United States Patent Application Publication US 2004/0123343 A1 - sequence listing, part 48

SEQ ID NO: 169090 - protein, 1476 aa, Oryza sativa
  Clone ID: PAT_MRT4530_67541C.1.pep
MGDDLKSTLETLAKTLASLQSSSEATTKAIEDNTQAIAALSVARTTEKASTESSGTPAPDRPPKHWRPEFPKYDGKTDPLAFINRCESFFIQQHVIPAERTWMASYNLQDGAQLWYMHVQDNEGTPTWERFKELLNLRYGPPLRSVPLFELSACRRTSTVEDYQDRFQALLPRAGRLEEAQQVQLFTGGLLPPLSLQVQQQKPASLEEAMSLARQFELMEPYLFPATTSARGVLPTPAPRPSTGPVVKPAPATVTVEGRPVKRLSQAQQEERRRLGLCYNCDEKYSRSHNKVCKRLFFVEGGAIEEGDDTVEDDTEEATVEAPVFSLHAVAGIPLGKPILLQVTLGAASLVALVDTGSTHNFIGEDAALRTGLPVQPRPRLTATVANGEKVSCPGVLRRAPITIQGMAFDVDLYVMPLAGYDMVLGTQWMAHLGTTIAWDVTTGTVSFQHQGRTVSWQSLPPHQRADVHAVSTGTSLVAATGSSSSTPAPTTEPALLDGLLGSFDDVFAEPRGLPPPRGRDHAIHLLPGAPPVAVRPYRYPVAHKDELERQCAVMMEQGLIRRSTSAFSSPVLLVKKADGSWRFCVDYRALNAITIKDAYPIPVVDELLDELHGAKFFTKLDLRSGYHQVRMRAEDVAKTAFRTHDGLYEFLVMPFGLCNAPATFQALMNDILRIYLRRFVLVFFDDILIYSNTWADHLRHIRAVLLLLRQHRLFVKRSKCAFGVSSISYLGHIIGATGVSMDPAKVQAVVDWPQPRSARTVRGFLGLAGYYRKFVHDYGTIAAPLTALTKKEGFRWSDEVATAFHALKHAVTTAPVLALPDFVKPFVVECDASTHGFGAVLLQDKHPLAFFSRPVAPRHRALAAYERELIGLVLAIRHWRPYLWGRAFVVRTDHYSLKYLLDQRLATIPQHHWVGKLLGFDFTVEYKSGASNVVADALSRRDTDEGAVLALSAPRFDYIERLRAAQTTEPALVAIRDAIQAGTRSAPWALRDGMVMFDSRLYIPPSSPLLHEILAAIHTDGHEGVQRTLHRLRRDFHSPAMRRVVQEFVRACDTCQRNKSEHLHPGGLLLPLPVPTTVWADIGLDFVEALPRVGGKTVILTVVDRFSKYCHFIPLAHPYTAESVAQAFYADIVRLHGIPQSMVSDRDPVFTSSFWRELMRLTGTKMHMTTAIHPQSDGQTEAANKVIVMYLRCFTGDRPRQWVRWLPWAEYIYNTAYQTSLRDTPFRVVYGRDPPIIRSYEPGETRVAAVARSMADRDEFLADVRYRLEQAQATHKKYYDKGHRAVSYEVGDLVLLRLRHRAPASLPQVSKGKLKPRYFGPYRVVEVINPVAVRLELPPRAKLHDVFHVGLLKKFVGAAPPSPPALPAVHHGAIDPEPERVTRSRLARGVRQVLVHWKGESAASATWEDLDTFKERYPAFQLEDELALEEGRDVMWGRTYARRHRARDVRRAGERAAARAQSTSREPQGQVNNSG

SEQ ID NO: 169091 - protein, 163 aa, Oryza sativa
  unsure (1)..(163): unsure at all Xaa locations
  Clone ID: PAT_MRT4530_67542C.1.pep
LNCLRDKSRVQQVHVMYFGYKYDPTPCNQRTIVQXTSVHCHPFXYFHCFDEFFCFRVXAASGTIFDEERVPLDXLRIVNIYSRSSTPNNLQVXICLCRSDASYIGMASDDTSSAILPIGYRSNQLACSEPEGNFFGPALXLSRSLRPVHNMYAMVKVILELKS

SEQ ID NO: 169092 - protein, 84 aa, Oryza sativa
  Clone ID: PAT_MRT4530_67543C.1.pep
MAAEVEAAALGEDGGEGGGGGGGGGARRCGRRWRRREAEASAGWRKRELGAAASGRLVEAGESALGIGWRLVAEAGPGIGVMLE

SEQ ID NO: 169093 - protein, 155 aa, Oryza sativa
  Clone ID: PAT_MRT4530_67544C.1.pep
QYGGGGRGHSCSTRPRPTLLPPLLRRVVGGPLICLYEFVFEVLKAYKSYIKHNIFMIRLLMKMSCSMREFKVLSDKNVLQLYYKLIEPHWVYFRKLTFFIHIVFLVYRTWGPRARGQIFAQIVGELICSPTVEMSVRLYSICLEHIFRSDMVVYI

SEQ ID NO: 169094 - protein, 95 aa, Oryza sativa
  Clone ID: PAT_MRT4530_67545C.1.pep
MEAESAAARQAKESLELAFQMSQILDTGLDRHTLSLLMALCDRGANPEALAALVRELSSAAPPTTAAAAPSPASNATAAPSAKAASLFPSGLRKP

SEQ ID NO: 169095 - protein, 85 aa, Oryza sativa
  Clone ID: PAT_MRT4530_67546C.1.pep
RSRGHRARRGGQPEREEDCHRGGVPRPHSFKDSARMHSRLRRACSSCAVLRRDRMTSSLCVLPWTHHELAPGEKRALAKKDPALA

SEQ ID NO: 169096 - protein, 112 aa, Oryza sativa
  unsure (1)..(112): unsure at all Xaa locations
  Clone ID: PAT_MRT4530_67547C.1.pep
PHYLGSRGTRASDHGSDRPXAGVSDHRTPSXEPQSSSRHRDPSAPRSAPPVPLVTVRRTSSPRAAEPPPSPSAAXRHRHRRRRPPHAGPATVEASRGRDSREQEWRLDCHWA

SEQ ID NO: 169097 - protein, 954 aa, Oryza sativa
  Clone ID: PAT_MRT4530_67548C.1.pep
MAAALEAFAAKLANVLVGMAKEEVETLLGVPGAIAKLETTLADLSSILADADRRRIHDPGVERWVRELKDAMYDADDILDLFRAMEGGEDPGSPPRAAPAPSACWSALCRRSPAATRKIGRKIQELNRRVEEIAKRSSRFGFVSQIVRRCHRRRYHRRWGIGKTTLARMVFNDAVLESHFDKKVWLSVNQEVNEVHLLHGVIAAFGGSYHGCAGDKALLEDTLKHAVRQKRFLLVMDDVWSDRVWSDLLRAPLGACAPGSRVLVTTRNDGVARGMRAQHLHRVEKLDLGDSWSLLKKQVVLNEGDESEIDGLEDIGLKIVERCDGLPLAIKVVGGLLLNKGKTRDAWVNVSNHFAWSMTRSNDDINKAVYLSYEELPPHLKQCFVFCSLFPKDELIIRGVIVRMWIAQGYGHDIMRSTLPEDLGVEYYNELVSRNLLEPYKRSYDLSASTMHDVIRSFAQQIVKDEGLLVNDRQDVHGIAGASKLRHLSVSKTAIERVAIQKQVSLRTLLLFGRCITELTYFRNNISCLRVLHLQGVDLVDLPDYICHLKHLRYLGLANTGISAIPRGIGNLKFLQFIDLMGCRNFHQLPDSILKLQNMRFLDFRGTRLTSIPPGMGKLENLVNMLGFPTYLDDRGHAWSSLEELRSLSNLKWLDLRGLELASSGSMAATAMLNSKKHLKILDLTFASRLTDNGMIEGTSNVIEEQERAEVVLSNLCPPPCVECLTVNGYFGYRLPRWMRTMSDFPSLRRLELKDYVCCKQLPVGLGQLPFLDYIWIDHAPSIVSIGHDLLFLSSSSADDQKVTTGTRITRKLQLHGLSRENFPSLVELTSADNPKLQRISNSPRLRHIVVIRCPGLKVVKDLQSLRSVIWKDLDADALPEYLRETELNKLDVYCSLRLLKLISLQDGSYEWEKIQHVQLLKAYGKRSTEDKVDRHIFYTKDPYSFEADMGEDL

SEQ ID NO: 169098 - protein, 53 aa, Oryza sativa
  Clone ID: PAT_MRT4530_67549C.1.pep
HTQTYSYCILDHTIESFMVHIGKTFFGLKIHGIHIYSATAPGKQDITIAFHFP

SEQ ID NO: 169099 - protein, 1596 aa, Oryza sativa
  unsure (1)..(1596): unsure at all Xaa locations
  Clone ID: PAT_MRT4530_6754C.1.pep
MARLNRVTKVLQMVLKEIKVITLKEYREFKVMVLREFKVKALIKMAIQHSCSSTTSKIRLWNQLSKQTPPRRQVLQPIQQTPFRQQVVLPIQQQGSMNASSWFATLGGQPMQHAANQAVPEHLVHHVQPDGTVIPQQPQGTPQQQPWADLIADVMKEQFGLRPKDAGNLYRQPYPEWFERVPLPNRFKVPDFSKFSGQDSTSTYEHVSRFLAQCGEASAVDALKVRLFRLSLSGSAFTWFSSLPYGSINSWADLEKHFHSYFYSGVHEMKLSDLTAIKQRHDEPMHEYIQRFREMRNKCYSLSLTDAQLADLAFQGMIAPIREKFSSEDFESLSHLTQKVTLYEQRFAEARNNSRKINHVCPYVCGSDDEDEIAAAKWVRSKNVIPCQWVKNSGKEERYDFDITKXLTKFLTCYSERSRFHFLPVTQFHRLKNXSKKRPMKVDGNPFPVNMVHTAGRTADGGRAIGFQGKYDKQQERHYEEDDDGFDPHWSCEFFIFCWNEGMRLPSIEDCPGCSDIAESSSQLFSRGSRLRQTRVPVHQRLGPVNQDRGQEDSENIKTQWCPSGIFTKNQKRRVQRLRNRERFLEVEQEINHRLMKTKPRQEWRVKNQVPVADEATADEARRLAKGKSVVTASVNMVFTLPAEFGIKQADIDEVEEESAKLILSPEQAVFEKLEGSENWHLKPLYINGYVNGKPMSKMMVDGGAAVNLMPYTTFRKLGRNAEDLIKTNMVLKDFGGNPSETKGVLNVELTVGKKTIPTTFFVIDGKGSYSLLLGRDWWQGDKIEIVPANRSVNVASADLALWEMDGLDCLSGKVWDGDFLKVSDSDIQQLKMENPNYYFEGVMEGSNVYTEDTVDDLDDKQGQGFMSADELEEIDIGPGDRPRPTFISKNLSSEFTTKLIELLKEFRDCFAWEYYEMPGLSRSIVEHRLPIKSGIRPHQQPPRRCKADMLELVKVEIKRLYDAGFIRPCRYAEWVSSIVLVIKKNGKILSFMDGNAGYNQIFMAEEDIHKTAFRCPGAIGLFEWVVMTFGLKSAGATYQRAMNYIYHDLIGWLVEVYIDDVVVKSKEIEDHIAYFRKVFERTRKYGLKMSPTKCAFGISAGQFLRFLVHERGIKKGIPFILYLSAGEKLIGSVLIQELEGKERVVFYLSRRLLDAKTRYSPLEKLCLCLYFSCTRLGHYLLSNECTVICKADVVKYMLSASILKGRIGKWIFSLTEFDLRYESPKAIKGQAIADFIVEHRDDSIGSVEIVPWTLFFDGSVYTHGCGIGLVIISPRGACFEFAYTIKPYETNNQAEYEAVLKGLQLLKEVEADTIEIMGDSLLEFRLVTLKHVSREQNIEANDLAQGASGYKSMIKDVKVEVAAITADDWRYDVHQYLQNPSQSASRKLRYKALKYTLLDDELYYRTIDGVLLKCLSADQAKVAIGEVHEGICGTHQSAHKMKWLLRRAGYFWPTMLEDCFRYYKGCQDCQKFRAIQRAPASSMNPIIKPWPFRGWGIDMIGMINPPSSKGHKFILVATDYFTKWVEAIPLKKVPPYKLVYGHEAVLPWETRIGSRRTELQKDLRVDEYYNLMADKREDLVQSRLRALAKVTRDKE

SEQ ID NO: 169100 - protein, 956 aa, Oryza sativa
  Clone ID: PAT_MRT4530_67550C.1.pep
MAGDQLLRRLLFLLWVVALAVPGLAARPANVSIGALFTFDSVIGRAAKVAIELAVADVNRDDGVLNGTYLSVVEQDTKCSGFIGIIQGLQVMEKKVVAVVGPQSSGIGHVVSHVADELRIPLVSFAATDPTLGSSQYPYFLRATHSDFFQMAAVADIISHYAWREATLIYVDNDYGRAALDALGDHLQSMRSKVSYRAPLPPAADRAAITDLLLRVSMMESRVIVVHANPDSGLDIFAAAQSLGMMSSGYVWIATEWLAALLDSDSSPPRKTTALALLQGVVTLRQYTPDSDAKRSLMSRFAARLQAHNTTGGINAYVLFAYDAVWMAARAVDQLLVDGSNVSFSDDARLRAENETGSALRLGALKVFDQGEQLLSKMKTLNFTGVTGQVRFGDDRNLADPAYEVLNVGGTGVRRVGYWSNRTRLSVTAPEQEQNGKKKKQQGEELYSVIWPGETASTPRGWVFPNNGKALRIGVPYRTTYKQFVSKDAGGPDGASGYCIDVFKAAVALLAYPVPVSYVVVGDGVKNPSYGELVQRVAEGELDAAVGDISIVTNRTRVVDFTQPYVESGLVIVTAVRERASSAWAFLKPFTREMWAVTGGFFLFVGAVVWVLEHRSNTDFRGSPRKQLVTVFWFSFSTMFFAHRENTVSTLGRLVLIIWLFVVLIINSSYTASLTSILTVQQLSTDIQGLDGLIASSDPIGFQVGSFAKSYLMQELGVPESRLRELAITDYSSSLQSGVVAAIVDELPYVELFLSINCQFRTVGQEFTKSGWGFAFQRDSPLAVDLSTAILTLSENGDLQRIHDKWLSPGQCASQGTDVGADRLNLSSFWGLFLICGVACFIALLIFFFRTLRQYFRYHGHADIDDDDDSENKATPFPVDGGERMSSRRPARLASIRDLMTFVDMKEAEVKRRKKMMNEDSSSCGRRLDMDSHSHRSMPTSANANAAPPSSSFSSV

SEQ ID NO: 169101 - protein, 127 aa, Oryza sativa
  unsure (1)..(127): unsure at all Xaa locations
  Clone ID: PAT_MRT4530_67551C.1.pep
SPPTKLNVHVKQPPWSLAAGRAAAWLERMPQPQLCALETSPSPPARGEHRSSRRPLMXDWGRGLMDWGRVEEMISLVFSRCCVAILSDPVVALCGGVRGXGRGGGQQAARGTASATPRPTEPSALVP

SEQ ID NO: 169102 - protein, 43 aa, Oryza sativa
  Clone ID: PAT_MRT4530_67552C.1.pep
MTDFLFNLLKTFPREHHSTGILDYTDEAYSSEKPSSDTYSCSG

SEQ ID NO: 169103 - protein, 64 aa, Oryza sativa
  Clone ID: PAT_MRT4530_67553C.1.pep
MHVVMKKSICQKVSIYIFEFVIYRCFWVPMVSGRFDQRGVGGLTGGRRAVRSAAIGLHHRLRSR

SEQ ID NO: 169104 - protein, 326 aa, Oryza sativa
  Clone ID: PAT_MRT4530_67554C.1.pep
MGAGWQWPAGGGGMEAAGRGLAAARSNHEQLKMTSNNSTNEELGGGGRKAADKPSGGGGAAAAVASSRHWSASTESRIVRVSRVFGGKDRHSKVRTVKGLRDRRVRLSVPTAIQLYDLQDRLGLSQPSKVVDWLINAAQAEIDKLPPLQFPPHDHDLVAAAASSMAPPPFANGGDGHHGASASSMLEDGDKAAGGGGMKAFMSLSNSLGLLNAATMPATLAAHHHHHHHAAAYYAAAESWGNGGNGGHHHDVSHGVSPSAHNSPFPSLLSLAPGSHHQFVFYSPEGGGFAVKEAAAEQFPVDSLDHSQGQLTLSSARSFLHSGSQG

SEQ ID NO: 169105 - protein, 43 aa, Oryza sativa
  Clone ID: PAT_MRT4530_67555C.1.pep
HRPKNSISITQMFTKDYHCSSKNAQDIMADQSLTCQELNCYCN

SEQ ID NO: 169106 - protein, 80 aa, Oryza sativa
  Clone ID: PAT_MRT4530_67556C.1.pep
DTGGQTGGITAIRQAGTWRSDQRRRQGAEATSERSDRAIYTGQTGGAGAVRPTDQPRDWQCCNTPDKCVYKGATSRPCIK

SEQ ID NO: 169107 - protein, 60 aa, Oryza sativa
  unsure (1)..(60): unsure at all Xaa locations
  Clone ID: PAT_MRT4530_67557C.1.pep
MHPGMVVLIVELLLGVVAVGLLVGXKYWRKKXRQQEQARFLKLFEDGDDIEDELGLENTL

SEQ ID NO: 169108 - protein, 124 aa, Oryza sativa
  unsure (1)..(124): unsure at all Xaa locations
  Clone ID: PAT_MRT4530_67558C.1.pep
LVRLHFGGCVVDESIGGSQFERMTXIRPLVFRAKPTFEELIFRMKDELDWSXESVGMQGRHDVGADPISHKYVLDLNGQVEWKTYVDIILGSQFKSLEVFAXKIDHSESKKEISDLNENPRIQS

SEQ ID NO: 169109 - protein, 213 aa, Oryza sativa
  unsure (1)..(213): unsure at all Xaa locations
  Clone ID: PAT_MRT4530_67559C.1.pep
GGGPRWTGSTDREGDGAPRGAHVAPTWRXTWRPRGSHAGGGSGRSDGGGGSRPAARARLKPARRHGARRRGSTQRRRXGGDRPTAEGGGVAATRTALAAAKQLGGGARLSGAGERGREEGPHRRRLTTASDGGRRRWQDELRDHLANTKKGVREREEDGRGRGSRPNAAAMAVLTGARCGMGSDGGIRRERGGRGGPLDGERGGVDGTARHGG

SEQ ID NO: 169110 - protein, 202 aa, Oryza sativa
  Clone ID: PAT_MRT4530_6755C.1.pep
MSWHRAGVLLLGAQSCLPVPGVPAVGGIGSVLLSMARMGWKLCHVFRLYTVVAEIKRLYDAGFIRPCRYAERVSSVVPVIKKNGKVNIDDVVVKSKEIEDHIADLRKVFERTRKYGLKMNPTKCAFGVSAGQFLGFLVHERGIEIPQRSINAIKKIKPPGNKTELQEMIGKINFVRRFISNLSGKLEPFTPLLRLRADQQFT

SEQ ID NO: 169111 - protein, 1076 aa, Oryza sativa
  Clone ID: PAT_MRT4530_67560C.1.pep
MEASGSEPGRPWTVSATWAPAGGAAVEDAVSFETSADDAEAVPSAVFLERPSPDGDGDAPPCEVTGALTVVNFSFAASSLAYGRINPSRLENIWLSFYYFRFDFSISGKRGKYEIHRVYVRSTARIYEIYYTTDPKDSSKDYLCTVRCGPAVKEPLPSAEESMPQWSSDASTSEKHEHETKSVSSSIDEDSWVDVKIPELHVEKNRSKSQEPNAIGVKQETTLAHYEATAEITDASPCVSLTVRLLSLQSKTSVHIEEIYIFADPVEPTNDESETRPGNMGGSSLLAMLVPSLMQMSKSRNQKTDNKYFSDASRTQLSQGCAMAVNNSPCENVVRDAEPYQPVTPLMDENPNPYSRIEGKLDTLLSKMEKMELYCSRFDDGMMRPICSIESRLQRLEQQFDVFSMEIKTLQASSARMTAPDGLSDMINPQDKTDNDGKAENSASTTNRQPGLVVRAPEFSLEESFSCDKSNENAVTLRGPSMVPRLLVKAPDFVSESEFACEKLHDGSFSPVDFALSSEKEPKTSPGLVVKVPEFPNDSDDELEEEKETEVGDHDDGHTKSDAALSESTVDSFKSKSHVSVDGALASALEALLGSTKKTPSSQSAACPASNSTAENTTDSSTCPFSSEQVDETSTNDGSAGQLSGTFVDANKVNTFISCEEADAVPQTYISKANLKAEVNDLNNVLDLNMMAFAESTEPLCVPQLHTVEESKDVGSQANLKNNGSSSYMMQSIANTEHIIAPSQLPTVLESINDGQQLNGNRSTLSLAEFLVARNANFSKNVISEALSSNGGAEMHTFKRTSMESAKNIKDINQLLLQKALEVNEDDSAKFSVSGGMNSCCLRAFTDSKKRCIESSGLEASLNDSFTKSEVEHSLSDLCSMESFSAEPAREAVGSGGVTAGNCVDDPFTGSSTVNPTAGEELQKVCDLLYEYNDDVLGMAFVAKKTSKSSPSLEVLLAESSDSEAEISDAKDTDNDAGLSSARLFSTFSSSDDEAPRTDEPIIDVVDLPTPLDAYASSKNELVDDESLLDMDDPPIPPESYASVLSDMHHACLNDQSKPSGTFAGEGNGEYPDSLI

SEQ ID NO: 169112 - protein, 66 aa, Oryza sativa
  Clone ID: PAT_MRT4530_67561C.1.pep
IGCPPGRAPACMVACCGWGSAEGGSAYARTWNAYDTRGPYPWATLSFCVREGAGKNTVACIVRGAG

SEQ ID NO: 169113 - protein, 79 aa, Oryza sativa
  unsure (1)..(79): unsure at all Xaa locations
  Clone ID: PAT_MRT4530_67562C.1.pep
ESRAGGAYREMRNMARNERESSSSSTPVRXGWEPTGDAPGWTQAPRYSIGVSSWASASEDRWRAPHDIQWGDDQPPRSS

SEQ ID NO: 169114 - protein, 99 aa, Oryza sativa
  Clone ID: PAT_MRT4530_67563C.1.pep
HKLMALSLSPRETNAQDGALSRLDLVRIDNCIILLLQLLGATNQIRRPHNLTQEQKQYSYYYILQISAPLEASKSLEFGSQEQLSAKLCISISLQPEGT

SEQ ID NO: 169115 - protein, 46 aa, Oryza sativa
  unsure (1)..(46): unsure at all Xaa locations
  Clone ID: PAT_MRT4530_67564C.1.pep
RGLSVSCDSFLVKVLPSVRQRGPKXCRRLNHHRPPPSTATVSSSSS

SEQ ID NO: 169116 - protein, 268 aa, Oryza sativa
  unsure (1)..(268): unsure at all Xaa locations
  Clone ID: PAT_MRT4530_67565C.1.pep
MRWRRRRWRGAGSDGWRCGGGGSRRIWHAAVGWRRRRRPAVERRLIRRLAVRWRRQPPDLAGGGEVAEEEGTGGGEAPDPRWGEAAVEAAAAGSGRRRWGGGGGGDRRGRGAGSAVGWRRRRRPXWRDAGSDSLRCGGGGSRRIWQATVGWRRRRGPTVERSRIHGGERPYWRWLPPDLAGGGGVAEEEATGGGEAPDPRWGEAAVEAATAGSGRRRWGGGGGVDRRSEGGWGRRRRPAEEEADAAAGPGARRVYREKSLTSHPVATH

SEQ ID NO: 169117 - protein, 125 aa, Oryza sativa
  unsure (1)..(125): unsure at all Xaa locations
  Clone ID: PAT_MRT4530_67566C.1.pep
MLYEGTFADFDKAKDELVNIAYMILEVSCECNCMNMLKPFCLGMPEHTTXKSVAAFYKSLXNLLELSILAVRHLSDGGXLEFKAFLLVPKRAPFDLFVTRKNXNNIKLYVLRLFLMINCEQLIPE

SEQ ID NO: 169118 - protein, 196 aa, Oryza sativa
  Clone ID: PAT_MRT4530_67567C.1.pep
MAAALAGGGDGGRRRRSGVEAAGSDGGGGVVEEEATGGGEALDPMVGGAVEAAAAGSSMRRWGGGGGGDRRWRGAGSDGWRCGGGGSRRIWQAAVGWRRRRGPAVERRPTMRWRRQPPDLAGGNGVAEEEGTGGGEAPDLRWGEAAVEAATAGSSRRRWGGGGGVDRRSEGGRGRRRRPVEEEADAAAEPGARRVY

SEQ ID NO: 169119 - protein, 80 aa, Oryza sativa
  Clone ID: PAT_MRT4530_67568C.1.pep
QSSMHDSPSPELRVSPGSDQGCVYSVLFSWFVSRMSKFAHLWLVRIVPLTDCPSITHGQYYVCDYVLTKPRRSNVVTVTF

SEQ ID NO: 169120 - protein, 349 aa, Oryza sativa
  Clone ID: PAT_MRT4530_67569C.1.pep
MAEKRLLLLPVALAMAQKHGGGGERVWARPWRWAKTAFFVVAMIASLLLVCAPPVLVVILDLALPPALLSARLRGGGGGDDASFVAAVVAQARAFDFRSSLVDLLAVSAARALLILGAYMACGGGGAAYLWVVATSAAGSVSYVLAKAAAAVLPRRGVAPAPEGKGPEPMLLLSVALAAAHLAVAYRTSCRERRRLLVYRIDVEANVKKLSQNLIQNTSLLPVISEGFDLELLIAGGSSSNLRGYTISLVDLWTITTCLVNWAQSLAKRKRVWQSGLGSMASETSDQSRACIDATRMTKLLPTADQARHDRGGGGGASPAGAHDIGAAGVVPGDDGVRWLSDAGVAPQA

SEQ ID NO: 169121 - protein, 598 aa, Oryza sativa
  Clone ID: PAT_MRT4530_6756C.1.pep
MTNFYTNFQVDEIGRVVSVGDGIARVYGLNEIQAGEMVEFASGVKGIALNLENENVGIVVFGSDTAIKEGDLVKRTGSIVDVPAGKAMLGRVVDALGVPIDGKGALSDHERRRVEVKAPGIIERKSVHEPMQTGLKAVDSLVPIGRGQRELIIGDRQTGKTAIAIDTILNQKQMNSRGTNESETLYCVYVAIGQKRSTVAQLVQILSEANALEYSILVAATASDPAPLQFLAPYSGCAMGEYFRDNGMHALIIYDDLSKQAVAYRQMSLLLRRPPGREAFPGDVFYLHSRLLERAAKRSDQTGAGSLTALPVIETQAGDVSAYIPTNVISITDGQICLETELFYRGIRPAINVGLSVSRVGSAAQLKAMKQVCGSSKLELAQYREVAAFAQFGSDLDAATQALLNRGARLTEVPKQPQYEPLPIEKQIVVIYAAVNGFCDRMPLDRISQYEKAILRSHAVWRRAPSGGSVESPKEELSKGKRKAPMEPLELQGPPTLRSLDDLILVPLSPEEGACSTQSEFKIKEDLIRLLYEGRRRADRYVIHETKIASTVDAFLSKKGLSGAPSAEGVVQLKKERYFLENPGRNGAPLYRELEELF

SEQ ID NO: 169122 - protein, 75 aa, Oryza sativa
  Clone ID: PAT_MRT4530_67570C.1.pep
RKSKPTQDQRSKANAEGKWFIFYQMSACMQISKKLIVQTANALTTQRYDFKISNHLMFPKLAENYLSHKLKPSYT

SEQ ID NO: 169123 - protein, 106 aa, Oryza sativa
  unsure (1)..(106): unsure at all Xaa locations
  Clone ID: PAT_MRT4530_67571C.1.pep
RDHQIGHYLGRQPHGDPATLCPRRRQRISQLSPAARRSDGGGVTAVIAIAAVGLGWITIEMAWKPCXDSSRSAMDRALDANYDTGESTGTGAAANEPLLAELSDAS

SEQ ID NO: 169124 - protein, 162 aa, Oryza sativa
  unsure (1)..(162): unsure at all Xaa locations
  Clone ID: PAT_MRT4530_67572C.1.pep
SNPSHGRRSYHAARAVTPPPXPSPPPPPPHSPPPXTPTPPPPASRTPARRPARRPAPTPPRTSPPAPRRGMAADAADSAAANIGAYIPEAGYNPGKLCDNAVVMDSCVEVLPRIPGALTAPDYRALAVILDAYAWKLVQGSRQIADSMRAAEKLGHTMDKCI

SEQ ID NO: 169125 - protein, 58 aa, Oryza sativa
  Clone ID: PAT_MRT4530_67573C.1.pep
FFFFFVFFFFFFFFGEDQSYFIHAMTMHPYGLSQTHEEFSWPKPKHTFLGVFKGGGQN

SEQ ID NO: 169126 - protein, 74 aa, Oryza sativa
  unsure (1)..(74): unsure at all Xaa locations
  Clone ID: PAT_MRT4530_67574C.1.pep
RITQSPRANCAACYGGRGNSEAPTAVRIEAWGARSSTSTLGLVLPGFTTNGPTSGPVDRXNVPMEGVKFQPAAF

SEQ ID NO: 169127 - protein, 1156 aa, Oryza sativa
  Clone ID: PAT_MRT4530_67575C.1.pep
MAAEAAAAKEEEPCCISHAFDRAARRNPTGLAVIHAASSSSSGSDSERHFTCADLLAAVSTLSRHIAAELSSSTSRHRDESPGCSGRPVEAAAAPRVVGVYASPSVEYIAAVLAVLRCGEAFLPLDPSWPEERIRWATSSSNAVLVVSSGGLGAAHVFASSSCSVIHMDDDLWQVFEDEKGGIGRDELAWPCKYKKPREFCYVMFTSGSTGKPKGVCGTEKGIEYLKLHGSKNICYQRNIKWLMFFYLLLCNFLFKAYGISRMNLVPSLMEIILPSLEKNLSWGHNPLKMLIFSGENLSILLWKRVHEILPETTIVNLYGTTEVSGDCTFFDCTDLPILLKREELTSVPIGFPISNCEVCIATDAEVADEGEMHVTGACLFAGYLEESMASNHTEDNGSSTYYRTGDFARRLKSGEFIFLGRKDRTVKIYGQRFSLQEVESTLNEHPDVSAAAVTFQNNEFLDFRAYLVLKSSAASVEDCQRRKRYKSFEVIMPSIRSWLIMKLPPAMIPRFFLPMESLPLTSSGKIDYMKLSSLKCALESCETETERITVNPHLQVIKKAFSDALLVDEVSEFDDFFTLGGNSISAAHVAHKLEIDMRMLYIYSTPSKLLDALFTKHGCLLSSSHEPHPKKGLDISSSIHSSFNPIATSVDDNFPEVKAHINGDGECAHDAISGNYANEVDGQLNRNVPLSNDRYQTKSLLLDTCSNDRNSVDVSPWILNFCLVKKWSIGRCNRFMHGYEDKLQIEDVCSYVPYNKRGYLQALWNIPLGSCVDASPLLVSNNGMLSIFIGSHSHRFLCIDGCSGSVRWSVKLEGRVECSAAITGDFSEVVVGCYKGKIYFLDLLTGKQAWTIQTDGEIVEVPPIKHQLERYIVAGVYLFLKKEHPKRMLSLFMSHNLRLRYLSSCRCGSYDHHLYALNYKDRCCTYKISCGGSIYGSPAIDMTHNMIYVASTSGLVTAISLEVSSFKIIWQYEAGAPIFGSLAIHHHGGKVICCLVNGLVIALNSHGSVVWKASVGGPIFAGACLSSGLPTQVLIPSRDGRLYSFDTTSGALLWKYEVGDPITASAFVDEVLTATSPGASERFACICTSSGQVHVIRIRADAKEEKVNGSICNDLVQGFAAIDLPGDIFSSPLMVGGRIFVGCRDDQLHCLTISS

SEQ ID NO: 169128 - protein, 206 aa, Oryza sativa
  Clone ID: PAT_MRT4530_67577C.1.pep
ALPSKPLPSAILILPGVNRAKSCRTVELRIDRGFPSHNSNHSPPSRPFSPTPPPRVAPGLAPSRRQLIPTAVKSILRRIISPNQSTASSFTSPHQAEHRHPRTALFFAAAKFFRPQFVVSTDLAAKPSTPQINSSAATRHRRRSLAPSPPRSQPLSPSNAALGERPEVEEEKRERERLTGLKDSFDTLDNINQSQDIEQGKLPYTY

SEQ ID NO: 169129 - protein, 791 aa, Oryza sativa
  Clone ID: PAT_MRT4530_67578C.1.pep
MVMRIEFLVVVTAVLFLLMSILDMFRHRSRHNLIKYFLLILDGISDSTLIYTIGLMQSVPSLKKDLFPVWALMLVNLRSSVCFISAYGIPDQQNRRFTEVARVMALIGVAFLNTTFNSRFKHPIWALWAMQVVRCGYLLRVYRLATRSYLHGWSSPLLTAYMGTPDGVAANGDTATMRGYKYLVSGDQKQTVEVKPPEYKFTLFVPEHRRKMLVTLDKVWQQDASDTSSTDILTPQMKDMCLSFALYRLLRCRFDDLSLPSDSVVNTRRLISKIIGKGNADFATQISNYSEKTFRIVRSELAFLNDYFYTRYPVLFWRGFPIFASCHPVLTIAFTVWLGKDLHKIYKPKQGGANVDIIITWGFMFIIVFKELWKMIIYLLSDWTKVMVLCEYTADSFKHAPRWLCKGFLWLLCTRRSKIVHHWHNKVNQYEFLQSFNYRPCKWNILYYGTLGLFARRRDGEKPGKSIELPEDVKSAILRSLCSQNLERDSLEPNFPILFSTFGLPCSHIILVWHIATTLCEIELSQRYNGCLTDSELQHAVKAGKNSQPYVVKEERLEGALQANYIVASCISRYCAYLLVSEPDLLPDTYLSSAEVFESTVKEASDVLKGSDNLQSIYRKLMYHGDVVNVDNMNRRHPSVILARSAQVAKSLVETEVMDRWEMLAGVWAEMLVHIAPSWNAAAHKKCLSTGGEFVTQIWAILSHCNIQESNLWPQQESPNDNEAEQQEESVSGNQASFSAQQRAAAGHGGVRDDEAGPSGTKPNDETKDDDEKKMSVNLSSRTPIKRDSVS

SEQ ID NO: 169130 - protein, 505 aa, Oryza sativa
  Clone ID: PAT_MRT4530_67579C.1.pep
MLLPPSPPPTAWAPNLWPWTAAHRCRTASLAHAPSHAASGVLRMTSDQQRCHISKAPDHIRSSNPEHYKPLAFPVGPYHARSGVPAPEKAQRLKEQCVDEVVQLSGRSRHDLLEQMRSVLDRAKEYYADEIGMDDEALAQMLLLDGCFVLVSLRGTERLKQLTPGWKAEESTESLLSENSDDRCSDCSDQQGDEENQIAAANNGGGGGDDSWHHFNVARDLFLAENQIPFFVVQKIYELLVKNRPYAERGVVGAVEAYVREVMAVYADGAGAQAQPPAADHVHHLLHLSHMYLRPRTRRQSSRWSGGGGATVGRLRRATQLRELMVRLKKLEIGGKAAPAGSILDVAFHGGVLEIPRLEIDGGTWRQMANLILLEQGSPHVGLYVTAYCAFMSQLAGTAEDVALLCESGVIEHQLGGDGDVADGLRRLCDGIIFDADDDAYNYLRPVYRAVEEHCRSRTLRLLCWVRGHANCPNPWLLLGIVAIITLLCFIVQQLQHATLRKNAT

SEQ ID NO: 169131 - protein, 1454 aa, Oryza sativa
  Clone ID: PAT_MRT4530_6757C.1.pep
MAEKQPPPPSSPGSVKEKMLKLGLTDVNEGNVVPIDPEKFTPEQKKEFEAMLQQARDQFLNSFMQTRKGTLVQKYKIKVVADDPGTSSSKDGDGKQAPDGSAQPSIKGATDGSLGNQGDNSQGVHGVQGDGVHGVQGDGAQGLQGGNLNQNSDVAQDFFNNFQDRVDYAVVQPIQQQVMQPVPQTPPRQQPLQPIQRTPLRQQIVQPIQHQGSVSTSAGFATPGGQPVQQFLNQVVPEHLVHHVQPDGTVMPQVVPEHLPPSPQAQYHPGGLAQPQFASQYGQFGPMQQQSQGAAQQRPWADVIADVMREQFGLKPKETGSLYRQPYPEWFEREFLFPIGSKFRTSLNFWDKMRFREMRNKCFSLSLTDAQLADLAFQGMIAPIREKFSSEDFDSLSHMIQKVTLHEHRSAEVRKSSKNVNHVCPYMYGSDDDDDDSEIAAAEWVRSKKVIPCQWVKSSGKEEKYDFDITKADKIFDLLLREKQIQLPAGHTIPSAEELGKKRYCKWHNSGSHSINDCKVFRQQIQVAIEGGKIRFDDSKKPMKVDGNPFPVNMVHTAGQTANRVRATGFQANSAMIIDKYQRKYDKQQEKHHEEYDDGFDTHWDCEFFRFCWNESMRLPSIENCPGCSDIIERSSRSYNRSNRLRQTRISVHQRFGPVNQDHGQEDNVIRKNQWCHSGIFMKNQKRRVQRLRNRERLQEVEQEINHRLKKAKPRQEWRVKNQVTLADDVAADEAKRLAKGKSVVMAPVNMVFTLPAEFGIDQADVDEVEEESAKLVLSPEQAVFEKPEGTENRHLKPLYINGYVNGKPMSKMMVDGGAAVNLMPYATFRKLGRNAEDLIKTNMVLKDFGGNPSETKGVLNVELTVGSKTIPTTFFVIDGKGSYSLLLGRDWIHASCCIPSTMHQCLIQWQGDKIEIVPADSQLKMENPSYYFEDIVEGSNVYTKDTVDDLDDKQGQGFMSADDLEEIDIGPDDRPRPTFISKNLSPEFRTKLIELLREFRDCFAWEYYEMPGLSRLIVEHRLPIKLGVRPRQQPPRRCKADMLEPVKAEIKRLYDAGFIRPCRYAEWVSSIVPVIKKNGKVRVCIDFRDLNKATTKDEYPMPIADQLVDATSGNKILSFMDGNAGYNQIFMAEEDIHKTAFRCPGAIGLFEWVVMTFGLKSAGATYQRAMNYIYHDLIGWLVEVYIDDVVVKSKEIEDHIADLRKVFKRTKKYGLKMNPTKCAFGVSAGQFLGFLVHERGIVTTGNNPTGVPYVRALFLVPGGKTEPQTKPYPLDMWKYGSSLQQRPEDRSLYGRARPHAAATRRARGRPSRRSRREAAPAPLWSPAVAIGTAERRPREGKGRGKRSGGPRLTLGRRRRRKRRPERRKAAARLGSTAFWRSASETEGWTRSARMRRSRRRRRQGGRWSGATTAADRSSTATAERESDGASSIPARRKGGERRKRTEEVRGGFK

SEQ ID NO: 169132 - protein, 290 aa, Oryza sativa
  Clone ID: PAT_MRT4530_67580C.1.pep
MARAKTVSKCITETAEGSHVFSITEYSQKRGMGVGKGVEVHASSDLRLLDHTTGLSTSVTKTLPKASAYLRDDRLDIECVVTVMKEPRVSQTKSSPKVAVPPSDIAAHLGKLLESKEAADVTFYVGEDTFAAHKVVLAMRSPVFKAELFGPMREAGAQVLPIKDIQPDVFKALLHFIYTDSLSIIDDLVGDDRGEMIRHLLVAADRYAMERLKLICESDLCENLNVQTVAATLALADQHHCASLRDACIEFMSSSSMDDIVATQGFVDLKTNCPSVLVDAFVNMSMLNKR

SEQ ID NO: 169133 - protein, 44 aa, Oryza sativa
  Clone ID: PAT_MRT4530_67581C.1.pep
PPTLTILFFWPLFYHKFYPITIFPPIQLSPNLRQVSIRLTKITN

SEQ ID NO: 169134 - protein, 62 aa, Oryza sativa
  Clone ID: PAT_MRT4530_67582C.1.pep
MSTGGGASGAAGGGAPGTGGAPIDNTNGGNSASQSSGETFTGGSRPCWIRMKRMKRWGGGKR

SEQ ID NO: 169135 - protein, 104 aa, Oryza sativa
  unsure (1)..(104): unsure at all Xaa locations
  Clone ID: PAT_MRT4530_67583C.1.pep
KGAPPLPQIPTHYLRINQHTSRLXRDDNMPASSIQKYIMQKLSLPSETEVEISCCGQPVNPIQPLRNLIERWLRFGPARTLQTVVGSSGGDYVMVISYGRPKAA

SEQ ID NO: 169136 - protein, 387 aa, Oryza sativa
  Clone ID: PAT_MRT4530_67584C.1.pep
MQTGPASPDGEGGGGGGGGGGRRGGGGGGWGRAAAAGAGAGAAEAEAEEAGGGGGGERGGDVCRKCIYKKINDEELEHCPVCKIDLGCAPLEKLRADHNIQDVRSKIFPLKRKKVNAEEVESPIAPPAKRKERSISSLVVNTPEITPKSLTGRRTRASTRKSAAALRDLGPIIPPVKKDSDNTNKNADNSSLLDSLSKVPQTRRQVLSNAETSSHPSSKDKGGDDKDLDKSELWRPLNCLVEAASKTKSYRSSSAARGNQPTESPSSANASRTKAREYLLKSKVQDEKKEVPVATVPFKRKGPGRGRKPAQPPAAAVSSHSASKHEKLLTPVWFSLIASFDQKGAPPLPQIPTHYLRIKDDNMPASSIPKYIMQKLSLPSETEVEIS

SEQ ID NO: 169137 - protein, 41 aa, Oryza sativa
  Clone ID: PAT_MRT4530_67585C.1.pep
ARFRIRFSLATPQLVPFFMHWILSGQFQTPHLSDMVEDLIS

SEQ ID NO: 169138 - protein, 41 aa, Oryza sativa
  Clone ID: PAT_MRT4530_67586C.1.pep
ICHRIDHLIDLNKYGSNGLHYQCLMVVPHMSYSFNRSSSSS

SEQ ID NO: 169139 - protein, 54 aa, Oryza sativa
  Clone ID: PAT_MRT4530_67587C.1.pep
CIALLLRAIYGARIDPTEQGYLARSLPHEVYHAGTRTEWAMRVPPTKTGTPGSS

SEQ ID NO: 169140 - protein, 62 aa, Oryza sativa
  unsure (1)..(62): unsure at all Xaa locations
  Clone ID: PAT_MRT4530_67588C.1.pep
AEHNDHLHTHPSATTLPQXAAMSMIDPDGIANXILSCYYSGTKDFIEQSQGLNILQHYVQPH

SEQ ID NO: 169141 - protein, 59 aa, Oryza sativa
  Clone ID: PAT_MRT4530_67589C.1.pep
DAVALASVYEQHIEMLPTIPFEATNIFIMMAHWHFNHSFPPNIGWNKTKRYLLVCWRGF

SEQ ID NO: 169142 - protein, 914 aa, Oryza sativa
  Clone ID: PAT_MRT4530_6758C.1.pep
MQQQSQGAAQQQPWADVIADVMREQFELKPKETGSLYQQPYPEWFERVPLPNRFKVPDFSKFSRQDGVSTFEHISRFLAQCGEASAVDALKGMIAPIREKFSSEDFDSLSHLKQMVTLHEHRSAEVRKSSKKDDSEIAAAEWVRSKKVIPCQWVKSPGKEEKYDFDITKADKIFDLLLREKQIQLPAGHTIPSAEELGKKRYCKWHNSGSHSTNDYKVFRQQNQVAIEGGKIRFDDSKKPMKVDAGQTADRVRAKGFQVNSAKIINKYQRKYDKQQEKHHEEYDDGFDPHWGWVRPHQQSPRRCKADMLEPVKAEIKRLYDAGFIRPCRYAEWVSSIVPVIKKDGNTGYNQIFMAEEDIHKTAFRYPGAISLFEWVVMSFGLKSAGATYQRAMNYIYHDLIGWLVEVYIDDVVVKSKEIGDHIADLRKVFERTRKYGLKMNPTKCAFGVSAGQFLGFLVHERGIEITQRSINAIKKIKSPENKTDLQEMIGKIIFVRRLRHYLLSNECTVICKADVVKYMLSAPILKGRVGKWIFSLTEFDLRYESPKAIKGQAIADFIMEHRDDSIGSVEIVPWTLFFDGSESMNARMIFSLTEFDLRYESPKAIKGQAIADFIVEHRDDSIGSVEIVPWTLFFDGSVYTHGCGIGLVIISPRGACFEFAYTIKPYATNNQAEYEAVLKGLQLLMEVEADAIEIMRDSLLVISQLAGEYECKNDTLMIYNKKCQELMKEFRLVTLKHASREQNIEANDLAQGASGYKPMIKDVKVEIAAITTDDWRYDVYQYLQNPSQSTSRKLRYKALKYTLLDDELYYRTIDGVLLKCLSTDQAKVAIGEVHEGICGTHQSAHKMKWLLRRAGYFWPTMLEDCFRYYKGCQECQKFGAIQRAPASAMNPIIKPWPFRGWAIDMIYDKPTVK

SEQ ID NO: 169143 - protein, 96 aa, Oryza sativa
  Clone ID: PAT_MRT4530_67590C.1.pep
MVQHTSRLDLFLVCTVVVVVVALHHATAVHGLTRAELVLAPAPAMAPAPAPPANNVVGVDAAKERDKTFVSRDDEKKKKKLMRILDKINRLCAPPV

SEQ ID NO: 169144 - protein, 199 aa, Oryza sativa
  Clone ID: PAT_MRT4530_67591C.1.pep
MGIFTRSWMKEHMCSIIINQGWAVAPLLCSSLACSEPSYRLPHCHRPTPPWLPATFVVVAANLLASSRKPIFGQIWRSNLRVGWIWWMGWQSGAIVGRGIAPKDEESGGDGGRQCRPSSRSRRDGVHVRARPQDIPKLNSISEENVVNKIVEIQIIQQETKDKLYLKHNSSGICNTKSAYKEVVKRENQNTNQMWTVGI

SEQ ID NO: 169145 - protein, 138 aa, Oryza sativa
  unsure (1)..(138): unsure at all Xaa locations
  Clone ID: PAT_MRT4530_67592C.1.pep
XXXXXLKDXXXXKGFYTKQFHLLLASRGVVHFSLSSFTHLLSNPSXFITPSYRDLLNYKCSQAANPDVVNNVRDEDSSVVSRIMPVFVSSIPKIIDFLDNTYYHNILAKIVTFHSNWQLLTNATSLFKVHEYSDNATL

SEQ ID NO: 169146 - protein, 400 aa, Oryza sativa
  Clone ID: PAT_MRT4530_67593C.1.pep
MSALLDLLMGVFRQPTLGGVALELASLAAPLWLAALVGLLIGWAWRPRWALVVVGEAPPPPRAAAEDSCRKNELVAAVPRTAMAAAAPEEDEGLAVDTGDLMHLRRLVEEKDGGPAWIHMMDKTLPTMRYQAWRRDPEGGPPQYRSSTIFEDASPEVVRDFFWDDEFRIKNTWDDMLLQHDTLEECTKTGTMVLRWVRKFPFFCSDREYIIGRRIWASGKTYYCVTKGVPRPSVPRCNKPRRVDVYYSSWCIRPVESRNGDGSMTACEVLLFHHEEMGIPREIAKLGVRQGMWGCVKRIEPGLRAYQIARTAGEPLSKCAAMAHVNTKVDPDELITAEDKTEASSTNNAEAEKPKHWTGNIPKVILVGGAVALACTFDHGLLTKALIFGTARRFAGPGRR

SEQ ID NO: 169147 - protein, 104 aa, Oryza sativa
  Clone ID: PAT_MRT4530_67594C.1.pep
YLLTTVHYYESDEQANSITESKGEIMDHRRSESGDERTRRGVVRMRVPCQRNGEKRKGKKIEFIFVAVQRGGGVWPGRICGEMEKEVEEEEEEEEAEASRKKGE

SEQ ID NO: 169148 - protein, 336 aa, Oryza sativa
  Clone ID: PAT_MRT4530_67595C.1.pep
MAGLLGFWTLHWSNGHEIVGADVSPSTWRHAIPALGSLLQPSDRRSTVRFSLSWLGVHSMLLMRYCTNVMDHNLRYYKNIMDHNLRTPLDSQAELQSLMNTLAGQQLQQNILDKRSTVTGSMDITTSTNYNLLTYHGILWQPASIIWNKATPNTCRIFLWLAFRDRLNTNANRVHKKWAIDPHCSSCPTIETANHIILHCKLADEVWKKLNLHMQAMSSANIQAFVELILDNMPEQQKLGWPACFAACAHGLWKARNQRAEVSEDKSKAYNVADLGEVALEFLYKEDRCNVTNVKEVVLSVIENTPVLHLIDPKRIKFLAENLAGKESEDELDEGT

SEQ ID NO: 169149 - protein, 141 aa, Oryza sativa
  Clone ID: PAT_MRT4530_67596C.1.pep
RKGPWAFTCSRIWRDRERGKREEKTRPRRRRQEDEGVGQARLPEAGGAARRRGRVPRGDDVRRAPVDQEQRAAADQGADGSPPGLHQLQEAKLVARNNHPWFPIIRSMRISLCVFVCNLNRIGDETKGGWVEEVGRARMCS

SEQ ID NO: 169150 - protein, 965 aa, Oryza sativa
  Clone ID: PAT_MRT4530_67597C.1.pep
MGAAEEEAAAAWDKAEAKEERIMVSVRLRPLNGREAGDSCDWECISPTTVMFRSTVPERAMFPTAYTYDRVFGPDSSTRQVYEEGAKEVALSVVSGINSSIFAYGQTSSGKTYTMTGITEYSVLDIYDYIEKHPEREFILRFSAIEIYNEAVRDLLSHDTTPLRLLDDPEKGTTVEKLTEETLRDKDHLRNLLAVCEAQRQIGETALNETSSRSHQILRLNFVDLAGSERASQTASAGVRLKEGSHINRSLLTLGKVVRQLSKGRNGHIPYRDSKLTRILQSSLGGNARTAIICTMSPARSHIEQSRNTLLFATCAKEVVTNAQVNVVMSDKALVKHLQRELERLQSEIKFPAPASCTTHAEALREKDAQIKKLEKQLKELMEERDTVKSQLDCLLKSDCDDHSDGRVAKRWDEHSRSSESFARNASEEAFSVSDTSGVPYQDQDNAVFNGSYVFSDDRDDIVFPVQTVDLPEETKHEKFMSPWHPPSHHSSSDCIESYHMTEAASRTASEVSEEHCREVQCIDIHEHRRSTSHKFDLLLPQDTEFQTPELEISKEAVPQPDEDQELESITNRMEDPTRMCPVEEEQQDEIVDTCESNGTTDNDVKLYTCDSNISFDIQKPYPNGCLTVKRCILSSKDRALSRSKSCRASFMIIPNSWFDDSEYTSQTPPNEILKHTPRRFDKVRRSLYPENDNPSSVDRSEFSGEVSSDEVVKDMSTIDEVAKDMCPSDAEQETLTSDISCLTKLKKTDSDHEDELDEYQDQQSIRDGSTTLRTVKDVGIDSSLSASPSRWPIDFEKMRQEIIQLWHECNAPIVHRTYFFLLFKGDPADNIYMEVEHRRLSFIRRSFSASPAGGELNSAVVSSLKNLRRERDMLYKQMLKKLTNGEKERVYARWGIDLSSKQRRLQLSRLVWTQTDMEHIRESASLVAKLIELLEPAQALKEMFGLNFTLAPRSERRSFGLLGT

SEQ ID NO: 169151 - protein, 46 aa, Oryza sativa
  Clone ID: PAT_MRT4530_67598C.1.pep
GQSALQQVLIGGMEYKGYFPSLQQNFSAHVCLEECIRLLSDFYHPY

SEQ ID NO: 169152 - protein, 235 aa, Oryza sativa
  Clone ID: PAT_MRT4530_67599C.1.pep
MESAAARKPARPKRRQAVEKARVERRPQNMARRKVVAEEKTFSELGMASANSPAAAAWVGTMMTVCGPKEALGLLAAKGVHMTRLGDGGEEDSLLLKPLMPSHQLNIIRVSQHALHAFFAGSYGKTLSIASGAGLPLIFQGDSECERLQRTDMAVTICRLPLRVVVLMVSAVMAGHTGWRELAAYLSLARLQLGWSLAWLGHAGKWLSGPDGRVSGEEFEDDNFSKVEFMDYFEF

SEQ ID NO: 169153 - protein, 385 aa, Oryza sativa
  unsure (1)..(385): unsure at all Xaa locations
  Clone ID: PAT_MRT4530_6759C.1.pep
MEAGGYYNCKKTDGICEDVCDSSAWFKRHFYYVCQGWKCALRGFDLRXFLILLIGLPTLIFDYILHSQKVTYFLRPIWEKPPKPFKVLPHYXNENVSMANLCKLTWREVSRXLFLIFSKLDILDIRWHELSPYVSEFVLLESNSTFTGLKKDLHFKENRQRFEFAESRLTYGMIGGRFVKGENPFVEESYQRVALDQLIKIAGITDDDLLIMSDVDEIPSGHTINLLRWCDDTPEVLHLQLRNYLYSFQFLLDDKSWRASIHRYRAGKTRYAHFRQTDDLLADSGWHCSFCFRHINDFVFKMQAYSHVDRIRFKYFLNPKRIQHVICQGADLFDMLPEEYTFQEIIAKLGPIPSTFSAVHLPAYLLEKMDQYRYLLPGNCMRESG

SEQ ID NO: 169154 - protein, 245 aa, Oryza sativa
  unsure (1)..(245): unsure at all Xaa locations
  Clone ID: PAT_MRT4530_675C.1.pep
WRPRRCQDLRAAPSPPPVSSPPAFPSCPAPRRRLSRPRPPGRSWPGFPPFPAVMDINQIRDILPHRFXLFPFLLVDRVIDYKPGEYAVGIKNVTINDNFFPGHFPERPIMPGVLMVEAMAQVGGLVMLQPEVGGSRENFFFAGIDKVRFRKPVIAGDTLIIRMTLIKLQKRFGIAKMEGKAYVGGDLFLRGCIGSIRGVRRHGGQGQMLHYLYWNWDPEELHDEQYQQRIAWIHWHTYRPSLCHS

SEQ ID NO: 169155 - protein, 73 aa, Oryza sativa
  Clone ID: PAT_MRT4530_67600C.1.pep
GLINIDIFAAQLSWLQGCITKGSEKRELSCHGRCVLQFRLIWIFVWLCLPCAETTVPASVMAALSIALSSPLT

SEQ ID NO: 169156 - protein, 154 aa, Oryza sativa
  Clone ID: PAT_MRT4530_67601C.1.pep
PLEEPDLVLERLDLASPISPTFLPGLGLPMDLTRWLQRPPVLPELPDEVAAVVTGSRPSSATGSRHADTQGWDADARPHLATSGRRPAASSRISARRHLAARPRKKGEREKGGRRRESTGGGGRRREAEEKRIRPMGVGSEQGGGYDGDFFNHL

SEQ ID NO: 169157 - protein, 77 aa, Oryza sativa
  unsure (1)..(77): unsure at all Xaa locations
  Clone ID: PAT_MRT4530_67602C.1.pep
RSFFFFCXSLAIAACSASXSFDAVTQVYRQYQLQPHXMLQQQMLSPCXEFVRQQCXXXXXPFFXXXXXXXTEEXXKL

SEQ ID NO: 169158 - protein, 53 aa, Oryza sativa
  Clone ID: PAT_MRT4530_67603C.1.pep
MRFVAVIAWFDASRVLKVWVHPFRRIRFFPNKGENGLDYIDPICSESVQNEDK

SEQ ID NO: 169159 - protein, 104 aa, Oryza sativa
  unsure (1)..(104): unsure at all Xaa locations
  Clone ID: PAT_MRT4530_67604C.1.pep
NDWKTEYLFTQSNVSCPSIPRHTTPELRHLAAIGLXRPATPTRRAFTPVVVLPAPSPLAPLAPPAVVPPPMSALVAASNPVAAPLLPPTPSPPLPLSKSFSSST

SEQ ID NO: 169160 - protein, 178 aa, Oryza sativa
  Clone ID: PAT_MRT4530_67605C.1.pep
MAPPAAAATSSSSSYTDTSGSSSDSSSSSGSDRRRRRARHRSGHRKDAAAAASSSSSALKARKDRSSSSSYDSEHEGKSRKHKKSRSSRKSRERERSKDRHSKRDKSKHKELYTEENSERTSGPVQLSKFLGRDKDEGVQRSAISGKKVRMVPGKSKEDKQAESKRNELLKFLNASYD

SEQ ID NO: 169161 - protein, 173 aa, Oryza sativa
  Clone ID: PAT_MRT4530_67606C.1.pep
MAPPPAAATSSSSSYTDTSGSSSDSSSSSGSDRRRRRARHRSGHRKDAAAAAASSSSALKARKDRSSSSSYDSEHEGKSCKHKKSRSSRRFFLHAHSKRDKSKHKELYTEENSERTSGPVQLSKFLGRDKDEGVQRSAISGKKIMMKLEKSKEDKQAESKRNELLKFLNASYD

SEQ ID NO: 169162 - protein, 493 aa, Oryza sativa
  Clone ID: PAT_MRT4530_67607C.1.pep
MGSGHRKLIHLLRAEQAAAAASAASASFSPKSFSSSSASDDDGCSSSSWQTNDGAGGYGSAASSPSRCSASTPPKSPWAAHLPGLGGGGVGTGAGATGLVASLVKEDGHVYSLAAAGDVLYTGTDSENVRVWRDRRELAGFRTGSGLVKAIVVADDGRIFTGHQDGKVRVWRADAGDPAVHRRVGSLPRLADYVRSSVNPSSYVETPRRRRGRRREVWLRHSDAVSCLSLDEGAGLLYSASWDGSFKVWRVSDSRCLESVCAHDDAINTVAAAGFDGVVFTGSADGTVKVWRREEEPAASGGEAKTRHVLETVLREDESAVTAIAVSAEGRVVYVGSSDGDVTYWHWIDGEARYGGALRAHGTAVMCLAVAGNVVVSGSADRTLCAWRRGGGEHSRLAVLAGHTGPVKCVAVDEEETSSCSSDGERRFVVYSGSLDGSVKVWRISDIEPTNPPPRLPSPHVWKREDQPAAATAAAARAWSPYQTSEMNSVAAA

SEQ ID NO: 169163 - protein, 109 aa, Oryza sativa
  Clone ID: PAT_MRT4530_67608C.1.pep
MDRVLRRQLLRALAKVTKDKERVARHYNKKVVPKDFSEGELVWKLILPVGTRDSKFGKWSPNWEGPFQIYKVVSKGAYMLQGLDGEVYGRALNVKYLKKKYYPSVWVNA

SEQ ID NO: 169164 - protein, 65 aa, Oryza sativa
  Clone ID: PAT_MRT4530_67609C.1.pep
SSWRPLRETRSVQHILRDHWWTERRCLTTTATSAARACRGSGCCAYRWVMPKDLDSTRLYESIGT

SEQ ID NO: 169165 - protein, 1680 aa, Oryza sativa
  Clone ID: PAT_MRT4530_6760C.1.pep
MAEKPPLSPSSASPSTVKEKIQKLGLTDVNEANVMPIDPEKFTPDQKKDFDAMMQQARDQFLNSFMQTRKGTLVQKYKVKVVADDPRTSSSRGQDGKQALDGSAQPSDKSATDGSLGNQGDNSQGVHGVQGDGVHGIQGQLVNPRLLIREQPQHTGQNVDRLTQDQVASIFLPPQNTVNPTQQQPIQQPPPRQQVVQPIQQTPPRQQVVQPVQQTPPIQRVVQPIQQTPLSWADLEKQFHSYFYSGIHEMKLSDLTSIKQKHDEPVYEYIQRFREMRNKCYSLSLIDAQLADLAFQEGSLHEQRYAEARKNSGKVNHVCPYIYGSDDEDDDSEIATIEWVRSKKVIPCQWVKSSGKEERYDFDITKTDKIFDLLLREKQIQLPAGHTIPPAEELGKKRYCKWHNSGSHTTNDCKVFRQQIQAAIEGGKISWPTADGGRARGFQVNSVKIIKKYLRKYDKQQDKYHEEDDDGFDPHWGCMRLPSIEDCPGCSDIAESSSRSYGRGNRLRQTRVPVHQRLGPVNQDHGQEDNEIRKNQWCPSGIFTKNQKRRVQRLRNRERFQEVEQEINHRLKRTKPRQEWRVKNQFPVADEAAADEVKRLAKGKSVVTASVNMVFTLPAEFGSKQADVDEVEEESAKLILLPERAVFEKPEGTENRHLKPLYINGYVNEKPMSKMMVDGGAAVNLMPYATFRMLGRNAEDLIKTNMVLKDFGGNPSETKGVLNVELTVGNKTIPTTFFVIDGKGSYSLLLGRDSIRANCCIPSTMHQCLIQWQGDKIEIVPADSQLKMVNPSYYFEGVVEGSDVYNKDTVDDLDDKQGQGFMSADDLEEIDIGPGDRPRPTFISKNLSAEFRTKLIELLKEFRDCFAWEYYEMPGLSRSIVEHRLPIKPGIRPHQQPPRRCKADMLEPVKAEIKRLYDAGVIHPCRYAEWVSSIVPVIKKNGKVRVCIDFRNLNKATPKDEYPMPVADQLVDAASGHKILSFMDGNAGYNQIFMAEEDIHMTAFMCPGAIGLFEWVVMTFGLKSAGATYQRAMNYIYHDLIGWLVEVYIDDVIVKSKEIEDHIADLRKVFKRPRKYGLKMNPTKCAFGVSAGQFLGFLVHERGIEVTQRSVNAIKKIQPPENKTELQEMIGKINFVRRFISNMSGRLEPFTPLLRLKADQQFTWGAEQQKALDNIKEYLSSPPVLIPPQKGIPLRLYLSAGEKSIGSVLIQELEGKERVVFYLSRRLLDAETRYPPVEKLCLCLYFSCTRLRHYLLSNECTVICKADVVKYMLSAPILKGRVGKWIFSLTEFDLRYESSKAIKGQAIADFIVEHRNDSIGSVEIVPWTLFFDGSVCTHGCGIGLVIISPRGACFEFVYTIKPYATNNQAEYEVVLKGLQLLKEIEADAIEIMGDSLLVISQLAGKYECKNDTLMVYNEKCQELLKEFRLVTLKHFVQEHIIYRFGIPQTITTDQGSIFVSDEFAQFVDSMGIKLLNSSPYYAQANGQVEASNKSLIKLIKRKISDYPRQWHTRLAEALWSYRMACHGSIQVPPYKLVYGHEAVLPREVRIGSRRTELQDDLTVDKYYNLMADEREDLVQSRLRALAKVTRDKERIARHYNKKVVPKNFSEGELVWKLILPIGTRDRKFGKWSPNWEGPFQIHKVVSKGAYMLQGLDGEVYGRALNGKYLKKYYPSVWVNA

SEQ ID NO: 169166 - protein, 60 aa, Oryza sativa
  Clone ID: PAT_MRT4530_67610C.1.pep
VALRLTDTDFTSTGRPVRARLHVMKYGPNDDGEERRFDVCGDATYTTYLRLQLRLRLTTT

SEQ ID NO: 169167 - protein, 44 aa, Oryza sativa
  Clone ID: PAT_MRT4530_67611C.1.pep
LHNMWSPYMIFFYHPHFTVIMAENLSIKHYVHSQLSLQFSLFCR

SEQ ID NO: 169168 - protein, 417 aa, Oryza sativa
  Clone ID: PAT_MRT4530_67612C.1.pep
MEISSSLNKRKLGEAQHDGDRVVIKKRQSVSMDMEVLHCPVCFQILRPPVFQCDLGHLVCSPCRDNLPAGGKCPSPSCFGTPSVRCVAMERVVNSVEVACAYAEHGCPDKIAYANITEHEKTCPHAPCFCPEPGCGFAAASAAALADHFTAPRHNWPSHKLSYSQPFELRVHPGKNVLVGEEDGALFLLNVSPAAEHAVVSLFSVQPHHGASGFGRSASHFGCSVEFSCFLGHLQCSTLVTVTSSSLSDGMPEECFFSVPELQDSVDGDAGVGVDIRITIDEAVPLFSCVDGMEDDDDEDCDDDVDANNGDDDENDGDTSDDEDEDDEDGTKLNFLVLSGTAWNPASDAQWNSFCFEGHCEASTLEAVKISSLSDGLPKDRFFSVPKQQDGDAGVVLGITIDDVEDVEDEDSDEECE

SEQ ID NO: 169169 - protein, 719 aa, Oryza sativa
  Clone ID: PAT_MRT4530_67613C.1.pep
MKKEFPGQAPTSRLHSEMDAAAAGGGGAAKRKRSFSEDDAYLILHRYQPATILTMLQEMGKQVGAGKGIDWRALVRRTSTGITSAREYQMLWRHLAYGHEFVESVEPASLPLDDGSDLECEIEIVPAPGNEALAEATSFAKTIITGSSREQTSGQRVNSEAAALNTPNEKIVRVPSDKQLVPGHRLTNGTGPVSSSKQPSHTGSSPDPLDPNGHPKKKKKPKPWSREEDMELGAGVQKHGEGNWMEILHKYKFDSSRTHLQLQQRWALICKRQGSTKPATPKIPNVMSEELKAAQKAFSLAIGTTRSSTLRPGGVPHHNPMVTTTNPEVKSVTAPSPLPVPVHVVPVPVPVQPVQVQLPPPQLHQAPAQSAPPPPKVSNASNKSRNNSKKQVAQSIPVNGPLSIQEAALAAGGRIAEPSVATNFLKAAQSTKAVHIRSRGTGSSKSSTGSKTPTVAGEPGTQLGSDQHLELQSTGGPSQVLTAHATEQVHNVSEVAGVNPLGQSAGVHLSETKKALNTTPVSGSSDKMEIDDNSNYFAVTMEDLFPEDVKQEDVQDPKIEEAIDPKDADMLEFDRFVAQGCLNKDNVDKSKAAKIAPEAQSVIGSQKKQLKTLPTVGKSNPVFAGPPATAKKTKAPVPQGGMSSGIVGVLNRSLGGKAPAPATTGTQSTVQKQQSMSSKGNLLVPKNVAPGTVTPANNRANTAVNGASKVNPPASQKPA

SEQ ID NO: 169170 - protein, 253 aa, Oryza sativa
  Clone ID: PAT_MRT4530_67614C.1.pep
MATSTILLFLLAVGGLAAAHGDTIRLPSEGDAPPQPAKPWDCCDDIEMSPLKIFPPLYRCNDEVKQCSAACKECVAAPAAGDSPCGGGAALVCRDWYSTEDPGKPCTPEREWPERTTKKRPWKCCDNIRRLPPRIHPPFWRCDDELKPGQCFAACKACREAPGPFPGPLICDDVYWGADPGPFCTPRPWGDCCDNTTCTKSIPPICRCDDKVKKCAAACKDCKRVKSSKPPRYVCQDQFTGQPGPKCKHSCEN

SEQ ID NO: 169171 - protein, 181 aa, Oryza sativa
  Clone ID: PAT_MRT4530_67615C.1.pep
MERRRRAVAPTAQSSWAGPTHRCPVPPPPYSSLGSFSAVSTRSGPPRIVAHLAVPYLHRKNTVGSLGGLLCAGHHRPSVQCTVSPIQHTGATSPQRQDEIVNNGLSVIRLGMLVHRDIGRTAVAGGHDCNNGSRVFLIWSDASFRNHTIEHSPSCRIRFYATFIRMSSFLISGKSTIISCA

SEQ ID NO: 169172 - protein, 146 aa, Oryza sativa
  unsure (1)..(146): unsure at all Xaa locations
  Clone ID: PAT_MRT4530_67616C.1.pep
XXXRSPGPDPFPTSHPPQNSHQWGLQIGANKQYLTFFYPPHTPQHYSSQHTKTTLFFSPPHPSPPANSRNTSKPPYPPGKAMKSEALQTIQHHTAGKNFNTTSHAEAHYQTRHDRHTIGTLNYESDAPTPGAPHPRDEKADPQRXX

SEQ ID NO: 169173 - protein, 73 aa, Oryza sativa
  unsure (1)..(73): unsure at all Xaa locations
  Clone ID: PAT_MRT4530_67617C.1.pep
AYLXFRLRLHLHLHWSNPSSTSASRTSVGPEXDRPPRHHQGEVSELPQLGMIWEMIARQGQRRNGREDEGSPA

SEQ ID NO: 169174 - protein, 113 aa, Oryza sativa
  Clone ID: PAT_MRT4530_67618C.1.pep
AMVASVRPKWLSRGNSLHAAPPHKLYDNHHCFQVHLRRRSTRPHYQGSLHVTACSTQSELHQLTVSATTGGRLHSWQRRLKQAIEANSSLHAAEAALTLLALRTDNPATVDIS

SEQ ID NO: 169175 - protein, 63 aa, Oryza sativa
  Clone ID: PAT_MRT4530_67619C.1.pep
QKLPTLAPTFFWSNVYFFWKEGAPPQFLFFGDGISRIPLSGVGSLQFNPMRLLSVGVKRKKLF

SEQ ID NO: 169176 - protein, 463 aa, Oryza sativa
  unsure (1)..(463): unsure at all Xaa locations
  Clone ID: PAT_MRT4530_6761C.1.pep
MEAGGYYNCKKTDGICEDVCDSEHGSKAVFSMSRLKCALRGFDLRALLILLIGLPILIFVIYLHGQKVTYFLRPIWEKPPKPFKVLPHYYNENVSMANLCKLHGXWKVRETPRRVFDAVLFSNELDILDIRWHELSPYVSEFVLLESNSTFTGLKKDLHFKENRQRFEFAESRLTYGMIGGRFVKGENPFVEESYQRVALDQLIKIAGITDDDLLIMSDVDEIPSGHTINLLRWCDDIPEVLHLQLRNYLYSFEFFLDDKSWRASIHRYRAGKTRYAHFRQTDDLLADSGWHCSFCFRYISDFVFKMQAYSHVDRIRFKYFLNPKRIQHVICRGADLFDMLPEEYTFQEIIAKLGPIPSTFSAVHLPAYLLEKTSYPALILRAIIILLSFDIFAVHYRKHMYNAVGVWSQLTVCKQPEQTTRVVAVIVRVRLFVPLSDMLRRHFVGRSGLEQAVLVGRPLQPD

SEQ ID NO: 169177 - protein, 87 aa, Oryza sativa
  unsure (1)..(87): unsure at all Xaa locations
  Clone ID: PAT_MRT4530_67620C.1.pep
DLLVEVTFSITTSLFDMLAALSCASPLSHTNVLYLQAQNAISISCVIQMKNRVQVSWHGNWYFWMLESIVYWNKYXLRCRRCISNEF

SEQ ID NO: 169178 - protein, 1248 aa, Oryza sativa
  Clone ID: PAT_MRT4530_67621C.1.pep
MNGGGASGGDGYDSDGYSFAPPTPTTLSMSIPPELAGAIPLIDRFQVEGFLKAMQKQIHSAGKRGFFSKKSVGPHVREKFTLEDMLCFQKDPIPTSLLKISSDLVSRSIKLFHVILKYMGIDSPAIISLDERIELVAKLYKHTLKRSELRDELFAQISKQTRNNPDRAWLIRAWELMYLCASSMPPSKDIGAYLSEYVHYIAHGATTDSDVRVLALNTLNALKRSVKAGPRVTIPAREEIEALLSSRKLTTIVFFLDETFEEITYDMATTVADAVEELAGIIKLSVYSSFSLFECRKVVNGSKSSDVGNEEYIGLDDNKYIGDLLSEFKAAKDRNKGEILHCKLVFKKRLFRESDEAITDPMFVQLSYVQLQHDYILGNYPVGRDDAAQLSALQILVEIGFVDNPESCVEWISLLERFLPRQVAITRAKRDWELDIVSRYQLMEHLSKDDARQQFLRILRTLPYGNSVFFSVRKIDDPIGLLPGRIILGINKRGVHFFRPVPKEYLHSAELRDIMQFGSSNTAVFFKMRVAGVLHIFQFETKQGEEICVALQTHINDVMLRRYSKARSATSAVSQNDVSQTYKPPNIEIYEKRVQELSKAVEESERKADLLNEELQKKTKQERDMQKELEGLRDTLQSERQSIKEVTNDLDKLKSLCDEKDSSLQASLMEKTRLETRLKSGQGQESSNRTGVSGNHFERDTLPTVGTVNNSIEMLAKLEEELKSCKKELDASKELSKKLTMENNLLDQKVQRLERAKSEEKSNMERVYEDECCKLKSRIAELEQKLESRTRSLNVTESTLALRNAEVDTLQNSLKELDELREFKADVDRKNQQTAEILKRQGAQLIELENLYKQEQVLRKRYYNTIEDMKGKIRVFCRLRPLNDKELIEKDKNIVCSPDEFTVAHPWKDDKSKQHIYDRVFDANTTQEEVFEDTKYLVQSAVDGYNVCIFAYGQTGSGKTFTIYGSENNPGLTPRATSELFRVIKRDGHKYSFSLKAYMVELYQDNLVDLLLAKNATHQKLEIKKDSKGVVTVENVTVVNISSFEELRAIILRGSERRHTAGTNMNVESSRSHLILSIIIESTNLQTQSYARGKLSFVDLAGSERVKKSGSAGKQLKEAQSINKSLSALADVIGALSSDGQHIPYRNHKLTMLMSDSLGGNAKTLMFVNVSPAESNLEETYNSLMYASRVRCIVNDTSKHVAPKEIMRLKKLIAYWKEQAGKRSEDDDLEEIQEERTPKEKADNRLTS

SEQ ID NO: 169179 - protein, 107 aa, Oryza sativa
  Clone ID: PAT_MRT4530_67622C.1.pep
GGSDVLLTPTAFRPTIQSIGGGMIQGLSYDPYYILSNNTLNACGSTSKWMSTPPMKIWIIGKGAASDPEGDAVRMPRRRAQAHHGESQEHLQQALAVAECARTVTPP

SEQ ID NO: 169180 - protein, 39 aa, Oryza sativa
  Clone ID: PAT_MRT4530_67623C.1.pep
FAEVTEMSTRLTSDTRIYADKAKDLNRQVIHLHNDMHNF

SEQ ID NO: 169181 - protein, 163 aa, Oryza sativa
  unsure (1)..(163): unsure at all Xaa locations
  Clone ID: PAT_MRT4530_67624C.1.pep
TRSIGVMVMTHGDDKGLVLPPRVAPLQVIVIPVPYKDVDTTAIVNECKKTVETLEKAGIRADLDTRENYSPGWKYSHWEMKGVPLRIEIGPKDMANNQARVVRRDNGAKADIPTADLVEKVNGLLDEVQKNLFETAKQKRDACLKSVXTWDEFIVALNDKKLI

SEQ ID NO: 169182 - protein, 59 aa, Oryza sativa
  Clone ID: PAT_MRT4530_67625C.1.pep
LAHILLVQSSSAIHRRATLENKLLEITQIELPLEELYWLCNFTQPTISCLAKFSSTIPC

SEQ ID NO: 169183 - protein, 539 aa, Oryza sativa
  unsure (1)..(539): unsure at all Xaa locations
  Clone ID: PAT_MRT4530_67626C.1.pep
MSSGKGGGGGGKGGGGKKKEVKKETKLGMAYKKDDNFGEWYSEVVVNSEMIEYYDISGCYILRPWAMEIWELLKEFFDAEIKKLKLKPYYFPLFVTENVLQKEKDHIEGFAPEVAWVTKSGKSDLEAPIAIRPTSETVMYPYFSKWIRSHRDLPLRCNQWCNVVRWEFSNPTPFIRSREFLWQEGHTAFATKEEADEEVLQILELYRRIYEEFLAVPVSKGRKSEMEKFAGGLYTTSVEAFIPNTGXRGVQGATSHCLGQNFAKMFDITFENDKGSRSMVWQNSWAYTTRSIGVMVMTHGDDKGLVLPPRVAPLQVIVIPVPYKDVDTTAIVNECKKTVETLEKAGIRADLDTRENYSPGWKYSHWEMKGVPLRIEIGPKDMANNQGTFVIMHFPENCYIFTVREKELVVVVVMARVVRRDNGAKADIPTADLVEKVNGLLDEVQKNLFETAKQKRDACLKVVNTWDEFIVALNDKKLILAPWCDEEEVEKDVKARTKGDLGAAKTLCTPFEQPDLPEGTTCFASGKPAKKWSFWGRSY

SEQ ID NO: 169184 - protein, 40 aa, Oryza sativa
  Clone ID: PAT_MRT4530_67627C.1.pep
KVFVTLNKSLFQPLICGKYLLGWFFNFLRPYLERDNFFWP

SEQ ID NO: 169185 - protein, 248 aa, Oryza sativa
  Clone ID: PAT_MRT4530_67629C.1.pep
MGRGRVHPRRIENKINRQVTFAKRRNGLLKKAYELSVLCDAEVALIIFSNRGKLYEFCSGQSMTRTLERYQKFSYGGPDTAIQNKENELVQSSRNEYLKLKARVENLQRTQRNLLGEDLGTLGIKELEQLEKQLDSSLRHIRSTRTQHMLDQLTDLQRREQMLCEANKCLRRKLEESNQLHGQVWEHGATLLGYERQSPHAVQQVPPHGGNGFFHSLEAAAEPTLQIGFTPEQMNNSCVTAFMPTWLP

SEQ ID NO: 169186 - protein, 792 aa, Oryza sativa
  unsure (1)..(792): unsure at all Xaa locations
  Clone ID: PAT_MRT4530_6762C.1.pep
PKDEYPMPVADQLVDAASGNKILSFMDGNAGYNHIFMAEEDIHKTAFRCSGAIGLFEXVVMTFGLKSAGATYQRVMNYIYHDLIGWLVEVYIDDVVVKSKEVEYHIADLRKVFERTRKYGLKMNPTKCAFGVSAGQFLGFLVHERGIEVTQRSVNVIKKIQPPENKTELQEMIGKINFVRRFISNLSGRLRHYLLSNECTVICKADVVRYMLSAPILKGRVGKWIFSLTEFDLRYESPKAIKGQAIAICFDXRGACFEFAYTIKPYATNNQAEYEAVLKGLQLLKEVEANTIEIMGDSFLVINQLAGEYKCKNDTLMVYNEKCLGLMKEFRLVTLKHVSREQNLEANDLAXGASGYKPMIKDVKVEIAAMSADDWRYDVHQYLSNPSQSASRKLRYKALKYTLLDDELYYRTIDGVLLKCLSADQAKVAIGEVHEGICGTHQSAHKMKWLLQRTGYFWPTMLEDCFRYYKGCQYCQXFGAIQRAPASAMNPIIKPWLFRGWGIDMIGMINPPSSKGHKFILVATDYFTKWVEAIPLKKVDSRDAIQFVQEHIIYRFGLPQTITMDQGSIFVSDEFVQFADSVGIKLLNSSPYYAQANGQAEASNKSLIKLIKRKISDYPRQWHTQLAEALWSYRMACHXSIQVPAYKLVYGHEAVLLWEVRIGSQXTELQNDLTADEYYNLMADEREDLVQSRLRALAKVTKDKERVARHYNKKVVPKDFSEGELVWKLILPIGTRDSKFGKWSPNXEKDRXIYKVVSKGAYMLQGLDGEVYGRALNGKYLKKYYPSVWVNA

SEQ ID NO: 169187 - protein, 103 aa, Oryza sativa
  unsure (1)..(103): unsure at all Xaa locations
  Clone ID: PAT_MRT4530_67630C.1.pep
RSTIHKQNDFKQPGERYRSWSPDRQERFILSFVGELVHPKVFPELRAIWVNFLXSCDESLGVKLFYLFPFFFLIHSHIIILISFYFFFLFSFFFFFFSLFFFL

SEQ ID NO: 169188 - protein, 345 aa, Oryza sativa
  unsure (1)..(345): unsure at all Xaa locations
  Clone ID: PAT_MRT4530_67631C.1.pep
WILVNSSHQALGTMNSENKSNLGNQKSAPLSPLLFTSIVNLLLETTLSSTKFSGVDFLPGGPLMDLEYADVMVLFGEDTDKMHRHLIALGNNTRMFGMCFSPSKYNLLLQDWPASTPELRIASDVVERINNFTYLGSLISPNGLVSDEISARIQKVXILANLHHLWRRRDICLSIKGRVYCAAVRSVLLYGCETXSLRVEDTRKLLVFDHKCLRNIARVCWDHRVSNSEFRHRLLGNDDKSVNEVMXHQLRWLGHVLRMXEHRLSXRATLTTIGDGWKRVGGGXTKTWHQCLKSLNSSLIHVVRCGLLGWGPRDYRNQWLETLCDMAQNRSQWCRCIHSLSSLKP

SEQ ID NO: 169189 - protein, 216 aa, Oryza sativa
  Clone ID: PAT_MRT4530_67632C.1.pep
TGETNLLLVILHTDFSVASEKRKKERENAKRGAKKKRNERNRGRGSVLPSSPSTPLCPQPHVRPSARRSPLLRPSSGASLRPLLLRPSSHAPLRPLLAARRSSAPSDLADRGRRRWPAIEDGGTVGRGGGTRQHGGSAVLVAAPSAELVAVKLFASSSLAGSGSAHAISEDVWAQRWPEIEGGMVGRGGGCSSKSDSSGAIPSVELVVALSFVGRK

SEQ ID NO: 169190 - protein, 65 aa, Oryza sativa
  Clone ID: PAT_MRT4530_67633C.1.pep
IMTCFTNLLCYISKSMNSKSFHKTSNHPWVLFFFLTFSPQRIKLTENAVNVCINKNLLMALSHKN

SEQ ID NO: 169191 - protein, 117 aa, Oryza sativa
  Clone ID: PAT_MRT4530_67634C.1.pep
GFLGPPPPPCRRTRRSRSRRSWRRRCARTAPSRTGSACAPTTPSGTTRSAGTGAAPSSGSELGEERRTRRRTPLPWEEEEEGEARAYGLRRVRFEVLPVLKRLSVAVCILEHHNFAD

SEQ ID NO: 169192 - protein, 65 aa, Oryza sativa
  Clone ID: PAT_MRT4530_67635C.1.pep
MAWLDSDGNGDARARVRSGSGGGGRATVPDQQPRPDSRRGAMSTSKYPIFDSVFPQKSRRSVFYS

SEQ ID NO: 169193 - protein, 285 aa, Oryza sativa
  Clone ID: PAT_MRT4530_67636C.1.pep
MEVILVSLVDALHGAEVVLESSLPNVEAFDTTALVEEGSSSTSPSFLLVLEFSIPRSSVSGENDDEEEEQAPPPPHRGLHPPSSGTPTVVVSHNGNIEAGDHRPPVPCGLQEHQRQQEEEGEERSKDNECSGQRAAGGKGRAAALLSLQISTPLDPAPPSPSRKHFCMEENQPPCRPPLLPTHLPPPPSSPRGGYTEAVTRFDDDAAHDGPPPTPPILLGQLCEPRHEHIPGCVTALKARWLTGRGAEASGKRAMTDGKELGDGSDVTESITTGLPSSRRREAKH

SEQ ID NO: 169194 - protein, 38 aa, Oryza sativa
  Clone ID: PAT_MRT4530_67637C.1.pep
PSSKLQCVHPQMVQLVSQNLIGHLRTRSTVCFGCYNVF

SEQ ID NO: 169195 - protein, 137 aa, Oryza sativa
  Clone ID: PAT_MRT4530_67638C.1.pep
SILLAGILCIYINYDCDRQRQEFRRTNGKCSIWGKAPSKIVASYQTTNGETKSSLLLTSGWWGLSRHFHYVPEILSAFFWTVPALFDHFLPYFYVIFLTILLFDRAKRDDDRCSSKYGKYWKMYCNKVPCRVIPGIY

SEQ ID NO: 169196 - protein, 611 aa, Oryza sativa
  Clone ID: PAT_MRT4530_67639C.1.pep
MAVAAALLRRRALYSALASPSWLHDTSSCYICSISGTHSLVNHPNLRLQRGYHNSGKFDLTDLTHPHIWYPNAREKKRNVFLHVGPTNSGKTHNALKRLEASSSELLMNSVGVYCGPLRLLAREVAQRLNKANVPCNLITGQEREEIEGAKHSSVTVEMADMTTEYQCAVIDEIQMVGCRSRGFSFTRALLGLCSDELHVCGDPAVVPLIQRILEPTGDVVTIIFQVNSRNCFFSIEFVELSNVYFGVSTDTRIMSSNIPICWLYVSMQVQYYERLSPLVPLKTTLGSFSNIKAGDCVVTFSRRSIYMLKRRIEMGGKHLCSVVYGSLPPETRTKQATMFNDQDSNLNVLVASDAIGMGLNLNISRIIFSTLEKFDGICNRELTVAEIKQIAGRAGRYGSKFPVGEVTCLNSDHLPLLHSALKSPSPIIERAGLFPTFDVLSLYSRLHGTDFFQPILERFLDKAKLSPDYFIADCEDMLCCGQAKLGSTLVQPRSNAELVQEEAMRNKKPSQLACMQYRNKETISLIFFEMQFAENYAKKGIVRLKEIFTPGTLQVPKSHNQLKELESIHKVLELYVWLSFRLEDSYPDRELAASQKSICSMSYCWQYQVD

SEQ ID NO: 169197 - protein, 605 aa, Oryza sativa
  Clone ID: PAT_MRT4530_6763C.1.pep
MAPPRANSGDGNDGAVGGQSKLSPSGLLIREIPGGYGVPFLSPLRDRLDYYYFQGADEFFRSRVARHGGATVLRVNMPPGPFLAGDPRVVALLDARSFRVLLDDSMVDKADTLDGTFMPSLALFGGHRPLAFLDAADPRHAKIKRVVMSLAAARMHHVAPAFRAAFAAMFDEVDAGLVAGGPVEFNKLNMRYMLDFTCAALFGGAPPSKAMGDAAVTKAVKWLIFQLHPLASKVVKPWPLEDLLLHTFRLPPFLVRREYGEITAYFAAAAAAILDDAEKNHPGIPRDELLHNLVFVAVFNAYGGFKIFLPHIVKWLARAGPELHAKLASEVRAAAPAGGGEITISAVEKEMPLVKSVVWEALRMNPPVEFQYGRARRDMVVESHDAAYEVRKGELLFGYQPLATRDEKVFDRAGEFVPDRFVSGAGSAARPLLEHVVWSNGPETGTPSEGNKQCPGKDMVVAVGRLMVAGLFRRYDTFAADVEELPLEPVVTFTSLTRAADGDGAARRGVPVEADEERRRGRPQPPPTPPVSGLASTPPSRGLDARRWPRLRARRHQPPPTSRATPSRLRLRHQLPRRAPPLPAARSASTSAAQGAPPAAHSASD

SEQ ID NO: 169198 - protein, 190 aa, Oryza sativa
  Clone ID: PAT_MRT4530_67640C.1.pep
STRLLPGQRTARVGGGAGELRQRRRPWAAPAPDRSAAGRVKASSAAAPWKTPSTPPSVPPPPTTRTPSARTGTTSPSASGRARRPPAAAPQAAYAVSPLPHLSPLTPRRAAPSSPASGHRGEGRRTARRAAREMAAAAPHRHEASSRRRNPPPPAPRNAPPPPTGRAPSRWPSLPPTPRRGGEEAEGSAV

SEQ ID NO: 169199 - protein, 404 aa, Oryza sativa
  Clone ID: PAT_MRT4530_67641C.1.pep
MRDPTKLPAPSLPPSSSSPRISPHSTPVSLTSATPSGVHRPPGCGRLDTVGEGSELLDPIPEVAPVEGFGSVAAFVAATEHFMVFIQETRAKAEEACRLAVLMQKAAAAAAGGGSDVAVALEICKKAAAATAAVGGGSSDAAATSEVCKVTNVMHKEVAAPTDLIQEGAAEEEAYQPQPPILIPALIARDFGGNMRGLTQSTMLANDSDHMTLFEKKASVGQIGIEEMRGKAKDVSSEEGSSEEMEASDDDVSMVIGGDAQDPYDDSGIEELVQDQGALEKLHTKPTKLANPNSLLRIPKGITESPSPPISHGAVGASRLAESPLSTFGNGMVFRHGEVGCAVRALGTSSWEELAGCSDGRAATHRWGTSSLAGTTTAVRQGPCRSRGQQLRKLQRCLQQACNL

SEQ ID NO: 169200 - protein, 258 aa, Oryza sativa
  Clone ID: PAT_MRT4530_67642C.1.pep
MGASNKLQFTPRSSLFQGNEINFSKLYLHHTPAGPRRDQSGLTGNNRETGLGPLVVNNWPVYDGIGRDAKVVARAQGLHIYAGNWHNSFSLVFEDERFKGSTLEVMGIVVERGEWAIVGGTGQFAMANGVIFKKFHEQKQEGNIMELTIQGFCPVLKGSQLTLRDYIVNIMVLDINVLCPLMKHLIFDSISFIYLDQAGQKHRAGPWGGPGGDPYMIEFGSSELLKEVSGTYGLYEGWKVIRSIKFVTNKKPYGPFGR

SEQ ID NO: 169201 - protein, 107 aa, Oryza sativa
  unsure (1)..(107): unsure at all Xaa locations
  Clone ID: PAT_MRT4530_67643C.1.pep
LGRPQPCCRRRTPSLPRRNRGLPRLSPLLPHSTATPTEDRAVVAPGRSHRHPPPHSTAAPXRSRGCPQPPLPSIAVPAGAEVVPSRHYRRERMRLREAAPVIGHGRH

SEQ ID NO: 169202 - protein, 77 aa, Oryza sativa
  Clone ID: PAT_MRT4530_67644C.1.pep
TRLNHLSTMHKYITSLKRRKQLLQRPKIGYVTEPFQTQYCNADGLSNGHIFPILPCKWVDQRSKLVHAFMDYYFPAE

SEQ ID NO: 169203 - protein, 109 aa, Oryza sativa
  unsure (1)..(109): unsure at all Xaa locations
  Clone ID: PAT_MRT4530_67645C.1.pep
XMADCSPCXIPXQGVRSCLHVILVXXXWXRTLXTPGDPXXLXXSAXXRNXXFCXXLVRXXIQAXGXXXKNXXLXEXAXXXQFXTIXDTEAXSXXXGAXKXEXTTXVVXP

SEQ ID NO: 169204 - protein, 49 aa, Oryza sativa
  Clone ID: PAT_MRT4530_67646C.1.pep
MTRNELHVPVGGEREAFAGNASNSKDVVGDQEREEQYIDELVGYLIRYT

SEQ ID NO: 169205 - protein, 225 aa, Oryza sativa
  Clone ID: PAT_MRT4530_67647C.1.pep
LNMSEKNDVTQTENGVPKSKRTCARHCKRFWWVYLIVLCIITVIVVPVIILVAVPKIAQSKINEAELEIQSVQILETEEGAYLMKIDSSITTDGKIHASVDPFEAEMYLEDWPAHVPFATVNMPETNSNKHQVVNVTQHVKIADMEEFTRFNIWFHNNETLRVTVNGKTKVKPSGLTRKYGVTFKKTVELKGLNHFAGNRVTDGHIGFGDGTDEPNFTVNRYSHA

SEQ ID NO: 169206 - protein, 121 aa, Oryza sativa
  Clone ID: PAT_MRT4530_67648C.1.pep
MAIHQSLRGTALTWFASLDLTRFDPDYLTGRRTQREQSSRCGRYVSAAFLASSAPARERRGILDPLRRRRTPGEPRLSASSASASSSPSSESRVVVACFPSLDAHPRTHARASVGEDRRQQ

SEQ ID NO: 169207 - protein, 69 aa, Oryza sativa
  unsure (1)..(69): unsure at all Xaa locations
  Clone ID: PAT_MRT4530_67649C.1.pep
IIFPRDXINTIPLEYSRVKCYNDISVRLRMKSITIIYHKYFCAIAGNYISRNVVKKYQHSPSKLCSESS

SEQ ID NO: 169208 - protein, 90 aa, Oryza sativa
  unsure (1)..(90): unsure at all Xaa locations
  Clone ID: PAT_MRT4530_6764C.1.pep
CPLTYARRFQWHPLTSTRCKMLPITVSSSHHGVNIFFAFGXYAGYNNYHDYGYYMIGYIDERGIEESQATTQMGTQESGGGPSIRDAIDD

SEQ ID NO: 169209 - protein, 320 aa, Oryza sativa
  Clone ID: PAT_MRT4530_67650C.1.pep
MAARARRAVAVAVAVLHLLLLTASQLAAPALSAMAPPAAPLPGSADPRCHASPPRRGAVAVYPSDMAHIQFLLNAKFVEAEWFLHGALGRGIDFIDGALSGGGPPPTGARKATLDFRATEVAAELGYQEVGHIRAITQSMGGFPRPAIDLSDAVFAAVMDDAMATRLDPPFDPYASSVNFLLASYILPHITASAAASMLAVEAGQDAVIRMMLYERADEVVAPYKGRTVAEFTRRISEWRNAASRCGAKDEGVKVLDRRQGAERRTVSNILGAGDDSLGFARTPAEVLRILYGSGNEQVPGGFLPRGGNGTIAKGFFQLA

SEQ ID NO: 169210 - protein, 74 aa, Oryza sativa
  Clone ID: PAT_MRT4530_67651C.1.pep
NLFKKNLNSLQKVPKNIIINLPFTMGKIILKCIFPPFKINIFLPNLSFWWPLCYTPKFQSVPLDYNNFSKKRLI

SEQ ID NO: 169211 - protein, 262 aa, Oryza sativa
  Clone ID: PAT_MRT4530_67652C.1.pep
MGEEEENKRADELYLDQKSHYVCIFKIWVYTSLVAIMLPGYTQSVSRAHVASLLSLYPLLAVHNLSLPQHLRAYKQEEMPSSFLGVCCSSPVGTMSTKRDASYVFIALCQQIMPSKHKVLAPEMKVFKPTGESSSSIHTGGKSGPMKQISKLLTCKGGTHHLCKVHGNKMTIKEQCTITSNTYVTLLGLMGKRCTRNHSEQMKNFLHSIEHPRYKDKCGGDLAHQLHNQSKITLEVMSHGKPHKGKLMQSDLMRGQPNLQFG

SEQ ID NO: 169212 - protein, 80 aa, Oryza sativa
  Clone ID: PAT_MRT4530_67653C.1.pep
RRREVRRRRHPSPDSSQTRSNTSQIPNPTNQDHGLLHITTATNSPQDRGANLGAMIWDRSRCGLGIGFRAIRLDWMPPLV

SEQ ID NO: 169213 - protein, 62 aa, Oryza sativa
  Clone ID: PAT_MRT4530_67654C.1.pep
MGSGSLLKVLAKNFDVLAGPLVALAYPLYASVKAIETKSPVDDQQWLTYWVMSSLITLFELT

SEQ ID NO: 169214 - protein, 89 aa, Oryza sativa
  unsure (1)..(89): unsure at all Xaa locations
  Clone ID: PAT_MRT4530_67655C.1.pep
YLPHLKSQSSPEFSGKWHRRTFTSSQSHWVPCACVVLEHPSTIPPTPWHGFVPPSVASPSRRSRSCSTGVTTRAHQLAXTAFAVVPLAH

SEQ ID NO: 169215 - protein, 284 aa, Oryza sativa
  unsure (1)..(284): unsure at all Xaa locations
  Clone ID: PAT_MRT4530_67656C.1.pep
KGSGYLPHLKSQSSPEFSGKWHRRTFTSSQSHWVPCACVVLEHPSTIPCRRREASAWRRXPAESSMPLGAHRRLRARLAGPPTPWHGFVPPSVASPSRRSRSCSTGVTTRAHQLAXTAFAVVPLAHRRREMXSRKRDLGARVLLLSPGRHFIRQGDDQSRPXLDRTVQIYPALGHRRRSRLRCAQWAAEVHQTIPXMCCGQLLSLRAVELTRLAEDGPAQVWAGLGRPGPKVFKVSHYQTVFFPLQRTCTIANLLKKIRSLSKENHLSKLPTVRAAELYRAGQR

SEQ ID NO: 169216 - protein, 73 aa, Oryza sativa
  Clone ID: PAT_MRT4530_67657C.1.pep
LRPLVKDVLPFKKIVSGPTTRLTPIEVKVKALKNKAPGFEIFALSPFFSRAPFRGNNFVLDKGRGIFRPPLFA

SEQ ID NO: 169217 - protein, 42 aa, Oryza sativa
  Clone ID: PAT_MRT4530_67658C.1.pep
LARASSHPVPMKADAVYRGGSPRKLERRAISFTQPTYLRWQS

SEQ ID NO: 169218 - protein, 67 aa, Oryza sativa
  Clone ID: PAT_MRT4530_67659C.1.pep
DFVFARKKIHELTLFIYCRYIIFTFPYTDVKLMRFVFARKKKYMSLHERFSGFTQYEAKWHMHQWIV

SEQ ID NO: 169219 - protein, 777 aa, Oryza sativa
  Clone ID: PAT_MRT4530_6765C.1.pep
MTRSVTICQSVLWMEEVAEICVEAVVGGESNESGSSDDSDFEDELEDMSPADDEWDDLNDDAVFELPTAKPILLIQSTPEKTKSDLDRLRAWSTPSPKDKGKAVVLCEERVKSADLSGSHSDYVGGDSCSSGEDQEVEEIRKAYKEFKKKLKDGEFVRKKSKYPRFNANQPHVRLALRMKFDGKKEFKEVVVQLALQNKRFIRFPKDEGCRTRAKCDWATYPWSFLLSRNSRTNSWQIASLVNEHNCPPRKDNNLVTYKRIAQKYEKIITDNPTWSIQSMQSTVSEQMFANVSASQCKRAKAYVLKKIYESRRDEYSRIFDYQLELLRSNPGSTVVVKLDTDQPSPVFKRIYVCLAACKNGFLLGCRKVVGLDGCFFKGSNNGELLCAVGRDANNSMYPIAWAVVEKETNDSWDWFCDLLCKDLGVGEGDGWGIVNAVQHWAPSAEHRNCARHIYANWKKKFSKKEWQKKFWRCAKAPNVMLFNLAKARLAQETVEGARAIMNTDPSHWSRAWFRFGSNYDSVDNNICETFNKWIVQARFLPIISMLEAIRRKVMVRIHEKITLMDKWLGSICPNIHKKLNAYIIDSGNCHAICNGMDKFEVKHQNHRFTVDLERKTCSCRIYSFKKTYSCCLEPVEGMESWPTSDRPRPKAPGYVRMPGRPSKKEMRRELHEKPKATRVSRVGSVMTCRLCKLLGHNKASCHKRRQQQQGNVQAQGSQPSSTQDQAHVAAKHMANASSSRKRQLKASTSARAAGMVGVEQPRKKLEVRRSPRLNKG

SEQ ID NO: 169220 - protein, 128 aa, Oryza sativa
  Clone ID: PAT_MRT4530_67660C.1.pep
MQIFVKTLTGKTITLEVESSDTIDNVKSKIQDKEGIPPDQQRLIFAGKQLEDGRTLSDYNIQKESTLHLVLRLRGGIIEPSLKALASKFNCDKMICRKCYARLPPRATNCRKRKCGHTNQLRPKKKLK

SEQ ID NO: 169221 - protein, 48 aa, Oryza sativa
  Clone ID: PAT_MRT4530_67661C.1.pep
SAIVAYILMKWCSISKSCLCMKYSTSYYLSVEGHALISQVSLQEDTGG

SEQ ID NO: 169222 - protein, 58 aa, Oryza sativa
  unsure (1)..(58): unsure at all Xaa locations
  Clone ID: PAT_MRT4530_67662C.1.pep
ALFRMLLTPPRVLFLSEPLSCSSIIQAGPXQIKSNPLGWPFVLRDSISIGKSMASVTY

SEQ ID NO: 169223 - protein, 157 aa, Oryza sativa
  unsure (1)..(157): unsure at all Xaa locations
  Clone ID: PAT_MRT4530_67663C.1.pep
SSSSSNXKRDRKPFLPQHRWCVSVGSSSSSRNTDASAAQYRDLYSSSGGNRIDIAVPQYSKLSPLVPSESATYRNVYNSTSGSRTDPTVPHCSKLSPLVTSESASLAGTVPVLKTLEPIKRSSSCCKEQPLSFLSRQFVAAKYKGMFSLWSHNQLAS

SEQ ID NO: 169224 - protein, 74 aa, Oryza sativa
  Clone ID: PAT_MRT4530_67664C.1.pep
NWFLHEHNSQKICLQVGNPLTDDYYDSKGLAEYAWSHAIVSDQVYERIKKTCNFKNSNWTDDCNAESVSVHQSK

SEQ ID NO: 169225 - protein, 287 aa, Oryza sativa
  Clone ID: PAT_MRT4530_67665C.1.pep
MDHQVGTSSPRERESISYGAARRGPGTSSEGECVGSSSSCEYAMKVVDCRALSKKGKLGHAAAEKRILRWLDHPFMLAMFDDFDAGQIYSLTHNAKACPVVDSQSRSPEPVHARSSSFVGTHEYVAPEVARGGGHGAGMDWWSYGMEFPSAVDASLHDDATRDMIARRRACHRRHVLAGRRGAVPGERGAYMWAHCRGCAVRRLWRGLQVGQQQIRPLRCRIYNGSVGKCVAEAVRPALARRQCDGLAACHGARPLVRWRAAVTGSGSAVHRPARGVHRLAAPLKHP

SEQ ID NO: 169226 - protein, 59 aa, Oryza sativa
  Clone ID: PAT_MRT4530_67666C.1.pep
LIIIIMQHCVAAILKSLIIHLNAKTSSDGLYFGPVPSLRFLGDITCEQNGHPPHSGKKK

SEQ ID NO: 169227 - protein, 123 aa, Oryza sativa
  Clone ID: PAT_MRT4530_67667C.1.pep
RGGIEVVQLTASDGGASRRPVIGLARHKSGLRAAAPPPPTPPPRHCRDPPSIHCMSRDGIEYISMHHRAIAENHSIVLLDSPFLVLFPCYCGRRSAMVESDPLLPQALEDVGLKWIMTFNLIY

SEQ ID NO: 169228 - protein, 95 aa, Oryza sativa
  Clone ID: PAT_MRT4530_67668C.1.pep
QKGPSCGGAASQCRGCAVRRLWRGLQVGQQQIRPLRCRIYNGSVGKCVAEAVRPALARRQCDGLAACHGARPLVRWRAAVTGSGSAVHRPARGVH

SEQ ID NO: 169229 - protein, 104 aa, Oryza sativa
  Clone ID: PAT_MRT4530_67669C.1.pep
TGAEPYIKCTAQSDIKICDLSNPRFDICELCGDARTIGQSSTVVYVPQNRASNGEEWIIRAQSRKHLPWIKKVTIKSVNSSEPEPICTSKHHIPAIVFALGGLQ

SEQ ID NO: 169230 - protein, 125 aa, Oryza sativa
  unsure (1)..(125): unsure at all Xaa locations
  Clone ID: PAT_MRT4530_6766C.1.pep
IWSTAHNRGHSYSNSFTLIRGVQLYPQDTAPQHVPVXPTCHHDILERGRDRTLRITPSNQSHHTSGFTSTPRKASGSPLSCLGESGSDKGRXQGPSRSIMPTLAWIRRLEESYTTNPAVAHAGLW

SEQ ID NO: 169231 - protein, 179 aa, Oryza sativa
  Clone ID: PAT_MRT4530_67670C.1.pep
MGRYTEMVHTAQSGPMYFLFLRRMRFPLGKASSSNSPSDYTSSALLSSSPSGPSFSWDFQLYPSVPAPVDVDDDAMRASGEPPEISRSGASSCCRVVVALRQTRQTSRSTGPPAAATHASCCPLTAALVDASSTAEEPPEGIRPPSPERPDPDWGCRCRTRGNHSRRRRVQLGPCLSHR

SEQ ID NO: 169232 - protein, 78 aa, Oryza sativa
  Clone ID: PAT_MRT4530_67671C.1.pep
VFFFFLGFFFFWFLFFFFYVVFLKGKNVGETKGEHRPPKKKPPERKGSQDKENFTPGTRGTRGRQKGGALKKGPQGGN

SEQ ID NO: 169233 - protein, 76 aa, Oryza sativa
  Clone ID: PAT_MRT4530_67672C.1.pep
MTSTIGRSNPIGVYLPTRSKSSPSTIQSIEIDRTSRRRLPGDRDTPTPVPRPVGYSNLMTPNATINIVVIATTKTG

SEQ ID NO: 169234 - protein, 166 aa, Oryza sativa
  Clone ID: PAT_MRT4530_67673C.1.pep
MWIQKAGVIKKPSSHRPPRQSSLSSLCHGSRTSRCHRKRRNRDAHNEEDESQVPIDSSHADGGGDGEEDDPLFADLQKLPPDVARDMEAVVGAAEGFHADTAWAGGLLERCGAIYITAAAAANHRCEPPCLEQQQQPPRHHLRIHQRVGGERKRVGKWNDVKRDEE

SEQ ID NO: 169235 - protein, 107 aa, Oryza sativa
  Clone ID: PAT_MRT4530_67674C.1.pep
RTGGSPKGLITSMTLGGYTVAGNTVIYSLFRFEVNRPGHTRAYVLPQVKCSIIFRNRVVESIDRHLSNKFAYKPQITHLWGLGESSQFRVRMHSSSYTMWYPFFFNT

SEQ ID NO: 169236 - protein, 73 aa, Oryza sativa
  unsure (1)..(73): unsure at all Xaa locations
  Clone ID: PAT_MRT4530_67675C.1.pep
GXXLNLVYIXRVQXGSSLRLPDYLEAGHQGLXDYLRRAGLSIRVVGPSCFNYCSLAYKICPSLGFCCSRMDTR

SEQ ID NO: 169237 - protein, 116 aa, Oryza sativa
  Clone ID: PAT_MRT4530_67676C.1.pep
ILPWMSEGPPCILFTKLNYIISSVQFFLFAHVLISRCSFYQQVCESCAWLIRLAEDMLTQRFAASTHCLHFGSDLNIGDHHSKRATISSTQHCLHLILRLRPLSSSYLCCSNTRKQ

SEQ ID NO: 169238 - protein, 231 aa, Oryza sativa
  Clone ID: PAT_MRT4530_67677C.1.pep
ADSSRAILPRLFSLVPRAQEPPRGVKGDIDFLIKELRMIVGAIDDDLSLDHPAAAAVQTLCMEDLRELAHGIEDCIDGVLYRAARDQQQSPVRRAVQAPKKLQRNLQLAQQLQRLKRMAAEANQRKQRYTAAAPGQHGQVYSSAAAQVDEPWPSCSSASDPRIHEADLVGVDADREELLEQLAERQPEQLKVIAIVGFCGLGKTALAAEAYNRETGGGRFERHAWVCAGHR

SEQ ID NO: 169239 - protein, 160 aa, Oryza sativa
  Clone ID: PAT_MRT4530_67678C.1.pep
MLLRIAHIWLLHRRTKSATIGARPAIPVDPRPARRTLAGCATHALQDDARATRYLGYYDGGWVFISLGHTTRSSVSTTFAAINHSAPMSSPIRRRRPRAFRVLGIAGWADAVPVRRCSADRTMRTTIRPPTSTWLPAAKFFAGASPVELLTAGVASTPLC

SEQ ID NO: 169240 - protein, 411 aa, Oryza sativa
  Clone ID: PAT_MRT4530_67679C.1.pep
MEGSSGGSGGIERLIRAAGEESRSEMDQSLYMGSSSTRNPVTGEAAEADAATGKKVAGGSGQPFSPSRGVGREEAGRLASGRKRNEASEWGMEGGRRGDRTTPRPSPSDIDLGEQASGKPGRARGSSSGQRWSSQQQGRSATAERGAFAMSRLRALWQASVNATRRAIVWNSEDLIPPSEKYIFNFNSKDELKRWHLYSDSEYGGLSSASLEITDGGAGGDTSSTGLFSGNLSLDMSEGSTWKIRRSGFCGMRSKKFNGFIDLDAYDTIAMKLRGDGRCYISTIYTENWVNSPGQQEDNSWQAFVYLPQDRWQIMKIPLDSYLPTWRGNVIEAKMEMNPARVVGMSLSVNAEGGVPGAKTGPGFLRAGNFLPALFHVIIAEYHEAWRCVMQFVLLLVNTMGHRKEATVQRR

SEQ ID NO: 169241 - protein, 84 aa, Oryza sativa
  Clone ID: PAT_MRT4530_6767C.1.pep
ALPSKFETRLALEQAVSATNPSYLRSRHMEGDRYTRTMPTTAEDHKQCKAVEVQRINAESHPPTHHDDRCDDLHNDEEFQRSMD

SEQ ID NO: 169242 - protein, 162 aa, Oryza sativa
  unsure (1)..(162): unsure at all Xaa locations
  Clone ID: PAT_MRT4530_67680C.1.pep
APPRGGRPARPPPGGPPRPPAAAPAPTYPLPPPPPPRPPTAPXPPPPRAPPPHPPPAPPPHPPPQPPPSPLPAPPPNPARLPPPLSPPXPPPSPASGGPRTPGPAPPPHPTHPLSLPLNKGGAPLPPIQGPMLPPHSVVVTPFPAPRQQLRMLCNKAPGLPE

SEQ ID NO: 169243 - protein, 47 aa, Oryza sativa
  Clone ID: PAT_MRT4530_67681C.1.pep
SLRSDLPSARQLTKSDFFPLLTEVAREMVVAAALSSLRTSLVGMVYN

SEQ ID NO: 169244 - protein, 229 aa, Oryza sativa
  Clone ID: PAT_MRT4530_67682C.1.pep
MSRLRALWQASVNATRRAIVWNSEDLIPPSEKYIFNFNSKDELKRWHLYSDSEYGGLSSASLEITDGGAGGDTSSTGLFSGNLSLDMSEGSTWKIRRSGFCGMRSKKFNGFIDLDAYDTIAMKLRGDGRCYISTIYTENWVNSPGQQEDNSWQAFVYLPQDRWQIMKIPLDSYLPTWRGNVIEAKMEMNPARVVGMSLSVNAEGGVPGAKTGPGDFRLEVDWIKALRTL

SEQ ID NO: 169245 - protein, 89 aa, Oryza sativa
  unsure (1)..(89): unsure at all Xaa locations
  Clone ID: PAT_MRT4530_67683C.1.pep
NEQPXGXXXLIXNXXSEGXAIPSQXPXXSLQDXKXRXXTLVXXXRPFAXGXEXHXPXSXGXQGXXXXVACLXCXCXIMATPWFXSFYRX

SEQ ID NO: 169246 - protein, 127 aa, Oryza sativa
  Clone ID: PAT_MRT4530_67684C.1.pep
MAWKTKERHRPRSMVGWRWRREHVEAASELAAEEEGKARRRRRRKLWATMDDGGRRRESWAAAPMAHGNSAHREERGGCLSGWADLGRGNKESTRNCMYWVIESCISLDSTSSDLKFGNPTFGSFSQ

SEQ ID NO: 169247 - protein, 180 aa, Oryza sativa
  Clone ID: PAT_MRT4530_67685C.1.pep
TLKYPIEHGIVTNWDDMEKIWHHTFYNELRVAPEEHPVLLTEAPLNPKANREKMTQIMFETFNTPAMYVAIQAVLSLYASGRTTGIVMDSGDGVTHTVPIYEGYALPHAILRLDLAGRDLTDYLMKILTERGYSFTTTAEREIVRDIKEKLAYVALDFEQEMHTAASSSSLEKSYELPDG

SEQ ID NO: 169248 - protein, 469 aa, Oryza sativa
  unsure (1)..(469): unsure at all Xaa locations
  Clone ID: PAT_MRT4530_67686C.1.pep
MASSGCSSNRLRQTIVVALLLPASSSCLASAKHRGNXGTATTVPFHXRHELRSYRKIMAQSPDGDVIDCVPSHLQPAFEHPTLRGQKPEAPPSATPTETXEEEEEEAAPCNTRPRSRRTPPGDGGGRVRIGADIAGVVGXVRRDEPILAEGVSIDTTVPFAMCSALSRGAAFARRDSDVMGNETGDQFXGATVSLMGSSAMVATAAVFILSQFWVITGTSGIDLNTIEAGWQVSPELYGDNNPRFFTYWTFTLXTDAYQATGCYDLHCSRSVQTNTAIPIGAASPPSSVFNGRQFDTSLLIWKDGRRGHCGRQPGAGPLVGYRPSYPFTLQLLLANMVQFGGEVVNTRPSGSHTPTQMGSGHFPREGFNRAAYFRNLQVVDWDNNLLPAAALRLVADHPSCYDIQGGYNRDWGNYFYYGGPGSNVKCPRKDLALSISCCLMAGHSCFSFFVRLFVCFLSSVFFFVIEIG

SEQ ID NO: 169249 - protein, 202 aa, Oryza sativa
  unsure (1)..(202): unsure at all Xaa locations
  Clone ID: PAT_MRT4530_67687C.1.pep
MGSTRSKNEDDKAIVLCHERKRYVREALDGRCAFAAAHFAYIQSLRHTGFALRKFLEPEVPTDSSLYTSTSATPEPPTIRQKSRNLSPSISHQASDSFSPVPSPLSSGRFRINHMKSGGNPVMTIEEKVPVPVTATLQTSSLVPKAXMXLDDSSTFEAPPGTPPWDYFGLFNPGEDQFSFHDEKEPGHDFENADDIRRLREK

SEQ ID NO: 169250 - protein, 65 aa, Oryza sativa
  Clone ID: PAT_MRT4530_67688C.1.pep
ESEAPLVGEVHVVLGVPHPNLLRVARTSLPGDRDPSYHPPTEERCFWVFPRDPTAAEGGGSARRA

SEQ ID NO: 169251 - protein, 61 aa, Oryza sativa
  Clone ID: PAT_MRT4530_67689C.1.pep
GPPFVRHIHRENFAPLGPFDIANYVNIDKVSHFPPGLNASTGGGDRSQAHTSQTPPTIERS

SEQ ID NO: 169252 - protein, 179 aa, Oryza sativa
  unsure (1)..(179): unsure at all Xaa locations
  Clone ID: PAT_MRT4530_6768C.1.pep
HVMEVEELRRPLMVSTPSNQALSSQRSPSVRIEIQGVPSLANLILLESKDLDVILGMDWLARYKGVIDCANRKVTLTSNDGRVVTVHALPSEPLRSSLNRITLEEIPIVREYPDVFPDDLPGMPPKRDIEFXIDLVPGTTPIHKRPYRMAANELAEVMSGPKTNDSETDMFRLYQALDQ

SEQ ID NO: 169253 - protein, 40 aa, Oryza sativa
  Clone ID: PAT_MRT4530_67690C.1.pep
QDLMNLMSLSLTNDTARLKNINRVKFAVRFSQADHLSGAC

SEQ ID NO: 169254 - protein, 195 aa, Oryza sativa
  Clone ID: PAT_MRT4530_67691C.1.pep
MDDFVTELNNHLITVYQTALKIREMIELCEFYANMSNSKRNAIPAKMLKNAHCQEDFGVLDLIDQAQKNDKFFFANIAVKLKCLLGRLCTADPPQAPDLERNKRKKVKKMVERVIDGGDLDLVLSYENDEECLLNESMLEDQETFRHQIENLGYAFIHVMREVILTDDEDQEEGEIVTYAEEEDDIVTDDDDEDD

SEQ ID NO: 169255 - protein, 139 aa, Oryza sativa
  Clone ID: PAT_MRT4530_67692C.1.pep
MSTTHGRKKSSFRAGLLRRHSGASGARAWGMEGGGRAQARSWQRWPLMELELKLRGNIDRAHLFNAIPRGSQYLRSKQWLSGNNGMWKWIGWSNLQSKGWGGDGANVIGVVMLNHGANDIGAAKRIIYRISFFRSLFGG

SEQ ID NO: 169256 - protein, 269 aa, Oryza sativa
  Clone ID: PAT_MRT4530_67693C.1.pep
MVVAGRSRDGANERIQRRSWADLRRSRVDLRSVRAPPGGSGYLAISLGPEGLPYLEALARRHVVTARGIEQAGTRGLPGAFMGSAPTAHRKTYTPSHRQQGIDVQAKDFARDHLRTSAHFTSGQRIGKLFNPDRCGPLSKGKSRAFVKEPFFFRPKFPSILNDHGRGSGGRSGGVHSHSVRKRRKDPNRLGGSALSLPADGGRARRAGVHRRLTYDDGGTPQGALQAVEALLRHPPVVLEPKTPVQRHDLTAIDNPDVVEALEKPRALR

SEQ ID NO: 169257 - protein, 232 aa, Oryza sativa
  Clone ID: PAT_MRT4530_67694C.1.pep
MRRRVSSSSSSSSSSSPARHHKARRSRRKLAVDEDWEAAFREFLSRDHDDDDDDHDGQHVVVAPLIRGSDKCVHGHEVVASTVGGGASGGRRRADDDDGERRRRRRREKRSYPYRGIRQRPWGRWASEIRDPVKGIRVWLGTFDTAEGAARAYDDEVRRIYGGNAKTNFPPSPPTPPPPEKPAAERSPSTTPTTTTEDSGDSRILIECCSDDLMDSLLAAFDMTTGDMRFWS

SEQ ID NO: 169258 - protein, 235 aa, Oryza sativa
  Clone ID: PAT_MRT4530_67695C.1.pep
MEEFGRQPCKREQELGWESFHPSSAHHLFDEMSSPLEVFEEDVLLVMSEENITWDEALHLLQEELKDAQCRFDEKLDRFLEVFGLMGDKSNQSEGDKRSNEFKEFSASIKELTPTTEAAAFQSPQASPSSAPTKCSMICFGLDTMSDLNMAAAVVCATTSLASVELVARGNATCEPYVNTPGHPKETHTKCSMVGFEVKGGTDHTKVTCHTMMGVPDGVLVPEASFHEASKYPIL

SEQ ID NO: 169259 - protein, 76 aa, Oryza sativa
  unsure (1)..(76): unsure at all Xaa locations
  Clone ID: PAT_MRT4530_67696C.1.pep
QRSISCXXTXVKGXRRDSSSRRRRRRPSSWGXXXVYRXEMGEAWRGAAWQGVGGGAAWXLVDIRRAAGXLGGGGGX

SEQ ID NO: 169260 - protein, 80 aa, Oryza sativa
  unsure (1)..(80): unsure at all Xaa locations
  Clone ID: PAT_MRT4530_67697C.1.pep
WLEAAACTTTGGDRRRQTARRRRRIAGAAAXPKATAHAGXEGKEGGGSPYRRGQRRPAAENEGGGEDRRCQGADARRRHL

SEQ ID NO: 169261 - protein, 89 aa, Oryza sativa
  Clone ID: PAT_MRT4530_67698C.1.pep
LHPYPSPLPRRRSDPVERAARRGAARASSAWRVARRGEGDEDGLTRRPHESRRNPSRPIRSIWAIQILIQTKYISREIRDAMTTPFESQ

SEQ ID NO: 169262 - protein, 86 aa, Oryza sativa
  unsure (1)..(86): unsure at all Xaa locations
  Clone ID: PAT_MRT4530_67699C.1.pep
ATPARRASGPPSPSPPPPPPPPPPMQPSPLHPPPLPVLLPSAGGRSSXGGGSGGGRLGRRVAPPXPPRPCPPAAACRRGGAPWRPG

SEQ ID NO: 169263 - protein, 408 aa, Oryza sativa
  unsure (1)..(408): unsure at all Xaa locations
  Clone ID: PAT_MRT4530_6769C.1.pep
TEADPVCQPRRVADKRTPLDTTRVAHVETTRLPSGHTNTDTTRSPPAHVNDYRHRYTGTGVDDRTTGTGRHRKDEGGEARGRXPYHHATRRGNDNDERDRRGQXGTTEANGEGTTSAAILGQRRDAAGTRLDDAEPSTETRTGLXGSLDERGRRTRTARRRDERHDDRERREDDDDDDDRDRRGGDEXSQQQLHGDEDDVEHAATMLVKVVVQRGDEPTRRKERPARRXRRSGEIRATPWPGRERGRHSGAGRGGGDVGRRTGDAAEAAGGGEVVATPLDAGEDASPVFSPRNRGLTEGEEVAARPREKTAXPDGARARRERRLEAAGAEKREGRRRGGSSGGHLAKRRASRGGGGGGDAGGGDGAAGRRSGEAGEAAGGXGRQRGRERATVGRWLETTGELGKRLKR

SEQ ID NO: 169264 - protein, 516 aa, Oryza sativa
  Clone ID: PAT_MRT4530_676C.1.pep
MSVLIVTSVGDIEVDLHTDMCPLTTKNFLKLCKGNEGLVAGGLAFRKQLSGQFWRCRAGATGSGFDVKGMSFPGYSFFLVFLSLHYFVHIQNYLFSRFLSGAMATRFFDDEIHPELRHSKMGTIAMASAGENCNASQFYITLRDGVDYLDDKHTVFGMVAEGFDTITKINETYVDDKGRPFKDIRIRHTYVLDDPFDDPPQLSKLIPENSPVGKPQDEIAEERLEDNWVPPDETVAPEELEDTIRSKEAHTNAVILQSLGDIPDAEIKPQDNVLFVRELNKDEDLYTIFSHFGSVTSAEIIRDYKTGDSLCFAFIEFEKKEACERAFFMMDNCLIDDRRIRVDFSQSVSKQWRQFRQSKSNANKDGCFKCGALDLIARDCDQRAEQKNKGPNYILKDENTQRSGNKRRSYDLVFEDGENYNGQQDLRSADRRKIHKIDDRRSGLPPRGDRDRISRERTHIDENDKEASTRAESKYRDGDDDYRRQSGGSRYGRDKCDGERRYRGDDDHGRSNRHTR

SEQ ID NO: 169265 - protein, 82 aa, Oryza sativa
  unsure (1)..(82): unsure at all Xaa locations
  Clone ID: PAT_MRT4530_67700C.1.pep
XKGLGFRTLPPRRGPQETLPRQTLPPPGSLLPHSRQPVGAPTTPKSESVVLATTAKSGADRFESGPLAKSGLGHTGPQQCDA

SEQ ID NO: 169266 - protein, 1458 aa, Oryza sativa
  Clone ID: PAT_MRT4530_67701C.1.pep
MVCSPEKAGAACPECLERRILSGLPGSCFSFVHGLHESPLPFASAAVVQIASDGAEECNGSQQSTGYFVLVGLQGGKELLDIQECESNSLENGSQIDLQGKESTDADDNHRKQSIINTITKLTPTRYLARAATSEIRELISSYLNLTTEESVMNSLNLLSENKIVGSGGLDFLNFTGFSEFNDIHPSGHVRHPNILPVLGIVETYDCCYMLHPKSPYTLENIMHYSPEALWSDWHIRFLIYQIISALVYLHDSGVHHGNLKPSAIFMSDSLWPYLSISDICPVKQNCGFAESKRPALTLCCFEEDCSSRAIYSGFNLSSSLDWQSYSKRWWMGELSNYEYILVLNKLAGRRWGDPAFHTVMPWVIDFTVRPDENSDIGWRDLTKSKWRLAKGDEQLDFTYSSSEVPHHVSDECLSELAVCSYKARRLPKNILRSAVRSVYEPNEYPSNMQRLYQWTPDECIPEFYSDPRIFVSLHSEMSNLALPSWVTSAEEFICLHRNALESDRVSRQLHHWIDITFGYKLSGESSVEAKNGGSSSMTTGLLLKDHIPPAMSSQIDYLEEFEQANVFMKLENHLCPIYDYANDSSSCCSSVKYNKSPCSNQYIVPPESVLSVAPDFDFCSFLECFESDDSSPTGYQELLRWKQKSCSVNEYHANDIFSVGCILAEIYLHGPLFDADLLSAYKETGILPGAIQELPIHVAVIVESCIQREWKRRPLAKHLLESQYFPPSVRSAYMFLAPLQLICTPRDRLKYVAKLASEGTLRAMGECAAEMCAPYCLPLVSPSLSYIDTEFALALLKEFVKCLSVQATKDLILHIIQKILQAGGLLGESFTVKQILPLLRNVILSCIESSKINKPEPQHSWNSFALMDGLSALEGLVSILPVKTILRELLQVAASAFVDLCQQIGPENTATYVLPHLKELFAELAFSHESSGLSVPTKGLKFFDGNKTEPAKMESRIDLVFLLYPFLAALVGIEKLRECYSTWFLLEQALQRLYGWKWQPSTDHSGSSENMKGQRFRSGNYTSSEPAPTKLVAEIGKNGRNMTVSNQGSRLEHGSSSDNLCASTSGNQPWFWFPSPDRNCWAPDFLGRSAGMKDELPWKIKASVLYSARAHPGALRSLAVHDDECTIFTGGVGPGFKGSIQKWELPNMNCSSGYYGHEEVVNSICILSITGKVASCDGTIHIWNAQTGKLIAVHTESSISFPQQTASIEQANMLNQDALSGGILSNAFRGSLYTTMHYMESKDKLVAGMGNGSIRFIDISQDQKLHLWKSDSDEISFSSLVSAICSCASDKLKKDSTVASSSWIAAGLSSGYCRLLDERSGNIVAVWRAHDGHITKLAAPEDHLIVSSSLDKTLRVWDLRGNLSTQSNIYRSHSDGIINFSAWGQDMVSVSRNKIALTSLSRPTSEIGHQQLTFQYLYSSDRGVKYKNMSVLSTISVLPLSRLFVVGTEDGFLKICH

SEQ ID NO: 169267 - protein, 333 aa, Oryza sativa
  Clone ID: PAT_MRT4530_67702C.1.pep
MDSGGASDPSRQVRVRFLTKLPAPLRAPPTSIAVPADLTRMGLSEIVNSLLLAASPDHQAQPFDFLVDGELVRLPLQEFLLAKGISVERVLELEYVKAVAPRKQEDPCPHDDWVSAVDGSNPSFVLTGCYDGLARIWRDASECTHILEGHSDGITSARFINKGETEDRLHVVTASKDRSLRLFKICSGSWDNSIKLWSVEGSEEDGDTVSVKKRRTNSDSSGPEESLFEGSATSTFLGHTQCVSAVTWPERQTIYSASWDHSVRQWDVQTGKETWNMVSGKALNCLDCGGESSSLIAAGGSDPVLRWPLASVESHKDKIVEAFIVKVTARLSY

SEQ ID NO: 169268 - protein, 102 aa, Oryza sativa
  Clone ID: PAT_MRT4530_67703C.1.pep
GKGLAWGPGLELVLEKGVFVRTMKSFQLSISSPEIDRSKTKRHMVYALTSSKKKEGAFFSESSRKRLLVRAICLLLLIWELPTKLLHRGKCPDVHYKIHKAL

SEQ ID NO: 169269 - protein, 202 aa, Oryza sativa
  Clone ID: PAT_MRT4530_67704C.1.pep
MTAAETQEELLRKHLEEQKIEGDEPILEDDDDDEDDDDDEDDKDDDVEGAGGDASGRSKQSRSEKKSRKAMQKLGMKTITGVSRVTIKKSKNILFVISKPDVFKSPNSDTYVIFGEAKIEDLSSQLQTQAAEQFKAPDLSNVISKAEPSAAAQDDEEVDESGVEPKDIELVMTQATVSRSRAVKALKAANGDIVTAIMELTN

SEQ ID NO: 169270 - protein, 221 aa, Oryza sativa
  Clone ID: PAT_MRT4530_67705C.1.pep
MTAAETQEELLRKHLEEQKIEGDEPILEDDDDDEDDDDDEDDKDDDVEGAGGDASGRSKQSRSEKKSRKAMQKLGMKTITGVSRVTIKKSKNAHRIVIYHCILLNFSLHYQILFVISKPDVFKSPNSDTYVIFGEAKIEDLSSQLQTQAAEQFKAPDLSNVISKAEPSAAAQDDEEVDESGVEPKDIELVMTQATVSRSRAVKALKAANGDIVTAIMELTN

SEQ ID NO: 169271 - protein, 110 aa, Oryza sativa
  Clone ID: PAT_MRT4530_67706C.1.pep
SAGSARCRPCAPCPAASSRTPARPPCAAPRRPRPGAAPPAGSRPAPGRPWGGPAPAPAPPGPQSASAAAGSAPPPARPPEQTLYPQPPRPRPYVAPPVPRRPPLRSGEPG

SEQ ID NO: 169272 - protein, 90 aa, Oryza sativa
  Clone ID: PAT_MRT4530_67707C.1.pep
MEKRNSNDRFFIVNLQPPLAFVRHFAASPTVVQQELNGWVLAARRMEDLAWAQITFQFVPYIKNLEIKTTVTPRCASETFWDSNRMQTHH

SEQ ID NO: 169273 - protein, 71 aa, Oryza sativa
  unsure (1)..(71): unsure at all Xaa locations
  Clone ID: PAT_MRT4530_67708C.1.pep
XXGWLLXRKHPTVNFDSMSVIXPFLXPXEXXTSIMQKTFFAXKWDGXFXTKFXLXSHFQPPXGXETKTNAN

SEQ ID NO: 169274 - protein, 80 aa, Oryza sativa
  Clone ID: PAT_MRT4530_67709C.1.pep
MAQQLIVAADRFCLDRLETMRLRLLCEELLTTGKEELMMMQKQWQTGNGQRKAAQLCLPANAVRVRLTSLQCAAAELPTK

SEQ ID NO: 169275 - protein, 371 aa, Oryza sativa
  Clone ID: PAT_MRT4530_6770C.1.pep
MAAAGAGAGAPDRAALTVGPGMDMPIMHDSDRYELVRDIGSGNFGVARLMRDRRTMELVAVKYIERGEKIDDNVQREIINHRSLKHPNIIRFKEVILTPTHLAIVMEYASGGELFERICKNVRFSEDEARYFFQQLISGVSYCHSMQVCHRDLKLENTLLDGSPAPRLKICDFGYSKSSVLHSQPKSTVGTPAYIAPEVLLKKEYDGKTADVWSCGVTLYVMVVGAYPFEDPEEPKNFRKTIQRILNVQYSIPENVDISPECRHLISRIFVGDPSLRITIPEIRSHGWFLKNLPADLMDDDSMSSQYEEPDQPMQTMDQIMQILTEATIPPACSRINHILTDGLDLDDDMDDLDSDSDIDVDSSGEIVYAM

SEQ ID NO: 169276 - protein, 59 aa, Oryza sativa
  Clone ID: PAT_MRT4530_67710C.1.pep
PLTYNTSYITSIKINILIFPPPTITKPISNSLILYHFQTSLYFLSIYQLPLPLLIPLIS

SEQ ID NO: 169277 - protein, 94 aa, Oryza sativa
  Clone ID: PAT_MRT4530_67711C.1.pep
SSELHFLNFRPTHHWFTHTHSQCTTRHRVVNGSLGCTHQSPQGQHHPSSQHGHCSTQPIAACSLSQHSASTVEITKLLELSAAALWPDTSVQLS

SEQ ID NO: 169278 - protein, 55 aa, Oryza sativa
  Clone ID: PAT_MRT4530_67712C.1.pep
MPTLAWERRLEESYTTSPAVAHVGLWDLGYNFEVHRSVGRAGFYTTYKANNADRL

SEQ ID NO: 169279 - protein, 67 aa, Oryza sativa
  Clone ID: PAT_MRT4530_67713C.1.pep
NYSQGESSMKQVIDSGLHDYSFTAPELFRFQLERWTIRSLFHVTFLSHTMIQTKENQPNNSSNRPRT

SEQ ID NO: 169280 - protein, 207 aa, Oryza sativa
  unsure (1)..(207): unsure at all Xaa locations
  Clone ID: PAT_MRT4530_67714C.1.pep
KKEKKCGFSILFSHHLHGDVIKRQKKILARLGVSEALSIPDATHFVADSFFRTKKGLEAIALGKLVVTSMWLENCGQAGCFIDEKKYILRDAKKEREIGFSMPTSLGRSLQASSAAGXRRVYVTLNVKPSREVVXALVLASSGQPLERIGRSITKEVPDDLLVISCEEDYEICSPLLKRGASVFESELLLNGIVIQKLEYERHRLFS

SEQ ID NO: 169281 - protein, 127 aa, Oryza sativa
  Clone ID: PAT_MRT4530_67715C.1.pep
NSVQVTMLHGQIFRPPGKIFSTRALGHPAVGPLAKKKQTWFYLFKTNLPFFLRGRGFPPPYFFFEPEGPPKKKPGIPNIDLGPKKPGGGPPKRGGFFYPGFRKPKRTPVFLCFKPNPGIFWGPRPPP

SEQ ID NO: 169282 - protein, 127 aa, Oryza sativa
  Clone ID: PAT_MRT4530_67716C.1.pep
QPSVQQRKFAQLDEEKRLHMGKSEYEKLLKVPSDGKAAASENASDDEKNRRPISSLVENALGVADKSKFKKKRPKGPNPLSCKKKKPKPQLSAAQNQGPKADGEAKRKRVRKRKRSHKDSKQTETMS

SEQ ID NO: 169283 - protein, 278 aa, Oryza sativa
  Clone ID: PAT_MRT4530_67717C.1.pep
MATAADGVAVARQAELRRIEGNSCFNKARLGAAIDCYTEAIALCPDVAVYWLNRGLCHFKRKEWAKVEEDSRRALALDDTLVKGHYLLGCAMLEKEQCALAIKEFNKALDLLKSSNLGDKMAEDIWQVLAKAKYQDWEIHSTKRVWKMQSLKEACENALQEHHFLSGTLVGDGSTNEYTDQLKLLSEVFTKATIDDTPTDVPDYLCCQITFEIFRDPVITPSGITYERSIILEHLCKVGNFDPVTREPLKEHQLVPNLAIKEAVQAYLKNHSWAYKLN

SEQ ID NO: 169284 - protein, 433 aa, Oryza sativa
  Clone ID: PAT_MRT4530_67718C.1.pep
MGLAPSTPVLSLHLATLSLAYHLVCLVDVVVRAHQSPNPSTLTPSSTTSTVTDRRRRSTLRPPRRRRAAPATFILNRDVVVRPSRAGEATEPPPLLPCLVPLAPPFAAAAAAAREGDARRMRVKRRSKNRKVVRFYATCFGFREPYRVLVDGTFVHHLLSHSLLPADDALQSLLSASRPPPLFTSKCVLAELRRLGKSHADAFDAAALLATAKCEHDKVVSAVDCVLSLIGEKNPEHFFVATQDSDLRAKLREVPGVPVIYGLKSSLFIEQPSVQQRKFAQLDEEKRLHMGKSEYQKLLKVPSDGKAAASENASDDEKNRRPISSLVENALGVADKSKFKKKRPKGPNPLSCKKKKPKPQLSAAQNQINMPIISIYYVVGKACLEELFAVDATRGLMRTCVLQGPKADGEAKRKRVRKRKRSHKDSKQTETMS

SEQ ID NO: 169285 - protein, 86 aa, Oryza sativa
  Clone ID: PAT_MRT4530_67719C.1.pep
GGNRTRPGLYFSPALFPLAPPLPGIWWGVPPRGPGLENFPGKPGPLRNRGLSRIFRTGSRRGAQLSLMGGLFKLGGSMGFRGSREK

SEQ ID NO: 169286 - protein, 2065 aa, Oryza sativa
  unsure (1)..(2065): unsure at all Xaa locations
  Clone ID: PAT_MRT4530_6771C.1.pep
MSPSSTWRPLDLRYKRDPLGGPKGXESDSQHNPHSLRNPCTNVPQYPLYPVYGYHPSTVARQVGGLGAQGFTTMSSSFVDNSVNTNLNHGFPASTTLVWTQVGEIVFPVYTTMPISAGPSMTGNENAVAATQGDSMSKDPPAEAGNGTSTTPELEKDSNAAEPCLSDKNHEPTRTASEATRSWCPIHKTRKHTLQACWVFLNAHAEIRACRERGIQRVSPTRDVYCPIHKTKNHDLSSCKVFLSAIKMSSPKVQPSSVSLREEDKRQGTTLTSDRFVGAIDIDSHEPSVLHLLKDYGSSSTSTPCEVLAIDGTSTSARANAEAENQVVTPAQRISTLNTILREAPYDPVLNDDLAWWQERLRESVTNLSHTFEGAAADAHPEQPPTGGVDGENPEQRESPYRATPSPRGTGDLRDHLNGRREARRTQGNGSRSRHHIPSRHHDNEERGGRSNEDRDRDDRDNRERRAPGNTSRGRRHNGEDDRDRPRDNDGGRRWDSREPGRCPRNPTPEPSDSSSSSSSSSSSSSDRHPRRTHDRRQPTAPSAGCRAFGRSLRDVRWPERFRPGTIEKYDGSTNPEEFLQVYSIVLYAAGADDNALANYLPTALKGSARSWLMHLPPYSISSWADLWQQFVANFQGTYKRHAIEDDLHALTQNSGESLREYVRRFNECRNTIPKITDASVICAFKSGVRDHYTTQELATRRITTTRRLFEIVERCAHVDDALRRKNDKPKTGGEKKTATDAPELSKKKNRKSAKRKAQAEVLAAEYANPSKRPDPQGSDARKAWCPIHKTDRHSLEDCLVFKKSLEKHMALEKGKRVRVVEKDAEAAAQELDSAYPDSDLHVSHIFXAPHRRYPIVVEPTIRNIKVARVLIDGGSSINLLFASTLDAMGVPRSELTPTNQPFHGITPQSSSKPLGKITLPVTFGQANNFRKEQITFDVAEFDTAYNAIIGRTALAKFMAASHYAYQVLKMPGPKGIITIQGNAKLAVQCDKRSLDMVEQTPNPPATTEPPKKVSKTNKTPKPDGAIKIVPLSSANPDKTEIALITFLRDNADVFAWQLSDMPGVPREVIEHKLMVRPDAKPVKQKLRRFAPDRKQAIREELDKLLKAGFIREVLHPEWLANPVMVRKANGKWRMCVDFIDLNKACPKDHFPLPRIDQLVDSTAGCELLSFLDAYSGYHQISMVKENEEKTAFITPFGVFCYVKMPFGLITAGNTFQRTVQGALSDQLGNNVEAYVDDIVVKTKTSDSLIDDLRETFDNLRRYRLMLNPEKCTFGVPSGKLLGFLVSGRGIEANPEKIKAIENMKSPXRLKEVQKLTGCMAALSRFVARMGERGQPFFALLKKKDKFVWTQEAEEAFVALKRYLTNPPVLVAPQPNEELFLYIVTTPYSVSTVIVVEREKIQRPVYYVSEALHDAKTRYPQIQKLLYAVIMTSRKLHHYFQAHRVTVVSSFPLGEVVRNKDVVGRIAKWVVELSXFDVHFVPRTTIKSQILADFVADWTMPDNKSDNQIDNETWTMAFDGALNSQGAGAGFILTSPSGDQFKHAIHLNFRATNNTAEXEGLLARIRAATAFGVKRLIVKGDSELVANQVHKDYKCSNPELSKYLAEVRKQEKRFDGIKVRHVYRKENVEPDELARRTSRREPLEPGTFLDILAKPSVKEVSGEVNPDTPDISSEATEAERAVADIKTTDDWRTPLIKFINSDELLEDDAEAKKITRKAKIYGTIGNDLYKKAPNGVLLKXVPSDDGRHLLHDIHEGICGSHAVGRTLVGKAFRQGFFWPTSLKDACDMXAHKATRASAPDYPSHLAVLVLGARYTRAFPMRTGRLXFLFVAIDKFTKWIEAMPTGEIKADNAIKFIKGIFCRYGLPHRIITDNGSQFISADFQDYYIRLGVKICFASVSHPQSNGQVERANGIVLQGIKTLLWAVRTTPTTSNKETPFFLMYGSEAMLPSELRHQSTXVQKYSDEDQEEQRNDDVNLLEEHRERVAVRAAGYQQALHRYHEKRIRARILXRRVQSQAGRNKLSPKWEGPYMITQVLRPGAFKIADGDGRELANSWNIDQLRKFYV

SEQ ID NO: 169287 - protein, 222 aa, Oryza sativa
  Clone ID: PAT_MRT4530_67720C.1.pep
MDRFRPLRRIQVDPEPAAAAPPPPAAAAANGGAGEDVSAAPAAGLLMASRVRRRSAVYRDCKGDYIGVPNDPCLTKILSKQGDNKVLFADKVLKFTQSGKMKRRILVITDFALYLVDPDADILKRRIALAAVDKLCISKLSDNFFAIIVPTEYDCLMASTRKKEIVDIIIKAIKSNSEYQPQVASSNRFEYHAAAEVIKEVEFEEAEGGVKTRITHKAKAKS

SEQ ID NO: 169288 - protein, 776 aa, Oryza sativa
  Clone ID: PAT_MRT4530_67721C.1.pep
MAGAMPGWMGTMMFIRDFLFSIRGVVALSFIAHVVLVLFAGVRRRQATGGATFLLWVANEGARWAPTAALGIITIGSTVQERQQATLWAAFMLLHAARPDNIAAYALEDSVLSLRQKVDVIAQFGPVSPAYILYLNMFAMPGDSMLWISSFVCLMAIAKYFEGAYYALQRGNLENMRSSRKEEEKKKENMRRRSSSSSLQNTSRGGRKPDDEQILLIAHDMLYITKNAFMDFLDKRSDDEQEALSGTWDETLYKVVSMELSLMYDILYTKKVMVQTWGGYAIRFASPFLGATAFLLFWFHSKQGQATADVVITYVLLGGAVILDIKWLLRAVVSTWTYSYLNDRPRSWLHHALLCSGKWRMLRRFILSLNLFRFLANNKKPTRYRMWLGTIGQYNLLRECTREEDEKTSNFWSSWWKKNAPEEAWMEYEYHNSRGIHISRDFRNKLFDRVWKNMELAFPERIPPVQLSDPKWIHVEDPFPSATVAAEAAAKATIGIDQELNDALDFTPDLQETILVLHVATDIFLFHTESGQNQDQSEWGKAIKALSDYMMFLVAVRPTMLPGLALSSRYDALLDALGEQWKEIKNSSSFNNSMAREKCLAKSLLDKEMKKNGKTPMRTFKWHQGNKTEILSPGAYLSVLYDSSYILSDGARLANLLLNWKPGSKIEIGDNKVLEDKLKRQFPDLMKSGEATETELEYQMPKEVRDIIFREWVRLLINVSIRCTRNSHAKQLARGGELTTVVWILAEHARILRVKKTTKRKPADSYDRLGIHVSRY

SEQ ID NO: 169289 - protein, 95 aa, Oryza sativa
  unsure (1)..(95): unsure at all Xaa locations
  Clone ID: PAT_MRT4530_67722C.1.pep
GSSIQIYVLIETRKKSRKYIKRAIHTXPWRGACQFHPADTGDTHVIHYLMEEDFWVLTCVEKQKPCSGQGMPGGTPPDMQPVHRRTTLVTSVIRP

SEQ ID NO: 169290 - protein, 397 aa, Oryza sativa
  Clone ID: PAT_MRT4530_67723C.1.pep
MILSVSDSEHKLPKPSKFGELDVQAEESAGSKAIMEMVFRCSDLEIKDLLSKSDPFLLISRISESGVPVPICKTEENPLIIECFNFSSNGKHDLIGKIVKSVAELEKMYHSQDGENFFVPASTAHDSHSKEVLKSQVYVEKYLENNRQTFLDYISAGCQLNFMVAVDFTASNGNPRLPDSLHYIDPTGRPNAYQRAILEVGDVLQYYDPAKRFPSWGFGARPIDGPVSHCFNLNGSTYQPEVEGIQGIMSAYISALRNVSLAGPTLFGPVVSTATAIANQSLANNQQKYFVLLIVTDGVVTDFQETIDAIIKASDFPLSILVVGVGGADFKEMEFLDPNKGERLESSTGRVASRDMIQFAPMKDAHGSGISTVQSLLAEIPGQFMTYMRTREIQAIS

SEQ ID NO: 169291 - protein, 87 aa, Oryza sativa
  Clone ID: PAT_MRT4530_67724C.1.pep
SFQYEGRSVQLLRNELEDRVGYAITVCVRAGRHGQHSPLLINLPHSRETLHIVVLRRNSEADNQLTFPDPKASSRRRYRHRRRAIIQ

SEQ ID NO: 169292 - protein, 124 aa, Oryza sativa
  Clone ID: PAT_MRT4530_67725C.1.pep
PVGEDEDAHQRWSDAPSDAPRRSGASRCRHAASQAPSSAPPRAHRTTHARAGLRRLAPPRAHRPPPTLPPPHTPPHGAAASTPAENRRGWPDPATAAPDLPLPSPEASPPPLPDAGERLLHRAL

SEQ ID NO: 169293 - protein, 271 aa, Oryza sativa
  Clone ID: PAT_MRT4530_67726C.1.pep
MAHTRAGGAARLSRLLPPPPSLLLPLHHRRWLPPSLPPSGRLPHSHRRRSSSSTTVATICHLRSLPSPVRRFSFSTTIVGCRGHGNDGACLVHCDVAGARSLVGGGEGGAAGMAKAPLQAPRLFNIVHRGSNDELPEETVVAYMRDKPIPGGAGRGCHCPCRHARSEAAFRFPDNLGLVGSADGDGFDDIDSEDDLFSTFMDIEKIVGTNCDSAVETSSLPRHTKHHHSAFIGRFVFGLVRVAVGGLRSRRRHRPPVICRRTNHAPPYQQH

SEQ ID NO: 169294 - protein, 112 aa, Oryza sativa
  unsure (1)..(112): unsure at all Xaa locations
  Clone ID: PAT_MRT4530_67727C.1.pep
GLLGLENFASALELIGQKLQMDTLQSRLDAEFLLAHMCSAKFKEWIVVLATLLRRAEVLVDLFRHDLRLWKXAYNITLQSHDVFREYLDLLNTLEEELSSVSDLTLQNRPVS

SEQ ID NO: 169295 - protein, 150 aa, Oryza sativa
  unsure (1)..(150): unsure at all Xaa locations
  Clone ID: PAT_MRT4530_67728C.1.pep
MAMLLRKAAVAPARTSVRSKAAIEWYGPDRPKFLGPFSEGDTPAYLTGEFPGDYGWDTAGLSADPQTFAKYREIEVIHARWAMLGALGCVTPELLAKNGMPFGEAVWFKAGAQIFXDGGLNYLGNENLVHAQSILATLAIHVLLMGAAES

SEQ ID NO: 169296 - protein, 59 aa, Oryza sativa
  Clone ID: PAT_MRT4530_67729C.1.pep
KNISRPINLTLLSMHKLTINTSCLCSLGFTYEYILQGGLFQAPVIHLEPFLLILNFSKY

SEQ ID NO: 169297 - protein, 54 aa, Oryza sativa
  Clone ID: PAT_MRT4530_6772C.1.pep
FYNLTFLEEKNDPFILLYIHRSSQNLVKSKSTFLAHRIRPAVVLSPTELYRNTR

SEQ ID NO: 169298 - protein, 192 aa, Oryza sativa
  Clone ID: PAT_MRT4530_67730C.1.pep
MGSGSGSFLKVVVKNLDVLAGPIVSLAYPLYASVRAIETKSAVDDQQWLTYWVLYSFITLFELTFSPVLEWLPLWSYAKLFFNCWLVLPYFNGAAHVYEHFVRPMVVNQQIVNIWYIPRKDESDRPDDVISAAQRYIEQNGSRAFESLVNKFKASNTRRSILEEVEAERRAKAELEAEARDENPFFNQNYRY

SEQ ID NO: 169299 - protein, 101 aa, Oryza sativa
  unsure (1)..(101): unsure at all Xaa locations
  Clone ID: PAT_MRT4530_67731C.1.pep
KFLIISVLNAKDIPQNKKQKNKKKEXIWPSEPTILHQASDNSGRMVEGQTFTVEPILTXEKAETVTWEDGWTTVTPMAXLAAPFRTRGLVTRTGAEILTKL

SEQ ID NO: 169300 - protein, 94 aa, Oryza sativa
  Clone ID: PAT_MRT4530_67732C.1.pep
ITIAYLTWWELQYQVPIRSALCVSSIQNLFPYMEDIVLRVHICSRPAPSASKLVYLCSRRAYFITLVVFVCGCVVCAQFVFRAHPCLWLNLIYY

SEQ ID NO: 169301 - protein, 911 aa, Oryza sativa
  Clone ID: PAT_MRT4530_67733C.1.pep
MAEAVLLAISKISTALGDEATRAVIAKLSGKVSNLRELPDKVEYIRRELRLMKDVIQDLDSTNTNMNVVKGWIDELRKLAYRVEDIMDKYSYYACQRQQEGSVMRCVRGAHYAGVFSEVASEVMKIKGDVEQVKRQQMEWLPTVQLISRTPTDIETPRSQGRRKLLECGDPVGIEYNRKRLLELLYPEEPGHKVITVSGMGGLGKTTLALDVFEREKIKFPVHAWITVSQTCTILSLLRQLVSPLIPMEQESSESKEDLINKMGVHELTKELNRRTENCTSCLIVLDDVWDQNVYFEIQGMLKNPQASRIIITTRMEHVAVLAPSECHLKIQALGEIDAFNLFCRRAFYNTKDHRCPLDLENVAASIVSKCKGLPLALVTMGGLMSTKLQTEHAWQQMYNQLRSELAKNDDVKAILKVSYHALPADQKNCFLYCSLFPEDFRISRESLVRYWVAEGFAVRIEHNRPEDVAEINLMELIHRNMLEVDEYDELGKVISCKMHDIVRNLALSIAGQERFGYANDYGAVEKVDWEVRRLSLFLNNGKGCASTVKFPHLRTLLETTTHPPGLLSSILSESKYLTVLELQDSDITEVPACIGKLFNLRYIGLRRTRLCSLPESIDKLSNLQTLDIKQTKIEKLPRGITKIKKLRHLLADRYEDENKSEFRYFIGVQAPKYLSKLEELQTLETVEASKDLAEQLKELMQIRSIWIDNISSADCGNIFATLSNMPLLSSLLLSARDENEPLCFEALQPMSNELHRSIIRGQWAKGTLDYPIFLSHATHLKYLALSWCHLGEDPLGMLASHLSNLTYLRLNNMHSSKTLVLDAEAFPHLKTLVLMHMPDVNQINITDGALPCIEGLYIVSLRKLDKVPQGIESLASLKKLWLMDLHKDFKTQWNGDGMHQKMLHVAEIHF

SEQ ID NO: 169302 - protein, 178 aa, Oryza sativa
  Clone ID: PAT_MRT4530_67734C.1.pep
MAAPPKLREPVPTTYARVHACVRHSSRALALGVARLEPARIPATDGDFCALNSQRSRGFSWARECGYGSFWGLRANASAAPFCFSLYVILPLCTPPARDRDSNENGAAPGAAGRSDNGSAALPPQLLAAFGDTAAVPAKPSGFTRRRGPRGRNGGARTADAVSTPRFQYATRVCCHTA

SEQ ID NO: 169303 - protein, 260 aa, Oryza sativa
  unsure (1)..(260): unsure at all Xaa locations
  Clone ID: PAT_MRT4530_67735C.1.pep
MSSHERFRLSHLMPNSWFYKLRDMKRPRPTSSRXDHRSRSCSKKLQEIVVVVKQHPPLLPPWTWNHHSQASPXSPPRRSYYPYLERAKQMPLMEKESQLISHSPLHQRIPATAIPGDHHDGEFQDLQLRPIRTRPPSAAAASAEPRRTASGSGTCPSSPRMRSRRLHVLGGCECRAGSGRRRSGGGGFAVVKASAEPARDFRESMVEMVVGNGMRSPEDLLELLECYLSLNAREHHGVIMEAFRGVWVEIVADADCCVGL

SEQ ID NO: 169304 - protein, 59 aa, Oryza sativa
  Clone ID: PAT_MRT4530_67736C.1.pep
RTCLFFYRQMFYSAKTNVAEINVKNHERFDNDPGSLENERNRNATRNRSNSSISSHGSP

SEQ ID NO: 169305 - protein, 78 aa, Oryza sativa
  Clone ID: PAT_MRT4530_67737C.1.pep
RGLSIDHRGATGNFICSLTLVSFTNNECNDRNGCIQYFCNLIWDYLDLISLLLGVRGNFTISNYLSNEKTAKSCRPTC

SEQ ID NO: 169306 - protein, 77 aa, Oryza sativa
  Clone ID: PAT_MRT4530_67738C.1.pep
YILQIYSCSHGGEICLMDLERENFNITRLSEFPILSLCQAPNSPSCLYFGEETDVKLFDDRIGKVSTSWNAHASRIN

SEQ ID NO: 169307 - protein, 78 aa, Oryza sativa
  unsure (1)..(78): unsure at all Xaa locations
  Clone ID: PAT_MRT4530_67739C.1.pep
AWAAAWAGSVCCXPMPHCGSXXQXXCXXXSVXLEGPVXXVXLRVAALSVWLRPFAPWGGGGSXXSXPCCFLRCRGWLG

SEQ ID NO: 169308 - protein, 239 aa, Oryza sativa
  Clone ID: PAT_MRT4530_6773C.1.pep
RPGPLGSREGAPEGSLAGTADGRGTRPRPDGHRRRPPARRSSTRERGGKGEANGAVFGSPRSTATTGTAAEAEEGGGAVRDDEDDGAPTVGERNGGADGVDDDAAKPMEVTPRREEVRSDDGGEPELGGDGGERVQRREHESDGKSERRAAETEERSTRSDYIASGEGESGRRGRNRPRRSRPPSITPARIAGIKSDESEGEREGKAGETGEGIAGNNSPHFNARGDGGMRRIRRRRRR

SEQ ID NO: 169309 - protein, 377 aa, Oryza sativa
  Clone ID: PAT_MRT4530_67740C.1.pep
MAFYNGASVVALLLLVSTAARAAGDGLLLNGNFEYQPSKSQMNGTRVMAEYAIPYWKITGFVEYISSGQKQGDMLLTVPEGAHAVRLGNEASIEQQISVTRGMYYSITFSAARTCAQSEKLNVSVAPGPESGELPIQTVYTSSGWDSYAWAFKAKRGLVSLIIHNHGEDDDPACGPLIDSVAIKTLYPPQATQNNMLRNGDFEEGPYMFPNAAWGVMVPPISEDDHSPLPGWMVMSDTKAVKCVDSAHFTVPHGARAVELVSGLETALMQEVRTVPGRSYRLEFSVGDASDGCVGSMQVKGYAGQGCTTVTYSSQGTGGHTRASLEFAAVANTTRVVFVSSTYITKWDGTLCGPVVDDASLVCVSQQQPPARRLLRL

SEQ ID NO: 169310 - protein, 233 aa, Oryza sativa
  unsure (1)..(233): unsure at all Xaa locations
  Clone ID: PAT_MRT4530_67741C.1.pep
MAIILNATNDGDRIELRVMHFSGHGDWTTNRDRPTFTLYPLQECYKLWRWGTQMIKVFSKIKMNALAINVIWIEAQLNCIGRANPCRIRFLLHSSAWAHIGIKRMGELDIIAFKNAVKQKSPEEAAILCSKWEAEITKPEWHPFMIVMVDGKEMEVIREDDAKLVELKEELGEEIYTTWXPRRCSRIEINEYNYNPSDRYPVSEPWNYKEGRKVTLKEIVQFIMRQWTRKRKR

SEQ ID NO: 169311 - protein, 122 aa, Oryza sativa
  Clone ID: PAT_MRT4530_67742C.1.pep
MSARCRAGPPQLVGDERRIFHVLLHMVGDPDWPERQQNGDTALAETNVVVVTGCRHVGEDDAEQSRLKRYLKLDRSPTRACSQADGVSEALARSDHPCARDEQNRGNRETAQEQKESIAKEQ

SEQ ID NO: 169312 - protein, 238 aa, Oryza sativa
  Clone ID: PAT_MRT4530_67743C.1.pep
MAAAAVADEVTEAMEQVEGEREEADAVADEAAEVMEQAEGEREEAIDAVAGEAGEVMKEVVEGEREEANAMADEADEAMEPEGEREEEADAVADEATEPMEQVEGEGEDGDAAAQRPALPLGRVKRIIRVDRDIKKVTNEAALLIAAATELFVGSLAAGAHRAASRRGRRAVRAVHVRAAAREHRPTADFLLDCLPAAEEAAPARAAAAGPSRGGGRGEAKPLPRGTRRIDAFFQKTT

SEQ ID NO: 169313 - protein, 859 aa, Oryza sativa
  Clone ID: PAT_MRT4530_67744C.1.pep
MAEKNLEEPDSPLIASLSAPKFMQNSAEPELTAGTDCENSNLQNRETANFEAAMQEELPEILVGNKSNMQEISTEQKAPISVCATPSEVDNSGLVSASDPHAFSVTSQNDDESTEPSSDSTTIPPSEKNTHSTSQTSDRLKAVVQLQDTPLHNTGDDAFCSYSVKASYETSAATPAKVKEKKPHLMHHFNERQMSLRDMRQKAPAPLNRSNSGKNFRTDNTFVDTTTHIESVKVAASRFGGSVNWKTRITEPEQENEIVLELDRLKKEISESKRQAEAVEAAKVPLSNEYEKTKRLIEGLEHDLEKAQEEEIIARLGLELFQLIVHEMREGDTSDGGVIGREKLNIIKEQYNAVLANLMLVKDESGKVQENYETLLIERDISIGKAQLAVSMSEGAVRKVEELTVELNRLKVELELAHSTCHDAEKHSKDTSLACDEDSLKWKSDLRQAEEELNQLAKKISSIEELKSTLDTSTGLLLKLKNELAGYVEAKPIDKEAQGNITQRSLHNEVILSTRELEECLMSVDKVRDEVCALNVAAASLKTELIKEKTALATMKQMEATSSIAAASLRVEIQLALRELEAVQAKEKESRNGMLGLQKIMEDTAKEADESKSIAREAQEKLRKAKEDMDHAKSCLDTMEFRIQAVLKEMEATKESMRLAIDALRPFDSELPVDIEEQGSQIVTVDLDEYQSLIAKSSKAEELVHERTASAIAQAKIAKESESRTLSTLSETHKVLEQRKQALVAATERADRATEGKLAMEQELRKWREENEQRRKAGEALKSQLNPSSTPVIIVERSSDTKSTSKDDSYASVHPLLDMSARSTPNDSALLSNKKKRKKLSFFPRITMFFTRKKSRAAI

SEQ ID NO: 169314 - protein, 76 aa, Oryza sativa
  Clone ID: PAT_MRT4530_67745C.1.pep
IEQHITFNYGHVSSSASQRIPKAALQRQHDYSHYQHIAGLRPPRLCLIKHYYPYRIPSFKPAAKLKAASKNHRICF

SEQ ID NO: 169315 - protein, 379 aa, Oryza sativa
  unsure (1)..(379): unsure at all Xaa locations
  Clone ID: PAT_MRT4530_67746C.1.pep
MQTCKGIQGRFVAICIKAVVKHFIEKTGGPTRQRAREWSTVDRDHGVVHRWSTGTDGPDQPELIGRPRGGAAEHGHCSGPPGRATAHGGAASCSDSRRTRESGGAARQGDPGGLGKRGGDKSAGRPNGGGARPGGRRRRPPARQHARETEEGGKEGDEELTKDATTRGGERRGSSASALLGTKAERRPSGVGWRWLGMHVARAAARGGRSSPGTDGEREHGGEVVRVVEGEEETAAERALEVAKPAVAAEQCGGDPSDGKRRPEFAGVWRRAGAAWGERGRECRARETRGNGRGEHGGAFYGLGKAGSRPDMAESAGEVGRRRGVVEGLTGANFRGESGGXRWRRWRGSISRARGAGWSAGAAASWGETGGHGGSWGDR

SEQ ID NO: 169316 - protein, 463 aa, Oryza sativa
  unsure (1)..(463): unsure at all Xaa locations
  Clone ID: PAT_MRT4530_67747C.1.pep
GGGGVGARCGRSGGAEKGGKWRQRGGFGGSGGCRRLEEEDGADREKRVADVIKGEGRRRQVGPTGQRHKGTXSTVDRDHXVVHHRSTGTDGPDRPKPIGRPGAARLGHSTXKAGLSDPWRGGSAVSGDXRPTGGAGEAARMGGGGAQDRRGATRGGPGGPGERGGGAWPGGRRRRPPARKRAQETEEGGKEGEEELTKDAATRGGERRGARRRXLLGTKAERRPGGVGWRWLGMHGGRVVAAIKWGNGAEAGVRRGTEKPAVQTARRGXARAAARGGWSSPGTDGEREHGGEVVRVVEGEEETAAERALEVAKPAVAVEQCGGDPSDGKPRPEFAGVWRRAGAAWGERGRECRARETRGNGRGEHGGAFYGLGKAGSRPDVAESADEVGRRRGVVEGLTGADFRGESGGERWRRWRGSISRARGAGWSAGAAASWGXETGGHGGSWGDGRLGEKMTGGASGPT

SEQ ID NO: 169317 - protein, 253 aa, Oryza sativa
  unsure (1)..(253): unsure at all Xaa locations
  Clone ID: PAT_MRT4530_67748C.1.pep
ILISDATLNIDIFPTNVSMVLTIAYIINNGSSKATLNILITMWHIWKARNDQKISGGNKEPTQVYKAAEAMSKTYTNLSSHTLLHVDQNEETIRRXINHLMHGPRCYTDATWNNGQTGLGIFFHIPTTHNAIFIKATTLVAQSPLHAELMALQLAMELVKLLNILAKKKELXEEPGHWSLRPIWSQICSRIPECLLQVSXIPREINKSADRLAKEAKSKQPSAPVFICQNISHLAYRYANSVRDNISLRKFVI

SEQ ID NO: 169318 - protein, 626 aa, Oryza sativa
  Clone ID: PAT_MRT4530_67749C.1.pep
MAARGGLENPLLGGGPVSSQGSRRRRPWTALAIAVALLAVACVVLLLLSSGGAEQGGDRSRVVSGGGGGGVGLSPHEVEAGVGAVAADDGRCSEVGAAALRAGGHAADAAVAAALWLGVVHPMSSGVGGGAFIVTRDAASGDAVAFDARETAPAAATPDMYAGNPTSKYKGALAMGVPGELAGLHAAWSRYGRLPWKDLFAPAIKLARDGFTVVPPVAGALKEAERDVLADPGLRAVFAPQGRILAAGEVCRNPALADTLEAVASGGVEAFYGGAIGERFVADVRRAGGIATVDDLRAYKVEVSDAMRADAMGYTFLGMPPPSSGTVGMALVLNILDGYKSLEFLKGFLGVHRFIEALKHMLAIRMALGDPDYVNVAGNVSQMLSPAFADKIRQRIVDNTTFPPSYYFPKWSQLNDHGTSHLCVVDGDRNAVAMTTTVNSYFGAHVLSPSTGIVLNNEMDDFSVPAERTPDHLPPAPANFIAPGKRPLSSMTPTIILKASIYSPMLTTAVLSVQNGQLAGVVGGSGGTNIIATAAQLVPNVVVYENETVVGGEVIELSGEAREFLRRRGHRLRSTGSGAVCQFIVQDLLAPVGSAADRRQHGGGNVFHGMLTAVSDPRKGGRPAGM

SEQ ID NO: 169319 - protein, 2012 aa, Oryza sativa
  unsure (1)..(2012): unsure at all Xaa locations
  Clone ID: PAT_MRT4530_6774C.1.pep
ELGYLRIELGLVCSSPTRRPPDLRYKRDPPGRAXRIESQSQHNPHSLRNPCTSVPQYPLYPVYXTVARQVGALGTQGSTTMPSSFVDNNVNTSSSQALSASIMLVWTQVGEIVFPVYTTMPISTGPPMTGNENAVAMNQDGSMSKNPPVETENGLSTTSKLVKDSDAAKSCPSDINHGPTKMTSEVIWSLCPIHKTKKHTLQDCXVFINVRAEIRACKERGIQRTSLTRDVYCPIHKTKNHDLSSCKVLLGAVKTPSPKSYVPVRDNGKEQGATPASDRFVGVIDLDPHEPSVLHLLEDCGSSTTSASREVLAIDDVGTSAQANAEAANQSTTPAQHIRVVQAIQRETPYDPVLNDDLERWTERLRESVTNLSNAFEEAATAAHQDQPPIGDTNGKDPERRELPRQATPPPRGIGDLRDQINDRREARRTWDDANRSRRHVSSRRHDRGNRPNEDRDYNDRERRGPDNTGHGRRRNDDDEGDRRRDNSERQRQDARDPGRHPRNRTPEPSDPSSSSSSASSSSLDRHPRRSRDRRQTTAPSAGCRAFGRSLCDVRWPERFRPRAIENYDGSTDPEEFLQVYSTVLYAAGADDNALANYLPSALKGSARSWLMHLPPYSISSWADLWQQFVANFQGTYKRHAIXDDLHALTQNSGESLREYVRHFNECRNTIPEITDASVILAFKSGVRDRYTTQELATRRITTTRRLFEIVERXAHVDDALRRKNDKPKTGGEKKLSADASESSKKKNRKNGKRKAQAEVLAAEYANPPKRPDRQGSDTKKSWCPIHKTDRHSLEDCLVFKKSLEKHMAFEKGKRVRVVEKNKETPPHESDSAYPDSDLHVSHIFGGSTTYSSKREYKKVEREVXFDVAGGCTLITFDVAEFDTAYNAIIGRTALVKFMATSHYAYQVLKMLGPKGTITIXGNAKLAVQCDKRSLDMVEQTPTPPATSEPPKKVSKPNKTPKPDGTIKIVPLSSANPDKTELAFITFLRDNADVFAWQPCDMPGVPREVIEHKLMVRPDAKLVKQRLRRFAPDRKQAIQEELDKLLKAGFIREVLHPEWLANPVMVRKANGKWRMCVDFTDLNKACPKDHFPLPRIDQLVDSTAGCELLSFLDAYSGYHQISMAKENEEKTVFITPFGVFCYVKMPFGLITTGNTFQRTVQGALSNQLGNNVEAYVDDIVVKTKTSDSLIDDLRETFDNLGRYRLMLNLEKCTFEVPSGKLLGFLVSGRGIXANPEKIKAIENMKPPTXLKEVQKLTGCIAALSRFVARMGERGQPFFALLKKQDKFVWTQEAEEAFIALKRYLSNPPVLVAPQPNEELFLYITATPYSVSTVIVVETEKIQRPVYYVSEALHDAKTRYPHIQKLLYAVIMTSRKLRHYFQAHRVTVVSSFPLGEVVRNKDVVGRIAKWVVELSQFDIHFVPRTAIKSQILADFVADWTMPDNKSDNQGDNETWTMAFDGALNSQGARAGFILTSLSGDQFKHAIHLNFRATNNTAEYEGLLAGIRAAAALGAKRLIVKGDSELIANQVHKDYKCTNPELSKYLAEVRKLEKRFDGIEVRHVYRKDNIEPDDLARRASRREPLEPGTFLDVLTKPSVKEVSGEVGPSTPDISLEVTEAERAVADIETTDDWRIPLIKFISSEELPEDDTEAEKITRKAKIYCMVGNDLYKKAPNGILLKCVSTDDGRQLLLDIHEGICGSHAAGRTLVGKAFRQGFFWPTDLKDACDIQAHKATCTSTPDNPSDLAVLVLGARHTWAIPTRTGRLQIPIXVAIDKFTKWIEAVPTGEIKADNAIKFIRGILCRYGLPHRIITNNGPQFISADFQDYCIGLGVKICFASVSHPQSNGQVERANGIVLQGIKTLLWAMHTTLTTSNKETPFFLVYGSEAMFPGELRHQSTRVQKHSDENQEKQRDIDVNLLEEHRERVAVRAASYQQALRRYHEKRIRACILSIGDYVLRRVQTQAGQNKLSPKWEGPYTITQVLRPGAFKIADGDDRELANSWNIDQLRKFYV

SEQ ID NO: 169320 - protein, 484 aa, Oryza sativa
  Clone ID: PAT_MRT4530_67750C.1.pep
MASAERSKKLRVLLMPFFATSHIGPCTDLAVRLAAARPDVVEPTLAVTPANVSVVRSALRLHGSAASTVVSIATYPFPEAAGLPPGVENLSTAGDERWRVDAAAFDEAMTWPAQEALIKDQSPDVLITDFHFSWNVGIAEELAMPCVQLNVIGLFSTLAVYLAAAVVNDSDSEELTVAGFPGPELRIPRSELPDFLTAHRNLDLVDNMRKLVQVNTRCHGFAVNSFLFLDKPYCEKFMCNGFAKRGYYVGPLCLPQPPAVASVGEPTCISWLDSKPNRSVVYICFGTFAPVSEEQLHELALGLEASGKPFLWAVRAADGWAPPAGWEERVGDRGLLVRDWVPQTAILAHSATAAFLTHCGWNSVLEGVTAGVPLLTWPLVFEQFITERLVMDVLRIGERVWDGARSVRYKEAALVPAAAVARAVARFLEPGGAGDAARIRAQDFAAEAHAAVAEGGSSYGDLRRLIDDLVEARADAGESALQPL

SEQ ID NO: 169321 - protein, 174 aa, Oryza sativa
  Clone ID: PAT_MRT4530_67751C.1.pep
DFSVPAERTPDHLPPAPANFIAPGKRPLFSMTPTIILKNGQLAGVVGGSGGTNIIATAAQVFVNHFIVGMHPLAAVQHPRVYHKLVPNVVVYENETVVGGEVIELSGEAREFLRRRGHRLRSTGSGAVCQFIVQDLLAPVGSAADRRQHGGGNVFHGMLTAVSDPRKGGRPAGM

SEQ ID NO: 169322 - protein, 598 aa, Oryza sativa
  Clone ID: PAT_MRT4530_67752C.1.pep
MAARGGLENPLLGGGAVSSPDSRRRRPCTALAIAAAALLALAACVVLHLSSGGDDRSRVVSGGGGGVRLSPHEVEAGVGAVATDNGRCSKVGAAALRAGGHTVDATVAATLCLGVVHPMSSGVGGGAFIVARDAASGDAVAFDARETAPAAATPLLRLCLENYSSYNSASVFRTIQKWTLIILLKYCRSLQKMSISDMYAGNPTSKYKGALAMGIPGELAGLHAAWSRYGRLPWKDLFAPAIKLARDGFTVVPYLEIALKKTERDVLADPGLRPVLAPEGRILAAGEVCRNPALADTLEAIASGGVEAFYDGAVGERFVADVRRAGGIAKVDDLRAYKVEVSDAMRSDAMGYTFLGMPPPSSGGVGVALILNILSGYKSLEFLKGFLGLHRFIEAFKHMLAIRMDLGDPDYVNITGNVSEMLSPAFADKLRQRIVDNTTFPPSYYFPKWSQLDDHGTSHLCVVDGDRNAVAMTTTENHLFGAHLLSPSTGIVDGQLAGVVGGSGGPFIIATVVQLVPNEVVYENVTVVDGEVFELSGEAREFLRRRGHRLTSTDSGAVCQFIVQDLLTPVAAAGDENVFHGMLTAVSDPRKDGRPAGM

SEQ ID NO: 169323 - protein, 65 aa, Oryza sativa
  Clone ID: PAT_MRT4530_67753C.1.pep
MPIYRIETKRKNIPDLQQKMGNKEDERRARGRKQQDVGTAARGMEIGKETIAEAEEMGRLTGREE

SEQ ID NO: 169324 - protein, 174 aa, Oryza sativa
  Clone ID: PAT_MRT4530_67754C.1.pep
MATGSGAAAAAAADAEEKESGSRMITLTSNEGKAFVVTEASARQSATIRSMVDDGGCVDKGFPLPNVDSKTLARVIQYCDEHGNKEPHTVDERAALAKFDRDFIAELDADKAFLYDVTMAANYLHIQGLLALTTQCVADTIKGKTPEEIRTAFGIEYDLTAQDEKEIKEEDTHA

SEQ ID NO: 169325 - protein, 117 aa, Oryza sativa
  Clone ID: PAT_MRT4530_67755C.1.pep
MAAHVEGKKPQHKYSKKGRKSDRIERQMCIDKEKRTIKSKREQSKCEGSEVVHPTSSDKERNSTIISVVDFTVAMDYCVSPSVVVAVTQTGKGIRFGQPHTAGDITTGQVNGRHRPK

SEQ ID NO: 169326 - protein, 214 aa, Oryza sativa
  Clone ID: PAT_MRT4530_67756C.1.pep
MGCSTVSSPALPWSKNGGKGLLIIEGKGIPSRTEKFGSRSTCPPQKSKPETEPKPTSEPNVGSATDPQVRQKAPDVTKTTWQTPQAATLVTTHDSRHGKACSERQTHHAEPKNPTARTAPPPLHSASRGTQGRSSQKPIYSFTTHLLVHATARGTVLLAESSPRHGGDGSCRGHAPTPTVSRVNEARGGRLAIRTRGKEPSKPRVGCGLRACAF

SEQ ID NO: 169327 - protein, 103 aa, Oryza sativa
  Clone ID: PAT_MRT4530_67757C.1.pep
MRLLLVAAAAALVAAGACFQAGGGRRPPPPPPPVELGASIVVLSPTTTTTTSGGGVNLQADAAVPETETKRPVRGVVGVAVDQETDYGSTDEARDRLTISTLN

SEQ ID NO: 169328 - protein, 73 aa, Oryza sativa
  Clone ID: PAT_MRT4530_67758C.1.pep
ACVVRGRKEVKQRLKQRVTNTVVGTLNTVRHAYSISETVNTSSRSRETRDHYISGQHFSTLGHVHDHANVFIV

SEQ ID NO: 169329 - protein, 816 aa, Oryza sativa
  Clone ID: PAT_MRT4530_67759C.1.pep
MESFSAVVGPNGSGKSNVIDAMLFVFGKRAKQRVLDAKVGMAVEGSDFIITRVAFRDNTSKYYINDRGSNFTEVTKLLKGKGVDLDNNRFLILQGEVEQISLMKPKSQGPHDEGFLEYLEDIIGTNQYVEKIEEASKQLEMLNEKRTASVQMLKLAEKERDNLESAKNEAETFMLKELLLLKWQEKATTLASDDATSHVAQLQENVADLEKNLASEREKIQHSSQTLKEMESVYNKHAKRQEDLENNMKSCKDQFKEFERKDVKYREDLKHLKQKIKKLEDKTEKEKVKTPEGVPRLFDLVKVKDEKLKLAFFATLGNTIVASDLDQATRIAYSAASEFRRVVTLDGALFEKSGTMSGGGSKPRGGKMGTSIRESISEEAVANAENDLNKLVDQLNRLREKINDAKKGYRALEDAKSRFEMELAKAKKEQLDKTSSDINRHKVRITTCEKLVKKLTKGIEESRKEKEKLLAEKEKMMSIFKEIEKAAFTVQEDYKKTQEMMDNHKDELDKTKVEYNKLKKAMDELRSSEVDVEYKLQDTKKLAKEWEMKVKAFRKKLDDIQTNLVKHMDQIQKDAIDHEKLKETLSDEQFNEACDMRKAVEMVALLEALLKDLSPNLDSIAEYRTKARVYGERVDELNATTQERDDLKKQYDALRKRRLDEFMAGFNIISLKLKEMYQMITLGGDAELELVDSLDPFSEGVVFSVRPPKKSWKNIANLSGGEKTLSSLALVFALHHYKPTPLYVMDEIDAALDFKNVSIVGHYVKDRTKDAQFIIISLRNNMFELADRLVGIYKTDNCTKSITINPGSFAESMKVV

SEQ ID NO: 169330 - protein, 1027 aa, Oryza sativa
  Clone ID: PAT_MRT4530_6775C.1.pep
MATGGEPRAAAAAEGGEKRAALLREITEEGGFAFVASAEKAAADGDLRAAEAAREMAWEQLHACPRSEVGRAWRDAYALACLHVAALRVAGGGGDGRRAALRALDMGLIMGGDLLRAELEEAIARVVADRSRGCGGGGGDGAGENGADVEKWMEGLTRKRDLADVLKVLPVKSLSCKQIERRSCISLEAFIRDYFLCESPVILSGYIDHWPARTKWKDIRYLERIAGDRTVPVEIKELREDIMVPEYCNAGGGELQKLNAWFGPEGTVTPLHHDLYHNLFAQGNPQILVFIQRVDHPLCFEITGMFALHQSSYSDKRLWPYPKWLHVLGRKYFRLYSASISNDLYPHRETMLSNISQVDLDNINVNEFPRTGDVEFMDGILEEGLRVRYTLYPSIYVAYRYGIPTRIRIFSAHIKEILHGIYGWKEFYSDKAGSSMYRVRSCTNVPQYPLYPVYGYHPSTVARQVGALGAQGSTTMSSSFVDNSVNTNLNQVFPASTMLVWTQVDEIVFPVYTTIPISAGPSMTGNKNAVATDQDDSLSKDPPAEAENGTSTTSELEKDSNAAKPCCPDMNREPMKMTSEATKSWCPIHKTRKHTLQACWVFLNVRAEIRACKERGIQRISPTRDVYYPIHKTKNHDLSSCKVFLSAMKAPSPKVQQSHIPIRDKDKEQGAMPTSDRFVGVIDIDPHEPSVLHLLVDYGSSRTSAPREVLAIDDVGTSARTNAEAENQLATPAQHIRAVNAILRKTPYDPVLNDDLARWTERLRESVTNLSNAFGEAAAAAHPEQPPTGDANGEDPERRESPHRATPPPGGTGDLRDHLNGRREARRTRDNENRSRRHVSSRRHDNEDRGDRSNEDRDYDNRHHRHDHNDRERRVPGDTSRGRRHNDDDDGDRRRDNSGRQRQDSRDPGRHPRNRTPEPSDPSSSSSSSSSSSSDRHPRRTHDRRQPTVPSARCRAFSRSLRDVRWPERFRLGAIEKYDGSTDPEEFLQVYSTVLYAAGADDNALANYLPTTLKGSARSWLMHLPPY

SEQ ID NO: 169331 - protein, 507 aa, Oryza sativa
  unsure (1)..(507): unsure at all Xaa locations
  Clone ID: PAT_MRT4530_67760C.1.pep
MPAWWKRGKGKKGKGGSAAAGEEEEGRRKAGSFDEALLAGKQSREEKEVVVVGHPLPRPASLPAPSAASSSAAGSASASSAGSSSLGSSAASDEPPDLGTYRVPDASYVLPGRTLAIDSRRQNLAVEEGRFFANNQGLEHPRLSETSVSPRKESYLHNLDLSNDRTAYCHGRKSTEIVFSTRVPISPPGSKGQIPCPTSPVQSRAFGQCPGSPTARQDDSRSSSSPHPLPRPPGSPCSSSRVVSSQWKKGKLLGSGTFGQVYQGFNSEGGQMCAIKEVKVISDDSNSKECLRQLHQEIVLLSQLSHPNIVQYYGSDLSSETLSVYLEYVSGGSIHKLLQEYGAFGEAVLRNYTAQILSGLAYLHGRNTVHRDIKGANILVDPNGDIKLADFGMAKHISAHTSIKSFKGIPSXISTRRISAIXNPSNVRMNMXPCPVSPCSSPLPQYRQXSNRSCMPSPPHPAYSAGAANYSPINNALYPKRPSNHVPDPWLEISQLKAPPFDSPRRL

SEQ ID NO: 169332 - protein, 66 aa, Oryza sativa
  Clone ID: PAT_MRT4530_67761C.1.pep
LFSDFRVSKGVSHVKLSEFTPKSMGIWYSPIQLLPFKIVGKLGCICRLKGLNVSGSLPRQEYCFFS

SEQ ID NO: 169333 - protein, 1236 aa, Oryza sativa
  Clone ID: PAT_MRT4530_67762C.1.pep
MESSPPRSPAPSPGRAGRPRLFIKEMVLRNFKSYAGEQRIGPFHKSFSAVVGPNGSGKSNVIDAMLFVFGKRAKQMRLNKVSELIHNSSNHQNLDSAGVSVHFQEIIDLDDGNYRAVEGSDFIITRVAFRDNTSKYYINDRGSNFTEVTKLLKGKGVDLDNNRFLILQGEVEQISLMKPKSQGPHDEGFLEYLEDIIGTNQYVEKIEEASKQLEMLNEKRTASVQMLKLSEKERDNLESAKNEAETFMLKELLLLKWQEKATTLASDDATSHVAQLQENVADLEKNLASEREKIQHSSQTLKEMESVYNKHAKRQEVLENNMKSCKDQFKEFERKDVKYREDLKHLKQKIKKLEDKTEKDTSKIDESTKEVEESSSLIPQLEEEIPKLQEKFNEEEKVLEQIKENSRGETERLRSKLTQVRSELEPWENQIIEHKGSLDVASAEKKLMKEKVCPALYFFSNAQNQMESIKEQIKAKDTYIMELQEKIEKHHSEANEARKVEQECLKQEESLIPLEQAARQKVAEIKTTRDSEKNQGTVLKAILQAKESKEIEGIYGRLGDLGAIDAKYDVAISTACPGLDYIVVETTNSAQACVELLRRRNLGIATFMILEKQTHHLRKLQEKVKTPEGVPRLFDLVKVKDEKLKLAFFATLGNTIVASDLDQATRIAYSAASEFRRVVTLDGALFEKSGTMSGGGSKPRGGKMGTSIRESISEEAVANAENDLNKLVDQLNRLREKINDAKKGYRALEDAKSRFEMELAKAKKEVESMNAQFSYNEKRLDSLKAASHPKADEVRRMEELDDIISAEQAELNRLAKCSSKLKDQLQQKIENAGGQVLKDQKLKVANIQSQLDKTSSDINRHKVRITTCEKLVKKLTKGIEESRKEKEKLLAEKEKMMSIFKEIEKAAFTVQEDYKKTQQMMDNHKDELDKTKVEYNKLKKAMDELRSSQVDVEYKLQDTKKLAKEWEMKVKAFRKKLDDIQTNLVKHMDQIQKDAIDHEKLKETLSDEQFNEACDMRKAVEMVALLEALLKDLSPNLDSIAEYRTKARVYGERVDELNATTQERDDLKKQYDALRKRRLDEFMAGFNIISLKLKEMYQMITLGGDAELELVDSLDPFSEGVVFSVRPPKKSWKNIANLSGGEKTLSSLALVFALHHYKPTPLYVMDEIDAALDFKNVSIVGHYVKDRTKDAQFIIISLRNNMFELADRLVGIYKTDNCTKSITINPGSFAESMKVV

SEQ ID NO: 169334 - protein, 99 aa, Oryza sativa
  Clone ID: PAT_MRT4530_67763C.1.pep
ATRGATRARLAAYMVICNTWSSLLLASAGVLAALDDAMDDGVAFRCLYIDADEDTFGALHALQQVITIEHAGGHYGPRPQGIGNTAPSGITDAASKIDR

SEQ ID NO: 169335 - protein, 587 aa, Oryza sativa
  Clone ID: PAT_MRT4530_67764C.1.pep
MDPIATASWPSTSASSWPRSVRRRVPEAEEERELGRRVEEMEEAVERLRAEKEAAEAEERDLRAELDAERAAAETAASEAMLMIERLQREKAAALLEARHFRRLADGRADRDGELQDELASLSALAASYLSLLHAHGIDPDDDDGSNQQEQLQPPVEHLDAEADRESRSVVASPPPSEKVFAYAAATAPAADCGAEVTENLYARVEALEVDWSAMRREVAALRAERAQAVLAREVARRLCREAAVAGERGAVAVAAERPRFSVLAVCKEKEMSYCQEKESDSCRLRFSACFYSSTNPSRCIDDDGQGRDRMWWWPAFLYPPPAPAFVAAASVAQFALLANAGLGELRGEHMAYSKFWQVVAGKKKNGGGGGGGALLPSRQGMLVAYVPAFVAAAASFAVPGAVVGVRAQVLSAALTVHFLKRILEVLFIHQYSGSMPLNTAATISSSYLVITATMIYAQHLAAGLPDPPVDLLYPGVAAFAVGIAGNFYHHYLLSQLRNAAGGSGGGERQYRIPTGGLFGLAACPHYLFEIVGFFGFAMIAQTAHALAVASGTVAYLAGRSCATRRWYESKFEDFPDSIKALVPYIL

SEQ ID NO: 169336 - protein, 62 aa, Oryza sativa
  Clone ID: PAT_MRT4530_67765C.1.pep
MKKQRHAKKQKLPMMTAIFVGRFILSFMFWKKRKEEIEWIENPQPILDDDGNLDRKPSTNIG

SEQ ID NO: 169337 - protein, 73 aa, Oryza sativa
  Clone ID: PAT_MRT4530_67766C.1.pep
METMIFIQVRTPELSVDNRVAFLLESASGEIKDSAVSPDNIRRYRGGLVMLISEVDIRRLILAHVGLYVDLVS

SEQ ID NO: 169338 - protein, 492 aa, Oryza sativa
  Clone ID: PAT_MRT4530_67767C.1.pep
MDPTAPNSGDANGGAAADATAPSNTTVTLPPLTLRDVPLLPSAAAATDTIPNPISRHPYFHPPATFYISPGDVSLRHAFFDLASASPSPLVAYRRAGPRAGVAVDPARARAAVVTCGGLCPGLNTVLRELVVGLRELYGVRDVFGVAAGYRGFYGPDADHARLDLAAVDDWHKKGGTVLKTTRGGFDLNKIVDGIVARGYTQCLTSNTFYHDYILLKVYAIGGDGTMRGAVAIFNEFKRRGLNISITGIPKTVDNDIGIIDRSFGFQTAVEIAQQAIDAAHVEAVSAVNGIGLVKLMGRSTGHIALHATLSSRDVDCCLIPEVDFYLEGKGGLFEFLYERIKQKGHAVVVVAEGAGQELIPRTDDQKREQDESGNIVFLDVGPWLKSELGKWWKREHPSELFTVKYIDPTYMIRAVPANATDNLYCTLLAHSAIHGIMAGYTGFVPGPINGNYSYIPLEDVAVAKNPVDVNDHKWAWVRSVTNQPDFMKPKY

SEQ ID NO: 169339 - protein, 80 aa, Oryza sativa
  Clone ID: PAT_MRT4530_67768C.1.pep
LARSRLTVPGGPPAFGAPLQHFLRSFLARGFSRAELCAIPPPRPAPPPFPRLCSRLSPHGAGAAPPPLHRPPEALNPAVC

SEQ ID NO: 169340 - protein, 48 aa, Oryza sativa
  Clone ID: PAT_MRT4530_67769C.1.pep
TTQVSLPKDVSPAIYLKHLQPVVCPELVPQPSIFWFMYVMARHFLLLS

SEQ ID NO: 169341 - protein, 80 aa, Oryza sativa
  unsure (1)..(80): unsure at all Xaa locations
  Clone ID: PAT_MRT4530_6776C.1.pep
MGPQVRCNRPENCINYHNSHKDPPASDPEKCGGLLGQPRFGRTRGSAEXLVAAALAGLTRGRPGWLADGGCRVEYSFRLF

SEQ ID NO: 169342 - protein, 605 aa, Oryza sativa
  unsure (1)..(605): unsure at all Xaa locations
  Clone ID: PAT_MRT4530_67770C.1.pep
MAAATLAAASMGVVTEVLGSDVVDEVDQPIIDYIANVLADEDFDFGAPDGHGIFDALGDLLIDARCVADEEHCLEVCSKICEKFGKHGLVKPKQAMRSLVTPLRMNEGMDDKVAPKKQADVFDGPLLSSRDKAKIERKKXKDERQREAQYQTHVAEMEALRAGMPPVFVNHNNSGGPAVRDIHMENFSVTVGGRDLIQDCTVTLAFGRHYGLVGRNGTGKTSFLRAMAMHAIDGIPKNCQILHVEQEVVGDDTTALQCVLNADIERVQLLQEEAHLVQRQVXVSHAREFLNTVVTDILHLHGQKLHAYKXGDYDTFQQEGEGHLKNQQKAFDSNEKGRSHMQAFIDKFRYNAKRASLVQSRIKALERMEHVDAVVSDPDYVATXEPTNHLDLHAVLWLETYLLKWPETPLVXKNLNFGIDLDSRIAMVGPNGIGKSTILKLISGDLQPTSGTVFRSPKVRMAVFNQHHVDGLDLTVNPLLYMMRCYPGVPEQKLRAHLGSFGVTGNLALQPMYTLSGGQKSRVAFAKITFKKPHIILLDEPSNHLDLDAVEALIQGLLVFQGGVLMVSHDEHLITGSVDELWVVSEGRVSPFAGTFKDYKKMLKS

SEQ ID NO: 169343 - protein, 81 aa, Oryza sativa
  Clone ID: PAT_MRT4530_67771C.1.pep
DLSQVSICKLHWRTAHLYKKLCTEHISVSKDTPLRICHHYKVRKMNWILECTWSSNRMTIKGRVSWTILPNECKLTRVTPQ

SEQ ID NO: 169344 - protein, 71 aa, Oryza sativa
  Clone ID: PAT_MRT4530_67772C.1.pep
PRLAVTHEGGSISIAGAGYTTYSTTRLRGNGGSIGAWPSYLRRLSPSELTPGTGVTGETSSGQGRGQPRRA

SEQ ID NO: 169345 - protein, 113 aa, Oryza sativa
  unsure (1)..(113): unsure at all Xaa locations
  Clone ID: PAT_MRT4530_67773C.1.pep
RFNTVPVKLCMTFFTELEYTIQKFIWYYXRPRISEAIMRNKNQAGGITLRQHYKATVIKTVLYWYLNRHTDQRYRIEKXEINPDTYGQLIFDQGGRNIKXEKDSLFSKWYWEY

SEQ ID NO: 169346 - protein, 74 aa, Oryza sativa
  Clone ID: PAT_MRT4530_67774C.1.pep
APRSNRRAPSPSTSQSCSSTSRWCFSVLFPPSILTLSSTACRRKPNRTRYRTSPHTCAHTCAHTCASAWAYGSG

SEQ ID NO: 169347 - protein, 103 aa, Oryza sativa
  Clone ID: PAT_MRT4530_67775C.1.pep
QVPVRNSRVDPRVRPRVRVCLISIIQGMTSCSALLPLRATTANKLSQRVYIFSKKTKGNDHENCHLSNPQRISHQASIEPPGIVKQITLKHYCFFYSVLILSG

SEQ ID NO: 169348 - protein, 74 aa, Oryza sativa
  Clone ID: PAT_MRT4530_67776C.1.pep
NPAREGARSPPPPRAGSHLTSPAAPLFALHRAAAGLVSCEGRGRTGVVVEGEKGIELALVGEGGEESWVDKMRR

SEQ ID NO: 169349 - protein, 164 aa, Oryza sativa
  Clone ID: PAT_MRT4530_67777C.1.pep
SVRQCPQRRVDDVGVELLNLAIPSRHHSVDVEVHGDVIQTLEHLQLRPRRVPLPIPMLRHCLRAAAILEYGRQRQRQHHRLHVTLLEHCAAAAAGDGCRRTARGLALLRRSGGGGGGRRTERGFALLRRGDGGGRRAECREVEDRAGTEDGRGGLVVGEGGVDG

SEQ ID NO: 169350 - protein, 275 aa, Oryza sativa
  Clone ID: PAT_MRT4530_67778C.1.pep
MPLPDQEAAAGGDGGAMASGDGANGGGGGGQGKLPRKRFYRARAHSNPLSDSHFPIPISPDEVDLSQHYPRYFPSGEGEARQGDAAVPRIRFADVGCGFGGLLVGLSTLFPDTLMIGMELRDKVTEYVKERILALRASNPGKYDNISVVRTNSMKYIPNYFRKAQLSKMFFLFPDPHFKEKNHRRRVISMQLLDEYAYVMEVGGIIYTITDVEELGEWMRSCLEKHPLFEAIPEEETKADPVVKLLSTATEEGQKVARNGGQTFQAIFRRISLQE

SEQ ID NO: 169351 - protein, 365 aa, Oryza sativa
  Clone ID: PAT_MRT4530_67779C.1.pep
MPRAYRPGGKGVVVGTITGNCRFYEISDNLLKLETQIALNGKKKSSLKRITGFQFCPSNPSKLMVTSADSKIRILDGTNVIQNYSGLRSGSCQLSATFTPEGQHIISASEDSNVYVWSHENQYECACKQAKTTQTSEHFRSNNAAIAIPWNGTKPRSPVPLSSQILPPQGDTFWSMSKAIKYNSSLCGKDSSIKKIVSTPAAPGIFNLNQEFFIESSCKSSATWPEEMLPSTTASVNLDESQFKLLRNCFQGTSNSWGQVIVTAGWDGRIRCGQFVLLFGVTSCLLWTLWSISRAIIVPLMGPEEGEFPAILGLERVLISGSAASQKHVGKAEKATAADSEVSRFHSYYSTVETVEENLQQPSNY

SEQ ID NO: 169352 - protein, 665 aa, Oryza sativa
  Clone ID: PAT_MRT4530_6777C.1.pep
MDEVVATMDISEANEGYASCGSVIEMSRQMKTTRVGARAQPWPACPGIPAVGRVGSVLLFTARMGEGLCHIFTTGSKAMECGVKMCLVGWPGLAWDELEPRSGCQFGPNYRRPWVKAVLDGQLCEEEDVVSRLPKLRKTAGSASEAKEAVKPAVKQDKRLRSVKVLSLVSNLSLPFVFPLSLSKPLQQMADNEKGNKVRSQDIGTSSSRVNEAPDTSCVTLVQHLINQNRLLIEILQQHQTPILNLSQIQPQVQLEAVQALTPQVSAPPTSQKAPHAMPHVDPKEASIICFMCDEQGHYARNCPQQKRKAPMRTEDEVRKMIITSTEWPPPGMTKHQRRNSFRGAQQLTEHLLANGGRVSDSEDSDQVSSDDEDAKSPQDFNQNKIELKACSRCGEIGHVASSCAFTCVRCEEDHPPDRCPMSRITCFLCEGTDHVPKDCQLSFLLTKKMADQHAHSNGEKHQGSTNPRQDYSFSLTPVPGQRKQNEKRKCRVREDIRCFNCQGMGHFADKCPKPRNIAAGTSVHATPCNQQLAPQRIVIHASRSSPLARVATTPIPMSALPQGVNAQFQPQPPADKTEASICVVPLEVPIQQLRNQVQDEEPECKKVIVCYNCSEEGHYSKNCPQPRQNRPPHYRQFTRSRHSNRIVVTGANAVPVRPRVNQNP

SEQ ID NO: 169353 - protein, 138 aa, Oryza sativa
  Clone ID: PAT_MRT4530_67780C.1.pep
MKIIFTFALLAIAECSATAQIDVLGQNITRYHEQWHLLLQQHVLSLYNDIVRDLYKIAVLSLFRNIVYQVRNNHALRQLKVLAHQYHYQDINDVQAIPQQLHLQQVGYVYVKKALAEGCALVAFNTTSTYVLYPRYYS

SEQ ID NO: 169354 - protein, 109 aa, Oryza sativa
  Clone ID: PAT_MRT4530_67781C.1.pep
MLNVLTIIYLIVAIILIGFVLMQQGKGADTGASFGAGASGTVFGSAGSANFLSRTTAFLATIFFALSLLIGNLNSHKTGNVSQFEDLSGIQQKVEQSTKVENQNNDIPQ

SEQ ID NO: 169355 - protein, 332 aa, Oryza sativa
  Clone ID: PAT_MRT4530_67782C.1.pep
MGRSGGGGPAILLVAAVLVAGATVSNAQLKVGFYSKSCPTAESTVASAVRQFADADSTILPALVRLQFHDCFVKGCDGSVLIKGVGNNAEVNNNKHQGLRGLDVVDSIKQQLESECPGVVSCADIVVLASRDAIAFTGGPSFDVPTGRRDGRTSSLRDADVLPDVKDSIDVLRSKFAANGLDDKDLVLLSSAHTVGTTACFFLQDRLYNFPLAGGGRGADPSIPEAFLSELQSRCAPGDFNTRLPLDRGSEAEFDTSILRNIRNGFAVIASDAALYNATATVGVVDTYSSMLSAFFGPYFRQDFADAMVKMGSVGVLTGAAGEVRKVCSKFN

SEQ ID NO: 169356 - protein, 45 aa, Oryza sativa
  Clone ID: PAT_MRT4530_67783C.1.pep
GGYVSSETDLGQSSQRAGALASGQNGDREDDAGGGGGALPPSLRS

SEQ ID NO: 169357 - protein, 111 aa, Oryza sativa
  unsure (1)..(111): unsure at all Xaa locations
  Clone ID: PAT_MRT4530_67784C.1.pep
GGYVGSETDLGRSSQRAGAPASGQNGDREDDAGGGREKGKRKKERRLPLXLWEKKEGERAMRQXRRSSASIPWKLARXWRGRVDDDGDDSGAVWKGTATGRQTRAQARQVL

SEQ ID NO: 169358 - protein, 51 aa, Oryza sativa
  Clone ID: PAT_MRT4530_67785C.1.pep
VIRSVVSTSSFSSRTSRPRGTRLHISWSPWRAPAHFRLGQAAFVGPMGAHS

SEQ ID NO: 169359 - protein, 112 aa, Oryza sativa
  unsure (1)..(112): unsure at all Xaa locations
  Clone ID: PAT_MRT4530_67787C.1.pep
IFTSGLVIYLNSSVFALSSVINRRKFLVANVMSFVSFNVSFKRTLIYQNLVNWYNLCASILYICLTKGNGIFIKCSFDQTGQXLALINNGYIEMYKITXKIKIPLKIKILCA

SEQ ID NO: 169360 - protein, 73 aa, Oryza sativa
  Clone ID: PAT_MRT4530_67788C.1.pep
PLHRLKQPTPQPTALNADTLRSLMQPAVAVAKQPQARQSTPTPAGAARRKPLLALLHYSLKSAPFLLASTTPK

SEQ ID NO: 169361 - protein, 242 aa, Oryza sativa
  Clone ID: PAT_MRT4530_67789C.1.pep
MWMQEGHPTCVNLTPIPHTDGHLWRKYGEKKIKNSSFPRRWCKTVAIYRLYYRCSYRDDRNCMATKVVQQENDADPPLYRVTYIHPHTCNPSPPAPTPAHVFTEPPPAKAEVHHAVLFRFSSTAGGHTANNAVHRQQWQPAAATMAAGAQAQLSMTMSDDEREQPPAAIRSAPPARRLSMFRAVVDGLRQMRSSAPPTPSSSMVVDDGWDTFSSFDLDTCEFSVDDELLCGDHMYFPDSMQQ

SEQ ID NO: 169362 - protein, 79 aa, Oryza sativa
  Clone ID: PAT_MRT4530_6778C.1.pep
EDPKVPDQDKRAQDAHRSKGLVTRKRGYLLAIPSNARTKTHPLYLKRALVLANKMIKTLRNMSTHCIQRRYSRLSTNIP

SEQ ID NO: 169363 - protein, 129 aa, Oryza sativa
  Clone ID: PAT_MRT4530_67790C.1.pep
QQHSKAKAFDFRDASSLFASASVLHGGGGGGGGAGVPPRPPTSACVRESGYKWPPPPRRPRAWRMEMEGPVPTGDTSHIYASRSDYTAAEDTSSFPDDDRGLRRSSAMSCGTDRVVHTEGNVCPSKEER

SEQ ID NO: 169364 - protein, 85 aa, Oryza sativa
  Clone ID: PAT_MRT4530_67791C.1.pep
SLTARMNSTVSMEVTKNITCVKEKVNSETEQLDFCLYLIFGLIQLHPDTYFSILGFTPTKYLLLHVSNINSILLFVRVVVCRAFK

SEQ ID NO: 169365 - protein, 570 aa, Oryza sativa
  Clone ID: PAT_MRT4530_67792C.1.pep
MANAGVNETVAVAVAIDAPGVGHDHGAAGEVRRPSTRRLAPAGSGGRLMAELLGVFNGLTERMGEDVATSSSSRLLFRALKLALPALRDGGGDGGGGQSVSRALVVAASLADLQMDAEVISAGMVRGALDTGALAMADVEAQLGASAAGLVEESLKVKRAPSEVDVADEEAASALRKRCLSSYDIRAVILELAVKLDAMKHLDVLPKHQQRTTSLEVLKVFALLAHAVGAGELSLELEDLSFQRLYPQAYAHIDQWLSSQEDDCKRVIAASKEELLRALTADDELRCTVTGVDVMGRYKSRFSTMKKLVKDGRRPEDVNDILGMRVILDPRPGGGGGGDGDGGDRACLRTHEVIKAMWKDVPARTKDYITRPKGNGYRSLHVAVDMSEPGPEGKKRPLMEIQVRTREMDMAAVGGQASHALYKGGLTDPEEAKRLKAIMLAAAEVAAQHLRDEPAGDAAATAGNIERAFRLLDKNGDGRISMEELTELMEDLGAGGKDAEELMRLLDDNNDGSLSSDEFALFQKRVELKAKLEDKDDEYKEILRQKLQKVDDTGLIHVYRKNLSDKLVSG

SEQ ID NO: 169366 - protein, 50 aa, Oryza sativa
  Clone ID: PAT_MRT4530_67793C.1.pep
CKPHKGSGHLGPRGRGRSNPTPPRGNQEEGGHLTLGPDVPEGARPRGRFH

SEQ ID NO: 169367 - protein, 123 aa, Oryza sativa
  Clone ID: PAT_MRT4530_67794C.1.pep
MQMEAADVAKEHHKEEKKDKEHAKEAKPEKEKKEKKEKNGEEAAKPAKEKKEKKEKKEKGKEKKEKVEETTDVAKLRAKLEKLDAKIDDLKAKKQEIVARLVQLEEGATANAAAADAAPPASG

SEQ ID NO: 169368 - protein, 35 aa, Oryza sativa
  Clone ID: PAT_MRT4530_67795C.1.pep
AGIQTLSYYLHTPSTFTYKAQPQQTFDLTIMQDNS

SEQ ID NO: 169369 - protein, 690 aa, Oryza sativa
  Clone ID: PAT_MRT4530_67796C.1.pep
PRGPPRLRVPGRQVGPPCRPLAIAAGAPFASFRAERWIVVSVSSPPTAALGALARVKGWQLLAVGNSHTPSGWELKGAIFLSLELQAQLGYRSVDFLPYASHVRKTAGYLFAIQHGAKVIFDADDRAEVPGNDLGKHFDVDLGSGVTNHPVLLQYSHADPNRTVVNPYVHFGQRSVWPRGLPLDKVGEVAHEVFYTEVFSGQQYIQQGLSDGLPDVDAVFYFTRKPPTAAFDLRFDAEAPKVALPQGTMAPVNSFNTLFHTPAFWGLMMPVSVSSMASDVIRGYWAQRILWEIGGYVAFYPPTIYRKDHIQAYPFAEEKDLHVNVGRLIKFLNEWRSNKRTLFERILDLSYAMAEEGFWTEQDVRLTAAWLQDLLAVGYRQPRLMSLEIDRQRATIGEGDMKEFVPKKLPSVHLGVDEIGTVNYEIGNLIKWRKNFGNVVLIMHVSGPVDRTALEWRLLYGRIFKTVIILAEQSNTELAVERCALSHAYKFLPKVFARYGGADGFLFLQDHMILNYWNLLQADKEKLWITNKVASFWVFVLMQYNKEEWFVKQGSMVKQVIGSSPVHFQTNYKESMGEDKIAFCGSELFYIPRQFVEDFGDLVGLVGDLELHHKVAVPMFFLAMDSPKNFDSDALAGTVFRSNLVGNETFSSIYTAHAPAVFPVKVQNEIDFIKLIRVMSTGDPLLMELV

SEQ ID NO: 169370 - protein, 78 aa, Oryza sativa
  unsure (1)..(78): unsure at all Xaa locations
  Clone ID: PAT_MRT4530_67797C.1.pep
REGAKSKGRSGFGKREDGAVGPPFPFVXDSXARPHPRGXPSSSLLFLFLEILTSIQFLRSERREDRIQAEAAAPGHKR

SEQ ID NO: 169371 - protein, 112 aa, Oryza sativa
  unsure (1)..(112): unsure at all Xaa locations
  Clone ID: PAT_MRT4530_67798C.1.pep
ERAGLLHVAAVEXARDPAGGGSPYTDPTVVAVNARIQWWRSSPHGSGSQPPSPRVGSSSPPLPFLPSLDPAEGRGVGGVAAGGERGSDGGWRGGRREAAGTMAIGRKPAAGF

SEQ ID NO: 169372 - protein, 168 aa, Oryza sativa
  unsure (1)..(168): unsure at all Xaa locations
  Clone ID: PAT_MRT4530_67799C.1.pep
KKKKKRKKTTEKKKKKNQKKKKKKKKKKKKKKERKKKKKKKRKKKKKTKKKKRTEKKKKERKKEPRAERKKKKRKKKKKKKKKKTKKNRKKKKTKKKEKKKKKREKEKNTKQKETEKNEKKKREKPEQKRSTSXKNXQKSHHHPQPSNRRRHRNCAAAPSHPLSPSIS

SEQ ID NO: 169373 - protein, 1865 aa, Oryza sativa
  Clone ID: PAT_MRT4530_6779C.1.pep
MAEIDSIYHVAVADRMLTSAMTTPPAAARDLMVAGDLGHGGAIRGHYRDEGNSPVHDTTTDGDSGEEDRRRGRQVAAVLIRPFAVAEDHRSTVAAVDPISAAASSSSSSPSVPLPPSLWSPIPSFPESPFSPKKSLKSSKAGKETPGLEWYIPGLEIELCSRDGCSEWLGLYNRMPRYKPEYLFGVEGFVQELRTMSFVIGIGTAPFYAQIPHDRHEEKCRVKVTLNSNSEDIPSVMFEAGGRNYIHACQEVARIAIGELRDRYSDQLADTEYRYHPRQPQGSDRGSYLETEGIENDATTRHLVEMLWAMDESRAETVLAAQDREDRNRGKICKLEDKVDRLEKELAALKGEAPPQKARIRLTARKRALFVPRYQLAPKFPPVSLLVPCPCQMVNTRSNGNGPNNPNNNNNGENPTLAQVLAQQTQLMNMMMQQLQNQQNQGNNHAPPQNKLAEFLRVRPPTFSSTTNPVEAGDWLHAIEKKLDLLQCTDQEKVSFASHQLHGPASEWWDHFRLNRTTAEPITWLEFTAAFRKTHIPSGVVSLKKKEFRSLTQGSRSVTEYLHEFNRLACYAPEDVRNDEERQEKFLEGLNDELSYPLMTGDYSDFQKLVDKAIRQEDKYNRMEQKKRRMAQFKTQQGNNQRPRLTLGPQSMPHGGSSSVVRPQRQFFNNNAGNNIRNQAPRPVAVPTQQQPAKREQGSKPVVCFNCGDPGHYADKCPKPRRVKVVPAQSNSAVPASKARVNHVAAAEAQDAPDVILGTFLVNSVPTTVLFDSGVTHSFLSMSFAGNHGMEVEDLRRPLMVSTPSNQALSLQRSPSVRIEIKGVPFLANLILLESKDLDVILGMDWLARHKGVIDCANRKVTLTSNDGRVVTVHALSSESLRSRLNQITLEEIPIVQEYPDVFPDDLPGMPPKRDIEFRIDLVPGTTPIHKRPYRMAANELAEVKRQVDDLLQKGYIRPSSSPWGAPVIFVEKKDHTQRMCVDYRALNDVTIKNKYPLPRIDDLFDQLKGATVFSKIDLRSGYHQLRIKEEDIPKTAFTTRYGLFECTVMSFGLTNAPAFFMNLMNKVFMEYLDKFVVVFIDDILIYSRTKEEHEEHLRLALEKLREHQLYAKFSKCEFWLSEVKFLGHVISAGGVAVDPSNVESVTNWKQPKTVSEIRSFLGLAGYYRRFIENFSKIARPRTRLLQKDVKYKWSEECEQSFQELKNRLISAPILILPDPKKGFQVYCDASKLGLGCVLMQDGKVVAYASRQLRPHEKNYPTHDLELAAVVHALKIWRHYLFGTRTEVYTDHKSLKYIFTQPDLNMRQRRWLELIKEYDMGIHYHPGKANVVADALSRKGYCNATEGRQLPLELCKEFERLNLGIVSRGFVATLEAKPTLIDQVREAQINDPDIQEIKKNMRRGKAIGFLEDEHGTVWLGERICVPDNKDLKDAILKEAHDTLYSIHPGSTKMYQDLKERFWWASMKREIAEYVAVCDVCQRVKAEHQKPAGLLQPLKIPEWKWEEIGMDFITGLPRTSSGHDSIWVIVDRLTKVAHFIPVKTTYSGSRLAELYMARIVCLHGVPKKIVSDRGSQFTSNFWKKLQEEMGSKLNFSTAYHPQTDGQTERVNQILEDMLRACALDFGGSWDKNLPYAEFSYNNSYQASLQMAPYEALYGRKCRTPLLWDQTGERQVFGTDILREAKEKVKIIQERLRVAQSRHKSYADNRRRDLSFEEGDYVYLRVTPLRGVHRFHTKGKLAPRFVGPYKIVSRRGEVAYQLELPQSLAGVHNVFHVSQLKKCLRVPIEEANLEQIEVQEDLTYVEKPIRIMEIDERKTRNRVIRFCKVQWGNHSEEESTWEREDELKSAHPHLFASSSESRGRDSV

SEQ ID NO: 169374 - protein, 94 aa, Oryza sativa
  unsure (1)..(94): unsure at all Xaa locations
  Clone ID: PAT_MRT4530_677C.1.pep
GRVGAALSLHSGRISAAAIGGGLRSRRXSPMGAVATPFLRSSFVFSSSTSSAFXXLDELFVVVLALLTFTSGSSFAGSSLGIEFNLNRVTTGRS

SEQ ID NO: 169375 - protein, 143 aa, Oryza sativa
  Clone ID: PAT_MRT4530_67801C.1.pep
MKSAGAGNFAKKSSLTLIIFLKSSIRCNPSPSPQWVGALLLKFEAPLPCGADTVSQLQIWPATDCVRTKTFREAQHLLIEVRFWTCDASGEVFGLDQPIAFRLLGSFLSMLKFHTLSASYTKRAECVEPQGCRQVVQMEPSIP

SEQ ID NO: 169376 - protein, 54 aa, Oryza sativa
  unsure (1)..(54): unsure at all Xaa locations
  Clone ID: PAT_MRT4530_67802C.1.pep
QXASXRATYSTYIARSVSESPGRLYSLAVPHSNPKGASLSIAWNRRYAVSKWFV

SEQ ID NO: 169377 - protein, 504 aa, Oryza sativa
  Clone ID: PAT_MRT4530_67803C.1.pep
MAGEEGEDEAASIELQLEHHLQEQRASLTAVDEALAADPSNADLLEVHEELLAAIKDAEEGLLHLKRSRLVKQIDEIFPNQEPTSEAPEVAVDPPDDVEPEPLEPQEFSVGSKCRFRHKDGRWYNGCVIGLEGSSDARISFLTPTSENMSMCKFFLQQRCRFGSNCRLSHGIVIPILSLKQFTPTRWQQSLVGSSILAASGHHSGLWRRAELESWDDDLKVGQVVFQDDGSSARLPSDSLSISEYADESDEDGEGSSSDEGSDFSEDGDQEDESVHQGLGLLESKNLSGVQTETAIFAKWEHHTRGVASKMMAKMGYREGMGLGVSGQGMLDPIPVKVLPPKQSLDHAVAASEVNDSVGPGKKRSRGGKRKREKKFAEQARAAKAEEEERSVFSFINSQLVGQDVAEGSAVKSKKDSSGEANGHAKKEDRRSLLAYDDEVKELRSRVEKLEEMMKRNRKDKAFYEAASKKLKQTRKALADAEATHASATNAVARKEKEKKWLKF

SEQ ID NO: 169378 - protein, 502 aa, Oryza sativa
  Clone ID: PAT_MRT4530_67804C.1.pep
MGGDPTRCVAELEMKTDSCVIDIPSLAKELRVELSSFKSSTARVVGGAAPPPCIIVDKVGESTRIHDPHEYVPQYVSIGPYHRAADLAGEAIKVKYLGDVLSAAAASSTAPMTLEDYLSELAHLEHSVRRCYVHSFDIPSREFVRMLLLDACYILVRFGDVLTPRTAAPPQPAAAAAEEVAVANGVVHAGHRVVPTEERRAAADDQQMAVAVVRDVLYLAENQIPFFVVDKVHQLTFLDGETPVLDAIARYAHDLLSWTEYSVATPTIVAPPALRPEPANLLHLLHMHFTPTVLASGKVSRGGRSVGRWRTATEYHYAGVTFKRRPLSSGGGARSILDVKVSRRGGALQVPRLSIDGETWRLLRNLMALEQSNPSAAGSHVTAYCVFMSQLACTARDVELLSRRGVIVHGLGNDGEVAGLFANLCKGAVFDFDEADQNYLRPVCQVLDRRFRSRPRRWMASLRQKYFLNPWLTAGLVAATIGLVCTVIQAVYSVLSYVKPGN

SEQ ID NO: 169379 - protein, 67 aa, Oryza sativa
  unsure (1)..(67): unsure at all Xaa locations
  Clone ID: PAT_MRT4530_67805C.1.pep
MTSRVHEDSSSWSGYCQCEVVERLCRGKSHSLGRXGHVLGKSRSTGKVYIHCSQSDEEKPLLVRLRT

SEQ ID NO: 169380 - protein, 779 aa, Oryza sativa
  Clone ID: PAT_MRT4530_67806C.1.pep
MAGDKFLQKFRLYETRSKFYLIGRDKTRTLWRVLKIDRMEPTELEIEEDHTSYTENECQELLWRIHEGNRLTGGLKFVTKCYGIVGFIKFLGPYYMVLITRRRKVGTICSHEIYSVGKSELIAIPSPIVWPNVAYSRDENRYKRLLCSVDLSKDFFFSYSYNIMRSLQKNITDKNTGQVVYETMFVWNEFLSRAIRNHLKNTTWTVALIHGFFKQSKLSVAGKEFWLTLIARRSRHFAGTRFLKRGVNEKGRVANDVETEQIVFEDTPDEIPHQISSVVQHRGSIPLIWFQETSRLNIRPDIILKPDVDYKTTRLHFENLALRYGNPIIILNLIKTREKKPRESLLRAEFAKAIHYINKGLPDDKRLKFLHMDLSKLSRRKGTNVLSLLNKVASDVLDLTDFLHCEITTSKYEDASSGQGAVANSGDIENIQDQNLCATKLVPLLLQKGVLRTNCIDCLDRTNVAQFAYGLAALGRQLHVLQLNETPTIELHAPLADDLMDFYERMGDTLAIQYGGSAAHNKIFCEQRGQWKAATQSQEFLRTLQRYYSNAYTDPEKQDSINVFLGHFQPQEGKPALWKLDSDQHYNIGRQGTLTEETGRSFIKRSLSDGNILCDNTGGPVSDCNVGKNNTSSELLPMQPLEDIREPSDSAPEISIEPNPCSSTNYSTLSGRHSISEERQNYLRRLGYPELHSSNFLDLDLLSSSGNSCEEEIYERSSLINSPMDVVSIESTTSYSEQGHNDEGRDDTDLSRSSSQMSDIRDYSDRFTHWVDGGGMLCY

SEQ ID NO: 169381 - protein, 58 aa, Oryza sativa
  Clone ID: PAT_MRT4530_67807C.1.pep
FQVKLYIYRLYIIWMLAAQLRIRKGIHVSVEGTYDSSPRKELTRSGACANGREKPSCR

SEQ ID NO: 169382 - protein, 390 aa, Oryza sativa
  Clone ID: PAT_MRT4530_67808C.1.pep
MARGWEDLPPDLLVHIAGGFSIQAYTRLRGVCAAWRDALRPPSPSLLVLRDRHAGQRFAAWCVSPRMVSTALHETLAARLSPASRCVGSGDGWVAAHVPGGAVLVNPHTGDEIPLHSFPGGGGNNVVVFKVVFAPNPTPSEFTAAAITGGGRVVYTTNGNSGWTDFKCPRLGAHGDGGSIADVVYHDHGGGKKVVYCLTAGGDVHVLRLPAGGQRRTTASLVPLFDKPAATFYPAAAFAPPYDTVRTFADSKNLAVCGDGQLYQIWRDDDANATMFVLRYHPRRRPCWLPAKDLGGHAVFIGKNNAVALRGDDGGGATPAPRANCVYWTDVWTDRAKVFDVVTGESTLCFPGAEVSFNTGYILQCFKIVFDHPINVDPMFIGGNGIGYDL

SEQ ID NO: 169383 - protein, 84 aa, Oryza sativa
  Clone ID: PAT_MRT4530_67809C.1.pep
MEPTELEIEEDHTSYTENECQELLWRIHEGNRLTGGLKFVTKCYGIELRYHCLLIKLPGFIKFLGPYYMVLITRRRKVGTICSH

SEQ ID NO: 169384 - protein, 314 aa, Oryza sativa
  unsure (1)..(314): unsure at all Xaa locations
  Clone ID: PAT_MRT4530_6780C.1.pep
NGILILRSIVLAPSRASPCRLSLLTGASSGRVVASLGSATPSPSPASPSPRRKLAGTVPPPAXQWHWCHCTPSSRLLFIAGAPIDAAVSSFDTAASPSSPASPPPRPNFAGTPSSPRRPLLPPRRLVAPLHHHLHQHRSGVFHAVPSSAQPLLPAIIVSSSSPIVLVXRRPIGRPARRLAAPPPSSSSLRRVPRRPRLRAAVAGCPRRLLAGCPRSLLAGPGRRRPRPLVVPDRRGVRPSVKPFSFVVXLRQDRCSPVLVFVLGSASSSLVPAASRLRPRIAAEAVPSPFVSVAPVCLRRARSSLSFPRLVAWW

SEQ ID NO: 169385 - protein, 185 aa, Oryza sativa
  unsure (1)..(185): unsure at all Xaa locations
  Clone ID: PAT_MRT4530_67810C.1.pep
SFSHFYCLRIFIFLPFTFCRYKRLLCSVDLSKDFFFSYSYNIMRSLQKNITDKNTGQVVYETMFVWNEFLSRAIRNHLKNTTWTVALIHGFFKQSKLSVAGKEFWLTLIARRSRHFAGTRFLKRGVNEKGRVANDVETEQIVFEDTPDEIPHQISSXLYKHRGSIPLIWXFQETSRLNIXPDIIL

SEQ ID NO: 169386 - protein, 452 aa, Oryza sativa
  Clone ID: PAT_MRT4530_67811C.1.pep
MRKEKIPHQAPFAIQAAQLLGRAIGAGLFAITPAGERGMCCKAIKLVLSAIYRKGTNVLSLLNKVASDVLDLTDFLHCEITTSKYEDASSGQGAVANSGDIENIQDQNLCATKLVPLLLQKGVLRTNCIDCLDRTNVAQFAYGLAALGRQLHVLQLNETPTIELHAPLADDLMDFYERMGDTLAIQYGGSAAHNKIFCEQRGQWKAATQSQEFLRTLQRYYSNAYTDPEKQDSINVFLGHFQPQEGKPALWKLDSDQHYNIGRQGTLTEETGRSFIKRSLSDGNILCDNTGGPVSDCNVGKNNTSSELLPMQPLEDIREPSDSAPEISIEPNPCSSTNYSTLSGRHSISEERQNYLRRLGYPELHSSNFLDLDLLSSSGNSCEEEIYERSSLINSPMDVVSIESTTSYSEQGHNDEGRDDTDLSRSSSQMSDIRDYSDRFTHWVDGGGMLCY

SEQ ID NO: 169387 - protein, 294 aa, Oryza sativa
  unsure (1)..(294): unsure at all Xaa locations
  Clone ID: PAT_MRT4530_67812C.1.pep
MEEEKAAAYYDELSRKGEGARRFKQGLGFSSSDPQSTSFPSKPPSTSSSFLSGFVRAGATPAPAQPTKQPPPPPPPPHEPSRTGRHSRSPSPSRRHRTRSSSPSRSRRHRSRSRERRRRSRSREREREDRRASRRRSRSRSRSRSPSRRSGRSSYSENRHGDRRRDDGGGRRGSSKGRGGREGDSTLGNATVGWERFEFNKDAPLDEDDNDVEVXKHEDTVRDAHENAIFGVPAYPIVDTETTEAEPETNDESEKAKDVEAEPSSSLISDKVXGNAKRVMERKSSEITAESKCV

SEQ ID NO: 169388 - protein, 146 aa, Oryza sativa
  Clone ID: PAT_MRT4530_67813C.1.pep
MARLRGHERLKLTSMAEGVRDLSIFRGKKFGGDRALCEEDADGLASWLQAQTLSASPTARFNADHVSSPGEPQRQAIDPAARLAAGCDVVELNTLAMVLPYVSLRTSAVLEEEEEDDPRKTQCREQGRANRSIPRSSTWHPSGAGL

SEQ ID NO: 169389 - protein, 243 aa, Oryza sativa
  Clone ID: PAT_MRT4530_67814C.1.pep
MGVPSPPPPPPSSCLSHGLLRRHHRSGSSAAATAYSAAGSFASASAFTDNTEANLAAPKEEHGSGRHGDGGAEEEHGGAGAEEKHGDDMEEEHGGGGSGFLGDRIGTAQYKLYQPLDRGSMSRSNGNGGGGGGSTRGARLELQLNLSPPAVGMEVDGNDDSDSSSPTSCVSSDGRSSAGGSPGDKSPMVIGACTRCLMYCMVAKKDYPTCINCKQPSLVDLLQNQDAAAADADADKKRGGKRK

SEQ ID NO: 169390 - protein, 259 aa, Oryza sativa
  Clone ID: PAT_MRT4530_67815C.1.pep
MGVPSPPPPPPSSCLSHGLLRRHHRSGSSAAATAYSAAGSFASASAFTDNTEANLAAPKEEHGSGRHGDGGAEEEHGGAGAEEKHGDDMEEEHGGGGSGFLGDRIGTAQYKLYQPLDRVRSNGQDFGTGRYWYRPLMSRSNGNGGGGVWSTRGARLELQLNLSPSAVGMEVDGNDDSDSSSATSCVSSDGRSSAGGSPGDKSPMVIGACTRCLMYCMVAKKDYPTCINCKQPSLVDLLQNQDAAAADADADKKRGGKRK

SEQ ID NO: 169391 - protein, 168 aa, Oryza sativa
  Clone ID: PAT_MRT4530_67816C.1.pep
MNDFTIEDHALSNTQAHMSGSGVEMPIPLVKRNRMRRNRSRKRSRMKVARRTGANEGIQRWIGRSRGLTAASPPVHRHCHCCLLPTATAKAFYLSPSPPLLPFGASHSFAKVCTIEAKARNKPATHSPLPKPYSPTLPPCSLPQKHRFNVVHTQPTWTGATDVVFFAL

SEQ ID NO: 169392 - protein, 340 aa, Oryza sativa
  Clone ID: PAT_MRT4530_67817C.1.pep
MADMTLSESAAPSVDNMATGPQINMGDMDFDLKSSLITMTQASPFCSKPDDDANANLQQFLEICSTYTMKGVNPDAVRLRLFPFSLLGKAKQWFYANFATTNTWDKCSTAFLSKFFPMGKTNALRGRISSFQQTRDESIPEAWERLLEYVAACPHHGMDDWLILQNFYNGLTPTSRDHLDAAAGGAFFSKTGRGAVDLIEKKDLVFAQTKTTDALSKKLAANDKTLENINVKLDGFASAFQDQLSFNKMIETRLAQLAALVPANESGRILGQPKSSVENVKAITMRGGASHTREAPSDNTVNEEVQPEKTLPQEYCDTRLLPFPQRYKKPLVDEQFARFV

SEQ ID NO: 169393 - protein, 104 aa, Oryza sativa
  Clone ID: PAT_MRT4530_67818C.1.pep
MSCANEVSLERQLNDRQSGTGHLWKGVVVAGPKTTGVYCPVHIRNDSLPVPVPVRLPYRVAASGTGAAIDRSIQAAMRPVSRPRVLLSQVGQNFSESRGQLLIA

SEQ ID NO: 169394 - protein, 115 aa, Oryza sativa
  unsure (1)..(115): unsure at all Xaa locations
  Clone ID: PAT_MRT4530_67819C.1.pep
SPSGXXXDXVXHCTVGXXFFXFXPXMAPXGKVIDITPNFSAMPHLGAAXCDPXAEXXGAALLSXNXAXLEFFVWLXGERNSRRWWXPRGAXTNSXYNXSYYIHWAVVYKPPXXGK

SEQ ID NO: 169395 - protein, 583 aa, Oryza sativa
  unsure (1)..(583): unsure at all Xaa locations
  Clone ID: PAT_MRT4530_6781C.1.pep
MEALVAAAAAAARDQPWLLLPWSWLAGVVVVVVYFYAPWWGVRRVPGPAALPVVGHLPLLAAHGPDVFAVLAKKYGPIFRFHLGRQPLVIVAEAELCKEVGIRQFKSIANRSLPAPIAGSPLHQKGLFFTSVMRERLRCRDARWSAMRNTIISLYQPSHLAGLIPTMHSCVARAADAIAAAEQRDVDFSDLSLKLATDVIGQAAFGVDFGLTAAAAAAPRSDDADADGGEAAEFIREHVHSTTSLKMDLSGSLSIVLGLVAPALQGPARRLLSRVPATADWRTARANERLRARVGAVVARRERAGGEARRARRDFLSAVLNARDGGSDRMRALLTPDYVGALTYEHLLAGSATTAFTLSSAVYLVAGHPGVEAKLLDEVDRFGPPDAVPTADDLEHKFPYLDQVIKEAMRFYTVSPLIARETSEQVEVGGYTLPKGTWVWLAPGVLSRDEAQFRDAGEFRPERFDAGGEEERRRHSYAHVPFGLGPRACPGRRFALXQEVKLAMAHLYRRFVFRRSPRMESPPELQFGMVLSFRRGVKLTGPVFHITTKPAALLVGKLLSPLITSECQNNRFLKKRISFGYCG

SEQ ID NO: 169396 - protein, 248 aa, Oryza sativa
  Clone ID: PAT_MRT4530_67820C.1.pep
MASTVALKGRPLATLLRQLLAADAPPAATGRPVAAAPAASGKPVTAPAAATATNAASRRLYNTEGAPLRRYDVVDESGTDSGDEYDATDDGRRLTVPFFFSASDVLDPFGAPTSLGRLLALMEDAAVATAAAPGTNGLATAAARRGGWWVAKEDDDAVHLKVSMPGLGKEHVKVWAEQNSLVIKGEGEKDPEDDADAAPPRYTRRIELPADAFKMDKIKAEMKNGVLRVAVPKLKEEERKDVFQVNVE

SEQ ID NO: 169397 - protein, 187 aa, Oryza sativa
  unsure (1)..(187): unsure at all Xaa locations
  Clone ID: PAT_MRT4530_67821C.1.pep
ASPPLRNLLHPLLQESRGLQKAAHPDTSGRAFPPPLQLPPQESQSARNKGEERERERERERERESHPWLPPSPSRAARSPPSSGSSSPPTRRPPPPGGPSPPLPPPPGSPXPPPPPRPPPTPTPAACTTPRARRSAATTSSTSPAPTAVTSTTPPTTAAASPSPSSSPPTTCFTRSARRRAWDDCCT

SEQ ID NO: 169398 - protein, 29 aa, Oryza sativa
  Clone ID: PAT_MRT4530_67822C.1.pep
MKIIFFFALLAIAACSASAQFDAATHVYR

SEQ ID NO: 169399 - protein, 378 aa, Oryza sativa
  Clone ID: PAT_MRT4530_67823C.1.pep
MPVPVGYGYGHGVLLANPSGVAVEPAKVNVVYGGSRKENRGLCGPGKKQDVLTLRGDTGGNPAAAAVPPPPPSFYLAAARAGRQKPRGRKDGGGGASSPRGRGVRSPRPRPSFGAATSAAATSSSTVAHGFGEVAVPTTVEEMGDRADDEKAVLAPTLSCADLVRGDGSRAAGGGDARGGGGMAGSGTLLSGSGAGGRAPTPGSEAAGARGAGRRWLKAAGMAMAAGTELAEGAEAAAAVPWLRRRGAWRLRRWCPPKSAPLGRVWRVAAVGDGGGGVAMAAAVVDVVAAVSTGGGGDGRHGVGQLAARCWRTTAHHQFAKPVVGVGGSDDGGCDSEGGGDVGGREGVGCEVAGCSAAAAAVVVTVFAVTGVMAASVD

SEQ ID NO: 169400 - protein, 288 aa, Oryza sativa
  unsure (1)..(288): unsure at all Xaa locations
  Clone ID: PAT_MRT4530_67824C.1.pep
RSFRVDPASDIVSLERVQPCLDHVRHRYVLAEAGDTLFXATFIGTKHYKDIIADVNILQGTVFHEDTAQDLAGAVECVQNDDQKGEENLGTSYREKSKQLRKSKPAAHRGFLARANGIPALELYKLAQKKNRKLVLCGHSLGGAVAALATLAILRVLASSSPSKEPDRLQVKCITFSQPPVGNAALRDYVHRRGWQDYFKSYCIPEDLVPRILSPAYFHHYNAQTPDNTNAKSDEENDAKSVCSKENNGEQLVLGVGPVQKSLWRLSKLFXLEGVRKSLSVLQKQPIF

SEQ ID NO: 169401 - protein, 92 aa, Oryza sativa
  Clone ID: PAT_MRT4530_67825C.1.pep
SVPKLPRMINLVDRKVTNLSRPKKRASYASTSYISFSAISAVKLLDMPLLCTKISPHHQEFRRTQVAPVMFILSIFVLDTREEEPTVVICSW

SEQ ID NO: 169402 - protein, 39 aa, Oryza sativa
  Clone ID: PAT_MRT4530_67826C.1.pep
MYAMRGRNGADISALRRLNQAIYLLTTGARESAFRNIKT

SEQ ID NO: 169403 - protein, 216 aa, Oryza sativa
  unsure (1)..(216): unsure at all Xaa locations
  Clone ID: PAT_MRT4530_67827C.1.pep
MSKKRREGGGGGNGGCDPPVTDALSMDSGLREVSLSVVFSVWCLLLLRSQCHGSINVMSPWRLIDLFFVDFYDDVEDGMRENYCKGKAANGRIPDGAAAHRLEPSGAEYNYAAASKGXAKVLAHNREAKGAANFLGATLLRRLCRLISSAATQLRRHAPPPPPLLRRHTAPPSAPTSAPPHSPHLADRTRRPPVPAFVLAVRERKEGGIRHGAVRA

SEQ ID NO: 169404 - protein, 212 aa, Oryza sativa
  Clone ID: PAT_MRT4530_67828C.1.pep
MAAAARTHHRDNTSALSSASVSSVNTSVSSTPKGSSAATRPRTPAITRSIPAMAAAAWTHHRDRTQALHVFGSVAAAGQPNVLSLSRRLAVVHQSLALAPNSPSPSPATLHPFPSHRHLAIPVSCRPPSLPICFLRPSGGTSSSSKSSMWVAISAITPLPPCGASSSYCSGRCQPSSSYKEKNDFGSDKALSALGVPSRSSLRFLGSLVKTA

SEQ ID NO: 169405 - protein, 935 aa, Oryza sativa
  Clone ID: PAT_MRT4530_67829C.1.pep
MHLSLWKPLANCATLLKNRPPRPPAAGGAAGGSGRRLQESKLREALEEASEDGSLAKSRDAALLDDGGGGGDGGGEEGSGVGRSRSLARLNAQREFLRATAVAAERAFLSPDALPALEEALATFLSMYPKYSSAADVDRLRADEYPHLDKVCLDYCGFGLFSYLQSCNPSDSTASFTLSEITANLSNHALYGAAEKGTCEHDVKARIMEYLNIPESEYCLVFTVSRGSAFRLLAECYPFGTNKRLLTMFDHESQSVNWMAQSARDKGAKAYTAWFKWPTLKICSTELRKLISTKKRRRKKDSATGLFVFPVQSRVTGAKYSYQWMALAQQNHWHVLLDAGALGPKDMDSLGLSLFRPDFIITSFYRVFGADPTGFGCLLIKKSVMSCLQSPNGGTGTGMVRIMPVFPQYLSDSVDGFDGVLDGLEDDTIIPIEEGSASNSLHATHLPAFSGAYSSAQVREVIEDEMDQDSSDRDGASTIYEENESVSVGEVMKSPVFSEDESSENSFWVDLGQSPLGSDHSEQSSKGKLGSPLPASWFSGRKNVKKTSPKVLSKLRRSPIPDNHVVSFDAAVRSVSQELEHGKDFTEEDCSQNGIKNVVPIKVSEIEEDQDGKQNKRFVKFSCANGPAEGSSTSVFGGCTARGNGSTSEICSEAKDSAIRRENEGDFRLLGRREAHNSRFNGGRFVGVEEAERVSSMGRKVSFSMEDSRLCRNSETAETSGYAMGDEDDDEEYSDYDDIQDGRREPEIICKHFDHVNQLGLSKTTLRLRYLINWLVTSLLQLRLPDSGDGEGVPLVYIYGPKIKYERGAAVAFNIKDCSTGTSLINPETVQKLAEKEGLSLGIGFLSHIRIMDNQKQGVVDVGLSSSLCRPTSNGRREKKSSKNDIIGIEVVTASLGFLTNFEDVYRLWAFVAKFLDSSFLEQQRLSSIPEDSER

SEQ ID NO: 169406 - protein, 105 aa, Oryza sativa
  unsure (1)..(105): unsure at all Xaa locations
  Clone ID: PAT_MRT4530_6782C.1.pep
MASAPFPQAAQLGYKPNVFSFWILSLQLELLQTLLNLFSTKTLSGTSETVQRTTTDDDXRWPATRFDCGSARVPDGDGAPMVFSGCEGVDGVPLLRAHPTEATDG

SEQ ID NO: 169407 - protein, 747 aa, Oryza sativa
  Clone ID: PAT_MRT4530_67830C.1.pep
MALTQEMRRRRLRLLTTKFGNISIGDEDGIEAESNIRVVAETEIFYVNYLEINVGKSLPQRLMKYKVKVVPDDPGIGSFKEGEKKQVPDGSAQPSDKGVTDGSTQENQGDYFREVHGVQGDGTQGPQRGNLNQNDNAFQDFFNNFQDRVDYAVYNALINQSGVLTNTLSNMMKSVADGSIAEHQAAGPVYLQGGTFPNYRTLITDVHPLTQGVPPVTSSAQPTVPASAPAPAVPSSASGQLVNPQILVREQSQHPGPNVTQITQDPVASMFLPPQNAINSAQQQPNQQTPPRQQVVQPIQQTSPIQQVVQPVQQTPPRRPALQPIQQTPLRQQVVQPIQQQASMNASAGFAMPGAEPSQLPGGNLSYQYQPPSPQVQYQQAGSVQPQFYNQFEPTPQQPQGTPQQRPWADVIADVMREQFGLKPKETGNLYRQPYPEWFERVPLPNRFKAPDFSKFSGQDTTSTYEHISRFLAQCGEASVVDALRVSGINEMKLSDLTSIKQKHDEPVREYIQRFRKMRNKCYSLSLTDAQLSDLAFQGMIAPIREKFSYENFESLSHLTQKVALHEQRFAEARKNSREINHVYPYMYGSDEEDDDSEIAAAEWVRSKQVIPCQWVKNSGKEERYDFDITKADKIFDLLLREKQIQLPAGHTIPSAEELGKKRYCKWHNSGSHTTNDCKVFRQQIQTAIEGGKIKFDDSKRPMKVDSNPFPVNMVHTAGQSADRVRAKGFQVNSAKIINKYQRKYDK

SEQ ID NO: 169408 - protein, 75 aa, Oryza sativa
  Clone ID: PAT_MRT4530_67831C.1.pep
HHLHLSPVSNYSVSQPFGFQWCPFSGCHPASIVYLSKHVSSYLICMGLVYALMIYKPRARYLVIVLILVKKKKKK

SEQ ID NO: 169409 - protein, 88 aa, Oryza sativa
  Clone ID: PAT_MRT4530_67832C.1.pep
RPGSSADRRHNTRIMASLPPPETVSIGETNRNLTCGRTRCSTHGTHRCLLACIQNGLPTYSIPTMGDCSHATSLQLGLKLLPLSPERH

SEQ ID NO: 169410 - protein, 133 aa, Oryza sativa
  Clone ID: PAT_MRT4530_67833C.1.pep
CRSPRTSSTSSSRGSPSTCWSARAASPTRGGAGGSPCATSTSASAGAAAARPPPATCGGARRPSSASAPASTPATSTTCPPGSPPWRARASGSSPSSATGCAAATPTPRRTGSSTRAFFSCAALAVLHLEDCD

SEQ ID NO: 169411 - protein, 120 aa, Oryza sativa
  Clone ID: PAT_MRT4530_67834C.1.pep
LRLLGGETRAAAPLSPPRRGESGRRGARGGRRAGRRVRGRPPRRGDQTLREIRSETLAANPHTTRRSGERGHGGGGGGGGEGQGALGLAGQRRGGLGVQLQADEGWWSVCCIHLRDAQLW

SEQ ID NO: 169412 - protein, 35 aa, Oryza sativa
  Clone ID: PAT_MRT4530_67835C.1.pep
GLVILNFTFSMEVVLQLIWPQGSRHVTDNITSCSG

SEQ ID NO: 169413 - protein, 164 aa, Oryza sativa
  unsure (1)..(164): unsure at all Xaa locations
  Clone ID: PAT_MRT4530_67836C.1.pep
RGAARRRQRERAAGRRRWPRACGRAGARSQEVDSPPLLPPHGTVPRRAATGREALAARTRLRLRLVLPPLAVLLLFALLAVAVARARGRGWRNHEXEEESNLRLPSERGVADDAVAEDDAAEDTRWAVLIAGSNGTHRTNPAPGPHRCSPTTHRPHLIPGPTCH

SEQ ID NO: 169414 - protein, 80 aa, Oryza sativa
  Clone ID: PAT_MRT4530_67837C.1.pep
MKAKGSGRGGKLWIFVSDFIDAGALSSLLQGGSGAGRRLHVAGVALAAPRGVAFIYGAGAGASSSEMLARRRNRGREEGG

SEQ ID NO: 169415 - protein, 388 aa, Oryza sativa
  Clone ID: PAT_MRT4530_67838C.1.pep
MDAGGEEAKQERHLVLAHKLFLLSHPDLDDLAKVALRSDALDAVKSDGMAPLFESLAAAGVLEPDDALLAEMRARIDEEVRKLDEKIADAEENLGESEVREAHLAKSLYFMRVGEKEKALEQLKVTEGKTVAVGQKMDLVFYTLQIGLFHMDFDLISKSIDKAKNLFEEGGDWERKNRLKVYEGLYFMATRNFKKAASLFLDSISTFTTYELFPYDTFVFYTVITSIITLDRVSLKQKVVDAPEILAVIGKVPHLSEFLNSLYNCQYKSFFVAFSGMTEQIKLDRYLQPHFRYYMREVRTVVYSQFLESYKSVTMEAMAAAFGVTVDFIDQELSRFIAAGKLHCKIDKVAGVLETNRPDARNAFYQATIKQGDFLLNRIQKLSRVIDL

SEQ ID NO: 169416 - protein, 35 aa, Oryza sativa
  unsure (1)..(35): unsure at all Xaa locations
  Clone ID: PAT_MRT4530_67839C.1.pep
CRSPSVPSPREPSRCXTRHHPHCTLGRAGRVLPKL

SEQ ID NO: 169417 - protein, 52 aa, Oryza sativa
  unsure (1)..(52): unsure at all Xaa locations
  Clone ID: PAT_MRT4530_6783C.1.pep
MAAVDKVNSRDDVSEGHKTDNVEDGNVGMTDANDXVAAMEGEDDEMDAGDGS

SEQ ID NO: 169418 - protein, 72 aa, Oryza sativa
  Clone ID: PAT_MRT4530_67840C.1.pep
HRPLWPVNLVGKLHRSNPLTVVEVQMLPASKGRSVMLEILLEVVSQAMELPNQGQPQLLNLLQSAPTKQAKG

SEQ ID NO: 169419 - protein, 250 aa, Oryza sativa
  Clone ID: PAT_MRT4530_67841C.1.pep
MSTDLTIPPSMEAPGADIQALIQRLRLHRPRPSPYAAAAAPSPDAAAPPAELLFRPRRAAVLICLFRGAAGELRVLLTKRSSKLSSHSGEVSLPGGKAEEGDADDAATALREAKEEIGLDPASVTVVASLEHFLSKHLLVVVPVVGILSDIQAFKPVLNVDEVDSIFDVPLEMFLKDEKRTSEEREWMGQEFTIHYFNYEKGSEKYVIWGLTAGILIHAASVVFQRPPDFPARTVQFNLPKYSKECSSMP

SEQ ID NO: 169420 - protein, 68 aa, Oryza sativa
  Clone ID: PAT_MRT4530_67842C.1.pep
YAAVHQALSASTAAPVPRPHRAELLHRAAPKNGVPHILLMLCPRAAGIFPVLSTASSSAILVVPKDLS

SEQ ID NO: 169421 - protein, 86 aa, Oryza sativa
  Clone ID: PAT_MRT4530_67843C.1.pep
MNIALLRRSETRAEKSGGGGESEGRPEGDLPLRGGRLQNHHGTPPTGCHVIEDKELVGARAQRGARRPGRGQAIGAGFELKLKLIV

SEQ ID NO: 169422 - protein, 155 aa, Oryza sativa
  unsure (1)..(155): unsure at all Xaa locations
  Clone ID: PAT_MRT4530_67844C.1.pep
MARRPAPWEQGGDEYDYLFKIVLIGDSGVGKLNLLSRFTRNSFSLDSKSTIGVEFATRTIQVEGKIVKAQIWDTAGQERYRSITSAYYRGAVGALLVYDVTKATTFENVNRWLKELRDHADSNIEVXLIGNKIDLKHLRSVSLEDATSFAEREGL

SEQ ID NO: 169423 - protein, 241 aa, Oryza sativa
  Clone ID: PAT_MRT4530_67845C.1.pep
MARRPAPWEQGGDEYDYLFKIVLIGDSGVGKSNLLSRFTRNSFSLDSKSTIGVEFATRTIQYYCFPKGPLLNCFNFVTQVEGKIVKAQIWDTAGQERYRAITSAYYRGAVGALLVYDVTKATTFENVKRWLKELRDHADSNIVVMLIGNKIDLKHLRSVSLEDATSFAEREGLSFVETSALDATNVDKAFQTVLTEIYRIISKKALAADEAGAGAGAVREGQSIQVSATDSSSFTSRCCSF

SEQ ID NO: 169424 - protein, 59 aa, Oryza sativa
  Clone ID: PAT_MRT4530_67846C.1.pep
LAAWYSLSCSKCSLILPLLSTPKLSPISPVAHKMPPLFGVHPRYFGAPYIVAPCQIGSW

SEQ ID NO: 169425 - protein, 121 aa, Oryza sativa
  Clone ID: PAT_MRT4530_67847C.1.pep
NFKDFEGFFNPFFANFFQGLWPVLSGGLVEAFFPPAGGKGFGPKFERFVLARNLLLIRVSSFFFALVFFFFWVFKNFFVFFLPLFFLGSFFYFKICFWSFFSKKIKKKKKKKKTGKKSLFF

SEQ ID NO: 169426 - protein, 73 aa, Oryza sativa
  Clone ID: PAT_MRT4530_67848C.1.pep
NHPESLLTRGTKKFGGAQNPGNEQNPLQKQKGPGSPSLREPKGLKTPFPWKPQGPHEFQKILPSFKLEKKKGL

SEQ ID NO: 169427 - protein, 94 aa, Oryza sativa
  unsure (1)..(94): unsure at all Xaa locations
  Clone ID: PAT_MRT4530_67849C.1.pep
LPLSPPHRLPRCPICHHQPPPPNHKIWFAPVANVGPPRSSIPAAWTPPPAPCCPPVSTAHRXATASHGYPSKSADPPSSPFPHPFSHPHLYPGP

SEQ ID NO: 169428 - protein, 1132 aa, Oryza sativa
  Clone ID: PAT_MRT4530_6784C.1.pep
AAGREESFSLESSGPPAFAAIIRLTPDLVDEIRRAEESGSGARIKFNPNMYNSSENIIDVGGKEFKFTWASERGELCDIYEERQSGEDGNGLLLECGSAWRKVNVQRILDESAKNLVKMRSEEAERLSKSRKSIVLDPANPSVKSQAKSMAAAAVEGNMRRMNWKQKKEFYKKNPAAVIAPTKSVSKVKLSNSVPKANFSTSPALSPEQPGPSIPSVPTGSDVNNEVITPFDLNKDENSKVEKSTPNRVSQGTSRRASVVSASTDDNTNELRSLLISVLSENPKGMNLKGLEKAVADVFPNASKKIDSIIKNIAIFQAPGRYLLKPGLEAESSKRSIDDNTEEAGPSLKMDDPDIFERIDIGGSPVSAARDEKVNNDSDGKAGSSSESGSGSDSDSESSDSGSDSGSQSRSAASGSGSSSDSDSDASSSSKEGSDAFVDITSDDDKGGAHRKAADELKLSSLPRDLTALDGDDELIDIGTNLDYKSASPHIDLNNFNDNNNESAYTAVPTDSFDASHLEKPPEIPGSKNMVNTSIDPSRIDSKYAANEMSYEDLFGDPLAPSSENLPKEETSQSTKHHGSRRKSVSKDGSNHGQDRINEKGAKPKLKRCSANENSSVMSGSAKRAKADYLGTTSSLSEQRQTLPLDKHVNEKLSKETGNVSWDAHSDLHAHDSSPAVKVRHLASGNLQKINQSPNVLNQAMHSERTQDKVEKSISKKKADKVQKPWNSLDGNLGRVSHAEDPYANFDDSDDSATRKKARYGGTQVEDKMLSRSKDANIDVNSMVSAKSAKGNVGYDGVMPFPDSNESNGQPSNLQRNNAESSPHGKKVLQRELSDLELGEFREASLENETGRAKKQFERNSSSKSLDGKLANVILHSQYGKQKGFSILFSRSEETITSRIWYWRPQQRGNVPQSQQLSKPDNPVPVVILHPDQPGEKPGKRETRVQVGMLDQVGPKKIGKTTPKLPQNGSRNAIGSRTQKSISPAENEERSRNNSLIENDASRKRRDSSSDEDNLFFSKYDKEEPELKGPIKDFSQYKDYVQEYTEKYKVYSYLNIQIEKTRSEFLKVQEDLNVAKERDKDLYYNIMERIRDMYHESGTRHKLMKKVFSLLHEELQTIKRRIKDFADSYSNE

SEQ ID NO: 169429 - protein, 83 aa, Oryza sativa
  unsure (1)..(83): unsure at all Xaa locations
  Clone ID: PAT_MRT4530_67850C.1.pep
SLXLWPSQNAGSSGYELGTAGSDSSYGGRAVGAMERHGQAQRRVAAWAGGAAYGRALRRCGLLYDGSLYFACFFSNPIDCRVN

SEQ ID NO: 169430 - protein, 146 aa, Oryza sativa
  Clone ID: PAT_MRT4530_67851C.1.pep
MSAATGSDAKSQVAGEGNITTTNKVGEQAISGQIQAYSYLMTFPHRTIIGMDMLMISNNVTSLMPIGQDGLMSLGPALAMTHTPIPMIIPWGNVMRRFYIIYGVHVHCWFIYLFTDFVTGDTATLSRYLTFRITPSGSRHLELAET

SEQ ID NO: 169431 - protein, 119 aa, Oryza sativa
  Clone ID: PAT_MRT4530_67852C.1.pep
TREELVSSFFFFFFFFFFLGAWTASTTVLLQYYKRTIGRRRETHHFFTYIIRAKQKFQTTNLLLLYGCMRDIRIQTPVEPVWVTLPTSTIWWLDTSGLWHGMASPCHQITRHAQVGKQS

SEQ ID NO: 169432 - protein, 166 aa, Oryza sativa
  Clone ID: PAT_MRT4530_67853C.1.pep
GRDPSHPSIVYNEASSPRSRRDGTSFPYEISCAIAACHDSARLEALTQTYTRYQLQSHLLLQEQALSPCTYDLLQQNRIEAAPFWNSAYEQCAIHPRDASIGSATASRSQDYNLTNNPLLVVRRIVHQLQLQQDPAVYCDPTPAQAQALLVSNLPSICGIYPNYYI

SEQ ID NO: 169433 - protein, 1031 aa, Oryza sativa
  Clone ID: PAT_MRT4530_67854C.1.pep
MTEGVVKFAVDKLESMAAQELKLQTEVGKKVLELRHELEWLRTFLRDADRKRRGSSSSSATGGAAAAAYDELIEVWVRQTRELAHDAEDLLEEFVHRGELHCHGCFDLPSFLRWLRHSAAGVFARHAIFDGIEDINKRIEQMKQQRKECNLEKLPCASKPHRKKYTDWSSLTELEIEDNLVKIGDYDEIKRLVLDQSRQRTVINLTGKSGIGKTTLASYLYRRSSIRKHFACTAWVHVPRKFRFADLLHDVIRQANASSGHDDDELAAAAADDDVRRRGGMEAERLVKARLAAALQGRRYLVVLDDVRSREEWAFFLAALPAGLAGSCVLVTTQVKISEESAAEQSGGVVRTRELGKLRPEQAAELFRRRVYGHGEPDPKKMEQLKKVVDSMTKGSNLPLNIVMLAGLLRSKKEDEWDAVIHSLDDTPPPPTSPEQMPPEKDSLDDIAPAAASETAPTSTEQTTKKKMKGKQMATSMDKILTVCMDDLPTHLKPCFLYFAGFTAQTPICAGKLVRLWVAEGFMQAKNGQTVEEHGEECLKELISRCLVQLVETDAAGGRVAAVSVHQAVLDFAQAEARDTNFLHVHSGAAGLSNGAARRLALRNTYDTDLAVMLEAPKLHTLLCDIPERAADAAGAAAWQRALELINGRAPTFSVHGSRFLRVMDLKGVRLPHRESLPEEIGWLIHLRYLGLSHTAMRHLPSSVKRLRNLQTLDVSRTDVEALPWRLWRNPSLRHVMARRLAAWSAPDERAVLPDLQTLHGVPWGRWARSGGGGAIGKMTSLRSLMAWNVSAAAAAGGGGGERLSSALAGLECLRSLDLEAADDAATTLPLWDLLTMLGLRQLEYLTLRGRVAPWNPPPPETTTTPTTPPPLQGHHHHHHHYLLPNLAKLELHRSECDQPLIDAIAKLPNLAELVLDEASYVKPYMRFPAAGFPKLRKLQLTSLDKLTECTAAAAAAGDGGGGALPQLRHVSVFHCGKLNTFPVKMAPKLELLTIHDSEELKNFMDCNQDNEHIHVVHGKMSKRRVMTAPK

SEQ ID NO: 169434 - protein, 309 aa, Oryza sativa
  Clone ID: PAT_MRT4530_67855C.1.pep
MATGLSGGAMTSFAVKKPLLAAAVRRRSWPPPSGRALPFSPLTRTPRSRGLGTVTCFVPQGTESQQAPAPSPPPTVPVPVPSLEEEAAAAAARRIAERKARKLSERRTYLVAAVMSSLGFTSMAVAAVYYRFHWQLEGGDVPMTEMFGTFALSVGAAVGMEFWAQWAHRSLWHASLWHMHESHHRAREGPFELNDVFAITNAVPAISLLAYGFFHRGIVPGLCFGAGLGITLFGMAYMFVHDGLVHRRFPVGPIANVPYFRRVAAAHKIHHTDKFEGVPYGLFLGPKELEEVGGLEELEKELARINRSL

SEQ ID NO: 169435 - protein, 88 aa, Oryza sativa
  Clone ID: PAT_MRT4530_67856C.1.pep
VSDSGAGRSLAPSLLLMERNELSPWARTTGIIMTIGLLVSELFQMPLLTGCPPPPLYYHSLDSVLDLTFLKDPSFTSLPFSLLCVVIT

SEQ ID NO: 169436 - protein, 82 aa, Oryza sativa
  unsure (1)..(82): unsure at all Xaa locations
  Clone ID: PAT_MRT4530_67857C.1.pep
NSFTAMPTANGDSSDDAAKKRKMRRLLANPTMVVLXPEVAIIDASGNASGGGSGFKASCAQALVMLEQRQVRVEQLGGGEKP

SEQ ID NO: 169437 - protein, 102 aa, Oryza sativa
  Clone ID: PAT_MRT4530_67858C.1.pep
DRLGCHVGGMVSVNQYCGKRLIRPFNRRRRFRLMGRIIHCDHKAQSTEQLSGPLAIFYSSTASKFRQLGTKSATAAPYRCPHRHRHHSYPLPPPLPTATLAK

SEQ ID NO: 169438 - protein, 369 aa, Oryza sativa
  Clone ID: PAT_MRT4530_67859C.1.pep
MAPSSSAQTATSPLPKLPTARTGSSHRRGGAPRGGGEAAAAAAVAPMASISVPNPAPSPTEDAESIRKAVQGWGTDENALIEILGHRTAAQRAEIAVAYEGLYDETLLDRLHSELSGDFRSALMLWTMDPAARDAKLANEALKKKKKGELRHIWVLVEVACASSPDHLVAVRKAYRAAYASSLEEDVASCSLFGDPLRRFLVRLVSSYRYGGGGVDGELAIAEAAELHDAVVGRGQALHGDDVVRIVGTRSKAQLAVTLERYRQEHGKGIDEVLDGRRGDQLAAVLKAALWCLTSPEKHFAEVIRTSILGLGTDEEMLTRGIVSRAEVDMEKVKEEYKVRYNTTVTADVRGDTSGYYMNTLLTLVGPEK

SEQ ID NO: 169439 - protein, 76 aa, Oryza sativa
  Clone ID: PAT_MRT4530_6785C.1.pep
MDPPTPSHLLPPPPSDHLPQLRGAGRLPPTAEGRRLPPSNRLMPPPAAEGAWATCLPPSPRIGAGLNGCWDDERAR

SEQ ID NO: 169440 - protein, 70 aa, Oryza sativa
  Clone ID: PAT_MRT4530_67860C.1.pep
EVYQRLPAISAAYKNMSTEQLIALQKNEGKKIISAVACYIHFFLGNEFKLGQHGYTWPKACYIHLLTASS

SEQ ID NO: 169441 - protein, 489 aa, Oryza sativa
  Clone ID: PAT_MRT4530_67861C.1.pep
MAPSSSAQTATSPLPKLPTARTGSSHRRGGAPRGGFFKPPGKKRRRRRQLLPRAHRPEKQQLMHVREPLPPPPRGPRAAAAASAADLRVQPRSSQGRAGSELDGSGSGRPRQAAPLVLRSHRRPNRLTRSEGKGRDPPPPSLQPPGFAGGCSGGGGEAAAAAAVAPMASISVPNPAPSPTEDAESIRKAVQGWGTDENALIEILGHRTAAQRGEIAVAYEGLYDETLLDRLHSELSGDFRSALMLLTMDPAARDAKLANEALKKKKKGELRHIWVLVEVACASSPDHLVAVRKAYRAAYASSLEEDVASCSLFGDPLRRFLVRLVSSYRYGGGGVDGELAIAEAAELHDAVVGRGQALHGDDVVRIVGTRSKAQLAVTLERYRQEHGKGIDEVLDGRRGDQLAAVLKAALWCLTSPEKHFAEVIRTSILGLGTDEEMLTRGIVSRAEVDMEKVKEEYKVRYNTTVTADVRGDTSGYYMNTLLTLVGPEK

SEQ ID NO: 169442 - protein, 220 aa, Oryza sativa
  Clone ID: PAT_MRT4530_67862C.1.pep
GRRIGCQRHPPRRIRAVHSSARSGAPLSLSPTHPPPPNPRPPHPAHPLHLAAAADSPGLAATGGGGELDLLAPRAHPDAVVLGAGEIRPSPPAGLAPSSRRKVEPGNIIIRQRGTRFHPGNYVGMGKDHTLFCLKEGHVRFERNKLTGRKWVHVDPVAGHVLHPVYASDSTPAAEMEPFGGAWKFSVGGFRGLRGFPLAVQRRNVNGNGNGVVARRSNHP

SEQ ID NO: 169443 - protein, 145 aa, Oryza sativa
  Clone ID: PAT_MRT4530_67863C.1.pep
MAFSSVFRRGNVKELISNVSVYTSAAESSGGLSLIFKRWATKKTAGSTKNGRDSNPKYLGVKKFGGEKVEPGNIIIRQRGTRFHPGNYVGMGKDHTLFCLKEGHVRFERNKLTGRKWVHVDPVAGHVLHPVYASDSTPAAEMEPL

SEQ ID NO: 169444 - protein, 49 aa, Oryza sativa
  Clone ID: PAT_MRT4530_67864C.1.pep
MVYEAAVASAARSHEHQVRKEKKLKQIGCSILWAFRRIYPTASSASGKK

SEQ ID NO: 169445 - protein, 91 aa, Oryza sativa
  unsure (1)..(91): unsure at all Xaa locations
  Clone ID: PAT_MRT4530_67865C.1.pep
YSRTSRMVFPSPGVPELLSLLETXWTPRVHEDLSSWSGYCQSEVVERLCRGKSHSLGRRLXCLGKSRSTSKVYIHCNQSVEENPLLVHLRS

SEQ ID NO: 169446 - protein, 369 aa, Oryza sativa
  unsure (1)..(369): unsure at all Xaa locations
  Clone ID: PAT_MRT4530_67866C.1.pep
RVQVHVGRLAPEGPPGCRISATREPAGGFFFFFFFVFLTKTRGKAPKKQQFFPNRRKTPPGPPQRDQNLFRGLPGRGQTHPKTHPPQTPNKPEKPPRPGANPTPGRRKGGGGHPPRRRGKHPGRPGPPPATHTPKHNRGGRTRPPTTHSHGGGDPPGERPEAPAKGGPENPTPQGPHDRPTAEENQXGSAPHRPPQRRRPSPGEAGRPAHAKGNGQAREARPPRTQRAEGRRGPPTERDAQTDRDGRPRSRATSARASAEERRETKAGGEASGRRRRRGETRRSGQGESTGDEREAPRRAQEHNRQKSKRGGRRTGKGGDTKGGEGEKGTQTGGDGEEDARTGRTKGPRRGRERGKRRGARGERAENTE

SEQ ID NO: 169447 - protein, 485 aa, Oryza sativa
  Clone ID: PAT_MRT4530_67867C.1.pep
MDEKSNRKRTHAIQQSIRQATNDPRFENTSALVENHHLCRRNTEGEKVLPNGLIWRRLLLLLCYSVKTVETNSLSARVASPANLFSLRFRMPPLPHFLSSLLQSREHPRCAADQDVGDIDPDELINEDEEDDYDQLPPFKPLSKSQVAKLSKEQQKLYFDEYDYRTKLLEKKQLKEQLRRLKEMKIEGNNHDVLGDNDNPDDEYETERSVMPDWALPSSFDSDDPAYRYRCLDPKPNFLVRAITNPDGWDHDCGFDGVSLQYSLDAANAFPASLWVQVNKDKRESTIHLVSSISAKHRENVSSLAGFDIQTIMDQLAYTLRGESKFKNSKKNTTTGGLSMTFLGDTMVTGAKFEDKLSVGDRLTLLANTGAVSIRGDTAYGVNMEATLREKDYLMGQDLAILGASLVRWHKEWSMAAKLDSQFSMGRASNVAVHVDLTNKLTGRGAKNMTLLMGSSAAEPRQSSPPWLGPRLTAEAAGLAAPAVP

SEQ ID NO: 169448 - protein, 130 aa, Oryza sativa
  Clone ID: PAT_MRT4530_67868C.1.pep
VVMVNQVHESWTGQPVSMTKFAAAMTNGALPRCRKVKHRNETSTLPRYGSHEWTQGARRVAHQDPPGRHRTEQLASSKEGFFCNKHNGLCTCPRTYTIIRGNARTFFANSLLMQPVPTAVECVRTPPQRR

SEQ ID NO: 169449 - protein, 522 aa, Oryza sativa
  Clone ID: PAT_MRT4530_67869C.1.pep
MKPGGSSGRLHALRFESQRFRLLTIVVGCFLISLTFLLSSRPDATVFSTRVKDTVIIQEVAGERSEEAEEAAERVAADSGDEAAPAVEEKNQQQLPVKLQDAGEPARTPEQTFNFEFWAPTNVADNVRAMNADSVDRRPLCDFSDFRTDICDFSGDVRMAANTSEFVVVVDPAAAAVSHKVRPYPRKGDATCMGRVTEITVRATGDAAGAPRCTRAHDVPAVAFSIGGYTGNIFHDFSDVIVPLYNTVQRYRGGVQLVMVNVASWWLVKYDKLLRELSRHAPIDLAKAGAAGEVHCFPSAVVSLRAHRELIIERERSLDGLATPDFTRFLRRALSLPRDAPTRLGDGTGRRPRLLVISRGRTRLLLNLDAVVRAAEEVGFEVVVNESDVGNSIEQVGKLINSCDALLGVHGAGLTNMMFLPPGATMVQVVPWGGLQWIARMDYGEPAAAMGLNYIQYEIAVAESSLKDKYPAGDEIFTNPTGLHKRGFAFMKQTLMDGQDITIDVTRFRPVLQQALDNLATK

SEQ ID NO: 169450 - protein, 64 aa, Oryza sativa
  Clone ID: PAT_MRT4530_6786C.1.pep
SSSLPVRWCFQCPRITTRQPLSSLWLYVNPPPPPLFPAHEKREGMLFPAHEKSQGMRGEEEGNM

SEQ ID NO: 169451 - protein, 72 aa, Oryza sativa
  Clone ID: PAT_MRT4530_67870C.1.pep
MAPGVTVRDMGPGVCPVTSGRRSKQGCRKSSLVYEGMTGLSPVSGGRRRWAPLKDRSMLSFQQKARVETRSQ

SEQ ID NO: 169452 - protein, 42 aa, Oryza sativa
  Clone ID: PAT_MRT4530_67871C.1.pep
LRSIPSILIHKPASEMHGSHVTSTRVEFCSPNHLIWPNYTVY

SEQ ID NO: 169453 - protein, 343 aa, Oryza sativa
  Clone ID: PAT_MRT4530_67872C.1.pep
MECNPVSSTTSSSLLWDWDATASAEPPPPPGKRGGRDSSSASASAKRGRSAAAAGDAAAVAAEAPRCQVEGCGLELGGYKEYYRKHRVCEPHTKCLRVVVAGQDRRFCQQCSRFHAPSEFDQEKRSCRRRLSDHNARRRKPQTDVFAFGSGTLPRSLFDDRQQISFAWDNNAPLNHANTTSSSSWTSDLQLSQVMDISKRSRKAGADSANIRLSNALPTLCHDTNELLPIKGADASETASKLDGALDVQRALSLLSASSRGLTDPGHQTSSIIQFTNSNQNSTLPSVPSEGNSNVPFWVDGQHQAVEPQVFQFTMDTGNTVFPDLERIKPSYESSMFGLNQIH

SEQ ID NO: 169454 - protein, 652 aa, Oryza sativa
  unsure (1)..(652): unsure at all Xaa locations
  Clone ID: PAT_MRT4530_67873C.1.pep
MALAVAVRAPVDLVPEGALLVTHQFLVVVVLEAGTEREKHAATARLVRIVVRAAAEALVVVVRAAALPLAAHAPASSVSLVPVVVSAAAAPLVADVLRAEAARLHAVARAAAEPLVVVVGVVVEARAAAERAPLAADTECGKGEPLAVRAAAEQPLVVLRVTAGLEAKDIPLVIVAHAVAAEAQCAVAEREHAPHLLAERAAGEEAQPLLVLGRVVVVRAALGSAHLAAPRFVVGVPGRVDLVSLAAAPAAADVVRAEAARLHAVARAAGEEAQPLLVLGRVVVVRAALGSAHLAAPRFVIVVPARVDLVSLAHAQLAVERFIVVAPERERFLWCEEREEDAIARTPECGGYSRPNGRPGPARHGTLTARPTRARPVRHDSCSGPCRAGPRAKASAQARPKEVLXAVPGRHGYCSGPWAVSPFPIAQLPPFPIAQKQRARAARWHWGDGGGGAARSTLPRSSGGVGNAGKGRPDPPLHGRGRSSPLAASASLIFGSGLSANPPPLPFPLLSDRGRSSEDEQKRGGHLKRRESSGARGQRAAVAAPPLSPSVASLLSSAAPLSPLPSAVACRAGGGGGIGEERRTAAVPATSPMTASLLSPSFPRFLFRPHPPTHPDKSDEVPMANFGSPNFTWLGHVKWRPLVLVVSTCHIG

SEQ ID NO: 169455 - protein, 500 aa, Oryza sativa
  Clone ID: PAT_MRT4530_67874C.1.pep
MAATLKIVLGSHIWLEDKDLAWIDGEVFRIEGQKAHIRTTNGNMVVASISDIHPKDTEVHSDGIDDMIRLSYLHEPGVLNNLSVRYAKNIIYTYTGNILIAINPFQRLPHLAEPHTMEKYKGANFGELDPHVFAIADISYRQMMNERKSNSILVSGESGAGKTETTKMLMRYLAFLGGRSRTGGRTVEQQVLESNPVLEAFGNAKTVRNNNSSRLGYSLGCQLGRCGKISGAAIRTYLLERSRVCQINSPERNYHCFYFLCAAPSEEIRKYNLGDPSSFHYLNQSTCIKVDGISDNEEYLATRSAMNTVGITEQEQVSRGYIPSCCAVLHLGNINFVKGREVDSSVIKDEKARFHLNAAAELLMCDHGKLENALIKRKINTPEGVITTTVDPNSATVSRDGLAKQIYSRLFDWLVSRLNASIGQDENSQYLIGVLDIYGFESFKTNSFEQLCINFTNEKLQQHFNQNVFKMEQEEYNREQIDWSYIEFVDNQDVLDLIEK

SEQ ID NO: 169456 - protein, 66 aa, Oryza sativa
  Clone ID: PAT_MRT4530_67875C.1.pep
MALPFEALPLPPSLKKKDEIDKQAARNALSPKWCKSYQRFRLFLRIMRTNSIGFLLLQEHYFKKQL

SEQ ID NO: 169457 - protein, 47 aa, Oryza sativa
  Clone ID: PAT_MRT4530_67876C.1.pep
MFHNKSIQMGHNQTQIEIRVSCSMTQTCRFYSQSWRYESSVFSQTCH

SEQ ID NO: 169458 - protein, 177 aa, Oryza sativa
  unsure (1)..(177): unsure at all Xaa locations
  Clone ID: PAT_MRT4530_67877C.1.pep
VKQEKPPAEEPDPAPPVTEADPPPPPPKTKVADTGDLLGLTDPNPNVSAIEQSNPLALAIDPADAXLSTYRTVTWQDKGFVPTGWDLALVTTCSVTNSSVAHSQLAGGFDMLILESLYDRVGLSGTDRPELLYVSFAPNPFMSNXPFIMSKQFDPCPSEHMVVMPSASINRYHPLMH

SEQ ID NO: 169459 - protein, 132 aa, Oryza sativa
  Clone ID: PAT_MRT4530_67878C.1.pep
MRPITCVLELSVVLCAKLEPSHGLYCTAPIHGWKSAGAARRGLGPPAPPLPSAHPRPVRLLPAYHVIPQVHSSTQRSFPADASAVPGVSSSLHPLPELDEKHGPVAESCDGVEALDDSSVVAGCEIEKVVAG

SEQ ID NO: 169460 - protein, 99 aa, Oryza sativa
  Clone ID: PAT_MRT4530_67879C.1.pep
MSETDSSAAAAEGRKPRRLRGHKKGAVTCCVASSSRPGVVASSGEVSDSARAWVFLPRGRRATPSRALRLPLPEQRVASLVGDTLLQQQQEEEERGALR

SEQ ID NO: 169461 - protein, 1893 aa, Oryza sativa
  unsure (1)..(1893): unsure at all Xaa locations
  Clone ID: PAT_MRT4530_6787C.1.pep
MAAVIAGGGGAVRSEDLLKNRRVVMSPCGGVGGSAGHCCGLPILLRALTVVATCGLYRSAPGCIGWSRLVPIPQAVRGGGDRRRRLQVSVAGCCYAMKVTQLADASVLVHVANIFHGVSILRSRRHLFDSSLLLSSGHSLGGLDWRLWPLNNEALILLLLDLSFKCFKTSSAIPGLLERQKFYRHHLIKDKCGQKSAAKTYGILEFVRDNSRVRIKSTGTLTHPKASFGPALELSRSPRPRVFSQHAFGTPGGTCKKSDVSSSSWPRNSHHHHLAQSGVLVNTLSNMMKTIAGGSIAEHPAGPVYLQGGVFPSYQSLITDVQPSVQAVPSVAPTTQPTAPASTPLPAILAMSPGQPVNPRLLTREQPQHGGQATNRLTKNQVAAMFLPPPPIVDPVQQQPIQQAPPIQLVVQPIQQQVIQPAQQTPPRQQPLQPVQQTPPRQQPQQPIQQTPLRQQIVQPIQHPGSVNASASWADLEKQFYSYFYSGVHEMKLSDLTAIKQRHDEPVHEYIQREKFSFEDFDSLSHLIQKVTLHEHRSAEVRRSSKKVNHVCPYMYGSDDEEDDSEIAAAEWVRSKKVIPCQWVKSPRKEEKYDFDITKAEKIFDLLLREKQIHLPAGHTIPSAEELGKKRYCKWHNSGSHSTNDCKVFRQQIQVAIEGGKIRFDDSKKPMKVDGNPFPVNMVHTAGQAADRVRAKGFQVNSAKIINKYQRKYDKQQERHYEEYDDGFDPHWGCEFFRFCWNEGMRLPSIENCPGCSDIVENSSRSYSRGNRLRQARLPVHQRLGPMNQDCGQEDEVIRKNQWCPSGIFTKNQKRRVQRLRNRERFQEVEEEINHRLRKPKPRQEWRVKNQVPVADDAAADEAKRLAKGKSVVAAPINMVFTLPAEFGIDQADVDEVEEGSAKLVLSPEQAVFEKPEGTENRHLKPLYINGYVNGKPMSKMMVDGGAAVNLMPYATFRKLGRNAEDLIKTNMVLKDFGDNPSETKGVLNVELTVGSDKIEIVPADSQSKMENPSYYFEGVVEGSNVYAKDMVDDLDDKQGQGFMSADELEEIDIGPGDRPRPTFISKNLSPEFRTKLIELLKEFRDCFAWEYYEMPGLSRSIVEHRLPIKPGVRPRQQPPRRCKANMLEPVKAEIKRLYDADFIRPCRYAEWVSSIVPVIKKNGKVRVCIDFRDLNKATPKDKYPMPVADQLVDAASGNKILSFMDGNAGYNQIFIAEEDIHKTAFRCPEVEDHIADLKKVFERTRKYGLKMNPTKCAFRVSAGQFLGFLVHERGIEVTQRSVNAIKKIQPPENKTELQEMIGKINFVRRFISNLSGRLRHYLLSNECTVICKADVVRYMLSAPILKGRVGKWIFSLTEFDLRYESPKAIKGQAIADFIVEYRDDSIGSVEIVPWTLFFDGSVCTHGCGIGLVIIPPRGVCFEFAYTIKPYATNNQVEYEAVLKGLQLLKEVEADTIEIMGDSLLVISQLAGEYECKNDTLMVYNEKCLELMKEFQLVTLKHVSREQNLEANDLAQGALGYKPMITDVKVEIAAMSANDWRYDVHQYLSNPSQSACRKLRYKALKYTLLDDELYYRMINGVLLKCLSADQAKFAIGEVHEGICGTHQSAHKMKWLLRRAGYFWPTMLEDCFRYYKGCQDCQKFGAIQRAPASAINPIIKPWPFRGWGIDMIGMINPPSSKGHKFILVATDYFTKWVEAIPLKKVDSGDAIQFFQEHIIYRFGLPQTITTDQGSIFVSDEFVQFADSMGIKLLNSSPYFAQANGQAEASNKSLIKLIKRKISDYPWQWHTRLAEALWSYRMACHGSIQVPPYKLVYGHEAVLPWEVRIGSQRTELQNDLTADEYYNLMADEREDLVQSRLRALAKVTRDKERVAWHYNKKVVXKIFRKENLYGS

SEQ ID NO: 169462 - protein, 98 aa, Oryza sativa
  unsure (1)..(98): unsure at all Xaa locations
  Clone ID: PAT_MRT4530_67880C.1.pep
HRVLYSRSGRVIQPQGQXVPRYTHXPDVVYIIQGRGTMGTTFPGCPATNQQQFQQFSSQGQSQSQKYRDDXQKIHQYKAKRPLIAHPKLGVSTIGSYQ

SEQ ID NO: 169463 - protein, 95 aa, Oryza sativa
  Clone ID: PAT_MRT4530_67881C.1.pep
MPHSKGEALCKRTDTVVAFTQDKILSIASGTGLPLICQGDSGLMMYPNVEDYEGWTWLSPPVIYLYNPWGTQKTMVEPWVSIFYLHEMVPCTYDV

SEQ ID NO: 169464 - protein, 66 aa, Oryza sativa
  Clone ID: PAT_MRT4530_67882C.1.pep
KLTQQLKEQGKEKWKDLYFHERLLNGELPLSIGGGLGQSRIYLLLLKKWAFGEFWPPFGPKKRWEN

SEQ ID NO: 169465 - protein, 120 aa, Oryza sativa
  unsure (1)..(120): unsure at all Xaa locations
  Clone ID: PAT_MRT4530_67883C.1.pep
RCSRAPNQAPHRRPPPPPAAPGPAAXTCPXRSLAPRRAGTPPRARPPCWTARRSCSATPPGRPPRRPAASXPDHPSSSAAPPRAHPRRILPHGRLXSNSPRPSPHPPDFSPPFFLCFLGR

SEQ ID NO: 169466 - protein, 150 aa, Oryza sativa
  unsure (1)..(150): unsure at all Xaa locations
  Clone ID: PAT_MRT4530_67884C.1.pep
MGFSPWAVKKGLLCGRTHSGRSSATGSAATARRRLAPPSPPPLPPPPLPPRRDPPSLSRSLSASADAPSFPSRSRHPVRRRVVRLHQLSVLRLPVKIQHRAAVLRRLRLLFEIHSTVXPFSASRFLQPREMETLHWTSCGIRGRLRLSIN

SEQ ID NO: 169467 - protein, 61 aa, Oryza sativa
  unsure (1)..(61): unsure at all Xaa locations
  Clone ID: PAT_MRT4530_67885C.1.pep
QELKAALSGQIYSLTILSLDHGKLEPNKPHYTILPXAPXLTXTGEANKAISHXYNFCIHAP

SEQ ID NO: 169468 - protein, 75 aa, Oryza sativa
  Clone ID: PAT_MRT4530_67887C.1.pep
MEPITVRSIGFSMNIGRKERLAAKTLSKGSAGEDGEAKALARRHGLRRAPNPTARRPNGPLHSRGGFDERMGQAI

SEQ ID NO: 169469 - protein, 234 aa, Oryza sativa
  Clone ID: PAT_MRT4530_67888C.1.pep
RTIFVAFEPPPPLDTAGIWAQKDSAVHIAMYCSIATDVLDVIMETMVVGPRQGIFHDNRETRIIYHEMEFRSVLQGYMPVTNYCWRLKNLADGDGAGHVSSSASRSAGLVMILGRRPEIMCALIVQMLWLLATNWEKEALKANKRVFKKKERRNGDATAVSRLLSGRGEDAAKRRRPPPVAARLLPAAAILSARYYPPCFPPPPAAARHGLPWHVGQAAAALCSSLLCTKRRRR

SEQ ID NO: 169470 - protein, 646 aa, Oryza sativa
  Clone ID: PAT_MRT4530_67889C.1.pep
MDKASCGLGFGDSINSLDTSRHWSTVQHTSGLKATTIDYSTYSSFSIASSKTLKRKRSAMAGPEGTGNPLLTLGLGHSPSSSDNSKVSSATAYAMSPSSLKEADEESSADLGLNFELCLGNDMVHCQKKSPVGAENSPLTNSHKLDLQLSLSTGSPESAVTNTNMVSPIIHGGLEIPVTNCSPAIIGEGSVPCTWVFEKSVISSSYASEATYTFPFSKVPKTGDAAMSSPVISSTLVTSMKSPVACTSGSINPQQRNSITKNCQFPGCVKGARGASGHCIAHGGGRRCQKPGCQKGAEGRTIYCKAHGGGRRCQFLGCTKSAEGRTDHCIAHGGGRRCSHDGCSRAARGKSGLCIRHGGGKRCQKENCIRSAEGHSGFCISHGGGRRCQFPECTKGAQGSTKFCKAHGGGKRCTFSGCNKGAEGSTLFCKGHGGGKRCLFQGGGVCPKSVHGGTQYCVAHGGGKRCAISGCTKSARGRTEYCVRHGGGKRCKFEGCAKSAQGSTDFCKAHGGGKRCSWGQVDLNFGVGAPQCDKFARSKTGLCSAHCALVQDHCVRGGTLGAATFQFATDAKFDEMEVTPVKGDPHAQASSDDQSHLGGAHPPAVPAITSDRFSEGRVHGGGLLALLSRGGNHANAGNSKNGALLP

SEQ ID NO: 169471 - protein, 1239 aa, Oryza sativa
  unsure (1)..(1239): unsure at all Xaa locations
  Clone ID: PAT_MRT4530_6788C.1.pep
MELSRSPRQRVFSQHAFGTPGGTCKKSDVSSSSWPRNSHHHHLAQGALVQKYKIKVVADSPGTGSSKDGEVKQAPGGSGQPSTKGATDGSPSDHGDNSQGVRGVQGDGAQEPQGGNLDQNSELAQDFFNNFQDRVDYAVHHALINQSGVLVNTLSNMMKTIAGGSIAEHPAGPVYLQGGVFPSYQSLITDVQPSVQAVPSVAPTTQPTAPASTPLPAILAMSPGQPVNPRLLTREQPQHGGQATNRLTKNQVAAMFLPPPPIVDPVQQQPIQQAPPIQLVVQPIQQQVIQPAQQTPPRQQPLQPVQQTPPRQQPQQPIQQTPLRQQIVQPIQHPGSVNASASWADLEKQFYSYFYSGVHEMKLSDLTAIKQRHDEPVHEYIQREKFSFEDFDSLSHLIQKVTLHEHRSAEVRRSSKKVNHVCPYMYGSDDEEDDSEIAAAEWVRSKKVIPCQWVKSPRKEEKYDFDITKAEKIFDLLLREKQIHLPAGHTIPSAEELGKKRYCKWHNSGSHSTNDCKVFRQQIQVAIEGGKIRFDDSKKPMKVDGNPFPVNMVHTAGQAADRVRAKGFQVNSAKIINKYQRKYDKQQERHYEEYDDGFDPHWGCEFFRFCWNEGMRLPSIENCPGCSDIVENSSRSYSRGNRLRQARLPVHQRLGPMNQDCGQEDEVIRKNQWCPSGIFTKNQKRRVQRLRNRERFQEVEEEINHRLRKPKPRQEWRVKNQVPVADDAAADEAKRLAKGKSVVAAPINMVFTLPAEFGIDQADVDEVEEGSAKLVLSPEQAVFEKPEGTENRHLKPLYINGYVNGKPMSKMMVDGGAAVNLMPYATFRKLGRNAEDLIKTNMVLKDFGDNPSETKGVLNVELTVGSKTIPTTFFVIDGKGSYSLVLGRDWIHANCCIPLTMHQCLIQWQGDKIEIVPADSQSKMENPSYYFEGVVEGSNVYAKDMVDDLDDKQGQGFMSADELEEIDIGPGDRPRPTFISKNLSPEFRTKLIELLKEFRDCFAWEYYEMPGLSRSIVEHRLPIKPGVRPRQQPPRRCKANMLEPVKAEIKRLYDADFIRPCRYAEWVSSIVPVIKKNGKVRVCIDFRDLNKATPKDKYPMPVADQLVDAASGNKILSFMDGNAGYNQIFIAEEDIHKTAFRCPEVEDHIADLKKVFERTRKYGLKMNPTKCAFRVSAGQFLGFLVHERGIEATQRSVNAIKKTKPTXIKTDEQEIFPQVSFTGRFIPDSAESLFHQLYT

SEQ ID NO: 169472 - protein, 132 aa, Oryza sativa
  unsure (1)..(132): unsure at all Xaa locations
  Clone ID: PAT_MRT4530_67890C.1.pep
GWEENNLSAAAKDPDSAFFKRLDSFQPCDIGELKPGTHFFAVYGDNFFRSVNYTIEVVCGESFPAEKEKLQSVEANILTKRAELSKFETEYREXVLAKFTEMTSRYTQEMQAIDNLLKERNEIHASYTNNSP

SEQ ID NO: 169473 - protein, 408 aa, Oryza sativa
  Clone ID: PAT_MRT4530_67891C.1.pep
KIRKLHENICKLVQLHKLDLEGCHYLVTLPTKKSKMKELQYLNVLNCYSLTAMPHAMGQLTHLHTLLGYFVPNIGSSAMSELQSLLDLHSLSLVNLEKVSDTEDARMAKLQEKEKLETLMLRWNMDAGNASRIDHEVLETLQPNQCLKTLEIVAYEGHAFPSWITSTEPYLTSLVEIRLVNLRSCENALPPLGLLPCLKIVEISRVENISCIDDNFYGQNGTFPSLEKLILSFMTSLEVWEQSSRMNLFPRLAELVIIQCPKLRALHMEFPSIEKLILWMNNKMLYSSKEGLRGVEKSLENLSISFCEELHASSGCEGLQALDRLKKLEICGCHELSCLPQGLQHLSSLASLKIDNCNKLEILPEWLENLPFLQIMCLSGCPILHSIPEGLTCSDIIVEYCPNFKEPS

SEQ ID NO: 169474 - protein, 76 aa, Oryza sativa
  Clone ID: PAT_MRT4530_67892C.1.pep
MAAAVAESCTAAVMAHGGGAWKHPREEEQGVGLSGRGWADLGRSCSVPLRTTLVSRAPASLRFCGRRTALALVSDS

SEQ ID NO: 169475 - protein, 104 aa, Oryza sativa
  Clone ID: PAT_MRT4530_67893C.1.pep
MGGRGAGGEAHDDPFRSRSSSFGAVQCPLTVFSHACSESCMRMEIEIELPIYNNAAEEKELQSSLILAMTKTNTAYRTGVAHMLLHPLRNTTRARSFFEEKLRI

SEQ ID NO: 169476 - protein, 74 aa, Oryza sativa
  Clone ID: PAT_MRT4530_67894C.1.pep
VVIPGRKDLPRSQMPCFHAQEAVTWYSFCNIRWQQESYNNQVPPDHQQFITQQKIACMGHPCFFKCSSWNPRIC

SEQ ID NO: 169477 - protein, 149 aa, Oryza sativa
  Clone ID: PAT_MRT4530_67895C.1.pep
MADTDDELDPVIVAGANRAFTDNGRKLGVGAGVIINHHRLSSRLPPMANLILVIVAGADRFSPADRLSSLELPSVWSSTIGVYTPGCHQWRTCPCAHTHDGFFMAAIGALPSQVTTIGDGSTSFEFSPDCRRIYKRATQLLERISSFPG

SEQ ID NO: 169478 - protein, 109 aa, Oryza sativa
  Clone ID: PAT_MRT4530_67896C.1.pep
MDLELVDHGCHHHAHLVLLQEAVEVAKHVLVHRCHRRGRRRKARVLGFGEQRRGEERSRDLKLSTFDVSTTVRVPERSVDNRVAFLLELTPDGIRDSARSLRPASEGTG

SEQ ID NO: 169479 - protein, 327 aa, Oryza sativa
  Clone ID: PAT_MRT4530_67897C.1.pep
VESPLPPPQAASPPRVWPSRAGPIKSGPAGPARSPPLSPMGAAAAATAPPRAPPQPSQSRAPPPPPRHPRAATTPPPPQTGSPRGAPTATAAGSISAAAAAAHRSRRRRTTPRHLPSRVSPPTTEPPSPAKPPVMLAAAAGTPEQGNGPKINAVLRRPTPPGGAGPREGSGGRGGVIHAIADSAPQRPGAPAEGAGGNGGDPPVMLAAAAGIPEQGSGPHHNAVPQWKPRGGGELRLPASPPVILAAAGTTPERGNGGGAGPREGRGGRGGVIHAVADSAPQRPGSPAEGAGGNGGAVHAAPAGAGDRESAGGGGEAAEGEAAAAAA

SEQ ID NO: 169480 - protein, 51 aa, Oryza sativa
  Clone ID: PAT_MRT4530_67898C.1.pep
TNGSSGAKFWPFKTSWGQSWGKPGYIRFLPNVGGPALWGVPLDFAYPTLPL

SEQ ID NO: 169481 - protein, 179 aa, Oryza sativa
  unsure (1)..(179): unsure at all Xaa locations
  Clone ID: PAT_MRT4530_67899C.1.pep
FCAQEEAAAAAAAGAAWTAPPLPPAPSAGEPGLCGAESATAWITPPRPPRPSLGPAPPXRGPPEDGVGLGAWCPPPPRSPAATRAVGVLLLPWASTAGPRCGVGHCLAPECPPPPPASPAAVGGGWHCGAGLRLSRAERPSPTLLRRRAAGRKTTTRRGAAGGEPGGTTARSAMPRLMP

SEQ ID NO: 169482 - protein, 55 aa, Oryza sativa
  Clone ID: PAT_MRT4530_6789C.1.pep
KMIFFKTVETNYAASISGHRHLTSPNSGLHWQYRFDLMVFSYFLTSDMFIVTGSL

SEQ ID NO: 169483 - protein, 163 aa, Oryza sativa
  Clone ID: PAT_MRT4530_678C.1.pep
MNFSFVKTRGENGNEISHCAVAGALIAYNHDQRLAASIHHADGRIYSIAGPPPPPLYSTAAKGEEGRRPFLAPRAAGECFASSRQGLLSTASFSPRRWSCPSLCVGRRRAPAAPSSCAASRPAASCATLLDLRRQAPAPRAPLRAQRRYGEQPPPQILPLQQQ

SEQ ID NO: 169484 - protein, 137 aa, Oryza sativa
  Clone ID: PAT_MRT4530_67900C.1.pep
MASALAPFLIPAHLLQPHAASASSGLQLAGANVLLRDDAPPEGGRGPHHNAVLLPQPPVMLAAAAGTPEQGNGPKINAVLRRPTPPGGAGPREGSGGRGGVIHAIADSAPQRPGAPAEGAGGNGGDVHVAPAAATSS

SEQ ID NO: 169485 - protein, 491 aa, Oryza sativa
  Clone ID: PAT_MRT4530_67901C.1.pep
MASANVLLLPEAGSGHLMSLIEAGKRLLAHGGRGDGEGPAVTVTVLVVRPATSESAAEVDAHVGRVEASGLGVRFHRLPAVEPPPMGCAAGNVQEFKSRYMQLQAPHVRAAAAELGAAALVVDFFATGVLDAAREAGVPTYVYFTSTAALLALMLRLPALEEEVPVDFEEFDGTVDVPGLPPVPAGSLPAFMGRKESPNFKWFLYHGRRFMDADGIIINTVAELEPALLAAIADGRCVPGRTAPPLYPIGPVLDLEDKPSSNARCVRWLDAQPPASVLFLCFGSMGWFDAAKAREVAAGLERSGHRFLWALRGPPAAGTVHPTDASLDELLPEWFLERTKGRGLVWPTWAPQKEILAHAAIGSFVTHCGWNSTLESLWHGVPLVPWPLYAEQRLNAFELVRDMGVAVPFLPRQCPQPLVASPKHLRRRHGVKLLLQVVRLHRVGLRQPRIYAGGAARLEPVVPDAKEEDSYRWRHHCRHPPRSPTNGCPTV

SEQ ID NO: 169486 - protein, 177 aa, Oryza sativa
  unsure (1)..(177): unsure at all Xaa locations
  Clone ID: PAT_MRT4530_67902C.1.pep
SLVLRHLVRLHLFLSTLKRCRAFSTISLERSLGNTSTSHLGGGNTLSPPGDVGGGSGKVRRRRGEMAAEAASVGRRARRRGERQGRAVEEASGGGSSRCSRXRRGSGGGGGEQRRGAPEEASVVAEEASAEAEEATRRGVTARRRGSRRRQRRATDDGARHWRGSRGDGNGAQRVRR

SEQ ID NO: 169487 - protein, 152 aa, Oryza sativa
  Clone ID: PAT_MRT4530_67903C.1.pep
NRSRKPVEAQLVAPHSQPPATAPAAAVTSTAFQNHSLYPAIANGGGANGGGGGGGGGGSAPGSFALGSNTQLHMDNAASYSTVAAGAGNKDFRYRVQLKFLQTFFTVYCCLLHDGCQMDGCSRAGCLLIVFEVFSLLCLIASADTSGKSEYY

SEQ ID NO: 169488 - protein, 55 aa, Oryza sativa
  unsure (1)..(55): unsure at all Xaa locations
  Clone ID: PAT_MRT4530_67904C.1.pep
LLRPSRGRNCYGEVVPLWHMLFALRPSPRRPLAWXANPCLSPSLLHSLRHGEGSP

SEQ ID NO: 169489 - protein, 123 aa, Oryza sativa
  Clone ID: PAT_MRT4530_67905C.1.pep
MPLPPNNYPRYQIVAPNLPRVDPRMDRNDSPIQTAGGYDSRGSGKVEEEEGGAHTCSAGEATAGDEAGERGRRGGRRRRRNETRCHRFFLDWFFLPGRQTRPLPRLAGPVRFRSLDGFEGGFG

SEQ ID NO: 169490 - protein, 94 aa, Oryza sativa
  unsure (1)..(94): unsure at all Xaa locations
  Clone ID: PAT_MRT4530_67906C.1.pep
MACCGGNCCCGCGCQCGGGCGGRKMLPDVEATATTKTLGLPAPSNTASSGGTEMAAESAKIGGCGCNTCEWGTSXRVCCCCSCKRIYSCRRPVA

SEQ ID NO: 169491 - protein, 178 aa, Oryza sativa
  Clone ID: PAT_MRT4530_67907C.1.pep
MVCHRMLPLLVVAVALLPAAAVATNYTVGDEKGWNPDVDYTAWVKKHRPFYKGDWLLFEYQNGRSDVVQVDEVGYDNCDKANAISSYSKGHSYAFQLKEAKDYYFICSYGYCYKGMKLAVTAKKGSASSSSSGSGDSSSSSKSDTASSKSKSSAAASSLANPSYAALLAVAIIFLRML

SEQ ID NO: 169492 - protein, 72 aa, Oryza sativa
  Clone ID: PAT_MRT4530_67908C.1.pep
FTKLTVSDSASGGGCHIYHVPRRGVRWIKHCSRTSEDKASCIHLTHNKCRAIKCCESGGSQADGRSRAWYGV

SEQ ID NO: 169493 - protein, 38 aa, Oryza sativa
  Clone ID: PAT_MRT4530_67909C.1.pep
DAWAYSFFFETKKYIIYIQSQEELVLKLYHHIDILIIF

SEQ ID NO: 169494 - protein, 69 aa, Oryza sativa
  Clone ID: PAT_MRT4530_6790C.1.pep
VQIEFPKIEVRYEDLTVDAYVHVGSRALPTIPNFICNMTEAFLRHLRIYRGGRVKLPILDNVSGIIRPS

SEQ ID NO: 169495 - protein, 54 aa, Oryza sativa
  Clone ID: PAT_MRT4530_67910C.1.pep
AFPHHPAQSLASSIADTPLVLQTTIAPVGHSIPPIGNSTYPPQLCVCRCAAGTT

SEQ ID NO: 169496 - protein, 92 aa, Oryza sativa
  Clone ID: PAT_MRT4530_67911C.1.pep
MAPTSNPKTIKPRSSAGVLSSEVTSTAVRGNSSPPWWVSYPLLLTRALGRLRDNPRAMEHPPPPYRAAARLAGWPEGVNGAGEAPRPASSPS

SEQ ID NO: 169497 - protein, 190 aa, Oryza sativa
  Clone ID: PAT_MRT4530_67912C.1.pep
FRQTRTAPRDPKSLTGLLGLPEADAGDARALHLLPLQTCHQSLHLLLLGEGEVSTVLSQLLLKFILRHCREGQYHLNSWSWQITFFRGQVILAAAAAVLLLRKVEPSITLQTTQFPVGGGTAVAVHIHWISSSPLPDDGSEAKTLIQGRRLSIQIQQRLRAGKGSWRRTPLRDTGGGRRQRRGKGEGMRG

SEQ ID NO: 169498 - protein, 439 aa, Oryza sativa
  Clone ID: PAT_MRT4530_67913C.1.pep
MAPLARASRAVARHAARAALQHATTALAAAARPHRAAARHHRARHTASSPARRPEPLSGVIVSDPKAKAKPSASPANVVGAAAGDRNILLSFGFKKMSVASGSGSYQRQSPLSQASQPKSESLPLSTSPQPESINDSEPIEVDGDEDEAEEERIQESEICVQKKIKLKGKTLTQSALRFSSADSKNITVENYTFDQDVARRELCDMIVLHEYPLSMVDHVGFRRFVAAFQPLFKFGTRNTIRAEIMDQYEFERKKAIQYMAGIQSRVAITTDLWTSSNQKRGYMAITAHFVDESWKLRSIIMRFIYVPALDRYMTNMSLRGRRPVGTELDHYLDDDLVDIHTKSFDVLDWWKVAGIRFPVLRRIARDIYAIPVSTVASESAFSTSGRVLSEHRSRLTSKLLEALICSQDWLRNKYKVDDKNKEQPSFWSCLQDIQEGLQ

SEQ ID NO: 169499 - protein, 515 aa, Oryza sativa
  unsure (1)..(515): unsure at all Xaa locations
  Clone ID: PAT_MRT4530_67914C.1.pep
PGAARGERGPPASPQPEKNLGGAAPGPHPVSKQQPRRPPPAASRAFPTPRRGDALPSPRPPSPPPRPPPAVAFRPPAASLPRXVPPPRPSPATNSPPPVPPSPPAASPPXPSPPPELGGEGPHALPPSLPTSPPCPPNPISSSTCFPFPITSSAPLPPLPIPSFVSSPLHPVTSSTSLPPLPIPSFVSSPLQPPISPPPRHKKRTEKQPXTPPLRLKKTATKPPHHAATYQKKWPPDLEERKPPPPQPTLPTATAGAMRXTVGSAPPPSAPPTPPTPARREETSATPPSPLRHGFRRRFTPPPPXGFRWRFMPPPPLSHSPPPPPPLPSLRPNLGGREPPLPPPPSPVLPPVGSGXREPPVPPPPSPGLPPARSGXREPMPPPXPPPPSLRPDLGGREQPPPPLPSLRPDLGGKEPPPPPPLLPLPPFGRIWEGGCAPPLGVGARRVCGDGGRRRRPRASPTPPPPTPRHHRFPLPTPPGPAPPGRDPRFPFFFFPMTWAIWAICIMPGISYFFL

SEQ ID NO: 169500 - protein, 66 aa, Oryza sativa
  unsure (1)..(66): unsure at all Xaa locations
  Clone ID: PAT_MRT4530_67915C.1.pep
IGGRQGGRLQISMPPXAHLQATPRTVQNRPSGGRQGGRLQISLTAVARERTAVCHVIFAALWDGDF

SEQ ID NO: 169501 - protein, 146 aa, Oryza sativa
  Clone ID: PAT_MRT4530_67916C.1.pep
MRSGELVAGDGRGGGTGVVERRPVAGKPLRAAGAVALAHRREQQHGRHQGGVSGVIVVHLLAPPPPWRLAGGEEVAGARRETATTGGGDGGRGEGRASPRLGVGKAREAAGGGRRGCCFDTGWLLPRHQLVASFARDEVARGAAAA

SEQ ID NO: 169502 - protein, 40 aa, Oryza sativa
  Clone ID: PAT_MRT4530_67917C.1.pep
LLQPPRRYCLDQPRRYTPLFFFHCLGGLLINQPLSPLHGL

SEQ ID NO: 169503 - protein, 94 aa, Oryza sativa
  Clone ID: PAT_MRT4530_67918C.1.pep
MCGPYELWAHVYYDLVSLAKVELIYKASSLQPYHSRVNPFTRSEDESHAPLNTILRRSPQPHPRSRSPALAPPSSKHAPLKAATFLPLAYRPHP

SEQ ID NO: 169504 - protein, 115 aa, Oryza sativa
  unsure (1)..(115): unsure at all Xaa locations
  Clone ID: PAT_MRT4530_67919C.1.pep
MWLTFVQTIRKAYHCIIRIGKNPLPPPPPPPPLPPLTPPPPPPXPSPPDHCRLPPRPPVQDPPPPPSTPLVQDPTPPPPSTPPGSRSTAASCSERRHRLPVQDPPLPPPSSSTSP

SEQ ID NO: 169505 - protein, 647 aa, Oryza sativa
  Clone ID: PAT_MRT4530_6791C.1.pep
MAEKPPPSPSSASPGSVKEKIQQLDLSEVNEGNVMTITLDKLTPDQKEFEAMMQQARNQFLNSFMQTRKGTVVQKYQVRVVADVPGTGSSKDGEMKQALGGSAQPSNKGATNGSAQENQGDHSQGVHGVQGCRPSLFARRYLSELSAFGHRYSSTYSSGSSHCIISLADGAGIDFPIYSVNVGTRSADAIKTADYPTDSPARLDESIGWATYSESGCSRAFGPSRAAGSYVNSSPCSNNRKEQLNNDRGPMEKFSSEDFESLPHLTQKVTLHEQRFAEARRNSRKVNHVCSYMCGSDDEDDDSEIAAAEWVRSKKVMPCQWVKNSGKEERYDFDITKADKIFDLLLWEMQIQLPAGHTIPSAEELGKKRKLGRNAEDLIKTNMVLKDFGGNPSETKGVLNVELTVGGDKIEIVPADSQLKMENPSYYFEGIVEGSNVYTKDTVDDLDDKQVPVIKKNGKERVCIDFRDLNKATPKDEYPMPVADQLVDAASGYKILSFMDGNVGYNQIFMAEEDIHKTAFSWLVEVYIDDVVVKSKEIEDHIADLRKVFERTRKYGLKMNPTKCAFGVSAGQFLGFLVHERGIEITQRSINVIKMIKPPEDKTELQEMIGKINFVRRRLIKLGLLFVHKLPIVLDCSFDVFAFPAIG

SEQ ID NO: 169506 - protein, 109 aa, Oryza sativa
  unsure (1)..(109): unsure at all Xaa locations
  Clone ID: PAT_MRT4530_67920C.1.pep
KAEMLCLGIFSVAVVMLVFPLFKGTGKILLPNAPGNVPPSAFSKWFRQKTGWEDVFXVCQGRFLELVPGPPVGSFPLPVKKGGDFPSVLDYVHGLYQNLGKQGLALPTH

SEQ ID NO: 169507 - protein, 64 aa, Oryza sativa
  unsure (1)..(64): unsure at all Xaa locations
  Clone ID: PAT_MRT4530_67921C.1.pep
MATAYAPMASQLMKSCLVCSKPRGLAVAFMTRRPCLTVKAIQSEKSTYHVVNPIXGDPFIFIFV

SEQ ID NO: 169508 - protein, 73 aa, Oryza sativa
  Clone ID: PAT_MRT4530_67922C.1.pep
SNPSPHLINLKTYIGANKIAQDVEFVDLVRATTVPGPACADYYRTVMTRVSLVNMVAEIMGPPIAITTIACRT

SEQ ID NO: 169509 - protein, 79 aa, Oryza sativa
  Clone ID: PAT_MRT4530_67923C.1.pep
ITVWQMGTSVVLFSHSTTKFIPRDFERGLFKHAGFETCIQLCIYILTEQCNFSRTNISCQILSPNTAVMGEIMKEAPHS

SEQ ID NO: 169510 - protein, 152 aa, Oryza sativa
  Clone ID: PAT_MRT4530_67924C.1.pep
LREHCYNAAVKDFKLTRYFVQMRKLPNTTWQGISSSVTLISSFYATLPVYYYYYIFRKSRGIALVPQHNWTTRFCSKKCGHARPENLTHMRPNTHQRFSYSCIRRKVQFQIFIPWWHVVACPTAAKVIRWWHVYWDPWHFLPETVQFCRPEG

SEQ ID NO: 169511 - protein, 113 aa, Oryza sativa
  unsure (1)..(113): unsure at all Xaa locations
  Clone ID: PAT_MRT4530_67925C.1.pep
IEVWNAVQNLRLIEHEEDKISXKLTSHGEYTATSAYKAQFLITIAXTSNNLFWKPCAPCKCKTLAWLIIQNRVXTSDRLATRDWPNGSICPLCHHSQETAIHLLAECSYTRRI

SEQ ID NO: 169512 - protein, 637 aa, Oryza sativa
  unsure (1)..(637): unsure at all Xaa locations
  Clone ID: PAT_MRT4530_67926C.1.pep
MEDEEMEKKVQQYLQRKGFRLTELALQEERNRISTSSVSDVALARSENDPARYYDGYSKLRTWAYSSLDQYKHELLRVLYPVFIHSFMDLVAEGHTQEARSFFHTFHEDHELMHSRDLQMEDEEIEKKVQQYLQRKGFRLTELALQEERNRISTSSVSDVALARSENDPARYYDGYSKLRTWAYSSLDQYKHELLRVLYPVFIHSFMDLVAEGHTQEARSFFHTFHEDHELMHSRDLQKLEGILSPSHLEYSYELLLQYLQKTQALVVLGIINERTTFDVSPGQPSLISDDTDVVALVGTKKDLAKQINLKELLEDSVEERMEKTLLESDKTEAESKDADAEDNNKRKSSEGGKQGGSVKKVWDMSKIGQPPKTSSPQGENGLSQGERTSASDYGKRPYTLFQVRLWSTKLNANLVCYKGHNYPVWDVQIILFNQYALPAIASVLILVHEFSPVGHYFASASHDRTARIWSMDKIQPLRIMAGHLSDVDCVQWHVNCNYIATGSSDKTVRLWDVQTGECIRMFIGHRSMVLSLAMSPDGRYMASGDEDGTIMMWDLSSGQCSLXYSCEGALLASGSADCTVKLWDVASSTKVLKTDDTSTNRLRMLKTLRTKSTPVYTLRFSRRNLLFAAGALSLGS

SEQ ID NO: 169513 - protein, 564 aa, Oryza sativa
  Clone ID: PAT_MRT4530_67927C.1.pep
MMEDEEMEKKVHQYLQRKGFRVAGLALLEDRTRLSATTTTTTTASSSSHSLSDAALSRSENDPARYYDGYSKLRTWAYSYLDHYKHELLRILYPLFFHCFMDLVAEGHTQEACSFFHTFREDHEHSRDLKKLESILSPLHLEYSYELLLQYLHKTQALVVLGIINERIDFQVSPGQSPLIIDDSDAVVLIGTSKDLTKQINQKEVHWGILEDSLEERMEKAISDSDKTEIESKDADTEDNKARNCFVKRSSEGGKQGGSHKKIKKDKFVGTTGKNMKSETSMVSIAPRVKPELTLPMTSVEVEQSILEDLRNRAQLNSLSLPSVWDMSKIGQPSKAFRLWNTKLNANLVCYKGHNYPVWDVQFSPVGHYFASASHDRTARIWSMDKIQPLRIMAGHLSDVDCVQWHVNCNYIATGSSDKTVRLWDVQTGECIRMFIGHRSMVLSLAMSPDGRYMASGDEDGTIMMWDISSGRCVSPLVGHNSCVWSLAYSCEGALLASGSADCTVKLWDVASSTKTLKMDDTKGGSANRLRMLKALPTKSTPVYTLQFSRRNLLFAAGAPSLGS

SEQ ID NO: 169514 - protein, 274 aa, Oryza sativa
  Clone ID: PAT_MRT4530_67928C.1.pep
ELLRVLYPVFIHSFMDLVAEGHTQEARSFFHTFHEDHELMHSRDLQKLEGILSPSHLEEMELARSLRKNQFRIKLCEYSYELLLQYLQKTQALVVLGIINERTTFDVSPGQPSLISDDTDVVALVGTKKDLAKQINLKEVHWGLLEDSVEERMEKTLLESDKTEAESKDADAEDNNKRKSSEGGKQGGSVKKVKKDKIAGATGKTNKSETSIVSVAPRVKPELTLPVIPVEVEQSILEDLRNRAQLNSLALPSVSFYTFLNTHNGLNCSSISHD

SEQ ID NO: 169515 - protein, 145 aa, Oryza sativa
  Clone ID: PAT_MRT4530_67929C.1.pep
SDKTVRLWDVQTGECIRMFIGHRSMVLSLAMSPDGRYMASGDEDGTIMMWDLSSGRCVSPLGGHSSCVWSLAYSCEGALLASGSADCTVKLWDVASSTKVLKTDDTSTNRLRMLKTLRTKSTPVYTLRFSRRNLLFAAGALSLGS

SEQ ID NO: 169516 - protein, 128 aa, Oryza sativa
  Clone ID: PAT_MRT4530_6792C.1.pep
MATPQARAPPLLRAPPRAFPASQLATRHRLVRLPVAASARVGGGGGPELRTCKNCKKQYDPAANHPSACRHHTAHFGGETKRKFESVYAGGTLDTPDSGKVFQYWHCCGSEDPFDVGCTASPHCSYDD

SEQ ID NO: 169517 - protein, 100 aa, Oryza sativa
  Clone ID: PAT_MRT4530_67930C.1.pep
FCFFFLFVSINYFLLYFLLFCYFSYLFLFLIFFFFYFFYLCIYVFLFFFLSLFFFFFFYLFFIFFFLFFLFVICFYLIFFFFLLSFFVFFFLLLFILVLF

SEQ ID NO: 169518 - protein, 176 aa, Oryza sativa
  Clone ID: PAT_MRT4530_67931C.1.pep
MASHVDPLVVGRVIGDVVDLFVPTTAMSVRFGTKDLTNGCEIKPSVAAAPPAVQIAGRVNELFALVMTDPDAPSPSEPTMREWLHWLVVNIPGGTDPSQGDVVVPYMGPRPPVGIHRYVMVLFQQKARVAAPPPDEDAARARFSTRAFADRHDLGLPVAALYFNAQKEPANRRRRY

SEQ ID NO: 169519 - protein, 446 aa, Oryza sativa
  Clone ID: PAT_MRT4530_67932C.1.pep
MGSIHHLIGDLPHRSLHDLSRRYGPVMLLKFGQVPFIIVSSPEAAKDIMKTHDSIFAMRPQSEIMKIITKRGQGLVFAPYDDQWRQLRKICIRELLCAKRVQSFCAIREEEAARLVKSISSDQAHLVNLSKKLADYATDAAIRIITGTRFENQEVRDKFQYYQDEGVHLAASFCTANLCPSLQLGNTLSRTARKAEIYREGMFAFIGGIIDEHQERRAQDMYHKEDLIDVLLRIQQEGSLESPVSMETIKFLIFDILAGGSETVTTVLQWAMTELMRNPTVMSKAQDEVREVFKWKKMFVIKETVRLHTPGPLFMRECQEQCQVMGYDVPKGTKFLLNLWSISRDPKYWDDPETFKPERFENDARDFKGNDFEFIPFGAGRRMCPGMLFGLANIELALANLLFYFDWSLPDGVLPSELDMTENFGVTVRKKEDLLLHASLYAQLSC

SEQ ID NO: 169520 - protein, 84 aa, Oryza sativa
  unsure (1)..(84): unsure at all Xaa locations
  Clone ID: PAT_MRT4530_67933C.1.pep
THGVGIKMERIVSVRSEQKRIRIHFGSDXRIRIQIWIWYRGYLFLLELDLVFMFREKFVSISVSDHIRLLFIFEIIRIIFRIRF

SEQ ID NO: 169521 - protein, 36 aa, Oryza sativa
  Clone ID: PAT_MRT4530_67934C.1.pep
LCFSFQFMRILTYFQHINLTCLFLQGFQTSFRRSLS

SEQ ID NO: 169522 - protein, 335 aa, Oryza sativa
  unsure (1)..(335): unsure at all Xaa locations
  Clone ID: PAT_MRT4530_67935C.1.pep
MAKKKNPIVFMDISIGDEPEAIPNPMTRMDGFAQCIVGLLSVADEERSFLLFIVVPRAPAWDDVTHLXVTGGVRRRRALRGGGPGGSHRRHRAGARVPPPRRRELRRGVLHAAAGGXPSFAMLVFLPDDRDGRSIGPARQDHLLAGVRRRPPPAGVRPRGQESDDDLGFSLYDGYYPPPLKLVDFVADHLFAFFIVEERLQSIVFAGHAKPHKLRADMTEDYPDQLHTGGYDIKQTGNKDYTGSGPLIARRLARRDEAWPAVTEAGTMRGGGAAGGCGADYGARRLAGGGHRCSGPICQQRLDSGRASGRQHGFAGGERRVKIQPGLSRAGNDDA

SEQ ID NO: 169523 - protein, 195 aa, Oryza sativa
  Clone ID: PAT_MRT4530_67936C.1.pep
MALHLFLLLLLAASLALANAAPPPNDEGATTIVLKDGTTCKLCASCDNPCNPSYYPPPPPPVVTPTPQCPPPPSYPSGGGGGGGGGTVMYTSPPPPYSGGGGGSSTGGGGIYYPPPTGGGGGGGGGWQQGGGGGGAYPTPPPPNPFLPYFPFYYYSPPPPFYSSGSSVAGVSAISSAAAATFTLLLTGLLLWWVI

SEQ ID NO: 169524 - protein, 516 aa, Oryza sativa
  Clone ID: PAT_MRT4530_67937C.1.pep
MGFEWTVATAAAAVAASWAFIAVVVKLGVAGPGYRFFSGNLSEIRRLRAEGANLVLDVSSHDFVPIVQPHIRKWIPLYGKTFLYWFGTRPNICLADMNMVRQVLSDRTGMFPKYIDNMQFARLLGKGLVLTDDDEWKRHYKVVHPAFDMDKLKMMTETISDYAQSMMFEWESELGMKGGSTEIELSRWFEELTADVISRTAFGSSYREGKQVFLAQRKLQFLAFSVFLTIQIPGFSYLLTKKNLKTWSLDKKVRSMLMNIIKSRLTNKETMGYGNDLLGLMLEACVPEHGGSQPQLSMDDIIAECKTFFFAGHDTTSQLLTWTMFLLSTHQHWMEKLRKEVRMVCNDEVPTGDMLNKLKLVNMFLLETLRLYGPVSLVTRRAGTDVKLGSIKVPKGTILTIPIATIHRDKEVWGEDADEFKPERSENGVLNAAKHPSALLSFSIGLRSCIGQNFAMIEARTIIAMILQRFSFTLSPKYVHTPISVITLRPKYGLPMILRSLKNWDVNFSSLLVDWR

SEQ ID NO: 169525 - protein, 212 aa, Oryza sativa
  unsure (1)..(212): unsure at all Xaa locations
  Clone ID: PAT_MRT4530_67938C.1.pep
MGEKEAMLVVCANDVGLVYDINTCEKIMYIHDCVAPPCGLAFVDGFLLAASRTDKDQPIFGSAIYFWAPSKIKEVQKSYXLKPLGPLLAQKMGCXLVGGASSGHTYIWEIASGALLKRWCGHKNATSCLAFSQDSSFLISGSIEGMVYTWSMVSAPITALAFCSGVGLVSASKDCTILVDTRAWQVINKIEQIGGHITNLLVFPKRAIFTVH

SEQ ID NO: 169526 - protein, 110 aa, Oryza sativa
  Clone ID: PAT_MRT4530_67939C.1.pep
MAGGGSAAGGVGGCAATLGGRQQLAGQGQAAARRRGRAAVRPREAGGQRSRAAGNKHACPSTHGSQNVAVEMEEEEGQMEEHVVQELGEERVEENFEGITKFNPDYIGCV

SEQ ID NO: 169527 - protein, 174 aa, Oryza sativa
  unsure (1)..(174): unsure at all Xaa locations
  Clone ID: PAT_MRT4530_6793C.1.pep
QPMAPASAPAPTVPPSAPGQLINPRLLIREXPQHAGXNVDRLTQDQVASXMFLPPQNTVDPTQQQPIQQTPPRQQVVQPIQQTPPIQQVVPPVQQTPRAQRVVQPIQQMPLRQQVVQLIQQQGSMNASAGFATPGGRPHVQHQQAGSAQPQFVPQYNQFEPMPQQPQGTPQQRP

SEQ ID NO: 169528 - protein, 512 aa, Oryza sativa
  Clone ID: PAT_MRT4530_67940C.1.pep
NPLSKGVFRYKVLELLLLYAPCLILRVSSLYLLRLFSDARRNLPPGPRPLPLVGNLLELGAKPHRSLARLAERHGPLMTLRLGAVTTIVASSPDAARDILQRHDAAFSTRPVPDIVRACGHDRFAMPWLPPSSPQWRALRKVCSAELFAPRRLDAQQRLRREKARRLVSHVARMAREGAPVDVRRVVFTTLLNMLSCTLFSADLADLDEGRAGSAGELADTVAEFAGTVGVPNVVDYFPAVAAFDPQRLRRWLSRVFTRLFAEFDEQIERRMRERDAGEPPKNDFLDVLLDYRTTEDGRQFDRQTLRSRFTDLFSAGSDTSAVTVEWAMAQLLQSPSSMMKAREELTRVIGSKPEIDESDIDSLEYLQAVVKETFRLHPPAPLLLSHRAETDTEIGGYTVPKGATVMVNIWAIGRDSKVWFEPDKFIPERFLQKEVDFRGRDFELIPFGSGRRICPGLPLAVRMVHLMLASLLHRFEWRLLPEVERNGVNMEEKFGIVMTLATPLQAIATPI

SEQ ID NO: 169529 - protein, 184 aa, Oryza sativa
  Clone ID: PAT_MRT4530_67941C.1.pep
MGEKEAMLVVCANDVGLVYDINTCEKIMYIHDCVAPPCGLAFVDGFLLAASRTDKDQPIFGSAIYFWAPRVDLIRSVLTNSGFSILVRNHMPDYGRRDSRCKSVIVIRIKEVQKSYVAEAIGPIACSKDGVYLVGGASSGHTYIWEDATLIINWFAPFVNVSLDDLNKEVHVTDKRKKVYDHGS

SEQ ID NO: 169530 - protein, 456 aa, Oryza sativa
  Clone ID: PAT_MRT4530_67942C.1.pep
MDTEPLLSPLSPSPHLLHPLPEHAEVSTFSPPLSPCPSPASSYKERIIFGAHPPPPPPPPPPPPPPPRGRRYYRRVSGDDLDVPSCSSSPSPPFDEENPPPNPPWLFDFIGGRKNLHRSRTAPAMAPLNAAAIAAAAASGDSRNPPPPPRRPAIVLHAFLFLLAYLAMGVTFYAALPGNFTSSAGPTHPVADALYFCIVTLCTIGYGDITPATPAAKLFSISFVLIGFGFVDILLSGMVSYVLDLQEHLLITALKNPRSVRKHRHNYIFDLKKGRMRVRMKVALALTVVAICVGVGAAVLKRVENLGWLDAVYLAVMSVTTVGYGDHAFRTLAGRLFASAWLLVSTLAVARAFLYLAEMRIDKRHRAMANWVLSRDMTVSEFLAADIDNNGYVTKSEFVVYKLKEMGKISEKDIMMICDQFQRMDSGNCGKITLSDLLESHQLVTDLNEKKKGKKS

SEQ ID NO: 169531 - protein, 91 aa, Oryza sativa
  Clone ID: PAT_MRT4530_67943C.1.pep
KRGVVLILNMAVKHLSKELTKWPSTDHKSTLNQCLSSAKTHRMGAKPTLGSPVTTESLACYKGPTRPHKERPGSLATLGQMPHETTKGPLG

SEQ ID NO: 169532 - protein, 97 aa, Oryza sativa
  Clone ID: PAT_MRT4530_67944C.1.pep
WRGWWWVGAGTVPPPLARTHAPVLQPQPQQAFAEKLASQPAAARCAGRRKILKKLASCARAGARRGGVELRSCGGGAMMVAWRGRTEVVVVETMWRH

SEQ ID NO: 169533 - protein, 97 aa, Oryza sativa
  Clone ID: PAT_MRT4530_67945C.1.pep
MRTARGAHLSVTEREKEARGPAISGGVFFFLLSLGSALGRRRDVAARLGSATGGRGGGSELRWSYASDGGAGRRGGVAWRDVAVSWRLGAGELWVAG

SEQ ID NO: 169534 - protein, 94 aa, Oryza sativa
  unsure (1)..(94): unsure at all Xaa locations
  Clone ID: PAT_MRT4530_67946C.1.pep
MARRDQLVSFLCFFLIVSAVAGGLCVSATVLPMRVGKQYVVGGRSGWRTPPPASVDLYAKWAAGIRFYVADSIEFVYKNDSVXKVDKFGYYHCN

SEQ ID NO: 169535 - protein, 87 aa, Oryza sativa
  Clone ID: PAT_MRT4530_67947C.1.pep
RRWITARLTHAQAQWSERRGYQSDVASHDLDASIPRAGPPQRHIECIGPCISWFLDHVHADLSFTGSMALTSTNVREKFLLPRRSGV

SEQ ID NO: 169536 - protein, 93 aa, Oryza sativa
  unsure (1)..(93): unsure at all Xaa locations
  Clone ID: PAT_MRT4530_67948C.1.pep
YELNSDRDPNRNPTGLGGPSHGSYIFVRGVTGGGIASPWAYGEENARGREGXAGAIDYFLYIDARYITRVPLPSXHFFPLRSASSGNCIGCPT

SEQ ID NO: 169537 - protein, 97 aa, Oryza sativa
  unsure (1)..(97): unsure at all Xaa locations
  Clone ID: PAT_MRT4530_67949C.1.pep
MRWMGHDIQARQLRLFRHAPETTXKTVIWNGPMGVLEFDKFAGGTEAFAKMLADLSGXGVTTIIGGGDSCAAVVKVGVAYVMCHILTGGGASLELLE

SEQ ID NO: 169538 - protein, 2264 aa, Oryza sativa
  unsure (1)..(2264): unsure at all Xaa locations
  Clone ID: PAT_MRT4530_6794C.1.pep
ISVGKSLPQRLVDQINCYANISEGELWTYTGVKQISQATCFLSTRFWHARWDLXKVRRQSLLMAEKQPPPPSSPGSVKGKAPKPGLTEIIDDNVMPIDPEKFTPEQKQEFEAMMQQARDQFLNSFMQTRKRTFVQKYKIKVVANSPETGSSKDGEVKQAPEGSAHLSNKGATDGSLGNQGDNPQGVHGVQGDGAHGAQGDGAQGPQGGNFNQNSELAQDFFNNFQDRVDYAVHHALINQSGVLVNTLSNMMKTIADDSIAEHQAAGPPPAQAVPSVAPTTQPTAPTSTPLPATAAMAPGQLMNPRLLMREHPKSTGQIANQPTQDQVAAMFLPPPPIVDLVQQQPIQQTPPIQPVVDPXNNRSYNQLSKHHQDSSLCNRXAHATKAAASADPTDSAICKPSGPRAFGSPSTTGWHGGASDGSXHLQQPKGAAQQRPWADVIADVMREQFGLKPKETGSLYRQPYPEWFERVPLPHWFKVLDFSKFSGQEGVSTYEHISRFLAQCGEASAVDALRVRLFRLSLSGSAFTWFSSLPYGSINSWADLEKQFHSYFYSGVHEMKLSDLTAIKQRHDEPMHEYIQREKFLFEDFDSLSHLIQKVTLHEHRSAEVRKSSKKVNHVCPYMYGSDDEEDDSEIAAAEWVRSKKVIPCQWVKSPGKEEKYDFDITKADKIFDLLLREKQIQLPAGHTIPLAEELRKRRYCKWHNSGSHSTNDCKVFRQQIQVAIEGGKIRFDDSKKPMKVDGNPFPVNVVHTAGQAADRARAKGFQVNSAKIINKYQRKYDKQQERRYEGYDDGFDPHWGCEFFRFCWNEGMRLPSIENCPGCSDIIEGSSRSYNRDNRLRQARLPVHQRLGPMNQDCGQEEEAIRKNQWCPSGIFTKNQKRRVHRLRSRERFQEVEEEINHRLRKPKPRQEWRVKNQVPVADDAAADEADVDEVEEESAKLVLSPEQAVFEKPEGTENRHLKPLYINGYVNGKPMSKMMVDGGAAVNLMPYATFRKLGRNAEDLIKTNMVLKDFGGNPSETKGVLNVELTVGSKTIPTTFFVIDGKGSYSLLLGRDWLHANCCIPSTMHQCLIQWQGDKIEIVPADSQSKMENPSYYFEGVVEGSNVYAKDTVDDPDDKQGQGFMSADDLEEIDIGPSDRPRPTFISKNLSPEFRTKLIELLKEFRDCFAWEYYEMPGLSRSIVEHRLPIKPRVRPCQQPPRRCKADMLELVKAEIKRSYYAGFIRPCRYAEWVSSIVPVIKKNGKVRVCIDFRDLNKATPKDEYPMPVADQLVDAASGNKILSFMDGNAGYHKIFMAEEDIHKTAFRCPSAIGLFEWVVMTFGLKSAGATYQRAMNYINHDLIGWLVEVYIDDVVVKSKEVEDHIADLRKVFERTRKYGLKMNPTKCTFGVSAGQFLGFLVHERGIEVTQRSVNAIKKIQPPENKTELQEMIGKINFVRRFISNLSGRLEPFTRLLRLKADQQFTWGAEQQKALDNIKEYLSSPPVLISPQKGIPFRLRHYLLSNECTVICEADEVKYMLSAPILKGRVGKWIFSLTEFDLRYESPKVIKGQAIADFIVEHHDDSIGSVEMVPWTLFFDGSVCTHGCGIGLVIISPKGACFEFAYTIKPYATNNQAEYEAVLKGLRLLKEVEADTIEIMGDSLLVISQLVGEYECKNDTLMVYNEKCLELMKEFRLVTLKHVSQEQNLEANDLAQGASGYKPMIKDVKVEIAAVSADDWRYDVHQYLSNPSQSASRKLRYKALKYTLLDDELYYRTIDGVLLKCLSAVEIMGTPYPHGMVIRLAIDASHGLEASQLSGRSAASPLCRLVLATAIANSNNDFTAGLPPSPPTGVSAYTVGLLCRRRWASTTSPLARLIRRRLVFPPARLAYYAHVVGRLRLHRPAASSAADWCFRLHGWSIMPPLLGVYVFTDRPPRPPPTIVTACTAGLLCRCYWASTTSLPACLCRRRLVSSPIRIQIQICTKGIHGFKLIPYAPGMDQSEHHHRLAIVTADWCLHLYGWLVTPPLLGVYVFTDRLALVRRRLMFPPTRLAFYTALFRSCHDAVWVYQAIDWIQYHCFSPRYFWPTMLEDCFKYYKGCKDCQKFGVIQRAPASAMNPIIKPWPFRGWGIDMIGMINPPSSKGHKFILVATDYFTKWVEAIPLKKVDSGDAIQFVQEHIIYRFGLPQTITTDQGSIFVSDEFVQFAGSVGIKLLNSSPYYAQANKVVGSIQVPPYKLVYGHEVVLPWEVRIGYRQTELQNDLTADEYYNLMADEREDLVQS

SEQ ID NO: 169539 - protein, 280 aa, Oryza sativa
  Clone ID: PAT_MRT4530_67950C.1.pep
MVMSSRKDGEENGSTVVVGRGGTLRPDPSPRRQERPDPPLRRRGRWDPLPRRGGRRDPPPRRRGRLMGRAATVEVGPVAAATTTTTAPARMTMVATMTMTTSATVTPTPPLYCLATTAWTSAGGGHGEVSRRPLAPPPPAATPPPPPAAGPPPPPLSPPDLAEGMAPQPGRRRLRRIRREGEGMRRRGTAATASSIRGRSQPHHAVSASTSHGAAARPRPRRRPATTPTASRSASLASAPAAPPPPPVRPLHPLAPSGEEGERKRKRRKERKIRKKERRE

SEQ ID NO: 169540 - protein, 58 aa, Oryza sativa
  Clone ID: PAT_MRT4530_67951C.1.pep
GDFLAADADADEDEDAVCACARRSSLVLVNEQLRIDHGWVGRNPSVLTIDRSNLGAPC

SEQ ID NO: 169541 - protein, 42 aa, Oryza sativa
  Clone ID: PAT_MRT4530_67952C.1.pep
EQHLCVPCIIFVVCPLVVFGGTLLLHNHLALNLFILKLAPSL

SEQ ID NO: 169542 - protein, 333 aa, Oryza sativa
  unsure (1)..(333): unsure at all Xaa locations
  Clone ID: PAT_MRT4530_67953C.1.pep
KGAPLPWGTYPDPRARAAVAAGSARNSGRCRRIRVRERPQPLPPPPPSEAAASPTTPSRPPHRTEPPHGLVLNVARPRRLRPAATPXPAFAPAAPPPPVRPLHPPPPPFPPQISLLAAPPPWTTPRTPPRLPPPPPPPPQPRPPRRSTSSFSARSSSCSRPRRSRSRRATPRRRSSCRSRPCPASPPTSTPTSARSAPSASSSPRSXQPQPPQPPPQPQPQQQQPHSGAPPTISPRSSPLANPPPPPPWTPPRTPPRPPRHPPWRRTSCTSARSSSCSRPRPAMSFFPSNIDAHLPLPGPIRFQQPLPQQPPPPQQQIHSWGPSLLQSWASLQ

SEQ ID NO: 169543 - protein, 393 aa, Oryza sativa
  Clone ID: PAT_MRT4530_67954C.1.pep
PVVLKPPPSMVRPAVCVVESTWDILRSFAPEEDSHAHAPASRSGGDSACQDAGEEEDDAAAVLTLEELRLGETSEEFTGTSSLSTTNDDETSSTTTESMFYISPNGRFRRKIRSWNRGMLLGSGSFGTVFEGISDEGVFFAVKEVCLCDQGSNAQQCIFQLEQEIALLSQFEHENIVQYYGTDKEDSKLYIFLELVTQGSLASLYQKYRLRDTHVSAYTRQILNGLTYLHERNIVHRDIKCANILVHANGSVKLADFGLAKEITKFNVLKSCKGTVYWMAPEVVNPKTTYGPEADIWSLGCTVLEMLTRQLPYPGLEWTQALYRIGKGEPPAIPNCLSRDARDFISQCVKPNPQDRPSAAKLLEHPFVNRSMRSIRSMRTSSRSNSSVRGING

SEQ ID NO: 169544 - protein, 624 aa, Oryza sativa
  unsure (1)..(624): unsure at all Xaa locations
  Clone ID: PAT_MRT4530_67955C.1.pep
MSEDGSGGSGDGDGDGDGGGGARAKPIPDLRGGTGAGGGVCRGGGRWEPPDKVPENVLKCVLEFLTAARDRNAASLVCRSWYRAEAQTRXELSIGNCYAVSPRQRRWSGSEGCAPWWLKGKPRFADFSLVPYGWGADVSPWVAPLGPAYPHLERICLKRMTVSNDDLALIAKSFPLFKELSLVCCDGFSTLGLAAIAERCRHLRVLDLIEDYIDEEEDELVDWISKFPESNTSLESLVFDCVSVPFNFEALEALVARSPAMRRLRMNHHVTVEQLRRLMARAPQLTHLGTGAFRSEPGPGGALSVTELATSFAASRSLICLSGFRDVNPEYLPAIHPVCANLTSLNFSFANLTAEELTPIIRNCVRLRTFWVLDTVGDEGLRAVAETCSDLRELRVFPFDATEDSEGSVSDVGLQAISEGCRKLESILYFCQRRTNAAVIAMSKNCSDLVTFRLCIMGRHRPDRITGEPMDDGFGAIVMNCKKLTRLSVSGLLTDKAFAYIGKYGKLIKTLSVAFAGNSDMSLQSVFEGCTRLQKLEVRDSPFSDKGLLSGLSYFYNMRFLWMNSCRLTMRGCRDVAQQMPDLVVEVMKDHLDDEGEMETVDKLYLYRSLAGARNDAPSFVNIL

SEQ ID NO: 169545 - protein, 84 aa, Oryza sativa
  Clone ID: PAT_MRT4530_67956C.1.pep
ALYELCKLAENMHRIVCASGAAPALTDSARVADVLIFFAKSSESRHELSTVRCLFRVTRSSGLDGSKIKEDMSFPETFHHLTAH

SEQ ID NO: 169546 - protein, 27 aa, Oryza sativa
  Clone ID: PAT_MRT4530_67957C.1.pep
AKVPGYNTWPLKVEPSSFLKCSPLGVG

SEQ ID NO: 169547 - protein, 290 aa, Oryza sativa
  Clone ID: PAT_MRT4530_67958C.1.pep
MGMRCKKHPYQAGGGVCATCLNDRLLALAAAQNGASSSPPPPAAPPAAAAPAFPRSVSPYVSRRKSDSSGGGALKHHPSLLFFRTPQVGPAYGSSGGLEEGDIGYEKRRAGKFSVIATLFGHHHHHHRSEEKDKGGDNRESRNRSWLAGFMPRRRKKQPPAPAAAAAASSPPPRRSCRVVSNRGLSPERDCDGSDEESSSPTDPPWQPSPSPMRRTPCRRRQTSTMPSGFAVCLSPLVRPSPGRRHRHAHPPDPGTFSCELRPSPLHNLSSAASITRCRSRKLADGGRFR

SEQ ID NO: 169548 - protein, 383 aa, Oryza sativa
  unsure (1)..(383): unsure at all Xaa locations
  Clone ID: PAT_MRT4530_67959C.1.pep
MAQEGKLDLLLKMMEDAEKKREETGGVRCVESSGAAVVEGGGGIAHTHGGIEANWVKVALLNFTGNASFWLQSVRHQMVGISWMELCDMVCHKFTRDRQATLIRQWIHVGQTGSVAEYVERFDNLMHHLLSYDNALTPPYFLTKFVDGLKDEIRGVVMIQKPVDLDAACSVAMLQEEILDGNKKISFRKAEGTSFTKAFTRPVQGTVCQKSPVATPGEEKRILESARTTPKDDKVSQLRSYRRSKGLCFTHGERWSKDHKCAQTVQLHVVELEAFQLEEETDSLETILESNPEENNLMTISVHAWNGTDSAHSLRVKGLIQGTELLMLINSGSTHSFVDEQMIHHFPGVVSTTPPVKVRVADKQLPDCXWWLQGRCYRSNFKL

SEQ ID NO: 169549 - protein, 79 aa, Oryza sativa
  Clone ID: PAT_MRT4530_6795C.1.pep
MGLSLQKTQITNPFRNIQESQGSPSILRALPVDSAQPNAYRLSREDSRQCKVQPRQIKWHVFAPRRGTQQYAEWQINEK

SEQ ID NO: 169550 - protein, 92 aa, Oryza sativa
  Clone ID: PAT_MRT4530_67960C.1.pep
MRRWIRLPLCAPCTWIQLQRRGSSAVAGGASADPAPPSSRMDPARVKTMGRRQDGGNLRGAYGINAKSMHAMISQFLDQRIRRHGVEFYPVN

SEQ ID NO: 169551 - protein, 87 aa, Oryza sativa
  Clone ID: PAT_MRT4530_67961C.1.pep
MMDLSTTSVVAAKAYKYRAESLVKDYLLADCYVSYTAVLGGILMCKMVYDITHLISSLYYKGYGSLTKIQKLEWNNSLPSILLQPIL

SEQ ID NO: 169552 - protein, 186 aa, Oryza sativa
  unsure (1)..(186): unsure at all Xaa locations
  Clone ID: PAT_MRT4530_67962C.1.pep
MCSIWLAITFWLMFQLPASMFVARSTKANASDMATMRVLAQFLGADRALGWGRASPDPCDGSWLGITCDASGYVVYIIANNSGLTGHLPRETRNLSMLAAIYLNNNSLSGDVPPLGPNLMEISLSYNRFMSISPEFFKGXPFHPWTIPDSWRDMEILFSLSAVNANIIGPIPEFVGDHFKYLGTLK

SEQ ID NO: 169553 - protein, 885 aa, Oryza sativa
  unsure (1)..(885): unsure at all Xaa locations
  Clone ID: PAT_MRT4530_67963C.1.pep
MTTTTTTRLLLAAILLAVAAADDDGQTLLEIKKSFRNVDNVLYDWAGDGAPRRYCSWRGVLCDNVTFAVAALDLKSNELSGQIPDEIGDCTSLKTLILKNNQLVGMIPSTLSQLPNLKILDLAQNKLNGEIPRLIYWNEVLQYLRLNICNVGQIVRGLRSNNLEGSLSPEMCQLTGLWYLDLSYNRLTGEIPFNIGFLQVATLSLQGNNFSGPIPSVIGLMQALAVLDLSFNQLSGPIPSILGNLTYTEKLYLQGNRLTGSIPPELGNMSTLHYLNLANNNLEGPIPDNISSCMNLISLNLSSNYLSGAIPIELAKMKNLDTLDLSCNMVAGPIPSAIGSLEHLLRLNFSNNNLVGYIPAEFGNLRSIMEIFLFLCFSDLSSNHLGGLIPQEVGMLQNLILLKLESNNITGDVSSLINCFSLNVLNVSYNNLAGIVPTDNNFSRFSPDSFLGNPGLCGYWLGSSCYSTSHVQRSSVSRSAILGIAVAGLVILLMILAAACWPHWAQVPKDVSLSKPDIHALPSSKXPPKLVILHMNMAFLVYEDIMRMTENLSEKYIIGYGASSTVYKCVLKNCKPVAIKKLYAHYPQSLKEFETELETVGSIKHRNLVSLQGYSLSPAGNLLFYDYLENGSLWDVLHAGSSKKQKLDWEARLRIALGAAQGLAYLHHDCNPRIIXRDVKSKNILLDKDYEAHLADFGIAKSLCTSKTHTSTYVMGTIGYIDPEYACTSRLNEKSDVYXLWHCPPGATYRQKASXNECNLHHLILSKAADNTVMEMVDPDIADTCKDLGEVKKVFQLALLCSKRQPSDRPTMHEVVRVLDCLVYPDPPSKPALPPALPQSSTVPSYVNEYVSLRGGSTLSCENSSSASDAELFLKFGEVISQNTE

SEQ ID NO: 169554 - protein, 210 aa, Oryza sativa
  Clone ID: PAT_MRT4530_67964C.1.pep
LACNDGRDPAGRRWLPGAPPPQPTSGGGGTPATRVRGVGVGGGGGGGGGGGRQGEAGWVGRGGDQARHRRLVLGRHHLLERVPVGRISVGYLDGLGDAYEQGLVKAVGVSNYSEKRLRDAYERLKKRGVPLASNQVNYSLIYRNPEENGVVLNWLICQGNVVPIPGAKNAEQAREFAGALGWSLTDQEVEELRSMAREIKPVIGFPVEKL

SEQ ID NO: 169555 - protein, 377 aa, Oryza sativa
  Clone ID: PAT_MRT4530_67965C.1.pep
MMAGTLQVAGGCLAPLLPSRQAAAAVRPPRASGASASAAAAAAAVEEDGKVRLGGSDVAVTKLGIGAWSWGDTTYWNEFQWDDRKLKAAKGAFDASVDCGITFFDTAEVYGAGISGAINSESLLGRFIKERQQKEQVEVAIATKFAALPWRLGRGSVISALKDSLSRLGVSSVELYQLHWPGIWGNEGYLDGLGDAYEQGLVKAVGVSNYSEKRLRDAYERLKKRGVPLASNQVNYSLIYRNPEENGVKAACDELGITLIAYSPIAQGVLTGKYTPNNPPTGPRGRIYTPEFLTKLQPLINRIKEIGGSYEKTPTQVVLNWLICQGNVVPIPGAKNAEQAREFAGALGWSLTDQEVEELRSMAREIKPVIGFPVEKL

SEQ ID NO: 169556 - protein, 139 aa, Oryza sativa
  Clone ID: PAT_MRT4530_67966C.1.pep
RAPVYFFFPGGPYKGKKGKGGPHIYYKKDRGYPGRGPSATKGGEGKKNLFWGGGGGSRSESPENSPFEGFPPQLKLGSGGGIKDSFNCFFGGKGSWRNFFLISLGPPESSFGENSPLPRGSLNLILFWGGGNTPNGVGG

SEQ ID NO: 169557 - protein, 70 aa, Oryza sativa
  Clone ID: PAT_MRT4530_67967C.1.pep
AEASSSKMYSPISNVGIQAHCFVSPEYIKARSVHQFKNKVGIGVCSNFVTPFCTFGGSKLVGSFRSVEKN

SEQ ID NO: 169558 - protein, 32 aa, Oryza sativa
  Clone ID: PAT_MRT4530_67968C.1.pep
LIPVEASPTPPLNHEAIARPRPRLGQTAIGSV

SEQ ID NO: 169559 - protein, 227 aa, Oryza sativa
  unsure (1)..(227): unsure at all Xaa locations
  Clone ID: PAT_MRT4530_67969C.1.pep
ARSRDLPLLRPPSLXPXVRPXLPPVLWXSPLXPSXXPVXXLSLXPSSPXPPCALXXRXFLPXPXPVXXGPAXAXXCXPLPSFXSCLACRPRLSSSPPSAAPRXSXVPPAPAPPPXRXPPPRRGPXGXVRSRRPGRAARPRPGXXPPPPPRPGPRRXPPRPARAPGPXRAPAARRWCGAPRRPPPCTRSRSAPRRRAPPLPPPPPMDPRDPVGSFSSLPPYPEIRGGP

SEQ ID NO: 169560 - protein, 1922 aa, Oryza sativa
  unsure (1)..(1922): unsure at all Xaa locations
  Clone ID: PAT_MRT4530_6796C.1.pep
MAEKPPLSPSSASPSTVKEKIQKLGLTDINEGNVVPIDPEKFTPEQKKDFEAMLQQARDQFLNSFMQTRKGTLVQKYKVKVVADDPGTSSSKGEDGKQAPDGSARLSDKGATDGSLGSQGDNSQGVHGVQGDGVHGVQGDGAQGLQGRNLNQNSDAAQDFFNNFQDRVDYAVHHALINQSRVLVNTLSNMMKSIADGSIVEHQAAGPVYFQGGVFPNYRPLITNTQPSIQAVPPVAPSAQPTEPASTPLPTPSVLAPGQLVNPRLLMREQPQHSGQVVNRPTQDQIAAMFLPPQPAIDPIQQQPIQQTLPSQQVVQPIQQQVVQPVQQTPPRQQPPRPIQQTSLRQQIVQPIQHQGSMSVSAGGNLNYQNHHPSPQAQYQSGGLAQPQFVSQYGQFEPMQQQSQGAAQQRPWADVIADVMREQFGLKPKETGSLYRQPYPEWFERVPLPNRFKVPDFSKFLGQDGYDCTIREKFSSEDFDSLSHLIQKVTLHEHRSAEARKSSKKINHVCPYMYGSDDDEDDSEIAAAEWVRSKKVIPCQWVKSSGKEEKYDFDITKXLARFLICYSERSKFNSLLVIRFHRMRNXGKKRYCKWHNSGSHSTNDCKVFRQQIQVAIEGGKIKFDDSKKPMRVDGNPFPVNMVHTAGRTTDTGRMRGYQVSSARIINKYQRKYDKQQERHHEEDNGGFDPHWGCEFFRFCWNECMRLPSIEDCPRCSDVAGGSSRLYDGGNWPKQTRVPVHQRLGPVNQRGDSEDDENKKTQWCPPGIFTKNQKRRVQRLRSRERFQEVEQEINHRLKKAKPRQEWRVKNQAHVADDVAADEAKRLVKGKSVVTALVNMVFTLPTEFGIDQADVDEVEEESAKLVLSPKQAVFEKPEGTENRHLKPLYINDYVNGKPMSKMMVDGGAAVNLMPYATFRKLGRNAEDLIKINMVLKGFGGNPSETKGVLNVELTVGSKTIPTTFFVIDGKGSYSLLLGRDWIHANYCIPLTIHQCLIQWQGDKIEIVPADSQLKMENPSYYFEGVVEGSSVYTKDTVDDLDDKQGQGFMSADDLEEIDIGPGDQPRPTFISKNLSPEFRTKLIELLKEFRDCFAWEYYEMPGLSRSIVEHRLPIKPGVRPHQQPPRRCKADMLEPVKAEIKRLYDASFIRPCRYAEWVSSIVPVIKKNNKVRVCIDFRDLNKATPKDEYPMPVADQLVDAASGNKILSFMDGNAGYNQIFMAEEDIHKTAFRCPGAIGLFEWVVITFDLKSAGATYQRAMNYIYHNLIGWLVEVYIDDVVVKFKGIKDDIADLRKVFERTRKYGLKMNPTKCAFGLSAGQFLGFLVYERGIEITQRSINAIKKIKPPENKTELQEMIGKINFVRRFISNLSGKLEPFTPLLRLKADQQFTWGAEQQKALDNIKGYLSSPPVLIPPQKGIPFRLYLSAGEKSIGSVLIQELDGKERVVFYLSRRLLDAETRYSPVEKLCLCLYFSCTRLRHYLLSNECTIICKADVVRYMLSAPILKGRVGKWIFSLTEFDLRYESSKAIKGQAIADFIVEHRDDSIGSVEMVPWTLFFDGSGACFKFAYTIKPYATNNQAEYEAVLKGLQLLKEVEADAIEIMGDSLLVISQLAGEYECKNDTLIVYNEKCQELMKEFRLVTLKHVSREQNIEANDLTQGASGYKPMIKDVKVEIAAITADDWRYYKGCQDCQKFGAIQRAPASAMNPIIKPWPFRGWGIDMIDEFVQFADSVGIKLLNSSPYYAQANGQAEASNKSLIKLIKRKISDYPRQWHNRLAEALWSYQMACHGSIQVPPYKLVYGHEAVLPWEVRIGSRRIELQDGLTADEYYNLMADEREDLVQSRLRALTKVTKDKERVARHYNKKVVPKDFSEGELVWKLILPIGTRDNKFGKWSPNWEGPFQIYKVVSKGAYMLQGLDGEVYG

SEQ ID NO: 169561 - protein, 204 aa, Oryza sativa
  Clone ID: PAT_MRT4530_67970C.1.pep
MGKYMRQAKVVAAAVMELAAVAPAPLGVRTRTRSLALQKRQGGEYLELRSRRLEKLPPPPPPPPRRRAPVTTPDAPAAESAEAEGSFGGGGERPRAGGHGKVQSCLADQAPGITGGVLDPPAAKHATGTVADRRPPLHKDKPTGGAKKPHTSSGGGRMCGSVNSCIGYRHQVSCHRADAKFTTPAVPFGDILLTCRLACQGGEK

SEQ ID NO: 169562 - protein, 157 aa, Oryza sativa
  Clone ID: PAT_MRT4530_67971C.1.pep
MASRCFSLVPAEAAVAPLCSCFGFWIQEVKVKASTVAPPPPHQSTRSSSCLNPFPRSYACRPHSYHSDDGGRFKLNGVDEPCPPYCCSQWYRRWMAPRHSLSCQGGPSPRWVSWGYGGGWWRRGGRGGLGLLVLQQQRPVRGWKRQRRGDSVGGGWE

SEQ ID NO: 169563 - protein, 123 aa, Oryza sativa
  Clone ID: PAT_MRT4530_67972C.1.pep
MSEKKRGAGTRKDEVVTREYTINLHKRLHGCTFKKKAPNAIKEIRKFAQKAMGTTDIRIDVKLNKAIWTNGIRSVPRRVRVRISRKRNDEEDAKEELYSLVTVAEIPAEGLKGLGTKVVEDEE

SEQ ID NO: 169564 - protein, 139 aa, Oryza sativa
  Clone ID: PAT_MRT4530_67973C.1.pep
MSEKKRGAGTRKDEVVTREYTINLHKRLHGCIVCSNDLIHYAPDIVSTFKKKAPNAIKEIRKFAQKAMGTTDIRIDVKLNKAIWTNGIRSVPRRVRVRISRKRNDEEDAKEELYSLVTVAEIPAEGLKGLGTKVVEDEE

SEQ ID NO: 169565 - protein, 89 aa, Oryza sativa
  Clone ID: PAT_MRT4530_67974C.1.pep
MREGRRRKKRREDRRGHDAVAGVHDAAALDLGGARRRRPSKRPAPDRSTCRRPSSSANGVAARRRSHRSTCSMPPPSTSHARRRRHGGP

SEQ ID NO: 169566 - protein, 751 aa, Oryza sativa
  unsure (1)..(751): unsure at all Xaa locations
  Clone ID: PAT_MRT4530_67975C.1.pep
MSSSAAPARKENGTVAAPAASSAAASNTFHVLNSGSAAAAVAAGRAYVQSPRATALRSPQVRAITNYGMFPTTGASAARTAMAGRTINGGASMLTTTTTTTTPPHLIQQLMVLAGWTTRSPWLQNHASMSPRGSPSSFSSGRFSDPRGMPSTFAYRTPGASSGRVIDNGAVAGRGKQMAGTSRSLEIIAVDTGAGSSKNASPAGGHANAGVVVKRLAPVLAMPSAGAAGKGKEEAAAAAAAPSPNGRGRKRAPPKVSNVPAAGXSDKKPRKRAKKAAAAGSKVTVPADVIIVDDDVNQPSSNTDAQSNADDDLKKAAVASPAATRSKTRSKCKTSSNSAAASPSARSSAIAARKKNNATATGTTATPPPPEAKKHTVLTWLIDTGFLKDKAKVFYVPGDAGAAEKVISGMVTKTGIRCRCCNTVVPVAVFETHARCERPGQPWEKLLLMSGKPLSKCMQEAWAQERVTAMRAREKAMASLEQEKEKSSQAKRKLAKTKKMQLLDGVVVVSTSSPRHQVKKNGGGKDCSDDACGVCADGGQLLCCDTCPSTFHPDCLAIXTTVAPDGSWSCHFCRSSVLPFHGRKLAEMPFAGTLPAYQKQGMMRRLVKAVEKVLASLQVENLVIPAVADLVETWKRSFSFRPMQAEVRDEAKKLSLVAITGTTLLQKPISAHQQQPVPSRKGSSSSRSKRASAPATVTGSSKEEEEQMTTTAARLTDDELAFLEMAPLCSFTDLLAGGVYPTGLQLLRGMK

SEQ ID NO: 169567 - protein, 101 aa, Oryza sativa
  Clone ID: PAT_MRT4530_67976C.1.pep
SFKLNLTFFFLRRRTKAGSLGPNSRKLQILQKLILLNTAEEYLGLWRSSPIFYFASSITASSLDFEQSSARQTSFFSRFLAFDKINSIKCISLNLHVIFLT

SEQ ID NO: 169568 - protein, 1103 aa, Oryza sativa
  Clone ID: PAT_MRT4530_67977C.1.pep
MASSSSTTAVNPLIGLQVPERLNKQNHAIWQAQVLATLRGARLEHYITGEAAPPVAELVTTDKDGKTKTTANPAYESWLATDQQVLGYLFSSLSKEVMTQVAASRNAAQAWRAIEEMFSSQTRARAINVRLALTTMQKGTSSIAEYFGKMKSLGDEFAASGKPLDDDDMVAYIVNGLDEDYNSVVSALVTRIEPITVSELYAQLLNFERCDSRSDRLVLSGDSMPRESICGDGPGVGLVGSYSFVNTVSKGGRGGGFNRGRGGANHGRGKGRGNAPQNSGGGRGNKPRCQLCFKVGHVVADCWHRYEEDFVPDEKFVAAATSSYGVDSNWYIGTGATDHITSDLDKLIIREKYKGNDQVHTASGAAYVELHPKFFYVKDRATKIPLLRGRCHQGLYPVPPSKSSSRIKQVCGAVKPSYERWHSRLGHPSPVVVASNNLPCLSQSNKESVCDACQKTKSHQLPYSESIHKSEYPLQWVFSDVWGAAPESAGRYKYYVSFIDDFSKFTWIYLLKFKSEVFSKFLEFQALVERLFNRKIITMQTDWGGEYQKLHNFFAQAGITHHISCPHTHQQNGSAERKHRHIVEVGLALLAFASMPLKFWDEAFLAATYLINRIPSKVIDFATPLEKLLQQKPDYSSMRIFGCACCPNLRPYNVYKLQFRSKQCVFLGYSNFHKGFKCLDVAAGRVYISRDVIFDETVFSFANLNPNAGAKLRSEILLLPSHLRNFQPADHGGDNVTDQQTNSASTANAANDFSGANGSNNAGSGAASDDGHDELEIGRNDTASDDTDPDDAGTVSPSSNRMEAQTQEDGDGTSFSSPSQPRAATSPTQGAEYMALMKNETWHLVPSSKGQNIIDCKWVYEIKRKADESLDRYKARLVAKRFKQRYDIDYEDIFSPVVKAATIRIALSLAMSRGWSLRQLDVQNAFLHGLLEEEVYMKQPPEYENKAMSNHVCKLDKALYGLKQAPRAWRLTLFLGNRSFHKNKNGILLTQEKYAADVLKRVGMEDCKPELGVQAPKASRLWCDNLGATYLSSNPVFHARTKYIEIDFHFVRERVSQRLLEIAFVPTQDQVADGLTKPLPLQLLEKFRYNLDLERLRLREDVR

SEQ ID NO: 169569 - protein, 149 aa, Oryza sativa
  Clone ID: PAT_MRT4530_67978C.1.pep
MALLPRTARLALLSAPRAYSAAATGAGAAPARYAGAPPPAPQSKAAEFVISKVDDLMNWARRGSIWPMTFGLACCAVEMMHAGASRYDFDRFGVIFRPSPRQSDCMIVAGTLTNKMAPALRKSVPPSSPRLLRFRVPVFRSGNLVLPSF

SEQ ID NO: 169570 - protein, 63 aa, Oryza sativa
  unsure (1)..(63): unsure at all Xaa locations
  Clone ID: PAT_MRT4530_67979C.1.pep
YRLVRLYKKSSSPYFSHPALFVEPLLQLNRHQHHPYSVLSQFQTSRYHQFAXEGLGGLFHYFF

SEQ ID NO: 169571 - protein, 267 aa, Oryza sativa
  Clone ID: PAT_MRT4530_6797C.1.pep
MASDGPQENCQCSFCHKDFEGRSSCAEHELQCKNNPDVHSQTEPSGNAQGGIGSLDVHVPRRKRTARNQPLPEQHLKKPASDYAQGGTSDAPETPPKPTTSEVKVDSAVNAPDITIPDNKDPSVMQKQKKKLDLNLQPHSDSSDQEEQADNFSSINDLSTIDTNSDKKKNTITGVADTNIPDHKDPSRMQMQIKLDLNLPPHDDSSSSMDDLKTLAPTDTNSDKETNTGNGGVDTNIPDHSDPSAMQTKNKLDFNLPPRNDSSDSLV

SEQ ID NO: 169572 - protein, 61 aa, Oryza sativa
  Clone ID: PAT_MRT4530_67980C.1.pep
RLVERVLWIERNDDVFANIDKISIAGYRQIFSSFAELKGAAERTRSRNADKATTSQLHLKT

SEQ ID NO: 169573 - protein, 49 aa, Oryza sativa
  Clone ID: PAT_MRT4530_67981C.1.pep
MASAQELLVATNSVVVPYLCDRGGEKVVAGADKGKAGVDFSYSWMGLPK

SEQ ID NO: 169574 - protein, 91 aa, Oryza sativa
  Clone ID: PAT_MRT4530_67982C.1.pep
MEDTAIADELRRGTWMTKDAAAGDELQCGVDGGGCGRQRQAPAWGVEMEDAAAGDEFRRGADDEGCGRRRRAPAWDVDGGTTGDDALMLGS

SEQ ID NO: 169575 - protein, 88 aa, Oryza sativa
  unsure (1)..(88): unsure at all Xaa locations
  Clone ID: PAT_MRT4530_67983C.1.pep
XPQAWXEKGGGXXXWQRXDXKRFGVKRPRGFFPQFXGTVXKKXXGPSXXCXIRNFXLIRGGNWGTRGPPPFGXLLXXXXXXXCPIVCN

SEQ ID NO: 169576 - protein, 114 aa, Oryza sativa
  Clone ID: PAT_MRT4530_67984C.1.pep
MGAVPTPPDGQGSQNTSNDPLERSLGGYVSLLQNDQTSLLAPHSNPNTQEAASGSKGKNVINIDNGDEVRKEKRLSWTPDEDVRLVSAWLFNSNDPINGNCKKNDHYWGDVHGH

SEQ ID NO: 169577 - protein, 148 aa, Oryza sativa
  unsure (1)..(148): unsure at all Xaa locations
  Clone ID: PAT_MRT4530_67985C.1.pep
CSSSPSSSTTARGLAVNVVHTTFNSPRXTDPAPTWSSRCWHSTPPVPXARRSGGWCGGAAARPGGGARWRARSSTGSGTRHHAPLHAQLLAPPLPGTGTINEIREGVGKHYSVNVPLDTGRWAAKASSSRAPCAGMLPCVIAVGGEPR

SEQ ID NO: 169578 - protein, 128 aa, Oryza sativa
  Clone ID: PAT_MRT4530_67986C.1.pep
RHEGSSSGGGGGGYHNHHHHGGQPQMQRKGGSNPKSPIVWKAADEMIGVPVPRKARSASTKRSSHEWSVPGGGSSGGGGSGSVAGDTSQIQRPSSRPISPASSSSTGPARKKSGTWIRSPLPPSLPPN

SEQ ID NO: 169579 - protein, 106 aa, Oryza sativa
  Clone ID: PAT_MRT4530_67987C.1.pep
MFFSAALRARAAGLTAHWGRHVRNLHKTAMQNGAGGALFVHRDTPENNPDTPFDFTPENYKRIEAIVKNYPEGHKAAAVLPVLDLAQRQNGWLPISAMNKVAEVLQ

SEQ ID NO: 169580 - protein, 90 aa, Oryza sativa
  Clone ID: PAT_MRT4530_67988C.1.pep
LVHLVNFVELDQFMTIKQPMELLLQSCKRNFSLFHTLESYISKGTVKMNYKWAIMYITHVNLSFAQNCFVLHWSIDNLTRFFHGFLFYIS

SEQ ID NO: 169581 - protein, 57 aa, Oryza sativa
  Clone ID: PAT_MRT4530_67989C.1.pep
MAHAVTGTTLARYTLASRNPGVIDGFNVPGQCEHPPTKYSRFFRDKFPIRKNSHPLP

SEQ ID NO: 169582 - protein, 1167 aa, Oryza sativa
  Clone ID: PAT_MRT4530_6798C.1.pep
MEGVPDKERQPEFYMETTRTTRIGTDTHHETINTITTIGTTTLSTPNTINIQANIRQDLPPDIDFRDRHSYSPTVSPDTVRRYESAICDLAGHGSEKEDYPVVDYESDLRTNMSTTPHPEPPRGRITPPRRHLSLSPAPAASSRLSLLARARAGRAVAFPDITAASSPPACPPFRVRPPEARPRRQPVALSPPTASSRPCRAAQVQAGHAVSSLGITASTSTPACPRFRPETAVARAGLSILVVADVPSAAPSSSPACRLAASPPPPASQRQGRPRPRLPSTQTPPVSVVVFTAHPRRLVVSWRRLRRRHRSGVFHAILVFVQPLPVVIFVLGSASSSLVPAVSRLRSRIAAEVVPSPFASVVPEPSPFPRLVAWCIEYCGVDLKEFFWVGAPIILFNCSGSKSLRPSNITRTQMMMMTMGRLVPAYDYEDDGLDLGNPVVVSRCCLGADLHYRRRYGGGHDQDRQRREVEEWLVEDTKTLWLRKSSLPARGSCRKDKNHEYQVPLPGAPLSTGDTRRPDIEGIGTRKGTFIQKYKVKVVPDEPETSTSKEEEGKRVLDDSAQENQGDGSQEVHAVQCDGAHEPQEGNLNQNSETAQDFFNNFQDRVDYAVHHALINQSGVLVNTLSNMMKTIADGSIAEHQAAGPVYLQGDATKATSCAADSTDFIKAAGCAVRSANTSETTNYTTDSTASLDESIGWAIDWTRRESGYSRTFGSPYTARWYDDASECARALGANLNQYSNSRKEQLNNDHGPMEMRNKCFSLSLTDAQLADLAFQGMIPPIKEKFSSEDFDSLSHLVQKVTLHEQRFAEARRSSKRVNHVCPYMYGSDDDDDDSEIAAAEWVRSKKVVPCQWVKNSGKEEKYDFDITKADKIFDLLLREKQIQLPAGHIQVAIEGGKIKFDDSKKPMKVDGRSYNKGNRLKQARIPAHQREHFQEVEQEIGHRLRKAKPRKEWRVKNQVLGADDIAADEAKRLANGKSVVTAPINMVFTLPAKFGIGQADVDELKEGSAKLVLSPKRAIFEKPEGTENRHLKPLYINGYVNGKPMSKMMVDGGAAVNLIPYTTFRKLGRTTEDLIKTNMVLKDFGGNPSETKGVLNVELTVGSKTIPTIFFVIDGKGSYSLLLGRDWIHANCCIPSTMHQCLIQWQGDKVEIVPADSRLKMKNPS

SEQ ID NO: 169583 - protein, 1254 aa, Oryza sativa
  Clone ID: PAT_MRT4530_67990C.1.pep
MASWGLGWKRSSEIFHLTLDYGDLADGPPHHHQQQPPPPQQPGSPPTPSSAGSTPTSSSSSPTARRSGGSGEFGFRIELDWSAGDDEDQVALRLQSQLMVALPPPHDAVCVDLSPRGEGDGGEEGAVAVEMRVVRRREALRSVRVARAAGSAAGSGDGAGVLSRLIRSNLAPAPAVDGAAATGVPVLADHWRSVAVLSLCNCGLLNYVTAVIARCCSDLGGGIVVLSSFVGEFDWMCIKEAWAYVLVASHTFTFSYRDSDYQMLPVELTRLALLEKLHLDNNKLSVLPPEVGDLKKLIVLTVDNNMLVSVPAELRQCVLLEELSLENNKLVRPLLDFRSMPKLRVLRLFGNPLEFLPEILPLHNLRHLTLANIRIEALESLRSVTVQIETENNSYFVAARHKLSAFFSLVFRFSSCHHPLLASALAKIMEDRSNQVAISKEENAVRQLISMISSDNRHVVQRLSLFAVGNLAFCLETRRTLMHSESLRDLLIRLTLSQEKRVSKAAARALAILGENENLRRAIRGRPVAKKGLRILSMDGGGMKGLATVQILKQIEQGTGKRIHEMFDLICGTSTGGMLAMALGVKQMTLDQCEEIYTKLGKLVFAEPAPKDEAATWKEKIDQLFKSSSQSFRVVVHGSKHSADQFERLLKEMCADEDGDLLIESAVKGIPKVFAVSTLVSVMPAQPYIFRNYQYPPGTVEVSSVMTESPSIGSAGTPVSGAPVGIKPINTVGTAVSGAPVGIKRGAFMGSCKHRIWEAIRASSAAPYYLDDFSDDVNRWQDGAIVANNPTIFAIREAQLLWPDTRIDCLVSIGCGSVPTKSRRGGWRYLDTGQVLIESSCSVERVEETLDTLIPMLPEMQYFRFNPVDERCGMELDETDPAVWLKLEAATDEYIQKNFQDFKNVCELLVPRYQEEEKSSETTKSMLFSRFKPSNSGFSESNPTLGWRRVVLLVEASYSPDFGKKVNHARSLETFCSQNGIRLTLMNSASGFGKAATTLPTPITSPLFTGSFPSSPLLYSPEGTQRIGRIDLVPPLSLDGNPTAKSSPPTSPLKSWQPSVHVQSLYDKLQNMPQVGVIHMALQNDSTGSILRRTVPAAHMTPEDVRWMVGAWRERIIVCSGKYGLAHGLVKAFMDSGAKAVISSAMEPPDSQSIVYHGMEVNGSLENGKFVIADDEASESEAEPVSPTSDWEDSDMEKNGDRSKDFDDEEYMAQFICLLYDKLFREGVTVDTALQQALRSHPKLKYNCHLPNVL

SEQ ID NO: 169584 - protein, 107 aa, Oryza sativa
  Clone ID: PAT_MRT4530_67991C.1.pep
MAVAEEAGDESGSGSGRGLERRSTAAVRGYAGGWRRERALARPPTVAALVSGILNCSHRHQPRDALLPLLLSSSRHRLNPPPSSLMPSSPLHLLLPPLNLSFMGRRG

SEQ ID NO: 169585 - protein, 52 aa, Oryza sativa
  Clone ID: PAT_MRT4530_67992C.1.pep
VAAYKVCWPEGCLGSDILAGIDAAVADGVGVLSLSLGGGSAPYFRDTVAVGA

SEQ ID NO: 169586 - protein, 135 aa, Oryza sativa
  Clone ID: PAT_MRT4530_67993C.1.pep
METNQELEAELLAGIGEGTSSAMEENDKLFYQEVDDRAQSEGSKSQFLHRVKSHLTLGMAYLAGAQAARNYGSPATIGGCCSVSGHDVASVPRGKLLQTQPQDQLLAHGDYLGLEKGRLTSQGQLAPAHKVPQAP

SEQ ID NO: 169587 - protein, 155 aa, Oryza sativa
  Clone ID: PAT_MRT4530_67994C.1.pep
MPTPSTATRRPSTVTRFALCLSSPPSTPLPTPVAAAHADADAAAAVIGRPKGEGREWEERSRSQRTPSPPNSESPPKANWGIASNNCYSRMIIASAALTSDRRMSNACDRMLAAVIPSPTAQPHAGHKGRDVCVLGYASPCPCPHLAGATAMNAT

SEQ ID NO: 169588 - protein, 187 aa, Oryza sativa
  Clone ID: PAT_MRT4530_67995C.1.pep
MWRLKVAEGGAPGLRSCNGFLGRAVWEFDPNAGTPEERAEVERMRREFTLRRFERREAQDLLMRMQAGSTLPPPPEPMPTATVPLAAIVPHAHYLPLKTAVGLPLELIAGYARGRAKGAVTVAVAKPTPAATAVAVEHTKHGNCLHWCPPSGGRRWERRRLGEKVEEAGVRSTGGEEEWARVERSGE

SEQ ID NO: 169589 - protein, 78 aa, Oryza sativa
  Clone ID: PAT_MRT4530_67996C.1.pep
KYCLRATRTSPESLIFSPRSGDELISSSSIRRRSHPRRLLDLISSLSSAPNLFFLRYMVCCLVQSLCQEVGRVRKERL

SEQ ID NO: 169590 - protein, 610 aa, Oryza sativa
  Clone ID: PAT_MRT4530_67997C.1.pep
MAQLQETYACSPATERGRGILLAGDPKTETIAYCTGRSVIIRRLDAPLDCWAYPDHAYPTTVARFSPNGEWVASADASGCVRVWGRYGDRALKAEFRPLSGRVDDLRWSPDGLRIVVSGDGKGKSFVRAFVWDSGSTVGEFDGHSKRVLSCDFKPTRPFRIVTCGEDFLANYYEGPPFKFKHSIRDHSNFVNCIRYAPDGSKFISVSSDKKGLIYDGKTGDKIGELSSEGSHTGSIYAVSWSPDSKQVLTVSADKTAKVWDILEDASGKLNRTLACPGTGGVDDMLVGCLWQNDYLVTVSLGGTFNVFSASNPDKEPVTFAGHLKTVSSLAFFPQSNPKTILSTSYDGVIMRWIKGVGYGGRLMRKNNTQIKCFTVAEEELVTSGYDNKVFRIPLNGDQCGDAESVDVGGQPNALNLAIQKPEFALVTTDSGIVLLHKSTVISTTKVNYTITSSAVSPDGTEAIVGAQDGKLRIYSINGDTVTEEALIEKHRGAITCIHYSPDVSMFASADANREAVVWDRATREIKLKNMLFHSARINCLAWSPDNRLVATGSLDTCAIVYEIDKPASSRITVKGAHLGGVHGLTFVDNDSLVTAGEDACIRVWKLVPQ

SEQ ID NO: 169591 - protein, 32 aa, Oryza sativa
  Clone ID: PAT_MRT4530_67998C.1.pep
GVTTVLQILTHQFHHNLAFLLQGTHTSMSMLT

SEQ ID NO: 169592 - protein, 532 aa, Oryza sativa
  Clone ID: PAT_MRT4530_67999C.1.pep
MEAAVMERERLTAEMAFRDDARAAGGEWAPSIVIKIRRRLPDFARSVNLKYVKLGIRHGGSVTSYLPMLCVPLLASAAYSFVRLDVIYRSIDLLTCVAWLGTAVLLLTVYYFKRPRPVYLVEFACYKPDDQHKISKEGFLEMTESTGCFNDAALDFQTKITNRSALGDETYLPPGVQARPPRLNMAEARMEAEAVMFGCLDALFESTGINPKRDVGILIVNCSLFNPTPSLSSMIINHYEMRADVKSFNLGGMGCSAGLIAIDLAKDMLQANPNSYAVVLSTENITLNWYFGNDRSMLLSNCIFRMGGAAALLSNRRADAGRAKYRLLHTVRTHKGATDECFNCVYQREDEDGKVGVSLARELMAVAGDALKTNITTLGPLVLPLTEQLKFLKSLMMRRVFRVKGVRPYIPDFRRAFEHFCVHAGGRAVLEEVQRSLSLEDRDMEPSKCSLHRFGNTSSSSLWYELAYAEAKGRVQRGNRVWQIGFGSGFKCNSAVWRALRDVPAVSPPPKGKKSCNPWVDCVAKYPPKAYV

SEQ ID NO: 169593 - protein, 109 aa, Oryza sativa
  Clone ID: PAT_MRT4530_6799C.1.pep
MRVPRCGSHGLHLTLPPPRQARQMLRCSPPSRCACVRGAADARISPVIRLVLCCSTGLAAVCDRDYVALRGRAVCQSVGAVGWLRDRLYYPATARQLQRLQPHAAAAIT

SEQ ID NO: 169594 - protein, 72 aa, Oryza sativa
  Clone ID: PAT_MRT4530_679C.1.pep
HTKQFLYLTNNIYIKFETTWISSHDFSHRIHTWCAQSHTHTDGFSHTHTGLGYHSGWTLYLFIMYTGWCIVN

SEQ ID NO: 169595 - protein, 237 aa, Oryza sativa
  Clone ID: PAT_MRT4530_67C.1.pep
MALAFAVLATFAAAATPTTTTNLTLHNLCTHPVWPLVTANAGLPAIADAAGAATRLDGNGDGLATLAFPPGAWSGRVVARTGCRGNGSSRCDTGDAPPVTVAQVSVHGAGGLAEYSVSLVDGFNVAVVVTPHGFEQGRLCPSLGCAVDLAADCPGDGGRGGCMAAGQAEAFKARCPDTRTTPTDCPADARVGAGCRASPQFFKEMCPEARTTATDVEATPQKCFGPGELKVVFCPTN

SEQ ID NO: 169596 - protein, 103 aa, Oryza sativa
  Clone ID: PAT_MRT4530_68000C.1.pep
PSCPCRGNHEDVSGFASGLGALHDQQQVFDHSSPWFPKNAPSPDLNRRFTIRRTPTNTISLSRAHYVPETVMRLRRQKQESLNPNLQKLQSFSRQRDGSRKSK

SEQ ID NO: 169597 - protein, 206 aa, Oryza sativa
  Clone ID: PAT_MRT4530_68001C.1.pep
SGRRSSGVGRRWCGVAGRRHGEEEAATAQVGQAAGRRHSGIGHSALQQGLAAEQQLNSTRHKHAASGGVGAPGPTLPLPLLFLRCAPARVRLRVRMPPWALEAGRAAAWPERMPQPQLCVLLTSPSPPAHDAHRGSRRPPMRSGWGLADWGRVEEMLSLVFSRCGVATLSDSAAALHGGVRGVQRAARGMASATPRPTEPSAPGIV

SEQ ID NO: 169598 - protein, 74 aa, Oryza sativa
  unsure (1)..(74): unsure at all Xaa locations
  Clone ID: PAT_MRT4530_68002C.1.pep
IRPKGGGGGGVAVATPGGGGGGGSRFSXIRPKGGQGRAMAAAAVPLPPRSGRREAGGGRWRWWWWRRVVSCNKG

SEQ ID NO: 169599 - protein, 278 aa, Oryza sativa
  Clone ID: PAT_MRT4530_68003C.1.pep
MHGGEGRLYERYAKSIEPILSEDIRFVHFDFHQICGHIHFERLSQLYDQIEDIFRNLRYFLLNSKGEKMEEQTGTVRTNCVDCLDRTNVTQSMIGRKILESQLQKISVLGDNNTISDYPAFDADYKVLWANHGDAISTQYSGTPALKGDFVRYGKRTTQGILNDLWNAMARYYLNNFADGTKQDAMDLLQGHHISSVSRDMPTPTKGLIENHASFRLAFALLLAAVIFLIMSLRRARNDVFHLVLSLLWSGFCFGITRYVKANGRKFTNRPRFHLSRH

SEQ ID NO: 169600 - protein, 60 aa, Oryza sativa
  Clone ID: PAT_MRT4530_68004C.1.pep
MAASAMQNYLQEKSQILHGDAAVSAFYWYNKRVDGSTSFKALQRRKVEIRKEFGVVGLNS

SEQ ID NO: 169601 - protein, 258 aa, Oryza sativa
  Clone ID: PAT_MRT4530_68005C.1.pep
MAKTRQPQKRVLESFTIKGPDGVIKREDPFLDPFIYLSRFLLFWGKFWIVESRYYLRFRSIVEMNTGDTVLMMAPDSSKKPYVARVEEIEATGPQASQVKIKVRWYYRPEESIGGRRPFHGSKEVFLSDHYDSQSADTIEGKCYVHTFRDYTKLRSVSAEDFFCRFEYKSATGSFVPDRIAVFCKCEMPYNPDNLMIQCEDCSDWFHPSCVEITIKEAKKLEHFYCKSCIAENGKDLQKSNGATVQSEEKVQSKRRRR

SEQ ID NO: 169602 - protein, 84 aa, Oryza sativa
  unsure (1)..(84): unsure at all Xaa locations
  Clone ID: PAT_MRT4530_68006C.1.pep
LGRRAAGGVERHGGRCGEGQQPSIARLGIWAHTIDEVHSXPWEKLEFNIAQWIPAFFPHKCVGEDEATNGGERASHTRRQGRQQ

SEQ ID NO: 169603 - protein, 65 aa, Oryza sativa
  Clone ID: PAT_MRT4530_68007C.1.pep
SKGPRKVNPAHIAASKNYSFFLIPHQTFLIKRVLSSNISSSKELVPKASTSYCPHLHEILPFLPP

SEQ ID NO: 169604 - protein, 85 aa, Oryza sativa
  Clone ID: PAT_MRT4530_68008C.1.pep
MEVVLPEVAMRVRGVGFIGNEAGGLTMASESFSGEVAMAPFGWAFLAQCGHMVRPVDKLSRHESQEISSLTREVDGQQWHRVVRG

SEQ ID NO: 169605 - protein, 106 aa, Oryza sativa
  Clone ID: PAT_MRT4530_68009C.1.pep
MQLPPDDRSIEDLPAMLLDRSYTLLCCCAPHATPNQTYQHRERMGYPAIQRQSMLVDRRIDRHSANTWIRSIYTMSCNKETLHKLRSNIGRRRTTKSSHQHQTPSL

SEQ ID NO: 169606 - protein, 1588 aa, Oryza sativa
  unsure (1)..(1588): unsure at all Xaa locations
  Clone ID: PAT_MRT4530_6800C.1.pep
MAEKTPLSLSSASPSTVKEKIQKLGLTDVNEGNVVPINPEKFTPEQKKDFEAMLQQAQDQFLNSFMQTRKGTLVQKYKVKVVADDPGTSSSKGEDGKQAPDGSAQLSDKGATDGSLGSQGDNSQGVHGVQGDGVHGVQGGNFNYQYQPPSPQAQYQPGRLAQPQFASQYGQFEPMQQQSQGAAQQRPWADVIADVMREQFGLKPKETGSLYRQPYPEWFERVPLPNRFKVPDFSKFSGQDGVSTYEHISRFLAQCGEASAVDTLRGMIAPIREKFSSEDFDSLSHLIQKVTLHEHRSAEARKSSKKVNHVCPYMYGSDDDEDDSEIAAAELVRSKKVILCQWLKSSGKEEKYDFDITKADKIFDLLLREKQIQLPAGHMIPSAEELGKKRYCKWHNSGSHSTNDCKGGKIKFDDSKKPMRVDGNPFPVNMVHTAGRTADKGRMRGYQVSSARIINKYQRKYDKQQERRHEEDNGGFDPHWDCEFFRFCWNEGMRFPSIEDCPGCSDVAGGSSRLYNGGNWPKQTRVPVYQRFGPVNQRGDSEYDENKKTQWCPPGIFTKNQKRRVQRLRSRERFQEVEQEINHRLKKAKPRQEWRVKNQAPVADDIAADEAKRLAKGKSVVTAPVNMVFTLPAEFGIDQADVDEVEEESTKLVLSLEQVVFEKPEGTENRHLKPLYINGYVNGKSMSKMMVDGGAAVNLMPYATFRKTLVAIHRKPKWQGYKIEIXTSRQLKMENPSYYFEGVVEGSSVYTKDTVDDLDDKQGQGFMSADDLEEIDIGPGNRPRPTFISKNLSPEFRTKLIELLKEFRDCFAWEYYEMPGLSRSIVKHRLPIKPGVRPHQQPPRRCKADMLEPVKAEIKRLYDVGFIRPCRYAEWVSSIVPVIKKNGKVRVCIDFRDLNKATPKDGYPMPVADQLVDAASGNKILSFMDGNVGYNQIFMAEEDIHKTAFRYPGAIGLFEWVMTFGLKSAGATYQQAMNYIYHDLIGWLVEVYINDVVVKYKEIKDHIADLRKVFERTRKYGLKMNPTKCAFGVSAGQFLGFLVHERGIEITQRSINAIKKIKPPENKTELQEMIGKINFVRRLRHYLLSNECTIICKVDVVRYMLSAPILKGRVGKRIFSLTEFDLRYESPKVIKGQAVADFIVEHRDDSIGSVEMVPWTLFFDGSGACFEFAYTIKPDATNNQAEYEAVLKGLQLLKEVEADAIEIMGDSLLVISQLAGEYECKNDTLIVYNEKCQELMKEFRLVTLKHVSQEQNIEANDLAQGASGYKPMIKDVKVEIAAITADDWRYDVHQYLHNPSQSASRKLRYKALKYTLLDDELYYRTIDGVLLKCLSVDQAKVAIGEVHEGICGTHQSAHKMKWLLRRTGYFWPTMLEDSFRYYKGCQDCQKFEAIQRASASAMNPIIKPWPFRGWGIDMIGMIDPPSSKGHKFILVATDYFTKWMEAIPLKKVDSGDAIQFAQEHIIYRFGILQTITTDQGSIFVFDEFVQFANSVGIKLLNSSPYYAQANGHGAVLPWEVRIGSRRIELQDGLTADEYYNLMADEREDLVQSRLRALAKVTKDKERVARHYNKKVVPXIFQKVNLYGS

SEQ ID NO: 169607 - protein, 199 aa, Oryza sativa
  unsure (1)..(199): unsure at all Xaa locations
  Clone ID: PAT_MRT4530_68010C.1.pep
WGEYYILRPGSPPTARNPTSPAAAATAAXGEDRLSALPNDILVHILLRVGTGGAARTSVLSRRWRHLWYLLPELDFGPEADGHSIRAALAADESPSLRRLLVRAADVGPRRIAEWLPVAARRLAGDLFKVTSRGDPEHIEQGTFLELPCFGSATSLSLELGFLGLAVPPSCVFARLTNLSICGVLFHGPCELGDAVSSP

SEQ ID NO: 169608 - protein, 194 aa, Oryza sativa
  Clone ID: PAT_MRT4530_68011C.1.pep
HAKSSTKIAFSTATTTSTFSSSFSFPSSPLPSPRSESAIPSRIPSTQPLSEPSFSPRSSPTTTTLSSSSPRPPTTTSSPPSPAPPPTTTTSSAPLPRSPPTPTRASGMSPHVGPESSTHPPAPPPRGGRRRSSSSSSSSSEREKWARRDETAMAAREKASAMDSGGRAQSSSPASSSRGGRTGSPPARSSPSSA

SEQ ID NO: 169609 - protein, 38 aa, Oryza sativa
  Clone ID: PAT_MRT4530_68012C.1.pep
LILLIFNFSYYLQKSNKNEAYALSSLCNHIFQLKCRNL

SEQ ID NO: 169610 - protein, 646 aa, Oryza sativa
  unsure (1)..(646): unsure at all Xaa locations
  Clone ID: PAT_MRT4530_68013C.1.pep
MTDGHHFNNISLGGRGGNNPGQFKLYSGGLAWKRQGGGKTIEVEKSDITSVTWMAIPRSYQLGVSTKEGLFYRFFGFREQDISSLTNFMEKNMRITPEEKQLSVGGHNWGGIEINGNMLSFNVGSKEAFEVSLADVAQTQMQGKTDVVLEFHVDDTTGGNEKDSLMDLSFHVPTSNTQFPGDENRPSAQVLWQAILNKADVGSSEEAVVTFDGIAILTPRGRYSVELHLSFLRLQGQANDFKIQYSSILRLFVLPKSNNPHTFVVITLDPPIRKGQTLYPHIVIQFETEAVVQRDLTLSDEVLAEKYKDRLENSYQGLIHEVFSKVLRGLSGAKVTRPSTFRSCQDGYAVKSSLKAEDGXLYPLEKGFFFLPKPPTLILHEELXSLWQIEYVEFERHGAGGASISSHYFDLLVKLKNDQEHLFRNIQRNEYHNLFNFISGKHLKILNLGEAQGRAGGVTAVLQSTDDDAVDPHLERIRNQTGDDESDEEDEDFVADKDDSGSPTDDSGEEGSDASLSGGEKEKSSKKEASSSKAPLKKRKPKGGDAAEGSEKRKPKKKKDPNAPKRAIAPFMYFSKAERANLKNSNPELATTEIAKKLGERWQKMTAEEKQPYVEQSQVDKKRYAEESAAYRGAAAMDVDSGPASD

SEQ ID NO: 169611 - protein, 208 aa, Oryza sativa
  Clone ID: PAT_MRT4530_68014C.1.pep
MGSYHYTSTSHFFFAGGGEGEYSSYKGTGSTDTHRPTTVRIPVTTPGPERPPDDAAAARIQAAFRGHLVRRHAAAVRGADDEATRLERLLRRQETVDAVRGDERERARFSEALMAVLLRLDAVPGYYPAVREARRAVTRRVVGLQEVFDAVLAAPDAADTCGVPASLDQVLEGIWGESPAAPPPPPPPPPPAAVEVEEEVLWKKKGIS

SEQ ID NO: 169612 - protein, 69 aa, Oryza sativa
  unsure (1)..(69): unsure at all Xaa locations
  Clone ID: PAT_MRT4530_68015C.1.pep
MGSSSSNGRTAPAPPPPAAPAPPHPLHVMDADEEDENVKQLXRDCLVESNRSWKACQALCFWKVYHILH

SEQ ID NO: 169613 - protein, 85 aa, Oryza sativa
  Clone ID: PAT_MRT4530_68016C.1.pep
MGSSSSNGRTAPAPPPPAAPAPPHPLHVMDADEEDENVKQLSECAALYLSLQDCLVESNRSWKACQAHVQALKACEAKRNKSETR

SEQ ID NO: 169614 - protein, 45 aa, Oryza sativa
  Clone ID: PAT_MRT4530_68017C.1.pep
SLTEEVRRWPIKIKKNLCCSKYTISLLYQLAIMITPDEVSLYCSR

SEQ ID NO: 169615 - protein, 37 aa, Oryza sativa
  unsure (1)..(37): unsure at all Xaa locations
  Clone ID: PAT_MRT4530_68018C.1.pep
VLMAAIEAISGAQLRXSNIRFKDRQCQREVQDSALDS

SEQ ID NO: 169616 - protein, 516 aa, Oryza sativa
  Clone ID: PAT_MRT4530_68019C.1.pep
MASLMEVQVPLLGMVLHQLLPMCTVYSLVQFPMIWNAFGRRRLPPSPASLPVIGHLHLLRPPVHRTFHELAARLGPLMHVRLGSTHCVVASSAEVAAELIRSHEAKISERPLTAVARQFAYESAGFAFAPYSPHWRFMKRLCMSELLGPRTVEQLRPVRRAGLVSLLRHVLSQPEAEAVDLTRELIRMSNTSIIRMAASTVPSSVTEEAQELVKVVAELVGAFNADDYIALCRGWDLQGLGRRAADVHKRFDALLEEMIRHKEEARMRKKTDTDVGSKDLLDILLDKAEDGAAEVKLTRDNIKAFIIDVVTAGSDTSAAMVEWMVAELMNHPEALRKVREEIEAVVGRDRIAGEGDLPRLPYLQAAYKETLRLRPAAPIAHRQSTEEIQIRGFRVPAQTAVFINVWAIGRDPAYWEEPLEFRPERFLAGGGGEGVEPRGQHFQFMPFGSGRRGCPGMGLALQSVPAVVAALLQCFDWQCMDNKLIDMEEADGLVCARKHRLLLHAHPRLHPFPPLL

SEQ ID NO: 169617 - protein, 548 aa, Oryza sativa
  Clone ID: PAT_MRT4530_6801C.1.pep
MATVDLAEGAASKAKAGNWWIGGGQRAMRRLATTTSSLDLVVGCGGGRRRHRRQWCDHDIKWSNVVHLQSELVAIDLVLGLKKIKSTGTLAHPKKPPASPSLAGEPRSVKAKIHKLGLSEVDEGNIVLITLDKLTPEQQKDLEAMMQQARNQFLSSFTETRKGTLVQKYKVKVIADVSGTGSSKDGEVKQAPDGVAQPSNKGAADGFQGIQGDGVQGFQGGGLNQDGNTAQLQFNNFQDQGMIAPIREKFSSQDFDSLSHFAQKEVEQEINHRLKKAKPRQVWRVRNQAPVADEAAADEAKMLAKGKSVVTASVNMVFILPAEFGVKQADVDEVEEESAKLILSPEQAVFEKPEGTENRHLKPLYIIGYVNGKPMSKMMVDGGAAVNLMPYATFKKLGRNAEDLIKTNMVLKDFGGYNQIFMAKEDIHKTTFRCPGAIGLFEWVVMTFGLKSAGATYQRAMNYIYHDLIGWLVEVYIDDVVVKSKEIEDHIADLRKVFERTRKYGLKMNPTKCAFGVSSGQFLGFLVHERGIEITQRSVNAIKKIQPP

SEQ ID NO: 169618 - protein, 438 aa, Oryza sativa
  Clone ID: PAT_MRT4530_68020C.1.pep
MATNQEMAMNKCSVLLNRAREFEPSRANGGYILSTSSYPQIRQYAASPDEHLRSLPSLLPPPPGQELPLAYLRAQRQSSGNYRGIQAQRRPLIDQTGALQSSFPESICLKEELQSLSMPRNSPNAGRNLVGHPHSSSKSSSKPCHFHFFRGYCKKGVNCQFFHGSVPELHNPRQVHPFASLSKLDMEIRELLIGIPPPVAVDRLPSMYFEKYGKPLRPDGWLTESQQHGRTGCSLTSLLMGLNTIRVVEREHGQYHVVLVEDARKKYMDCLGLAHSCNLMDTGTGSNQIYMTFPVHSKFTDDDVENYFKYCLNFIVTRQFGPVSGVRIPYQEKRMFGFVSFLYTETVRLILSKGTAHFICGLRVLVKRYMEKSELRKIYRKNKQFDYREHRTSGFGVTNEHYIGNNMKKKSHRSDDLDEASAYEDSDEIILPDSLGLY

SEQ ID NO: 169619 - protein, 87 aa, Oryza sativa
  Clone ID: PAT_MRT4530_68021C.1.pep
TRTSIFDSRRERHPGCGTSLIGSAYYISHLSVINSGWNCMRTLLLRINSAGIVEWILATATVDVADILWLRWIRGNNRLRQHLRIIA

SEQ ID NO: 169620 - protein, 243 aa, Oryza sativa
  Clone ID: PAT_MRT4530_68022C.1.pep
MDHIGISGGGEGGVVSPAQPSSPERRYKGVRLRKWGRWVSEIRMPNSRERIWLGSYESAEKAARAFDAAAVCLRGSRGAGSLNFPESPPPDVRRRFPGAALTVEQIQAEAARHANRPFPANTAAAGGSSSSYSISQRQEAAAPARSTSNDDTAMSSVPSTDGGAADYDGGDDVIDWSFMDTLPAMSSSAASTNADLVPAMDDFMYGFLHTMPPSPCEDGGEDVMIDGNCNMDQTFFSVDLWRF

SEQ ID NO: 169621 - protein, 62 aa, Oryza sativa
  Clone ID: PAT_MRT4530_68023C.1.pep
LFFEGVGCTFTNRPTKRLDASYGLNFSTNTDQLMQGKARGAPLGYLTREDHARGTACYRIPN

SEQ ID NO: 169622 - protein, 60 aa, Oryza sativa
  Clone ID: PAT_MRT4530_68024C.1.pep
GVLVWFSSPGGICSWSLCSIKKALYLQWWPLLFLKTCVFSPKESFVGLFIHFNYCNLFTR

SEQ ID NO: 169623 - protein, 58 aa, Oryza sativa
  Clone ID: PAT_MRT4530_68025C.1.pep
YLSYLPSMQGDHQKEHIGIKVYLYMIQILCICNQLGRYDSSIFLTACQEIASMHVIHQ

SEQ ID NO: 169624 - protein, 62 aa, Oryza sativa
  Clone ID: PAT_MRT4530_68026C.1.pep
RWPSDGVRTRVLQGLSHRACPPRVGLSWTQMGRQGMQGHEHRVRPSTAPLPGGPLSRSSTCS

SEQ ID NO: 169625 - protein, 662 aa, Oryza sativa
  unsure (1)..(662): unsure at all Xaa locations
  Clone ID: PAT_MRT4530_68027C.1.pep
MSAATACASPAAARPPLHIPLRSPPSAAHLPSAAASRRASSAACRCTASASASASPSTWDWTRWTRHFADVDQAESYASLLKFQLEEAVDNEDFAEASKLKKAILEATGNDAVAQVMSELKTAIEEQRYQDASRLTKLARTNLVGWWVGYAKDTDDSIGRIVRISPGVGRYVAKSFSPRQLVTASSGTPLFEIFLVRDDDETYTMKVVHMRPTKGTSSASSVSSATAESPAKEENESSLESSAISEGITDEANTDTTLKGDEDVEDKEQDVGNAKDSSVEGLKSVLNFFKSRIPEFKVQVINVDVSEEAELASDSSEELVQDDVKSTSENSLEDSTTEELQQDDVPDGDSDSAEDSKSPEMKLFISGVVHNKEDAGAKSYVRVPAEINNLEKDSFELYIPGKGSDRDLADTKAAKQKVADMAAKLASELMPSDVAKALWGTTKSSSKINKEVQELLKLTLSKARVKLTENTIFNRIITDSNGSDPFSGLYVGAFSPYGPEVVQLRRKFGHWNSTDEVEFFEYVEAVKLTGDLSVPAGQITFRAKIGKGKRLENRGAYPEEFGVIASYKGQGRIAQPGFKNPRWVDGELLVLNGKXRSHTLEVRSLVSCTACLSRVSWYSLTGLNFQSDEIMLNRAVLTCKLHEYREKLTQFQEKRIDVPSSS

SEQ ID NO: 169626 - protein, 177 aa, Oryza sativa
  Clone ID: PAT_MRT4530_68028C.1.pep
MAQWRPVPARRDYWREGLPRSGGTAKFDGEWRGAVEIGTDGGRRRAQVFDARPPSRNGSRLPPIAATATGTPPQHTPPPTLAEKPCGGGAAGAHQVFDTRRRRDPAPLRFDSMPWAGMIAYAVVCRRGLASWRKGHRITQRSQPGVTRWRRDGDVMATRATAMGSGNGLDRGRRAMP

SEQ ID NO: 169627 - protein, 56 aa, Oryza sativa
  Clone ID: PAT_MRT4530_68029C.1.pep
NQSCKLVESPPFKKYGLIKTLSRSKALQTFMLKAAPPPAAICPGLFHSRYFIWGPC

SEQ ID NO: 169628 - protein, 1124 aa, Oryza sativa
  unsure (1)..(1124): unsure at all Xaa locations
  Clone ID: PAT_MRT4530_6802C.1.pep
MRQRRHRWGRARLLHWLRGQQPRMDTAGGGSRRRRRRGCARLLPLYHRHHQGPLPPALLRRKWHEIEKFTALVAFYQRHADWVKMERCRKPSSMQLTQRLVYSNILGLDPTLRNGSLKDGSLNTEMLQFKSKFPREVLLCRVGDFYEAVGFDACILVEHAGLNPFGGLRSDSIPKAGCPVMDWRQNYHRMICLDXGYSVCIVEEIQGPTQARARKGRFISGHAHPGSPYVFGLAEVDHDVEFPDPMPVVGISRSAKGYCLISVLETMKTYSAEEGLTEEAVVTKLRICRYHHLYLHSSLRNNSSGTSRWGEFGEGGLLWGECSGKSFEWFDGNPIEELLCKVREIYGLEEKTVFRNVSVSLEGRPQPLYLGTATQIGVIPTEGIPSLLKIVLPPNFGGLPSLYIRDLLLNPPSFDVASSVQEACRLMGSITCSIPEFTCIPAAKLVKLLESKEVNHIEFCRIKNVLDEVLFMGSNAELSAILNKLLDPAAIVTGFKVEADILVNECSFISQRIAEVISLGGESDQAITSSEYIPKEFFNDMESSWKGRVKRVHAEEEFSNVDIAAEALSTAVIEDFLPIISRVKSVMSSNGSSKGEISYAKEHESVWFKGRRFTPNVWANTPGELQIKQLKPAIDSKGRKVGEEWFTTIKVENALTRYHEACDNAKRKVLELLRGLSSELQDKINVLVFCSTMLIITKALFGHVSEGRRRGWVLPTISPLCKVPYCLTIEISSEMELSGTFPYWLDTNQGNAILNDVHMHSLFILTGPNGGGKSSMLRSVCAAALLGICGLMVPAASAVIPHFDSIMLHMKAYDSPADGKSSFQIEMSEIRSLVCRATARSLVLIDEICRGTETAKGTCIAGSIIERLDNVGCIGIISTHLHGIFDLPLSLHNTDFKAMGTEIIDRCIQPTWKLMDGICRESLAFQTARKEGMPDLIIRRAEELYLAMSTNSKQTSSAVHHEISIANSTVNSLVEKPNYLRNGLEKEIESVVTTICKKKLLDLYNKRSISELIEVVCVAVGAREQPPPSTVGRSSIYVIIRRDSKLYIGQTDDLVGRLSAHRSKEGMQDATILYILVPGKSIACQLETLLINQLPLKGFKLINKADGKHRNFGISLVPGEAIAA

SEQ ID NO: 169629 - protein, 59 aa, Oryza sativa
  unsure (1)..(59): unsure at all Xaa locations
  Clone ID: PAT_MRT4530_68030C.1.pep
AVVEMVLTFTKLFSLLFSNKEMRILMCGFYAVGXTTILYKLKLCXIVTTIPTICFNVST

SEQ ID NO: 169630 - protein, 137 aa, Oryza sativa
  unsure (1)..(137): unsure at all Xaa locations
  Clone ID: PAT_MRT4530_68031C.1.pep
KLQADSWLGTLGTMDAIATTFSHIHNLITGVTNGCLYEMRSVYAHFPFNALLPKSTPSSKPDXLGKKNVRKVDMLEGVTILPSDNVKDELVLYGNDIXLCSRSAALINXKCHLNNKDLKKCLHGLYVSDQGSITEDA

SEQ ID NO: 169631 - protein, 54 aa, Oryza sativa
  Clone ID: PAT_MRT4530_68032C.1.pep
LAMRRWIGRERDELALGKHLSWHAARAEHEEGEESKLPPPLHYGAINTAAATAT

SEQ ID NO: 169632 - protein, 101 aa, Oryza sativa
  Clone ID: PAT_MRT4530_68033C.1.pep
TYGKISFTRQVPFDGLRIANIYSRSSIPNNLQVFICLCRSDASYVGMASYDTSSAILPISYRSNQLARSESEGNSFGRALKLSRSLRPVHVFRVNTRTMNL

SEQ ID NO: 169633 - protein, 183 aa, Oryza sativa
  Clone ID: PAT_MRT4530_68034C.1.pep
YNIHSLQIGWTKYEKSKHRNQTGASKIQPIIKREERRRGIKVGTNQSTHIIARVWIGLVAMAMHPSPPLPLFLLRLGSLQVVGEERDHGGAERRADGRRDGRGSGAGGRRSRGLGGERHGGGRGGDDEDGAGDLLHLHPLPLEVAPSRARTVSAGTEQATAETEARGRRDGYCCCCCCCAGRV

SEQ ID NO: 169634 - protein, 52 aa, Oryza sativa
  Clone ID: PAT_MRT4530_68035C.1.pep
MGICCTPLEGDFMGCATLGGAPHCTPPCAPVCAVVKWEVFSHPVYKCGLRGN

SEQ ID NO: 169635 - protein, 170 aa, Oryza sativa
  unsure (1)..(170): unsure at all Xaa locations
  Clone ID: PAT_MRT4530_68036C.1.pep
GSSPSAVEVHGXEYSFGAHDHPNXGVFEVEPKCCXGFMYRCSIFIGRTTGRALEFRDFIQRMASEYHGDTYHLISKNCNHFTDDLSTRLTGKPIPGWVNRLAKLGAFCNCLLPESMRLESTGTKHLADCHFSDDSRTSSNEHFEDEDLEDKHLLSQSSVSEDAIVKEVHR

SEQ ID NO: 169636 - protein, 76 aa, Oryza sativa
  Clone ID: PAT_MRT4530_68037C.1.pep
MVMRPRPQRAAKFQAMGARRVASSSREPWRPRPWRKYKQSRPPPFSPPRRARGEATEPKRAMAGGVVIGVAPPAAA

SEQ ID NO: 169637 - protein, 48 aa, Oryza sativa
  Clone ID: PAT_MRT4530_68038C.1.pep
MEIQGSDKRRSPEKRSTKVEQEAVRMRVARDVEKARWVTLNSLEGHPE

SEQ ID NO: 169638 - protein, 84 aa, Oryza sativa
  Clone ID: PAT_MRT4530_68039C.1.pep
DMGMLSQKLNMRFYEGELWIMGLVRISKLDAQGDSVSGTLIRRGNHVNILDRVTLGLGVPVSGLYAHKTPFYTAVVSVSARQGK

SEQ ID NO: 169639 - protein, 303 aa, Oryza sativa
  unsure (1)..(303): unsure at all Xaa locations
  Clone ID: PAT_MRT4530_6803C.1.pep
MTAYKNINRSEVLFSQADHLSDACENQFPQAHLTWSAYKNRTYLKKSSHPYPLLPHPYPLLSTTHFLPPLSLSYLEKISSLHPHLHCRAAPSSATTMTATPPLRANGSPRPRRRPSRHXSPPLPTSARRRPAPSSPTSTRRRLPPSPPAGSPLGDDDDRTAASACRRLPSAVTTTFAPPAPHLRRRPAPSSVTTTTATPALRADGFPRPRRRPSRRQLPSSPHVRAPPAPSFPTSVHRRLPTSGAGRLPPRRXRRPSRRRRAPSSPPSPSATTSDDNGSPPPPPATTGDNDDDGADAAGFISL

SEQ ID NO: 169640 - protein, 100 aa, Oryza sativa
  Clone ID: PAT_MRT4530_68040C.1.pep
FGGNNGFCEGFFTQTFGERPHPLGEVFFFFFPLGFGNKTASLFNWRFSPQRNGKNGDIPKAGTLPKVGGALLRILMYFFKKKKKKKKKKKPPKKKKKNTQ

SEQ ID NO: 169641 - protein, 179 aa, Oryza sativa
  Clone ID: PAT_MRT4530_68041C.1.pep
MRKKRKSTGARDLHPQRRGRADVTVINQRRRDQHKTRSVKQTKCQKRPTDPAEENGDDRLLWFVTGSMEIKNTATGDHVHGEEFNLTLDHKKQGKTKAKALVELGPPPGATECIAESKWGHEKSRSGFANAHIRVHRYKYLSTIRVDEALRLAFVEQREQWIDSNGKFSKAEFNDTSEP

SEQ ID NO: 169642 - protein, 66 aa, Oryza sativa
  Clone ID: PAT_MRT4530_68042C.1.pep
CGVRRLLGMLIPGVEPANFGCVRVVLVHQCLLSNCECVPGVLSLQQLLVALPLSPKAPPRMSRSFP

SEQ ID NO: 169643 - protein, 561 aa, Oryza sativa
  Clone ID: PAT_MRT4530_68043C.1.pep
MRPKIADFVMTKIFGENQQKANTKKSEDMQYKRRIILNFPTLRLTDSQKKAYALIEIEKLMRQAGKSLRDYPDIELPNAAEIEELGNRLINEELNYDKDQLKDEHLAILNSLNTDQKKAFDAIMESINGGQGKQIFVEGYGGTGKTYLWKALTTKLRSEGKIVLAVASCGIAALLLQGGRTAHSRFRIPIKITEESTCEIKQGTHLAELLKRTSLILWDEAPMANKHCFEALDKSLRDIMRFTNENSSERPFGGMTVVLGGDFRQILPVIPKGRRENIVNASIKRSYLWNHFEIIKLTENMRLSCMSNEPLEKQKVAEFAKWILHIGDGASASDEGEEWVKIPSDILLQKGQDPKETIVKSIYPNLLDNYREREFLEERAILCPRNETVQEINEYIMNQIQREEMTYLSCDTVCKAMTNNSSMEHMYPTEFLNTLKFPGIPNHELKLKVGLPVMLLRNINQTAGLCNGTRMTITQLGKKYIEAQIITGTHVDDKILRSCGLFEAASSRSSFWEKLQLGEAPPNRAVAFSRVTNRNGLKVLIDDSDCPEENVARNIVYKEIF

SEQ ID NO: 169644 - protein, 198 aa, Oryza sativa
  unsure (1)..(198): unsure at all Xaa locations
  Clone ID: PAT_MRT4530_68044C.1.pep
MADKTLREFPAPFANNVATGPQINMGDMDFDLKSSLITMAHASPFCAKPNKDANAHLQQFLEICSTYIVKGISPDAVRLRLFLFSLLGKEKQWFYANRVTINIWYKCSTAFLSKFFPMGKTNALRGRILSFQQTRDESINGAWERLQEYMVAYPHLGMDDWLILQNFYNGLTPTSXDHLDAAAGGAFFSKTVRGAGDL

SEQ ID NO: 169645 - protein, 72 aa, Oryza sativa
  Clone ID: PAT_MRT4530_68045C.1.pep
EMDSQIYLPRLHSLQRIILVLSQVSVLHPLVGSFFLFLSMICSIPYSLRQLDSPILSGSVEKVLQFSVCYGS

SEQ ID NO: 169646 - protein, 128 aa, Oryza sativa
  Clone ID: PAT_MRT4530_68046C.1.pep
MVASGVGAASGRARGEESMRGAEAGSPRDFVGVHTSAADVPPPSPMLCSSCMEIPSRLRGGGQVRWASMPAGRATPSSSCSSPSSEARAAARHQAENEHGCGLAEMKAAAAGALVEKARENHLCTTGQ

SEQ ID NO: 169647 - protein, 75 aa, Oryza sativa
  Clone ID: PAT_MRT4530_68047C.1.pep
VIHHKGIKKVMICQAQHTNKPSMTNFYSCHKKFTTQLTPLPMHLDPCMQETFTTTHTESLNFIIFIKGSLLSPIH

SEQ ID NO: 169648 - protein, 61 aa, Oryza sativa
  unsure (1)..(61): unsure at all Xaa locations
  Clone ID: PAT_MRT4530_68048C.1.pep
IKKKKLKYPXXRTGLLLAGRRGDRARRPTQGSIPSRXPMHPFXCVPPVXVSPXVSXVVXST

SEQ ID NO: 169649 - protein, 266 aa, Oryza sativa
  Clone ID: PAT_MRT4530_68049C.1.pep
MPVLDIEVLLGRGDTYRRDESAISDLAGHGFEEEGYPVVDYESDLQTASLAYTLVPTIPIPYKYQNCDIKRRQYILLIVEQQLPLAGGVVAIYATHCTTAIALISHRWGERNFRDRFSPFDVIYALLCSVWTRSATAHKAAGRGEGEAAALHVMVVVAESHRGRRQATNRSAANSTAQEDSAVMPLLRVDRLARGRRGGHLHGAWDTASSHRCRLQEDERELNPLRGSTIGARFAERKRALSPSPPAALSASFIGPPARRRSGGGG

SEQ ID NO: 169650 - protein, 1365 aa, Oryza sativa
  unsure (1)..(1365): unsure at all Xaa locations
  Clone ID: PAT_MRT4530_6804C.1.pep
MAEKQPPPPSSPGSVKGKALKQGLTDIIDDNTRKGTLVQKYKIKVIADSSGTGSSRDGEVKQAPGGSAQPSTKGATDGSPSDQGDNLQGAHGAQGDGAQGPQGGNLNQNRSMQQQPQGETQQRPWADVIADVMREQFGLKPKETGSLYRQPYPEWFERVPLPNRFKVPDFSKFLGQEGVSTYEHISRFLAQCSEASAVDALRVRLFRLSLSGSAFTWFSSLPYGSINSWADLEKQFHSYFYSGVHEMKLSDLTAIKQRHDEPMHEYIQRFRERRNKCFSLSLTDAQLADLAFHGMIPPIREKFSSEDFDSLSHLIQKVTLHGHRSAEVRKSSKKVNHVCPYMYGSDDEEDDSEIAAAEWVRSKKVIPCQWVKSPGKEEKYDFDIXRLTRSLIYYSEKSRFSFLRVFKQQFQVAIAGGKIRFDDSKKPMKVDGNPFPVNMVHTAGQAADRARAKGFQADVDEVEEGSAKLVLSPEQTIFEKPEGTENRHLKPLYINDYVNGKPMSKMMVDGGAAVNLMPYATFRKLGRNAEDLIKTNMVLKDFGGNPSETRGVLNVELTVGSKTIPTTFFVIDGKGSYSLLLGRDWIHANGCIPSTMHQCLIQWQGDKIEIVPADRSGSNVYAKDTVDDLDDKQGQGFMSADELEEIDIGLGDRPRPTFISKKLSPEFRTKLIELLKEFRDCFAWEYYEMPGLSRSIVEHRLPIKPGVRPRQQPPRRCKADMLEPVKAEIKRLYDAGFIRPCRYAEWVSSIVPVIKKNGKVRVCIDFRDLNKATPKDEYPMPVADQLVDAASGNKILSFMDENAGYNQIFMAEEDIHKTAFRCPGAIGLFEWVVMTFGLKSAGATYQRAMNYIYHDLIGWLVEVYIDDVVVKSKEVKDHISDLRKVFERTRKYGLKMNPIKFREASFEFAYTIKPYATNNQAEYEAVLKGLQLLKEVEADTIEIMGDSLLVISQLAGEYECKNDTLMVYNEKCLELMKEFRLVTLKHISREQNLEANDLAQGVSGYKPMTKDVKVEIAAMTADDWRYDVHQYLSNPSQSASRKLRYKALKYTLLDDELYYRTIDGVLLKCLSADQAKVAIGEVHEGICGTHQSVHKMKWLLRRAGYFWPTMLEDCFRYYMGCQDCQKFRAIRRAPASAMNPIIKPWPFKGWGIDVIGIINPPSSKGHKFILVATDYFTKWVEVIPLKKVDSGDAIQFVQEHIIYRFGLPQTITTDQVPPYKLVYGHETVLPWEVRIGSRRTELQNNLTADEYYNFMADEREDLVQSRLRALAKVTKDKERVARHYNKKVVLKDFSEGELVWKLILPIGTRDSKFGKWSPNWEGPFQIHKVVSKGAYMLQGLDGEVYGRALNGKYLKKYYLSVWVNV

SEQ ID NO: 169651 - protein, 130 aa, Oryza sativa
  Clone ID: PAT_MRT4530_68050C.1.pep
MARDGNGEFTIEGHIRVPIPVRESEKGRQTVDGGWLEVAGEAMTTRGGGRHDEAGGDGAATRAGGGRRRDEDWMQSTARGWLEAACSSGPRTCERMRRRALLEWRWRARILSGSDGYVGVVELWRGEGDG

SEQ ID NO: 169652 - protein, 87 aa, Oryza sativa
  unsure (1)..(87): unsure at all Xaa locations
  Clone ID: PAT_MRT4530_68051C.1.pep
ILSPSPPLRLPSGSGRRPGGGGGGLPSIGSERGGGRATVAEGGGRRARRAAPGGGSGGXHGGHGGQHGGSAARRRTVVAGCKAAGRR

SEQ ID NO: 169653 - protein, 121 aa, Oryza sativa
  Clone ID: PAT_MRT4530_68052C.1.pep
FFFFSMPIASKLVYFQRRRPSPAPPEPEPEPPDPRRRPCRAGAGASAARRRKPGQEHVPGSKRDTSKGVASAGNITGQAGSTGSSSRLNRSVSDHGRLPDSRQQARERLLQRLNSVDLSGR

SEQ ID NO: 169654 - protein, 93 aa, Oryza sativa
  unsure (1)..(93): unsure at all Xaa locations
  Clone ID: PAT_MRT4530_68053C.1.pep
QVGESASSSTAQQIVRFWLRSRQDVSIHQHARGKDVQLMLHARAQQINGIQDPVLYTLLSGARGIICSTRVNTSHGICXXXXXXXXXXXHSLS

SEQ ID NO: 169655 - protein, 413 aa, Oryza sativa
  unsure (1)..(413): unsure at all Xaa locations
  Clone ID: PAT_MRT4530_68054C.1.pep
PAVLPTEVGAWLDAFPDGAVVVTAAALPKGFEAATMAXGTGLVIRGWAPQVAIPRHRAVGWSLMHCGTNTMLEATSAGVAMLTWPMVADHFVNKILLVEAGVAMHLAEGADAVPDSGQMAKAIAAVVGDKGKPFRERAVALARMAAAAVAEGGTSYRDLERGRKWGIREKRRRANESNDIFLHFDLTPLPHNVTEVLRVEGKTGQEHVPGSKRDTSKGVASAGNITGQAGSTGSSSRLNRSVSDHGRLPDSVQQARERLLQRLNSVDLSGRRQNTSLSSETIHGGVAPGVSTTADSIFSSLTSCFHTDVSIAPCKLQESTAETFNTADKHTFIAHCSEPAPTQEVASCRVTDDDELAGPSTECSICLERCGDADGLLELRCKHIFHSACLERWLRSRSDCPYCRASVLLTAEG

SEQ ID NO: 169656 - protein, 1063 aa, Oryza sativa
  Clone ID: PAT_MRT4530_68055C.1.pep
MAAYKLGVEVASAHDLMPKDGQGSASACVELTFDGQRFRTAIKDKDLNPVWNERFYFNVSDPSNLPELALEAYVYNINRSVDGSRSFLGKVRIAGTSFVPFPDAVVMHYPLEKRGMFSRVKGELGLKVYITNDPSIKASNPLPAMDPVSNNPPPTPAEQIAADITSTNLSTTHEHRAEVKTLHTIAKEVQHQHHGHGHLPASFPDQPSKYAVDPMKPEPQQPKIVRMYSAASQQPMDYALKETSPFLGGGQVVGGRVIRAEKHASTYDLVERMQYLFVRVVKARDLPDMDVTGSLDPYVEVRVGNYRGITRHFEKQKNPEWNAVFAFSRDRMQATILEVVVKDKDLLKDDFVGLVRFDLNDVPMRVPPDSPLAPEWYRLVHKTGDKSRGELMLAVWIGTQADEAFPDAWHSDAATLEDPSAVTHMKSKVYHAPRLWYLRVNIIEAQDIAITDKTRYPDVFVRAQVGHQHGRTKPVQARNFNPFWNEDLMFVAAEPFEDHLILSLEDRVAPNKDEVLGRVIIPLTMIDRRADDRIVHGKWFNLEKPVLIDVDQLKKEKFSTRLHLRLCLDGGYHVLDESTNYSSDLRPTAKQLWKPSIGLLELGILGAQGIVPMKTRDGKGSSDTYCVAKYGSKWVRTRTIVNNPGPKFNEQYTWEVYDPATVLTVGVFDNGQLGEKGGEKTSSSKDAKIGKVRIRLSTLETGRVYTHSYPLLVLHPSGVKKMGELHLAIRFSSTSLVNMMYLYSRPLLPKMHYVRPIPVLQVDMLRHQAVQIVSARLSRMEPPLRKEVVEYMSDVDSHLWSMRRSKANFFRLMSVFSGLFAVSKWFNGVWNYRYRPRYPPHMNTKISHAEAVHPDELDEEFDTFPTSRSPDVIRMRYDRLRSVAGRIQTVWLVQESTSVLLKANMGAAESSSKLAGSIHEFTVKDARGSDVELSRYKGKVVLIVNAASRCGLTNSNYTELGQLYGKYKETGATEPGSNEQVVEFACTRFKAEYPILGKVDVNGGNAAPLYKFLKSERGGLFGERIKWNFTKFLVDKEGHVVNRYAPTSSPLSIENDIKNLLGA

SEQ ID NO: 169657 - protein, 235 aa, Oryza sativa
  Clone ID: PAT_MRT4530_68056C.1.pep
MAASAPPPAEPPPPPAAAAAAATNPPASTAPTEDGEVEEGATPPRTSALGTANWGTATLVGVFAGLLYGGSKEASASVSKDAEVMLKMGSTTDKREQYRLMRDAMEKRFIRVAKGSLVGGVRLGMFTATFFGIQNLLIEKRGVHDVFNIAGAGSATAAAFGLILPGSPMWRARNVLVGSALGAGVCFPLGWIQLKLAEKANLEMASSKPTDLVEEQGNQSGVGAAIERLGRSLKK

SEQ ID NO: 169658 - protein, 57 aa, Oryza sativa
  Clone ID: PAT_MRT4530_68057C.1.pep
MQISRHTGPYKSLTSGARLSRMISREDTVGSTVNLSSPIIDSGGNNPRTCWGFQRPR

SEQ ID NO: 169659 - protein, 141 aa, Oryza sativa
  Clone ID: PAT_MRT4530_68058C.1.pep
MVKFQGLYAHAGIARQLDILRVRTTNYAYVGKPHPSYPSQPAPISPLGPACKPGPGGRERGHEEGAVVHICTMNGLRTTNYTYVGKPHPSYTHGVVARETRQRTAYNTVYAYVMADMLFRESCVLYAYPEIARCLQGTSNV

SEQ ID NO: 169660 - protein, 253 aa, Oryza sativa
  Clone ID: PAT_MRT4530_68059C.1.pep
MASEPTAAAGAPAPQPAAPRRRPPCVLSFSLARDRFLRRRFFSAGLRPFSIRLPSPAGAGTSVHVWAPPRPARRPVLLLHGFGASTTWQWASYLRPLLAAGFDPIVPDLLFFGDSCTLAADRSEVFQATAVKAAMDAIGVRRFDVVGVSYGGFVAYRMAAMYPEAVDRAVMVCAGVCLEETDLAAGLFPVAGVAEAAELLVPSRPADVRRLVHLTFVRPPPIMPSCFLRDYINVSHLISSSLVNSFVNPHFFF

SEQ ID NO: 169661 - protein, 145 aa, Oryza sativa
  Clone ID: PAT_MRT4530_6805C.1.pep
QEIDTNSMTIVNASTISSPFASFSFSATASFDVQSPSRIEVQFKEGSFQPPKISSSVDLPAEVDIFGQKISLGPVQQVLNPLQQAFASIAGSISGQPPLKLPIPGNNRARSWLLTTYLDKDLRISRGDGGLFILVKEGSPLLDQL

SEQ ID NO: 169662 - protein, 117 aa, Oryza sativa
  unsure (1)..(117): unsure at all Xaa locations
  Clone ID: PAT_MRT4530_68060C.1.pep
RRPFSPSAAARQSSSPLVAARPDTPSPRRSPPVTPSSSPAVAHLFAACYAVHPTDRCSSRRLGRIYSSSGGHRRXRPFSPVTTACRASRLIEEKREERGRETKRGEMGIERGGRRGQ

SEQ ID NO: 169663 - protein, 58 aa, Oryza sativa
  Clone ID: PAT_MRT4530_68061C.1.pep
MALVANVVHRNSGGVDGSTLRWPETFALMQSSLNTYHYQQRLYFAQKKEKKLYFTRRG

SEQ ID NO: 169664 - protein, 133 aa, Oryza sativa
  unsure (1)..(133): unsure at all Xaa locations
  Clone ID: PAT_MRT4530_68062C.1.pep
MISASAVAMRGEMGGGGGGGDEGELEDELDALLGTGGAGARRRGEDAGERERELNMFRSGSAPPTIEGSLNAISGLLRGGGEAAVTVAAIPDAETLNGXGGLLSEDELRADPAYLSYYYSHGNLNPRLPPPVL

SEQ ID NO: 169665 - protein, 238 aa, Oryza sativa
  Clone ID: PAT_MRT4530_68063C.1.pep
MASAGPAGRILRSSTPSPSPSARKMVGDHGATAWADGQQHEEPLKHEAEEEAVQDGHQPRYAQVLLAPYGRGVIVGHSGIQVEYSWVTARVGSVAYRLQLPASCSIHLRVHVSQLCKALSFGDLSTVRLPPTMPNEDHVQVQVLACRRCKRGVAVPEQIKVRWSGATSDEATCEDAAALRHRFPGAPAWGQDGSEGERNVTTAITTKDTSLAANPVKSIGHGGRLKRPSSQVIGPEWV

SEQ ID NO: 169666 - protein, 218 aa, Oryza sativa
  Clone ID: PAT_MRT4530_68064C.1.pep
NRGSGRSPLLWESRRRIALASARGLEYIHATGSKVVHGNIKSSNVLLSRSSVDARVADHGLAHLVGPAGAPSSRVAGYRAPEVVADPWRLSQKADVYSFGVLLLELLTGKAPTHAVLHDDEGVDLPRWARSVVREEWTSEVFDTELLRHPGAEDEMVEMLRLAMDCTVTVPDQRPAMPEIVVRIEQLGGAGSARTARSVSMDDADDRPLRPAGSTRES

SEQ ID NO: 169667 - protein, 1178 aa, Oryza sativa
  unsure (1)..(1178): unsure at all Xaa locations
  Clone ID: PAT_MRT4530_68065C.1.pep
MADRDEEQILYDTIAEGSSQYWNEEEGNEDPNQYLNEEGNVERDAEGNQQGHVERDVEGNQEEEASGSQPSVGQKRARGQRGAAKKLEGRHIITEVEEDGRPSAPAEAAKNYVRHSGWVVRDNVPVSTVYWRRTRARGDHESFVPDSEKEMLWTTMLETFTLPAGTEDKVKRWTLKKMAEQFQSFKGDLYQKYILKGQTPNFDTFPKLRDHWDEFVAYKTGEQGKAMMERNKENAAKKKYHHHLGSGGYSVAMPKWEQMEASLIERGIEPATANWPERSKFWYYAHGGTLNPADGSLVFGYQIQEAARRLTDAVEASSQGTFRPDRDRDELTLALQTPEHPGRTRGKGVIPWKIGFKEDIHTYRSRMRSKRDTEAKIADLEFRVSSYELNMQEEVARKVDERMAAHRSHDPQPTIPPAMVSPSGNRSSCASTGQVGSGMPIPTDPSGLYHCRPIPAGYSKDRALSPPRAPPALSPPQAPASTPQDLAPTPPRAPTPTPPQAPLPAPSKSRAPPAPPLAHTRASKKAKVDSAKNKNPGCDCTQEELNAYAASEVKRQFKHRSPEKKIPIDPSVRTXFRVPQLGEHPNQEIEPXLVTGKEMTIEQFIADTGLTTDQLLGVAPIEKAEVKYMYELGKPLVKPELLQSLPTQMYKFHQLYMEMSATGREMIGARIRDTDFLQGDDILWINFRGIYELYQLDALDVCIMSCWILMEIQRARRRRVFDTGFIDPRKVNVAMLDQYPQETEDNLVHLLKAQHYKTFILLPYNTEFHWVLLLIDLEACTVNVYDSMDKKESTFDKVFELIDRAWYRFRHLVRGKWRERLRRKFKFPCAKQKQGTNLCGYYVCEYCHCLADQIITTRELDFIRMRDNLTTHKEFIAAVQEQLMGFINEEILDPKGVLMVLTLQRVKIGPWGGTGGHAWDEGGHGASAGGYTGVRRMSIGSSWCVSSMLFEYDDNGKRVKGTLQGEGGNGIPEEELDFHGEVLTHMCGYHDNHLIRWLQFRSNRNRTFGPYGNLGEDRAGWTRFEVSMEHSGSIVGFCGRSGNFTDAIGVYVAVWNPERFYDSMRRQGVRVYRASPLRMDLRQIEEEKKKEEVERGRLQKEIKEGRESLRKLRLKLGVDVPQQDQEIVQQLERGRQGKRQTIEELQVEHEQLERERGRLLLLQQVDEQLERELRRHTY

SEQ ID NO: 169668 - protein, 840 aa, Oryza sativa
  unsure (1)..(840): unsure at all Xaa locations
  Clone ID: PAT_MRT4530_68066C.1.pep
MADRDEEQILYDTIAEGSSQYWNEEEGNEDPYQYLNEEGNVERDAEGNQEGHVERDVEENQEEEASGSQPSAGQKRARGQRGAAKKLEGRHIITEVDEDGRPSAPAEAAKNYVRHSGWVVQDNVLVSTVYWHRTRACGDHESFVPDSWKEMLWTTMLETFTLPTGTEDKGQTPNFDTFPKLRDHWDEFVAYKTGQQGQAMMERNKENAAKKKYHHHLGSGGYSVAMPKWEEMEASLLERGIEPVTANWPERSKFWYYAHGGTLNPADGSLVFGDQIREAARRLTDAVEASSQGTFQPDREKDELSLAMQTPEHSGRTRGKGVIPWKIGFKEDIHTYRSRMRSKRDTEAKIADLEFRVSSYELSMQEEVARKVDECMAAYRSHDPQPTIPPTMVSPSGNRSSCASTGQVASGMAIPTDPSGTYHCRPIPAGYSKVEVELVEGAYEDLELDYPGGDGETHLRDTSHAIILWRKRLLXPSPPHAPAPSPPQAPAPTPPQAPTPTPPXAPTPTPPQSPCPAPSKSRAPQAPPPAPTRATKKAEVDAAKNKDLGSQETIEASKGMSAPAKEAIELSDYERTLKKASSGKSKPVPQLKEQPNQEIEPLVTGEDFGIQDFINDTGLTTDQLLQGAPIEKAEFHQLYMEMSATGREMIRARIKDTNFLQGDDILWINFKGIYELYQLDALDASIMSCWILMEIQRARRRGVFDTGFIDSRKVNVAMLDQYPQETEDDLVHLLKEQHYKTFILLPYNTEFYWVLLLFDLEACTVNVYESMDKKESTFDKVFELIDRAWYRFHHLVRGKWRERPKFNFPFIRMRDNLIXTQGIYRGGSRTTHGIHQRTNP

SEQ ID NO: 169669 - protein, 59 aa, Oryza sativa
  unsure (1)..(59): unsure at all Xaa locations
  Clone ID: PAT_MRT4530_68067C.1.pep
XXXKKKIPSANQLMHFYRESIVVHVVLQWITYGKMAKRVIAMYKGDGKPYVLPTKQWGA

SEQ ID NO: 169670 - protein, 1431 aa, Oryza sativa
  Clone ID: PAT_MRT4530_68068C.1.pep
MNFFRGMSALVKEAIKLSDYERTLKKASSGKSKPVPQLGEQPNQEIEPLVTGKDMTIEEFIIDTGLTTDQLLGVEPIEKAELKYMYELGKPLVKPELVQSLPTQMYKFHQLYVEMSATGREMIGARIRDPDFLQGDDILWINFKGIYEVYQLDALDVSIMSCWTLMEIQRARRRRVFDTGFIDPRRVNVGMLDQYPQETEDNLVHLLKAQHYKTFILLPYNTEFHWVLLLFDLSACTVNVYDSMDKKESTFDKVFELIDRAWYRFRHLVRGNWRERLRRRFKFPMADRDEEQILYDTIAEGSSQYWNEEEGNEDPNQYLNEEGNVERDAEGNQQGHVERDVEGNQEEEASGSQPSVGQKRARGQRGAAKKLEGRHIITEVEEDGRPSAPAEAAKNYVRHSGWVVRDNVPVSTVYWRRTSARGDHESFVPDSEKEMLWTRMLETFTLPAGTEDKVKRWTLKKMAEQFQSFKGDLYQKYILKGQTPNFDTFPKLRDHWDEFVAYKTGEQGQAMMERNKENAAKKKYHHHLGSGGYSVAMPKWEKMEASLIERGIEPATANWPERSKFWYYAHGGTLNPADGSLVFGDQIREAARRLTDAVEASSQGTFRPDRDRDELTLALQTPEHPGRTRGKGVIPWKIDFKEDIHTYRSRMRSKRDTEAKIADPEFRVSSYELNMQEEVARKVDERMAAHRSHDPQPTIPPAMVSPSGNRSSCASTGQVASGMAIPTDPSGTYHCRPIPAGYSKVEVELVEGAYEDLELDYPGGDGSCTVSSSCSASTVSTSGSSTDSSSGSCTVSSSCSASTVSTSGSCTDSSSGSCTVSSSCSASTVSTSGSSTDSSSGSCTVSSSSRAPPAAPPAHTRATKKAKVDAAKNKDPGYDCTQEELDAYVASEVKRQFKPRSPEKKIPIDPSVRNFFRGMSASVKEAIKLSDYERTLKKASSGKSKPVPQLGEQPNQEIEPLVTGKEMTIEQFITDTGLTTDQLLGAAPIEKAEVKYMYELGKPLVKPELLQSLPTQMYKFHQLYMEMSATGREMIGARIRDTDFLQGDDILWINFTHIYELYQLDAVDVSIMSCWILMEIQRARRRRVFDTGFIDPRKVNVTMLDQYPQETEDNLVHLLKAQHYKTFILLPYNTEFHWVLLLFDLEACTVNCAKQKQGNNLCGYYVCEYCHCLANQIITTRELDFIRMRDNLTTHKEFIAAVQEQLMGFINEEILDPKGEFYYDGNTIHRPPMMVVAVGMVGNALQPSLGSDPSHSEETLRPTAPGRVRPNHGLDHSGQSLAGGLLFCSFGDGTQRREGEGGGGGSGCFGHGGGREVSGCDYGSRYRLREGGCDDGSQRRLREGATTTRGREQRIRRLCWQGEPDPALDSPPAAAAMLGRVALGVSSGRWIWRARRRVSFSLSLLHRRQLPSPPPPRAAASSGLAGFLLMC

SEQ ID NO: 169671 - protein, 49 aa, Oryza sativa
  Clone ID: PAT_MRT4530_68069C.1.pep
GQKKNRWGAPRLAIYICIWMEHMLTRMHTLLNGPMDTSFLGHYLGQASH

SEQ ID NO: 169672 - protein, 436 aa, Oryza sativa
  Clone ID: PAT_MRT4530_6806C.1.pep
MAMPPPLFAAASHASLLLPSPTIHSSTGSRRPFRLPLRSSRRPPVAAAAASGVPDEWGDRSPSAPEPPSQPDPPIDDDEWGRDDPSASGNSRPVLVTDEWGEPGVPEPQSTSAADPPTNDDEWGGDPAPPPPPPPVPEEDNEEERREELKRCLVDTVYGSDLGFRASSEVRGEVLELVTQLEATNPTPEPVQATHLLAGNWILIYTAYSELLPILAVGAAPLFKVDEISQEIDTNSMTIVNASTISSPFASFSFSATASFDVQSPSRIEISLPTNSSGIQLATQMLKISTQTSVHQKLEMCIEIIEISDHQLSCANMYIDQTDMLMVIPMKVQFKEGSFQPPKISSSVDLPAEVDIFGQKISLGPVQQVLNPLQQAFASIAGSISGQPPLKLPIPGNNRARSWLLTTYLDKDLRISRGDGGLFILVKEGSPLLDQL

SEQ ID NO: 169673 - protein, 894 aa, Oryza sativa
  Clone ID: PAT_MRT4530_68070C.1.pep
MADRDEEQILYDTIAEGSSQYWNEEEGNEDPNQYLNEEGNVERDAEGNQQGHVERDVEGNQEEEASGSQPSVGQKRARGQRGAAKKLEGRHIITEVEEDGRPSAPAEAAKNYVRHSGWVVRDNVPVSTVYWRRTRARGDHESFVPDSEKEMLWTTMLETFTLPAGTEDKVKRWTLKKMAEQFQSFKGDLYQKYILKGQTPNFDTFPKLRDHWDEFVAYKTGEQGKAMMERNKENAAKKKYHHHLGSGGYSVAMPKWEQMEASLIEKGIEPATANWPERSKFWYYAHGGTLNPADGSLVFGYQIQEAARRLTDAVEASSQGTFRPDRDRDELTLALQTPEHPGRTRGKGVIPWKIGFKEDIHTYRSRMRSKRDTEAKIADLEFRVSSYELNMQEEVARKVDERMAAHRSHDPQPTIPPAMVSPSGNRSSCASTGQVASGMAIPTDPSGTYHCRPIPAGYSKVEVELVEGAYEDLELDYPGGDGGTSSSLGDKRRLAPASTPQDPAPTPPRAPTPTPPQAPLPAPSKSRAPPAPPLAHTRATKKAKVDAAKIKDPGYDCTQEELDAYVASEVKRQFKPRSPEKKIPIDPSVRNFFRGMSASVKEAIKLSDYERTLKKASSGKSKPVPQLGEQPNQEIEPLVTGKEMTIEQFITDTGLTTDQLLGVAPIEKAEVKYMYELDKPLVKPELLQSLPTQMYKFHQLYMEMSATGREMIGARIRDTDFLQGDDILWINFRGIYELYQLDALDVSIMSCWILMEIQRARRRRVFDTGFIDPRKVNVAMLDQYPQETEDNLVHLLKAQHYKTFILLPYNTEFHWVLLLIDLEACTVNSMTYESCQMDDGHNKEGVGGGRQHQGRGHDVVGNGQQRGKHRAGVSDGKEGAMSSDEVDAEGSRHQ

SEQ ID NO: 169674 - protein, 1351 aa, Oryza sativa
  Clone ID: PAT_MRT4530_68071C.1.pep
MAPQRHAAAAVATPPPPPPRRRANRRPDAATPPLTNENENDRTNESEMNTSTCFLYQQMADRDEEQILYDTIAEGSSQYWNEEEGNEDPNQYLNEEGNVERDAEGNQQGHVERDVEGNQEEEASDSQPSVGQKRARGQRGAAKKLEGRHIITEVEEDGRPSAPAEAAKNYVRHSGWVVRDNVPVSTVYWRRTRARGDHESFVPDSEKEMLWTTMLETFTLPAGTEDKVKRWTLKKMAEQFQSFKGDLYQKYILKGQTPNFDTFPKLRDHWDEFVAYKTGEQGQAMMERNKENAAKKKYHHHLGSGGYSVAMPKWEQMEASLIERGIEPATANWPERSKFWYYAHGGTLNPADGSLVFGYQIREAARRLTDAVEASSQGTFRPDRDRDELTLALQTPEHPGRTRGKWVIPWKIGFKEDIHTYRSRMRSKRDTEAKIADLEFRVSSYELNMQEEVARKVDERMAAHRSHDPQPTIPPAMVSPSGNRSSCASTGQVASGMAIPTDPSGTYHCRPIPAGYSKVEVELVEGAYEDLELDYPGGDGETHLRDTCHAIILWRRRYIILPGRQAASRAPSPPAPPSPPQDPTPSPPHAPPAPSPPQAPASTPPQDPAPTPPRAPTPTPPQAPLPAPSKSRAPPAPPPAHTRATKKAKVDAAKNKDPGYDCTQEELDAYVASEVKRQFKPRSPEKKIPIDPSVRNFFRGMSASVKETIKLSDYERTLKKASSGKSKLVPQLGEQPNQEIEPLVTGKEMTIEQFITDTGLTTDQLLGVAPIEKAEVKYMYELGKPLVKPELLQSLPTQMYKFHQLYMEMSATGREMIGARIRDTDFLQGDDILWINFRGIYELYQLDALDVSIMSCWILMEIQRARRRRVFDTGFIDPRKVNVAMLDQYPQETEDNLVHLLKAQHYKTFILLPYNTEFHWVLLLIDLEAYTVNVYDSMDKKESTFDKVFELIDRAWYRFRHLVRGKWRERLRRKFKFPCAKQKQGTNLCGYYVCEYCHCLADQIITTRELDFIRMRDNLTTHKEFIAAIQEQLMGFINEEILDPKGVLMVLTLQRVKIGPWGGTGGHAWDEGGHGASAGSYTGVRRMSIGSSWCVSSMLFEYDDNGKRVKGTLHGERDNGIPEEELDFHGEVLTHMCGYHDNHLIRWLQFRSNRNRTFGPYGNLLEDQAGWTRFEVSMEHSGSIVGFCGRSDDFVDAIGVYVAVWNPERFYDSMRRQGVRVYRASPLRMDLRQIEEEKKKEEVERGRLQKELEEGRESLRNIRLKLDMPPDQRKRLIRRDLRVEHQEIERQLQEMQQLERERQQLEQQEIERQLPSRQQLEQQEIKRQLQDMERERQLHRWRNFVTGGETL

SEQ ID NO: 169675 - protein, 135 aa, Oryza sativa
  unsure (1)..(135): unsure at all Xaa locations
  Clone ID: PAT_MRT4530_68072C.1.pep
TQLPIEDLIVIIGCYIAIDWITDIVIFIIGVGTMHLKRCQTVKLYIAVPLTFXIVMVLFGFXKQLIGYNIVAFCHPSTVFRFGKSTRETMAKMIEVLGLGVIWFERRLSFRLISKVSFFYLVLYIQILSTTAISL

SEQ ID NO: 169676 - protein, 114 aa, Oryza sativa
  Clone ID: PAT_MRT4530_68073C.1.pep
MQTLMSVFVIIIGYYTAIDWITDIVIFIIGVGTMHLKRCQTVKLYIAVPLTFLYISQGAVWVFKQLIGYNIIAFRHPSTVFRFGKSTRETMTKMIEALGFGVIWFERRLSFRLR

SEQ ID NO: 169677 - protein, 112 aa, Oryza sativa
  Clone ID: PAT_MRT4530_68074C.1.pep
HSRSPHIVFAVAIVGCSTAVCAAAAPPSPAGTAPPAPPSRGATGAYPPPPPTSGARGCWPPSPEQRLRAQPSMRSAASNRVAPPPPRSRHKTTNSPSRAAGTRPLSSFSFVP

SEQ ID NO: 169678 - protein, 113 aa, Oryza sativa
  unsure (1)..(113): unsure at all Xaa locations
  Clone ID: PAT_MRT4530_68075C.1.pep
MQMLMSVFVIIIGCYTAIGWITDIVIFIIGVGTMHLKRCQTVKLYIAGPLTFLYISQGAVWVFKQLIGYNIIAFCHPSTVFIFGKSTSETMAKMIEALSFGVIXFERRLSFRL

SEQ ID NO: 169679 - protein, 70 aa, Oryza sativa
  Clone ID: PAT_MRT4530_68076C.1.pep
MKMKKILDDDKRNRHDEDDDVGDPANSSVATNDNDKDAHQHLHTVVDASLGGELMLLSNSSKPKYLKLLK

SEQ ID NO: 169680 - protein, 81 aa, Oryza sativa
  Clone ID: PAT_MRT4530_68077C.1.pep
MPVHLSSDPVLAASATARVNAQQALSMIRSEPYSLKSYLSPTSIMDQKTSCCTRYEYDRHTELIRLELRDQMAKNEVVASR

SEQ ID NO: 169681 - protein, 198 aa, Oryza sativa
  unsure (1)..(198): unsure at all Xaa locations
  Clone ID: PAT_MRT4530_68078C.1.pep
MQMLMSVFVIIIGCYTAIGWITDIVIFIIGVGTMHLKRCQTVKLYIAGPLTFLYISQGAVWVFKQLIGYNIIAFCHPSTVFRFGKSTRETMTKMIEALGFGVIWFERRLSFRLRSSSCFVYFXLLFIVVTAGETIFTPGSQPLTNSQKPGGGWDLEEGGGGRRDKRLRMGALLVGNIKCRAAFEPGLKMFFCPSSYSN

SEQ ID NO: 169682 - protein, 91 aa, Oryza sativa
  Clone ID: PAT_MRT4530_68079C.1.pep
MGDDVRSAGKGKPVLGSFMTVFMHTNTVNVVLMVLGLLGTVGDGLSMPVLLLITGSVYNNFGGGADNVQEFSSKVNMVRAPLVDSPSSILN

SEQ ID NO: 169683 - protein, 66 aa, Oryza sativa
  Clone ID: PAT_MRT4530_6807C.1.pep
PELDSSYLLSENDGSATSGYIYSSFLWNDKSESEIRCKIDLLAQDDSAEHFFRKEMHLNHFTLLYS

SEQ ID NO: 169684 - protein, 90 aa, Oryza sativa
  Clone ID: PAT_MRT4530_68080C.1.pep
NYFTESKRSVTFYGKEFFRENVFLNFSIRANILNTDYLKINVMIIESFQIILLSYTRFTHVKFGGVLTLGSPSSLYSKRTHSILLTSTSG

SEQ ID NO: 169685 - protein, 149 aa, Oryza sativa
  unsure (1)..(149): unsure at all Xaa locations
  Clone ID: PAT_MRT4530_68081C.1.pep
CRRWWRRRPAHRRRRGRGSRRRNSGVNATVAGGDALLKVSAGNGGLAGXRGGDGTGGRSADAAAGAAGVGRRHGRERRTAGRGDEATGVRGRGQKIENGPRGFHFIGIGXEPGTGEVGTAAEFVSGGHGRRPGKTRPFPTIGGAIQWGK

SEQ ID NO: 169686 - protein, 92 aa, Oryza sativa
  Clone ID: PAT_MRT4530_68082C.1.pep
MGLFGSVWRSLRFYETAVVASAGFGWGRGWSFAIACTLPRARRSRLPTAVHTSLSPPLPRPPPSEPEEEAKRPAPVPAAWPAGLELDAATRF

SEQ ID NO: 169687 - protein, 60 aa, Oryza sativa
  Clone ID: PAT_MRT4530_68083C.1.pep
KRRQSFFIKIRRKKSPFPLPNIKPSIIIKWNTGYRPPGREIFTLFTIKRNILLILLGTIH

SEQ ID NO: 169688 - protein, 130 aa, Oryza sativa
  Clone ID: PAT_MRT4530_68084C.1.pep
DSWKAPLRLSVWLYISNSRSREPSVLPTTWLRTPAAWPPPLPSPVHGALPIPSGRKPYAPRRCHQTCCCGFAGHHVRTTGNLSWSCCCCCSVASRRQCWLPAAPCPVAAVCCCWLVRSCVVVSGGKGGFL

SEQ ID NO: 169689 - protein, 131 aa, Oryza sativa
  unsure (1)..(131): unsure at all Xaa locations
  Clone ID: PAT_MRT4530_68085C.1.pep
KRKNGKKGKKKKTPGGKKKKAPPPGGGGNKKKNGPKGFPLEKRGRGATPNNGGKPPPKAPQGLHFNLPAGILGGNGKGKKFPPGKTYAHXPQALKRPPKRKMGTPPGPGPKNRGEPRGRIPPPNRGGKKSF

SEQ ID NO: 169690 - protein, 84 aa, Oryza sativa
  Clone ID: PAT_MRT4530_68086C.1.pep
EIISRHQGIKERMRGGHGAAAGEGRNGWMTVLALGDWNMKNGALPDYSMDLYKIREMRKRIKKELLRTRLGGDDYLLAQQKQQQ

SEQ ID NO: 169691 - protein, 89 aa, Oryza sativa
  Clone ID: PAT_MRT4530_68087C.1.pep
MEAIAETLASSVRHASGRTGGGPGGRVGDHARAWGHNAPMHLRTISSARERLRITWLDEVCASSGGFDDGGSSREWIHNDACGGARKWL

SEQ ID NO: 169692 - protein, 123 aa, Oryza sativa
  unsure (1)..(123): unsure at all Xaa locations
  Clone ID: PAT_MRT4530_68088C.1.pep
FPLXLHTIPTSRPHTHCLNNTHPNCIPTQSTTVTQGIFPPEHCTQTLNPQAQSGIPLAPQHSFTTHQHGSCTASSSPHRKGTLTDYWNILTSRWRRWVRMSLSGRHTMXGQGQCLTSFDTCGS

SEQ ID NO: 169693 - protein, 106 aa, Oryza sativa
  Clone ID: PAT_MRT4530_68089C.1.pep
RNLSPAIASIRSDQQSKPHDHREIQTKKIQRGKTTPRSSAPRRLLQIEHPARAHQMLQGENPTKFLSPSGIKNRTNKRPENHLRQIEIGSNSPQDTPRKGAPLDLQ

SEQ ID NO: 169694 - protein, 96 aa, Oryza sativa
  Clone ID: PAT_MRT4530_6808C.1.pep
HTDWRSYRGDITVHQLIAHLPSASTANRAEKPTQEDIQEGQEVCHMGWLMDDITYYNLQYALHSALKSHPEIPPQMPQPRVKLSLILNPGSTSVCA

SEQ ID NO: 169695 - protein, 269 aa, Oryza sativa
  Clone ID: PAT_MRT4530_68090C.1.pep
MHRVYDFILPTDASPIEAKQPVVATHSSSIDRSPAGILRSPPPAPASSERENTTPLGLDRIGLPCISAVASSRVSPRVAGLARRRRGACRHSRASSWSWVADDRKLEEEEEKKTLEFYAGTNDLSLLFPTWQGSPTIANVTLDAGSRYDQWIHQLDRRRHSCRDVAALIGSSDGSHVEKATFSFRTVQVCKMQTETGWATAIEDALLPIPFPALAMLQSSQPTKEKRRCVPYAYKRLHETDEESTTQAMYSTFECSLRVPIRLPTLPTS

SEQ ID NO: 169696 - protein, 68 aa, Oryza sativa
  Clone ID: PAT_MRT4530_68091C.1.pep
PGVVLPRLPDALPANGPPSQNRDHSRDGYLYFRTSAGAKKNTRPVPLQHYIWWWPGLNYFFIREKIKH

SEQ ID NO: 169697 - protein, 188 aa, Oryza sativa
  Clone ID: PAT_MRT4530_68092C.1.pep
MGWGERLRPAASPASGRSHGCGSRTLVTSRTWTRCGSNVVVDSALVDMYFKCSSPEDARWVFAAVAARNITMWTTVMSGHSQHGRVAEALALFDQMMRVDRLRQNDVTFLTVLSAMRWYKWIVTQFEGLANLSNDGALVMQTGAGGRYSLLVHHSVEELRVFGLTDDMIEDQRFAWTPSSSVLLNRWR

SEQ ID NO: 169698 - protein, 459 aa, Oryza sativa
  Clone ID: PAT_MRT4530_68093C.1.pep
MATITTQLRSALLSPAASPSRRARRAPSSVRCDSSAASSLSASASLDADFDKKQFRHNLTRSDNYNRKGFGHKKETLELMSQEYTSDVIKTLKENGNQHTWGPVTVKLAEAYGFCWGVERAVQIAYEARKQFPDDRIWLTNEIIHNPTVNKRLEDMGVQNIPVDAGIKDFDVVEQGDVVVLPAFGAAVEEMYTLNEKKVQIVDTTCPWVSKVWNMVEKHKKGDYTSIIHGKYSHEETVATASFAGTYIIVKNIAEASYVCDYILGGQLDGSSSTKEEFLEKFKNAVSPGFDPDVDLVKVGIANQTTMLKGETEEIGKLVEKTMMRRFGVENVNDHFIAFNTICDATQERQDAMYQLVKEKVDLILVVGGWNSSNTSHLQEIGELSGIPSYWIDSEQRIGPGNKISYKLNHGELVEKENWLPEGPITIGVTSGASTPDKVVEDALQKVFEIKRQEVLQAA

SEQ ID NO: 169699 - protein, 71 aa, Oryza sativa
  Clone ID: PAT_MRT4530_68094C.1.pep
GRRAAACWGGRAVGARGPAAERGEVAAGNGWRRGGQEGVGGDGLRRQIHHPLELRGYGDEATSPLLRRAPS

SEQ ID NO: 169700 - protein, 702 aa, Oryza sativa
  Clone ID: PAT_MRT4530_68095C.1.pep
MDPTDITFRLLEEITDGFSEERKIGQGAYGTVYKGEFRNGKEIAVKMLHNDTLGFDDKQFENEFQNLMRLEHPNIVRLVAYCYETQHKYAEYKGRIVFAAIIHRALCFEYLTGGSLENHLSDEFHGLDWPTRFKIIKGTCEGLKYLHEGLKPPIYHLDLKPGNILLDKNMVPKLADFGLSKLFTEEKTRVTQTPIGTVGYLPPEYIEKNVLSNKLDIFSLGVVMLNVIAGPRGRSRSAEMSSQEFTDLVLGNWTVRLQATWNGSSLEAYRQQVKTCTEIALKCVEIDRHKRPNILDIVNKINETETMIGKLPISHGSEVRFVNDHREKQTSYSDEFITLESRLASHLNLSDTQVNQEAYHHNGSSFKEKEEDREVHQIIPMENPDIPIDAHPTEPWILTGNIFGSVDILNCDTQNHLLLILKISGNIVMFAYASEIHSSAAKLIARKQWLVVGYHDGFIRVYTYESPVQQVKRFKAHSWNITCLDVHPTEPYVLSVGLLDPIKMWDWNKGWECIRMFDMQGVLAHGIKFNPHDSYKFAAASMMNVQVWNFRSSRREFTLFGHGSAVSCFDYFTRGNQQYIITGSLDKTARIWDCKSRTCVQILIGHMDCVTCVCSHPDLPILLTGSNDETVRLWNSITFKLEGVLDFELGKVGAIVCLKGSKRVVIGHQAGLVITEIRNEQPGPSNRLTQCKQHYSICFTVA

SEQ ID NO: 169701 - protein, 65 aa, Oryza sativa
  Clone ID: PAT_MRT4530_68096C.1.pep
MPLQRRHHQTRIPTAAVAAEAAQIRTPLPTHEEKEGEIEKEWLAPSFNRTAPAWRRSPADVAGRC

SEQ ID NO: 169702 - protein, 120 aa, Oryza sativa
  Clone ID: PAT_MRT4530_68097C.1.pep
YIGTCGGHHSLTIHVLFKQKGYTTLFESPHLIHPQLAPAALTDTQRVPGGLNTTYSVGDVHVVATPGGSSTGAPGAISLGRPTPWAWCCPTSRAPCSLRFPASMCVIFLHPPQLLGTAVS

SEQ ID NO: 169703 - protein, 209 aa, Oryza sativa
  unsure (1)..(209): unsure at all Xaa locations
  Clone ID: PAT_MRT4530_68098C.1.pep
KNNSQGTRSNGPAIHTPRTIAPVTANISHTPNTSPPITXHTPHHHRTPHPHYSYTSRPHTSLPPTLPLTLPPLTTQSQPRPPLTQPTHSPLTXTHTRPPSPSFPPPPSPAHXPLPHPPSHSPSLXLAYYSHPPHALPLAPPPPSPTPLPPPTPTPTLAPHTKPPLAXPATPPTQRPPPPSGWGGPTPLSPQHXPNSTPHPHKPNPPNSA

SEQ ID NO: 169704 - protein, 384 aa, Oryza sativa
  Clone ID: PAT_MRT4530_68099C.1.pep
MASSFRKRKTGWLILHPWRPRGRGAVQTPSPPATDRLSALPDALLHTILSSLKGRQMVQTSVLSKRWRHLWRSVPCLDIDQREFAAASENWAISRSDLEKFEDFADNVLAYRCGSPAKLDTFRLRICDRYHSLRSSDTDRWIRRGLKCSPREFHLHFDYRYDSYLLEMHKLGSNYGCLTKLHLTNVSLHECFMEHITTVCTLLEVLELNRCSLYLQEITHPKLKNLVLHGPAVMPSLVRASIRFSVVFPCKCNFLNVLFNVTSLELSGFREMVRLEFNQVEFHAFKNLRTLLLDRCRPSYNNELLRHLLQNSPNLEKLTVHCCKFSKGSLEWRKSSQHKNQVNCRKLKSTEIIYKDIDDVRELVDLLLDVSGHLPKNTIALTKI

SEQ ID NO: 169705 - protein, 120 aa, Oryza sativa
  Clone ID: PAT_MRT4530_6809C.1.pep
HHLRQVEFSAEGGTSEDDVAKASAHGHRFRQVHPLQPGQMSQVMAEGALALQAQLQAFLQQSCQPHNISGTAPSAQLEENTSQGAPSWLPSNQPGPGASPLTHPWQPTKHHQSEPGSRTP

SEQ ID NO: 169706 - protein, 418 aa, Oryza sativa
  Clone ID: PAT_MRT4530_680C.1.pep
MDEHLAYHLPDLALEIVLSHLQSLADRASFRGVCRQWAAVWRDQWPRTPPMPWLAAPGHCVDLSDASVHRVPLPSGVDVDGIVCCGSLGNWIALTPKRRRWRPRHQVRPLLLNPFSGASVQLPILTPAAFRGGGDDINVEKIVMSSAPDSDGCVVAAIVMGSYSSTREIVIWRRGQESCSAPAAAPSNVADAVFHGGDLYVVDKCSQLYVFPNHVFSSDGGGGQELHPVRLEMDLTRTSRFVARVLLECDGRLLMADRHRHGGDAGYHEYRVYALERDASCGDWRWSPVTRLDGHVLFLGAGCCRALPVTGRDRVKDGNVVFLDDSAEITAVVTVDDRKPLERSALIRRSMDVPASNVLDTFRRRGGGGGGGADRPAPPAACMAGRRNQCFGFGGLQDLIVLLKSFVSLQEDGYTHRQ

SEQ ID NO: 169707 - protein, 113 aa, Oryza sativa
  unsure (1)..(113): unsure at all Xaa locations
  Clone ID: PAT_MRT4530_68100C.1.pep
MGMRGLGSSTILPRIVANYTGLRPLWFLERAVVVHPVGSAGLHCPVRYTWAETYLRCRRLLSFLVQGSVRSGCPVLVLFPGVRAPVXSYFMVLMFAALADCFTICVNAVTVAL

SEQ ID NO: 169708 - protein, 214 aa, Oryza sativa
  Clone ID: PAT_MRT4530_68101C.1.pep
MNLEDLRLSLAQQPNARSVLETIWGCPENIQMRAVVCLWQWWKQMNEVREGGKARDPIDLAYIIDNQGEEFLKLNWKEGKLKERRMAKWRKPTSDVLNINSDGAFHSSTKQGGWGYVIRDHHGRVVQAGAGGADNMMDAFHSEIIACAAAVGAASERGIMKVEFEIGSLLLKSTLQENSFNLSVMGGVILEIKNVISRRFISFLVNYCPRECNK

SEQ ID NO: 169709 - protein, 163 aa, Oryza sativa
  Clone ID: PAT_MRT4530_68102C.1.pep
MTAEVAGRNSGDRAGVSNNSNSSEEDERDVAAQRMALHVPPLTVRWSSGGRRRNVSRCRLGDLGGPVLDVSAAPHSTMRVLREGEDIGTTPVVDSFEWKDAATYTMPEGSAAACRVRRDVHRQDQVGSDMHHGEYSKKLATTMYEKVAGVGTVVDSWLARCSK

SEQ ID NO: 169710 - protein, 76 aa, Oryza sativa
  unsure (1)..(76): unsure at all Xaa locations
  Clone ID: PAT_MRT4530_68103C.1.pep
SNAPXDSKGYLLEAFTDAFWDCKVDCKLIFPYLDAVGKMLFPVGSFYGIHTKLPLLHNFFSLFFFFFFLWVTCSGY

SEQ ID NO: 169711 - protein, 140 aa, Oryza sativa
  Clone ID: PAT_MRT4530_68104C.1.pep
MAVTLASKARRTVPTRRRQQGEELRWRPSWTRRSTSGGGGGLCHRIRLRPRVPPHRLHIVDFLRWDLGLPRDYLTSMKRCSCCASLGDAMPGSFLAMVDLVAVTEVKLVASRWSAPGLDAVVRGVTRRQACPKSRRGEEE

SEQ ID NO: 169712 - protein, 70 aa, Oryza sativa
  Clone ID: PAT_MRT4530_68105C.1.pep
MRRSEEAWQHAAVVERRSRRGSLRYLGSLCVLDDVWKETNARVFHNREKSVGLLFGAIKEEVIIWKEAGG

SEQ ID NO: 169713 - protein, 118 aa, Oryza sativa
  Clone ID: PAT_MRT4530_68106C.1.pep
YYFPMLMSLLILICMKSAATLLKCSIFVATNSQTVALAAGGLCLAFCIARIHRAVWRFNGALRPTLTSKCGCEGARHDHKNHEESSSDKLVDLDRCHDRRLQIDRVFLNFSLPFLSFV

SEQ ID NO: 169714 - protein, 116 aa, Oryza sativa
  Clone ID: PAT_MRT4530_68107C.1.pep
PLIHKWRGGGSGNQPGPTGQGPWAPGAGSQRRLGSLLPNSRPVAAWCLGVTAPPPSASPWTEQPGGQTTAARGSAPWRAKNDGERWELWSRCEGKANWRGQERRNGGGMGRTRSSA

SEQ ID NO: 169715 - protein, 175 aa, Oryza sativa
  Clone ID: PAT_MRT4530_68108C.1.pep
MRRCVPRGPAPPRARRPTSLITAHSPVPHSMPSWPRARVGVARHNASSLGRSPSSLLLLRTGAPPLRCPGQYVHSPICRVDRLVGAERMRMGAPHWRSVPSGAGPLGLVRLGRLTPVGLRCKERDRSIAISRDFNAHLRLVQCKWRGAGPYEQQIIAIDLPAAGTGLAATPYRPR

SEQ ID NO: 169716 - protein, 182 aa, Oryza sativa
  Clone ID: PAT_MRT4530_68109C.1.pep
MPRLSSSRSGPPHPRWAKIRQGPATSSVTPTKTKVGSPPPLPALVTTTSTAYPTHSYSSSYTFFPQITRIVLGGIVNPIQVLAQILSLPTPPLSSRHLYPLPPRHRPAPSLCRGDGLSHRRVSPLQGRRSAPVGHLAIRQADKVGLVLVTQPWRSRSISKMRSGTGSSPSRRYGRRKSSMSI

SEQ ID NO: 169717 - protein, 569 aa, Oryza sativa
  Clone ID: PAT_MRT4530_6810C.1.pep
MGMVAQEEEGAAATHQWGKSAHHWLGDSHHCSTVEQATGLGYIVLALQAYTPSLHPPPCNPAATTAAASTTCEPVRGANLSLLLLGLYLVPIGDGAMKACLPALGGDQFDPADPDEQRQEVSFYNWYTFAASTGGLVGLVFIVWVENSKGWGIGFAICAAFVLLGLLVWAAAFPLYRNRLPTGSPITRILQVFVAAFRKRNVRLPEDPSELKQINQDDDNNALEVLPRTDGFGYPDERNYNPLNFLQTLLTYHMIYLKKNLPLSMPMCGIIMNPPMWCLEKAAVRTGNDAGAWSLCSVNQVEETKILLRMAPIFAAAVLGYIPMPLILTFTVQQGSTMNTKLGSVHISPATLFLIPIIFQLVILILYDRVIVPPLRRLTGYVGGVTHLQRIGVGFIATIMATAVAAVVEIRRKSAADESSLADGTAGIPLSVFWLTPQFFLIGIFDVTSFVGLLEFFCSEVSMGMKSIGSSIFYCILGVSAWLGSLLIQVTNRVTRRGGKGNGGSGGWLDGANLNNGKLERFYVVLCIIEVVALLSYVFFARRYVYRNEQKVVTQGGTMCDTGNGADMI

SEQ ID NO: 169718 - protein, 88 aa, Oryza sativa
  Clone ID: PAT_MRT4530_68110C.1.pep
MLVYRSYHELEREGKLAKPKKLTDVRPNHGCEPATPTATPRAMHTIRGLGLGMHTASIAAATRRLFAFLFIASMAYPPSRVDALAAAG

SEQ ID NO: 169719 - protein, 57 aa, Oryza sativa
  Clone ID: PAT_MRT4530_68111C.1.pep
LHQPWTWHRILPSARPWCAEARYQIPDHPHPWAQKYYAPYASGRPWRFGFPKGPATP

SEQ ID NO: 169720 - protein, 189 aa, Oryza sativa
  unsure (1)..(189): unsure at all Xaa locations
  Clone ID: PAT_MRT4530_68112C.1.pep
QGHKYENTGLLNXVHLPQKSPAFDLLXSKMLEYDPXRKRITAAQAXEHEYFRMDPLPGRNALLPSQAGEKIVQYPVRPVDTTTDFEGTTSLQPTQAPSGNAAPGNQSVVPRPIPRQMQQPMVGMSRMGGTNMAAFGAAPQGGIAGMNPGNIPMQRGAGAQSHPHQLRRKADQGMGMQNPGYPTQQKRRF

SEQ ID NO: 169721 - protein, 360 aa, Oryza sativa
  unsure (1)..(360): unsure at all Xaa locations
  Clone ID: PAT_MRT4530_68113C.1.pep
MGDGRVGGGTNRPAWLQQYELVGKIGEGTYGLVFLARLKQSHPHAAAGVGRRGSPIAIKKFKQSKEGDGVSPTAIREIMLLREINHENVVKLVNVHINHADMSLYLAFDYAEHDLYEIIRHHREKLNLPINPYTVKSLLWQLLNGLNYLHSENTGLHNIVHLPQKSPAFDLLSKMLEYDPRKRITAAQALEHEIRLVILNGGSMIYYSNPSEQPFSVDRYFRMDPLPGRNALLPSQAGEKIVQYPVRPVDTTTDFEGTTSLQPTQAPSGNAAPGNQLEVPRPIPRQMQQPMVGMSRMGGTNMAXAFGAAPQGGIAGMNPGNIPMQRGAGAQSHPHQLRRKADQGMGMQNPGYPTQQKRRF

SEQ ID NO: 169722 - protein, 83 aa, Oryza sativa
  unsure (1)..(83): unsure at all Xaa locations
  Clone ID: PAT_MRT4530_68114C.1.pep
VVKGFIYFFFFFFFFFFFFFFFFFFXGLKPKFIFLKNLPPLKKLTLFFLWGGVGYKLFIHFFLRSIQHLSTHPHTYNHHHGFF

SEQ ID NO: 169723 - protein, 45 aa, Oryza sativa
  Clone ID: PAT_MRT4530_68115C.1.pep
EIGTELLHVSREENVQALVMSLQCQQKIKNQIKYAQASSSVLVCK

SEQ ID NO: 169724 - protein, 58 aa, Oryza sativa
  Clone ID: PAT_MRT4530_68116C.1.pep
RLYAERPVRCVTNMQQTTGQVIPKTEIADSWSTPLPTFHFESSNNVPNLHSPQHSIIY

SEQ ID NO: 169725 - protein, 70 aa, Oryza sativa
  unsure (1)..(70): unsure at all Xaa locations
  Clone ID: PAT_MRT4530_68117C.1.pep
LSQHILSVLDEDEMPGDKLIIAIAGRQDAXKHLTDPAPNVTPSHIAETLGTMLETALFESTTAVIPTLYP

SEQ ID NO: 169726 - protein, 257 aa, Oryza sativa
  unsure (1)..(257): unsure at all Xaa locations
  Clone ID: PAT_MRT4530_68118C.1.pep
VGPTCLSSSSSLSPFSLFLSISPLLPIRXAGGRAARASGRPGSASVGRRRRTAGVHXXSRRRTDEESGGGIGAQRXPERRRPSTHTSRTTPMAGLPEHGDSRXGKTTRGGEGEPAAAVAMEAAETRLRSGRQQAGVGRRRQVAASIPTSLPLGRAAAVLAANRRPRFGSDXAPMPPARSRRLPAHRPNGKKGRERERREIGRRKRSDMWAPHAPRGATSAKPPPKTGKGVKLHWIYKFGGRDFXIAVEGYDLDSVAS

SEQ ID NO: 169727 - protein, 49 aa, Oryza sativa
  unsure (1)..(49): unsure at all Xaa locations
  Clone ID: PAT_MRT4530_68119C.1.pep
DLXSCTKYSHCFHMPHIFTLDLHIFTWXKTKRMIITWSHGVMGIXXTRP

SEQ ID NO: 169728 - protein, 543 aa, Oryza sativa
  unsure (1)..(543): unsure at all Xaa locations
  Clone ID: PAT_MRT4530_6811C.1.pep
YHPGKANVVADALSRKGYCNAMEGXQLPLELCKEFERLNLGIVSRGFVAALDAKPTLIDQVREAQINDPDIHEIKKNMKRGKAIGFLEDEQGTVWLGERICVPDNKDLKDAILKEAHDMLYSIHPGSTKMYQDLKERFWWASMKREIAEYVAVCDVCQRVKAEHQKXPAGLLQPLKIPEWKWEEIGMDFITGLPRTSLGHDSIWVIVDRLTKVAHFIPVRTTYSGSRLAELYMARIVCLHGVPKKIVSDRGSQFTSKFWKKLQEEMGSKLNFSTAYHPQTDGQTERVNQILEDMLRACVLDFGGSWDKNLPYAEFSYNNSYQASLQMAPYEALYGRKCRTPLLWDQTGERQVFGTDILREAEEKVKIIQERLRVAQSRHKSYADNRRRDLSFEEGDYVYLRVTPLRGVHRFHTKGKLAPRFAGPYKIVSRRGEVAYQLELPQSLAGVHNVFHVSQLKKCLRVPTEEANLEXIEVQEDLTYVEKPIRILETNERRTRNRVICFCKVQWSNHSEEESTWEREDELKPTHPHLFASSSESRGRDSV

SEQ ID NO: 169729 - protein, 110 aa, Oryza sativa
  unsure (1)..(110): unsure at all Xaa locations
  Clone ID: PAT_MRT4530_68120C.1.pep
VFICYICSRYYRAPELIFGATAYTAXIDLWSAGCVIAELDLGQPLFPDESAVDQLVEIINGLGTLTPDEIPCLNPIITALKVSQIKACPWNTSYHRRMPPEAEHLASRLL

SEQ ID NO: 169730 - protein, 110 aa, Oryza sativa
  unsure (1)..(110): unsure at all Xaa locations
  Clone ID: PAT_MRT4530_68121C.1.pep
RRSTTTRASPCCCCCDDXCWPWXDDGPXAXPPFXFFFRPPPPPCSSRSSRLLLFRHGRSNSNSPRDSSKNRVANAGGGREGWWLGLLGRLAXADRWLEAAPCXMTSSCRI

SEQ ID NO: 169731 - protein, 93 aa, Oryza sativa
  unsure (1)..(93): unsure at all Xaa locations
  Clone ID: PAT_MRT4530_68122C.1.pep
KGLGAITPAKVTKDQEDWSAQKLAGLVVVDARHLGPAALAPGDVLPAAAARSRHRXRXRACGRREREXGAAAQRTSGENPPARRPRRVRWRGD

SEQ ID NO: 169732 - protein, 95 aa, Oryza sativa
  Clone ID: PAT_MRT4530_68123C.1.pep
MWNGWPGLAWDELGPGSGCQFGLNHHRPWVKAGNDLVAGSPTILGETMRSELRQPAISSRTHGLFKIIEGSSLFYSPADRRIVGFFIGLARFSAP

SEQ ID NO: 169733 - protein, 88 aa, Oryza sativa
  Clone ID: PAT_MRT4530_68124C.1.pep
LPVVLTLIATQQKDTFFANLCYTKWALEGFVIANAQRYSGVWLITRCGSLLKSGYDINDRFLCILVLAANGVLFRCVAFFCMVIFQKH

SEQ ID NO: 169734 - protein, 91 aa, Oryza sativa
  unsure (1)..(91): unsure at all Xaa locations
  Clone ID: PAT_MRT4530_68125C.1.pep
FPCNVLLPEILRLFQVELPQLSPLALVWIAIFDXACRISRFQPNAELFGAIFFATVNSKTVXPAGTKKTVFGSVNFNVRPERSDLWPVNAA

SEQ ID NO: 169735 - protein, 94 aa, Oryza sativa
  Clone ID: PAT_MRT4530_68126C.1.pep
VEQLTIDSSSRCSLSFCPFYTVFQPHAVDVRLTLNDAFCGASEFTPLTLREDQFERLHFHRNAHFQPGHFPCPRLSPIAPHFCCLPNFHFQRAR

SEQ ID NO: 169736 - protein, 554 aa, Oryza sativa
  Clone ID: PAT_MRT4530_68127C.1.pep
FLSVLYDVDEVTVRSLNGCRVADQILRLVPNVENFRTTLRCLKYWAKKRGVYSNVTGFLGGVNWALLVARVCQLYPNAVPSMLVLRFFRVFTQWQWPNPVMLCAIEEDELGFPVWDPRKYHRDRSHHMPIITPAYPCMNSSYNVSTSTLRVMMEQFQFGNKICQEIDISKANWSALFEPFQFFEAYKNYLQVDIPTRPGEDLRLWKGWVESRLRQLTLKIERDTYGMLQCHPYPHEYADPSRQCAHCAFFMGLSRKEGAKIQEGQQFDIRGTVDEFRHDIGMYGYWRPGMELAVSHVRRKQIPSYVFPEGYKRPRPSRHINHPQQSNKNDVEDGTANRSPDGQPKRKHDTAGVYDSEPGRSVKRASISPSISPVHQKTSSPPSGNIADASGASGGSPVSLANGNLEQANCLNSPLASEKSLDSVTSGSKCVGVEAVCPSDATKEHDNCGSNMKNCTTTTVAVSLKRVAEKVVSELVGSESLGGNKSGELLERAEDKGSALVENVHLGGRGRGHGGMPAGWWKWSGLNWSSRSLRGVNSDAPQKASLRVSLTSTA

SEQ ID NO: 169737 - protein, 516 aa, Oryza sativa
  Clone ID: PAT_MRT4530_68128C.1.pep
MASGAAGDIDDGVEADGEEGGAGEWVDGKESTMAQIMMGGGRRRWRVAGGVGVDGGEESEMESVPLTAEAIAFTEKKMDMTLDDIIKMSKKKNPGGKKPARQPIKKRPFQNDNTNQGNAKVQRFMETRSSLRQGVLAQRRTNLGGNQFAATKQAAKKAATMPIRSRGVRWNKPRYELTAALFHYSYSLQSLYESILQEIMNSAPSNSIQRRPVGQAFQNGKGKEVQNKAPRTMDALFAQMKQQRMRTIPQQQTNTAPGRQIAQQRRNQQQRRGRGYGGRNGGNKEKEKDENYSNLTLYFGRRKMLNLIKIKGQKKEDAANANGKPPAKKQSPGELRLHKDIAELNLPKSTRISFPNGKDDLMNFEVTIRPDEGYYVGGKFIFTFQVPPAYPHEPPKVKCKTKVYHPNIDLEGNVCLNILREDWKPVLNVNTIVYGLNLLFSQPNDEDPLNHEAAAVLRDNPEKFERNVQRAMAGGYVGETHFPRSRENAEQYVCAALTACYDLWLPGSKNKFTNIA

SEQ ID NO: 169738 - protein, 119 aa, Oryza sativa
  unsure (1)..(119): unsure at all Xaa locations
  Clone ID: PAT_MRT4530_68129C.1.pep
LEWQDTIVVETHVVCASRSELYIERVHLWPHKQICDRRTEMEDAVDAVYRFFYIPLXMLTGNCVVDGLHHMRLRLPAHLFDVYNGHCATQGANYCRXRLHAVLVXELCRIDRSVSSANL

SEQ ID NO: 169739 - protein, 74 aa, Oryza sativa
  Clone ID: PAT_MRT4530_6812C.1.pep
AHIGLAIKHNNNPYSTKVTTHIATGSSDNAPLQKSYKPKKTKVSTNCMHHQQSPTRICCIKLAKISDSKVAKCS

SEQ ID NO: 169740 - protein, 256 aa, Oryza sativa
  Clone ID: PAT_MRT4530_68130C.1.pep
MFCPGCRKKKKKLPSRRLRSLRVRPPPPARRFPSPEQSGGRATAAAAAVAVVLLLPPHPEMESVPLTAEAIAFTEKKMDMTLDDIIKMSKKKNPGGKKPARQPIKKRPFQNDNTNQGNAKVQRFMETRSSLRQGVLAQRRTNLGGNQFAATKQAAKKAATMPIRSRGVRWNKPSAPSNSIQRRPVGQAFQNGKGKEVQNKAPRTMDALFAQMKQQRMRTIPQQQTNTAPGRQIAQQRRNQQQRRGRGYGGRNGGNQ

SEQ ID NO: 169741 - protein, 98 aa, Oryza sativa
  Clone ID: PAT_MRT4530_68131C.1.pep
ANFGLCEQLMWGPGCSAPSNSIQRRPVGQAFQNGKGKEVQNKAPRTMDALFAQMKQQRMRTIPQQQTNTAPGRQIAQQRRNQQQRRGRGYGGRNGGNQ

SEQ ID NO: 169742 - protein, 245 aa, Oryza sativa
  Clone ID: PAT_MRT4530_68132C.1.pep
MVCKNSRFAFLPLCAGVKEREISILVVSSAACAKTSRGSTGGGAAISIHPASRAGEGRGSWKMLNLIKIKGQKKEDAANANGKPPAKKQSPGELRLHKDIAELNLPKSTRISFPNGKDDLMNFEVTIRPDEGYYVGGKFIFTFQVPPAYPHEPPKVKCKTKVYHPNIDLEGNVCLNILREDWKPVLNVNTIVYGLNLLFSQPNDEDPLNHEAAAVLRDNPEKFERNVQRAMAGGYVGETHFPRCM

SEQ ID NO: 169743 - protein, 115 aa, Oryza sativa
  unsure (1)..(115): unsure at all Xaa locations
  Clone ID: PAT_MRT4530_68133C.1.pep
PHKGGPEGGVDLREPAATPPGNXXGLTAASTVSISDEKAKKQRAQXRQRSKLYAGQEGENGRAKPEKARYAPLERRHQREETLPEAASTQRLEIAKELEKEEGTSEPEEKQAGED

SEQ ID NO: 169744 - protein, 110 aa, Oryza sativa
  Clone ID: PAT_MRT4530_68134C.1.pep
CRYLLLKKNANKILNMCFQTQEVHCFSKQREAPCCVAFYLFSLCFILLKIFRFNILLDSNKLLSLSTYSGVHKLLHVRANIDQLRLTVYIMLRFQISVLMKKTLTNDSEG

SEQ ID NO: 169745 - protein, 61 aa, Oryza sativa
  Clone ID: PAT_MRT4530_68135C.1.pep
LFIKFVPACNPHPLEQSKKVPPQNGVEKECKSGTNVFRLSRKENLDLNSSSHAPQNPKEES

SEQ ID NO: 169746 - protein, 138 aa, Oryza sativa
  unsure (1)..(138): unsure at all Xaa locations
  Clone ID: PAT_MRT4530_68136C.1.pep
WSRARAAPPRHFAASNPPQSGLDSFGFLRASSPPPASKPAQRSISGAAXPTSSSSSPVGVTTVGCAVVRGKLGNLPFPSPVTGAPLARASRARRRRPFVAAVVVCRLTRGGEKSVGVAGESIASGFEGEIMIQERCIV

SEQ ID NO: 169747 - protein, 33 aa, Oryza sativa
  unsure (1)..(33): unsure at all Xaa locations
  Clone ID: PAT_MRT4530_68137C.1.pep
HLLPAADITSRITRADXKVEMLRPRADGTSLSY

SEQ ID NO: 169748 - protein, 41 aa, Oryza sativa
  unsure (1)..(41): unsure at all Xaa locations
  Clone ID: PAT_MRT4530_68138C.1.pep
TLSFFLIFLQLSLTGLESASCMNSSIVXNFQADCXLATVGS

SEQ ID NO: 169749 - protein, 284 aa, Oryza sativa
  unsure (1)..(284): unsure at all Xaa locations
  Clone ID: PAT_MRT4530_68139C.1.pep
HDCIGDARDAFPPPWLPLSLPTGAAAPLPPPPTGGDAPFPLPSSLSLTTTSAAQRRLSPSAAPPLPPHRRRRSLSPSPDRRRRSPSPPPTGGDVPPPSLPPVSSPFSGGGGVGCGGNGXAAVEMIWRPSSLPPAAYPPEVATVAARSAPXPSSRGGSGGSGGVXGGGGSDGVETAGRTSPPPDPAVLRPGRRRGGEPGLACARSGGKSSQVGLYTWGRAPPPPLPRGSTVAGPPPPPXTIGPPPPPLHVVHRHCASPPAPAGSGGGEGVSAPPAPAGPPSPPLH

SEQ ID NO: 169750 - protein, 190 aa, Oryza sativa
  Clone ID: PAT_MRT4530_6813C.1.pep
SHNIGAQALLVDVVAALVTSVLGQELFPSSPFLGALGTNERTRRYKVRRWHRGRLELFSGTEASIIFLNGIRGVISKEKLDSFYIPLCCPMDSEVNNIIEEEGSFEVNKMMMHDPYDGTGKALLDLKMVALRVRAVFEPIIVQHFAASDEIMDDFVRAVERHLISSGALEARLSGQHPFAFLCLSLTRAM

SEQ ID NO: 169751 - protein, 143 aa, Oryza sativa
  Clone ID: PAT_MRT4530_68140C.1.pep
MAKDGSNIYPHTPRNSQLMKSLEVLAARAFSSPLVTIVSRFVLRNALGVGDPSSWGKHSERHRQARLRSSQCAASLPSKALLPLLPKRDLAFCPWRRRDYQGTSCDTLSCLATRWTSPGRALPAPLDVPRKLADALTVRRDSY

SEQ ID NO: 169752 - protein, 70 aa, Oryza sativa
  Clone ID: PAT_MRT4530_68141C.1.pep
HRWRRLGCAAADTYSAAELLSSSARAPLPVAGTSVATLASLPRLGEGEKRGEKKEGERWWDPWRRRKEGT

SEQ ID NO: 169753 - protein, 97 aa, Oryza sativa
  unsure (1)..(97): unsure at all Xaa locations
  Clone ID: PAT_MRT4530_68142C.1.pep
GERGTLGATGPGGDPGFRGKGNGDPGLGDKKGFWNAKGKLVTRERRTRNKVIRFCKXVQWSHHSEEEATWEXREDELKAAHPHLFASSSESRGRDSV

SEQ ID NO: 169754 - protein, 838 aa, Oryza sativa
  Clone ID: PAT_MRT4530_68143C.1.pep
MKWLPEGNTRFYPSDTWSEVRNVPESSELVDGIKWLQISTTLIDGLIEPTFMKWIQEEKAWENSKINEELMKTVTSKIKEDDRILKRFNRLGKSELYLDLLYFLRFGSASYLPNSNPSIRSYSYFDAKFLAEHGARILEDLVIFLADAVASIYIELISVDGDMPTDVVGSSLALCSLSTRELQRMRNEVAINGWLHQYFESVVSMYEDRFELYVLSRKLCEKPADNQAEVTNWWRLGFGKPSTVTLLEYVHISSFSLPEERLTLLRFLAELSPPHDNGLAASWRNRTDCCTWEGIICDVDGAVTKILLASRGLEGRISSSLSELTSLSRLNLSYNSLSGGLPPELIFSGSIVVLDVSFNRLGGELQEVDSSSSDWPLQVLNISSNLFTGAFPSTTWEKMSNLVAINASNNSFTGHIPSSFCISSLSFAALDLCYNQFSGEIPAGIGKCSALRMLKAGHNNISGALPDDLFHATSLEYLSFPNNGLQGTIKLVIKLSNLVFLDLGGNSFSGKVPESIGELKKLEELRMDHNYISGELPSTLANCTNLAAIVLVSNKFTGDLAKDETIHGLENLQVLGINDCALTGKIPSWLSKLKKLELLLLYNNQLSGPIPTWIKSLNYLKYVDLSNNSLIGEIPTSLTEMPMLRSDKIADHSNPRLFRMPVFVAPSLQYHTANAFPKMLNLGNNKFSGVIPMEIGQLKALLSLNLSFNNLHGEIPQSASNLKNLMVLDLSSNHLTGAIPSSLANLHFLSNFNISYNDLEGPVPTIGQFSTFPTSSFAGNPKLCSPMLLHRCNSAGAAPVSTIPTKQYIDKFVFAIAFGMFFGVGVLYDQIVVSRFFG

SEQ ID NO: 169755 - protein, 32 aa, Oryza sativa
  Clone ID: PAT_MRT4530_68144C.1.pep
PHVQIGWFSYIVPQYIAIYRLRLNMLFTAYQL

SEQ ID NO: 169756 - protein, 140 aa, Oryza sativa
  unsure (1)..(140): unsure at all Xaa locations
  Clone ID: PAT_MRT4530_68145C.1.pep
PASRAGCSPGDGAGASRTGAPARRSRSPPRPSPPPPPSSSSSPHPPPPRRSRYQRSTAAHRSQPRSSXRRDGKKSRHRGVPVPGVRVRREKPPSHSTSAPNASSSPDGGTTDDAVAPGWRRDGRHPTGRRRRGGGGGITG

SEQ ID NO: 169757 - protein, 66 aa, Oryza sativa
  Clone ID: PAT_MRT4530_68146C.1.pep
PPHHDTGRETEVVEPVTRNSAPSPPLPTGTGLAATPEMAAVALALALRGWWEEVNGSPAWQDGAFF

SEQ ID NO: 169758 - protein, 34 aa, Oryza sativa
  Clone ID: PAT_MRT4530_68147C.1.pep
LNYLKSPYNFKKKNNLLYKLLYSLMNSDSPILSI

SEQ ID NO: 169759 - protein, 66 aa, Oryza sativa
  Clone ID: PAT_MRT4530_68148C.1.pep
KKTPLGPKNLTPPLRRLFDFFIKLVEQVFPLENGKYAPPIFFWLAPSFGPPGFNIFVSGWFVVLNF

SEQ ID NO: 169760 - protein, 222 aa, Oryza sativa
  unsure (1)..(222): unsure at all Xaa locations
  Clone ID: PAT_MRT4530_68149C.1.pep
MFVLQIHVLINSIEHLLGKRELVLVVLSSMPVCINDNVQDPKQLTXEIDKARRKFQWDGMXGNEIHGGKCKVYWXVCMLIKYGGSRVSNVXNKKGRALQLRXLWYEWISSNKPWIGMPTPGDEQDMDLFVASTKVXLGDGRKALSXKQPXASSIPLRTIAPNLYKHSRRKKQAVPEALKGDEXIDDIRHDQSITLVAEFFQVFECIWTANITLTQGTADSIR

SEQ ID NO: 169761 - protein, 144 aa, Oryza sativa
  Clone ID: PAT_MRT4530_6814C.1.pep
MAKGVAGGDVDEEEGEAGAGDGVPVKFGRGGGDAGDESSVAEPREVVATSTGAQAGRQRRLEAAGAEEREGRRRERSSGGHRAKRRVGRGRGGGCDTGEGDGTAGRRGDAAAGAAGGRPAPEGEKEKAGRGGEATGGLGRRLKR

SEQ ID NO: 169762 - protein, 53 aa, Oryza sativa
  Clone ID: PAT_MRT4530_68150C.1.pep
VSCSLIRPWAPTFKARMTLPGANMELRWCTICRKNVNRPRRRSRRPTQECSAA

SEQ ID NO: 169763 - protein, 138 aa, Oryza sativa
  unsure (1)..(138): unsure at all Xaa locations
  Clone ID: PAT_MRT4530_68151C.1.pep
GALRDQKGCMSLSVVRTSNKRNRSCVSKLRGHLLPFLLFGSLLTCVKIPASLALKGYTPSGYGHIWRQGWGKNMXRPSNLPLAQIWCLRLWALSMWWLSLVGRASQAYLDTLWVWLFLRYPLGGTLQDILGPKRNHLS

SEQ ID NO: 169764 - protein, 464 aa, Oryza sativa
  Clone ID: PAT_MRT4530_68152C.1.pep
MARLALLAVPVALLLSLSFLLLRPASPPLPFSRQQAASGPDRRRLLRVYVAELPRALNHGLLDLYWSLPAADSRIPASSDPDHPPPRPPRAHSPYPDSPLIKQYSAEYWLLASLQPGSSSAPAVRVVADWRDADVVFVPFFATLSAEMELGWGAKGAFRRKEGNEDYRRQREVVDRVTAHPAWRRSGGRDHVFVLTDPVAMWHVRKEIAPAILLVVDFGGWYKLDSNSASSNVSHMIQHTQVSLLKDVIVPYTHLLPTMHLSENKDRPTLLYFKGAKHRHRGGLVREKLWDLMVNEPDVVMEEGYPNATGREQSIKGMRTSEFCLHPAGDTPTSCRLFDAVASLCIPVIVSDEIELPFEGMIDYTEFAIFVSVNNSMRPKWLTNYLRNVPRQQKDEFRRNMAHVQPIFEYDSIYPGRMASAAQDGAVNHIWKKIHQKLPMIQEAVTREKRKPDGTSIPLRCHCT

SEQ ID NO: 169765 - protein, 345 aa, Oryza sativa
  Clone ID: PAT_MRT4530_68153C.1.pep
MATAAAAARAVAAAGRPAQGVPLSRRLTTASSSSARPLRPRGGRAAGSVRCMARRPESSYSPLRSGQGGDRAPTEMAPLFPGCDYEHWLIVMDKPGGEGATKQQMIDCYIQTLAKVVGSEEEAKKKIYNVSCERYFGFGCEIDEETSNKLEGLPGVLFVLPDSYVDAENKDYGAELFVNGEIVQRSPERQRRVEPVPQRAQDRPRPIIAATRGDAVPVPVPVVKPIASFSPSLHALPPPAPSHRQSLERRLDHLASHRSSRAVTPRRGTVAAGNPRSDMRWLRRGDHSSMERGGGSSSSRRRSLSREPSSAVQERGRGLHRGAKIHRNLILKEGYLTGAKRLCRK

SEQ ID NO: 169766 - protein, 102 aa, Oryza sativa
  unsure (1)..(102): unsure at all Xaa locations
  Clone ID: PAT_MRT4530_68154C.1.pep
PLVFLWRVCTGSLSLRDNSKIGINGFGRIARLVARAAHASEDDELGGVNDPLMTTEDMTYMLKDDTVHGQRKHXHEVKGKGLNTPIFGTKEVVGSGCRNPEE

SEQ ID NO: 169767 - protein, 138 aa, Oryza sativa
  Clone ID: PAT_MRT4530_68155C.1.pep
AKCGGNEEKGRTLYSAYGSNGQWGLFDKLFGRQDTQEPDPEGRVPDWSKASVQEMKDKFVAVGLGPRQLAVMSVFLGPDQAATEERLIADKDCRPWVEKYQRSRETVSRTDYEVDLITTLTKLSSLGQRINYEPYTYP

SEQ ID NO: 169768 - protein, 363 aa, Oryza sativa
  Clone ID: PAT_MRT4530_68156C.1.pep
MSPSHGGYWVLATWWGEPLLWLWQPFRAGGGAGPLGHLLEISGGLGRIRGWAAMEERGDELIRPCVTRLDASRNQVLLAATTDCRSSQSNSSSATDHQLQWPLHVYGLVATRDSLDPRRNLLFNRTRDNCQILTQQDPFLVLTGPSRAIVLIDPVQFEVQLKAKSNNNTLHDHPDQDQIVNFGVVDSGYLPGPTRHCIGKRSEVEFTISVLDRSIEATIISVQLVGGSSWPDHLQGKLVSRTASAIHQEIVLLDSQKQQDGKMPIDDGGFIQLSRRVVSVELAGQLIVQVLAFNSQQQVVDNDNDNKKDEIVAKHEIVFDPKEASLSVETCELQLGGGGGGPCKLQISVAWSLVDRLPPVGYF

SEQ ID NO: 169769 - protein, 585 aa, Oryza sativa
  unsure (1)..(585): unsure at all Xaa locations
  Clone ID: PAT_MRT4530_68157C.1.pep
MTKMLDDITRQTLLRQAKMLSPVLERKLSIQSDHRRTRDDAVPVPVPVPVVKPIASFSPSLHASEKSSRLRTQGATRRRDGRHGQDNYRLLARVASNRSARTTVPPPAPRHRQSPERRLDRLASRRSSRAVTPRRGTVDGGNPLSDMRCPRRGDDSSMERGGGSSSSSRSLSREPSSAVQERGRGLHRGASPAAAPRVGAEGGSSTRRLGRLDSGLSVNLVPPPLARRHGSQRGGRGAATTTKLSSSTDVAATIRSSIRPSSREFMERSPRRAGEAENDRKEGADAASVSKGRPSRGELSSMERGSSSGRSLSREPSSAVQERGRGLHRGASPPAAVRVGAEGSSTRRLERLDSGLSASMVSRRGTPRAGRGASTPKLSSSTDAAAMTRSRIRPNRDLTERSLRRAGEADEDESLRRCRGKGKGKEKGDDDAASVSMGRPSRPPRRALNRINSSSTYSSSSCPPEPTSSTSGSTSSWVPPRDNASSWAPPPPRGNPPSWVPLPPPPGGNAPSWVPPPPQPRGIAPPEYGFQVSGASRVXPPSPAGAPGEESGADEEVQGEARHGVPPPPLRSLGQQRGGAPAVQP

SEQ ID NO: 169770 - protein, 165 aa, Oryza sativa
  Clone ID: PAT_MRT4530_68158C.1.pep
MATAAAAARAVAAAGRPAQGVPLSRRLTTASSSSARPLRPRGGRAAGSVRCMARRPESSYSPLRSGQGGDRAPTEMAPLFPGCDYEHWLIVMDKPGGEGATKQQMIDCYIQTLAKVVGRTMLILDDWWVVACSEEEAKKKIYNVSCERYFGFGCEIDEETSNKLE

SEQ ID NO: 169771 - protein, 110 aa, Oryza sativa
  Clone ID: PAT_MRT4530_68159C.1.pep
STQRREPGNTVDGVEVGAALPAVRWGQSDVPAARWQMIRPPCPRPSSAARARLVWHVIVGVSSATSPARRGRRRHRRRQDKEEGWGLREEGREVGEEEEVGGEEKEVEER

SEQ ID NO: 169772 - protein, 176 aa, Oryza sativa
  unsure (1)..(176): unsure at all Xaa locations
  Clone ID: PAT_MRT4530_6815C.1.pep
QVDPRIVSPFPSLFRPPFRRAYGRRRRPXGRGRAASRRPRRSGRLRAHRAAAAWGPAVSRPRPRVRLTRGAHGTGRXSPGAPGPPWTHLGHIRTGLRASVAKHYRXFHMSSGTNEGYTSCGPVVEMSWHRAGVLLLGAQSCLPVPGVPAVGGVGSMYTSDQSIIYSNSRALGYGQA

SEQ ID NO: 169773 - protein, 223 aa, Oryza sativa
  Clone ID: PAT_MRT4530_68160C.1.pep
MCIFDFHTYNKALYLRWLRLPFPLVSLRRSVGRHTGGTRGGSQAGAVRGTARHTGTVAGDGTGVASGCHRVAQVTGAVKRTESIQASQKSTQRREPGNTVDGVEVGAALPAVRWGQSDVPAARWQMIRPPCPRPSSAARARLPPAIAATVAAAPSLWLDLGEGEGGEGRGGERGEGLVAHARRGRRRHRRRQDKEEGWGLREEGREVGEEEEVGGEEKEVEER

SEQ ID NO: 169774 - protein, 111 aa, Oryza sativa
  Clone ID: PAT_MRT4530_68161C.1.pep
MWDFVRGYLNHTSGANDGTWREDGQLQDGGGCGFGTARGCSRDQARWAEMAVDDGARIFVEAVPRRLQATAIWRHGGGHTKIGGVANESKGRAAGIGVTAAERRGAGGDEL

SEQ ID NO: 169775 - protein, 164 aa, Oryza sativa
  Clone ID: PAT_MRT4530_68162C.1.pep
EKIIGPPCEAKSFSLFIMSTIFSLNPVGTVHSPVLKLVPGKLLQPNWKSTEGRNRDIGASCRNTSATSNGRESPPCCSLSLWLKLDSCHSSSTRAWPTEAEATLAAELMGAVGARGETGSRWSLRRRRRWRRLKGIPAAGAEEVAGGGGDGSRREREPSSRRNG

SEQ ID NO: 169776 - protein, 92 aa, Oryza sativa
  Clone ID: PAT_MRT4530_68163C.1.pep
MTCSTSASTATTRPHFVSAISLPSSLHVRLHHWPLELPFVEVRQFRRGHRWICADNALRLRLHRWSHELATSTATTRARSATVGGLPSSLHL

SEQ ID NO: 169777 - protein, 83 aa, Oryza sativa
  Clone ID: PAT_MRT4530_68164C.1.pep
EDLCSSFLIHQMFICFLTNESACLLQPKTDAWADAGGAPGIAARFQKAHQFPTKCGGIEPGEIGGEVEPGRKWGPRTIPEKIG

SEQ ID NO: 169778 - protein, 73 aa, Oryza sativa
  unsure (1)..(73): unsure at all Xaa locations
  Clone ID: PAT_MRT4530_68166C.1.pep
KRSETVGIGSISSETMLDRPVTDHIYHLNFSVSTLIQCRNKLEKTKFKNSQKGMIGNXYPLYRNDARSIGNFC

SEQ ID NO: 169779 - protein, 141 aa, Oryza sativa
  Clone ID: PAT_MRT4530_68167C.1.pep
MRQAVGRDRGQEKEIIREAHNNKLATESLMDEQGLLQLQLHASCMVHDATGAILQASSISMIRNKIDQYTNDDDAGNARSYLVCMFVCSVLGLKKRKCAEMMHGYSWELILFHQECCTNGALEPAVQLLVCIVHTHLEAAR

SEQ ID NO: 169780 - protein, 69 aa, Oryza sativa
  unsure (1)..(69): unsure at all Xaa locations
  Clone ID: PAT_MRT4530_68168C.1.pep
MSGRGRGELLITGRLLVGELLLTLGVCTHCLQSTHHHGLXRRRTKHEIHSHXRLLEEVVMENRCLGHIL

SEQ ID NO: 169781 - protein, 390 aa, Oryza sativa
  Clone ID: PAT_MRT4530_68169C.1.pep
MGSSGADAPTKTSKASAPQEQQPPASSSTATPAVYPDWANFQGYPPIPPHGFFPSPVASSPQGHPYMWGAQPMIPPYGTPPPPYVMYPPGVYAHPSMPPGAHPFTPYAMASPNGNADPTGTTTTAAAAAAGETDGKSSEGKEKSPIKRSKGSLGSLNMITGKNSTEHGKTSGASANGAISQSGESGSESSSEGSEANSQNDSHHKESGQEQDGEVRSSQNGVSRSPSQAKLNQTMAIMPMTSSGPVPAPTTNLNIGMDYWANTASSTPAIHGKATPTAAPGSMVPGEQWVQDERELKRQRRKQSNRESARRSRLRKQAECEELAQRAEVLKQENTSLRDEVNRIRKEYDELLSKNSSLKEKLEDKQHKTDEAGVDNKLQHSGDDSQKKGN

SEQ ID NO: 169782 - protein, 193 aa, Oryza sativa
  unsure (1)..(193): unsure at all Xaa locations
  Clone ID: PAT_MRT4530_68170C.1.pep
GRAHLRPAQAAALPPLAVALPPRIRAPRPRLSLPRPLRAIPLRPLLPPHRPTRTLAPPAVVAGGAEAGESADATEKAEETASRPDDTAAAVNADAAAGEGRRRHGGSGGXDGGGGGDEPAAKVRWETCRPGRGVSSADYIPCLDNMRAIKALRSRRHMEHRERHCPVAPRPRCLVRVPSGYRSPVPWPRSRDM

SEQ ID NO: 169783 - protein, 603 aa, Oryza sativa
  unsure (1)..(603): unsure at all Xaa locations
  Clone ID: PAT_MRT4530_68171C.1.pep
MAVPTSDQRKRRPFLLSLSLFLLVSALLALAFLFLDPSAQSLSVLSSRLTAPTTTLAPPAVVAGGAEAGESADATEKAEETASRPDDTAAAVNADAAAGEGGGSSESPRLDADKGAAATEGVADDDGGGGGDEPAAKVRWETCRPGRGVSSADYIPCLDNMRAIKALRSRRHMEHRERHCPVAPRPRLSTFKAIWYNNVPHPKLVEYKKDQNWVTKSGDYLVFPGGGTQFKTGVTRYIQFIEQIMPTIQWGTHTKTVLDVGCGVASFGGYLLDRNVITMSFAPKDEHEAQIQFALERGIPAFLAGGKPLLELNRVLRPGGYYIWSATPVYRQEKRDQDDWNAMVKLTKSICWRTXWYAPLDTCISSSIEKSSWPLPWPERLNARYLNVPDDSSSTDEKFDVDTKYWKHAISEIYYNDFPVNWSSTRNVMDMNAGYGGFAAALVDKPLWVMNVVPVGQPDTLPVIFNRGLIGVYHDWCESFNTYPRTYDLLHMSYLLGSLTNRCDIMEVAAEIDRILRPDRWFVLRDTTEMIKKMRPVLKSLHYETVVVKQQFLVAKKGFWRSGNSFKMDKSWMYGSDRASLEYRRGVADFINVVEQDKNRMND

SEQ ID NO: 169784 - protein, 75 aa, Oryza sativa
  unsure (1)..(75): unsure at all Xaa locations
  Clone ID: PAT_MRT4530_68172C.1.pep
PQNRAPPAHGVSVAGDSARSSGVSASALCFFLPDGTRTKTRLFFLSAPSHRPTDAASSKKKNQILMWHGYSNXLI

SEQ ID NO: 169785 - protein, 418 aa, Oryza sativa
  Clone ID: PAT_MRT4530_68173C.1.pep
MGFSPFRRENPSRQWQFGDYAFWGRGSGGVGRLLRLRPEKSPGGSIPRRRRRDVGGLRRLELEGQQRVPPVPKRTLECGAGTPTGLKKRANVTKKFNPDATTSDLNRHRSIDGYHGETKDKVGGGTSDHSKGRKGLEDFGYQSKSHELSSNHPDIGSAYRICFIASLDCARFLLMQGMAFSGPGQSPTSINKGNLLELIDLYKKRDKEVERAFDMNVVGNIDITSPLIQKGLAKACAQEVTEVIIGEIGDGNFTILIDDSHDMAEKYQMAVFVRFVNKKGKVIERFLGLEYLTEDTPAAFKETLVGLLAQHGLSISKLRGQGNNFSKFDVEKLAWLAGIYAEDFSIDDRVAIKHELQNYILFMRRSHLDYGSGTFTMLNFLRAKASWDRPGPYIAQVDSSPAPEELTLSINFWTLLAL

SEQ ID NO: 169786 - protein, 74 aa, Oryza sativa
  Clone ID: PAT_MRT4530_68174C.1.pep
PRKSWLKNIWEFKREENHNGQRVSLKHSTNKNPPVQPLSGKLWVKKFPHFKGMEAQTSKGFPSQLCPEDINFPV

SEQ ID NO: 169787 - protein, 302 aa, Oryza sativa
  Clone ID: PAT_MRT4530_68175C.1.pep
MATQATAREIAVVGVIGAGQMGSGIAQLAAAAGCGVLLLDSDTAALSRAVDSISSSLRRLVAKGQLSQASCEHSIEQIKCVSSVQELRDADLVIEAIVESEDIKKKLFVELDKITKPSAILASNTSSISITRLASATNRPCQVIGMHFFNPPPIMKLIEIIRGADTSEEVFTKVKSFSERLGKTVICSQDYPGFIVNRILMPMINEAFWALYTGVATKEDIDTGMKLGTNHPMGPLQLADFIGLDVCLSVLRVLHNGLGDSKYSPCPLLVQYVDAGRLGKKRGQGVYSYRTRSSSIKPRSSL

SEQ ID NO: 169788 - protein, 333 aa, Oryza sativa
  Clone ID: PAT_MRT4530_68176C.1.pep
MSMMSFLSMVEAELPPGFRFHPRDDELICDYLAPKVAGKVGFSGRRPPMVDVDLNKVEPWDLPEVASVGGKEWYFFSLRDRKYATGQRTNRATVSGYWKATGKDRVVARRGALVGMRKTLVFYQGRAPKGRKTEWVMHEYRMEGVHDQQASSFSSKEDWVLCRVICKRKSGGGATSKSRSLTTTTTTIVHDTSTPTSSPPLPPLMDTTLAQLQASMNTSSSSAIAAVAALEQVPCFSSFSNSIASNNNNSNSATVNAQQCYLPIVTGSNNNGMSYLDHGLPEFGSFLDTQSCDKKMLKAVLSQLNSIGGEVLPGLPPPSEMAAAVSSSWMNHF

SEQ ID NO: 169789 - protein, 177 aa, Oryza sativa
  Clone ID: PAT_MRT4530_68177C.1.pep
MAAVGDGAGVERKNRHLLEVARSLIFQMNVPKYLWSEAVITVAYLINRMPSRILGMKSPTELLLGKREFKVPPKVFGCVCFVRDHRPFGGKLDPHATKCVFVDYASSQKGYKCWDPIGRRLFVSMDATFREFEPYYKSKYLDQFLKKFLTTMEVDSREGEIERCDTHEENAGDKNGE

SEQ ID NO: 169790 - protein, 101 aa, Oryza sativa
  unsure (1)..(101): unsure at all Xaa locations
  Clone ID: PAT_MRT4530_68178C.1.pep
NVPPFPGRARLHLVAFIGHRLPSQTNTCLFCTLCPHSCALGKNFPIGHPSXIALVQALLTSEFFIDRLPEKKLQLVDMSILLILLSPGLRCHKAYRFRLNE

SEQ ID NO: 169791 - protein, 201 aa, Oryza sativa
  Clone ID: PAT_MRT4530_68179C.1.pep
LFLSGTVDYPEEKGIKGNAIPLMARGIRMKPTYVPHVVSPAAQSPWIYVVICWLIKSDAESVFLCEEKKAMQQPSSTSTQPHASRKQQPVSSSSTHRWRKIRSHREPLLLFCSRELIFTYGWKFVTHGVYQEFKFCALLGSVEVNPNSLSIATFTSQIYQEFRYRDQNTSFYAPRVFRVSARVSQIIPADSEFYSQGEFEV

SEQ ID NO: 169792 - protein, 298 aa, Oryza sativa
  unsure (1)..(298): unsure at all Xaa locations
  Clone ID: PAT_MRT4530_6817C.1.pep
GGRRGASSLAAHPSSPSPPPFPPLAAFPPRRNRARAVALSLRRRRRAPVRRRRRPGPSPAPAPPPSASPHPRRPRPPLRFAHRPPERRRPRRPEPRRRLPPLRPPFSSSPSTRGEPWTAASFPPFPPLSRSLFRRAGGRRRXHRGTGAASRRPRRNGRXPRAHRAAATWGSAVSRPRPRVRLTPGAHGAGRREPXAPGPPWSHLGHIRTGLRASVAKHHRXFHMSNGTNEGYTSCGPVVEMSWHRVGALLLGAQSCLPVPGVPAVGGIGSMYTSDQSITYSNSRALGYGQAEQCTQVS

SEQ ID NO: 169793 - protein, 131 aa, Oryza sativa
  unsure (1)..(131): unsure at all Xaa locations
  Clone ID: PAT_MRT4530_68180C.1.pep
MEKRRAGESGKKXMKKKQEIESTADDPKTGKAETRQGHGSGEAATLGGRSGKAFIRDGDEMEAWSRGGGGVDRRRQKRRRSGQGGGGAVKAEAXGGGGGVRGSAEAARVRVRVSRLCFFPPFFCFRFPSSP

SEQ ID NO: 169794 - protein, 387 aa, Oryza sativa
  Clone ID: PAT_MRT4530_68181C.1.pep
MGSCFSSEGGNESRKESAERPQITPDETAASEMDVNLNTTNADSISNHGMERLIHGQSFTYGELYAATGGFSDDRFLGEGGFGQVYRGVLDNSQEVAIKILNLQGNQGDREFITEASVLSKLHHTNLVKLIGCCQDGDQRLLVYEYMPLGSLKSHLHDLSPDKKPLDWNTRIKILVGAAKGLQHLHVNVDPPVINRDVKSENILLGDGYHPKLSDFGLAKMGPTGDDTHISTRVMGTLGYCAPDYLESGKLTVQSDIYSFGVVMLEVITGQKVIDDSRAKPERNIVEWAIPKINKKDFPKLADPVLNGQYHMRSLFRALTVAALCVDRTANRRPDITAVVDALTQISESQSSRKRWSSRLQSSVGSSASTEPRIEDWNQAKDQGEGS

SEQ ID NO: 169795 - protein, 61 aa, Oryza sativa
  Clone ID: PAT_MRT4530_68182C.1.pep
GNGEKHFHWHSEEEQTRNVCKTAGFDYTPYSLKAKGTTGLCGSIHWANVILERGPCTIQWT

SEQ ID NO: 169796 - protein, 244 aa, Oryza sativa
  Clone ID: PAT_MRT4530_68183C.1.pep
MEQVSSHDDDVLREALLETGLFTGAMSIDQIDAGDEFEIQDEFGHEDGETEDEGVQSQPAVPDVARHEEGSGVWVKTWYLGFLGGTTRYQTWYLDCYQAPDPGTYIQTLEFKLGTRFRGTFPPLLFSITLVGFLDPWSSIKYDYPITGYNFLATPITASLGLVYKKSENLLNFDNRRKGWEQRCGTVVMGEAEGGMRPTLWSWRIAIVPVAVEKGTILKFDNAFFLLSGLQVLLQRGIAFMLRQ

SEQ ID NO: 169797 - protein, 87 aa, Oryza sativa
  Clone ID: PAT_MRT4530_68184C.1.pep
MRQGQEECGLLIRRRSRRRTATTRRQSRAAPPNGGGAPLHRRLARARTSPLALNLDTSAPNSVALNMRWHADLVSHPRWHGIQRQLT

SEQ ID NO: 169798 - protein, 669 aa, Oryza sativa
  Clone ID: PAT_MRT4530_68185C.1.pep
MAISSRAAACGALIFPTTASAAPVSRSVSVDQRVSHRRRKAVAVAAVPHASSGGALLERPAFDQSQLDTLPVTQEGGDTGRMRDRRGSGSGDSYKVLLIDDARHTEKLVEKALPQVVPSVTAEAARQLFHASRQKGAALVIVAVKLLLPPFHTRALARRQRRRHHHHRHCHYTNAELPTPPLAPPRRCATALERASTLAVSQCPVVRPLEILELVMAHKAAALVLLLVSVSVAAAASGDQESDRIRELPGQPAKVRFSQYSGYVTVNQAHGRALFYWLVEAVPAAGPIAPLVLWLNGGPGCSSVGYGASEEVGPFRIRPDGKTLYLNPNSWNKAANLLFLESPAGVGFSYSNKTLDLYVAGDAKTASDAYAFLVNWLERFPQYKYREFYIAGESYAGHYVPQLAQLIYEQNKGIQNPIINLKGFMVGNAVTDDYHDYLGTFEYWWTHGLISDNTYHNLKKTCLLESSEHPSPECLKNLNLASSEEGNIDPYSLYTKPCNNTASLKLGLGGRYPWLSRAYDPCTERYSSIYYNRPEVQIAMHANTTGIQYSWKTCSDIVGSYWADSPKSMLPIYQELIAAGIRIWVFSGDTDAVVPVTATRYSIDALKLPTMVNWYPWYDHGKVGGWSQVYKGLTLVTIAGAGHEVPLHRPREALILFRHFLQNTPMPTQ

SEQ ID NO: 169799 - protein, 101 aa, Oryza sativa
  Clone ID: PAT_MRT4530_68186C.1.pep
VMLSPALKKIIKPIKKYTFFYLTSRKHNFARINIEKLKLNHMTLVPLVRQTIKLPLAHAKLLTLERLSVIMPLLSSTALMILTCSTFEPSILKCELKGKEP

SEQ ID NO: 169800 - protein, 64 aa, Oryza sativa
  Clone ID: PAT_MRT4530_68187C.1.pep
TLNSEGCCFHQGALVQQRSVIYVFIFGHVLPVFFDGNEGSSRSSIRLMEFSQEIRINQNQHYKI

SEQ ID NO: 169801 - protein, 112 aa, Oryza sativa
  Clone ID: PAT_MRT4530_68188C.1.pep
AGDLHLIFVVPGVGCINLEARLTEAYRPSVHPSCGALKGKGWFGLWDNSLDLSTYHYGDCFKEQMSLVYDPVSNDYRNLPGVETRVGNFGIARGFHSKNTLHPERCLCKAIE

SEQ ID NO: 169802 - protein, 158 aa, Oryza sativa
  Clone ID: PAT_MRT4530_68189C.1.pep
MSPATAATAGCHHLLLPTASRPCGAPPRRLARGAAAAAAAAGHVSVVGRRPLEEVYKVRVERGAAARERAEALRAMETWSTWRTGGRCRMPWDWHVDQLVYIVSGEVRVLPAEATTGEEYMHFVAGDLVRYPKWFEADLYFDGPYEERYRFLAYGDDN

SEQ ID NO: 169803 - protein, 979 aa, Oryza sativa
  Clone ID: PAT_MRT4530_6818C.1.pep
MLVWTQVGEIVFPVYTTTPISTGPPMTGDENAVATNQGDSMSKNPPVETENGISMTSKLKKDSDTAKPCPSDMNHEPTKMTYEATRSWCPIHKTKKHTLQDCWVFLNVRAEIRACKERGIQRTSPTRDVYCPIHKTKNHVLSSCKDYGSSTTSAPREVLAIDDVGTSAHANTEAGNQSTTPAQHIRAVQAILRETPYDPVLNVDLERWTERLRESVTNLSNAFEEAATAAHQEQPPTGEANGEDPERRESPQQATPPPRGTGDLRDQINGRREARRTRDNVNRSRRHVSSRRHDNGNRGNRSNEDRDHDNHHDHNDRERRCRNTIPEIIDASVIRAFKSGVRDRYTTQELATRRITTTRRLFEIVERCAHADDALRRKNDRPKTGGEKKPAMDTSESSKKKNRKNGKRKAQAEVLAAEYANPPKRPDPQSSDTTKSWCPIHKTDRHSLEDCLVFKKSLEKHMAFEKGKRGATPKMKWSEQKIEFSEEDHPKTAVIPGRYPIVVEPTIRNIKVARVLIDGGSSINLLFASTLDAMGIPQNELTPTDQPFHGITPQSSSRPLGKITLPVTFGQANNFQTEQITFDVAEFDTAYNTIIGRTTLAKFMAASHYAYQVLKMPGPKGTITIQGNAKLAVQCDKRSLDMVEQTPSPPATTEPPKKVTKTNKTPKPDGAIKIVPLSSANPDKTELALITFLRDNADVFAWRPSDMPGVPREVIEPKLMVRPDAKPVKQRLRRFAPDRKQAIREELDKLLKAGFIREVLHPEWLANPVMVRKANGKWRMSVDFTDLNKACPKDHFPLPRIDQLVDSTAGCELLSFIDAYSGYHQISMAKEDEEKTAFITPFGVFCYVKMPFGLITAGNTFQRTVQGALSNQLGNNVEAYVDDIVVKTKTGNSLIDDMRETFDNLRRYRLMLNPEKCMFGVPSGKLLRFLVSGRGIEANPEKIKAIENMKSPTRLKEVQKLTGCMAALSRFVAKMGERH

SEQ ID NO: 169804 - protein, 534 aa, Oryza sativa
  Clone ID: PAT_MRT4530_68190C.1.pep
MAAAVLVAIALPVSLALLLVAKAVWVTVSCYYLTPARIRRVLASQGVRGPPPRPLVGNLRDVSALVAESTAADMASLSHDIVARLLPHYVLWSNTYGRRFVYWYGSEPRVCVTEAGMVRELLSSRHAHVTGKSWLQRQGAKHFIGRGLLMANGATWSHQRHVVAPAFMADRLKGRVGHMVECTRQTVRALRDAVARSGNEVEIGAHMARLAGDVIARTEFDTSYETGKRIFLLIEELQRLTARSSRYLWVPGSQYFPSKYRREIKRLNGELERLLKESIDRSREIADEGRTPSASPCGRGLLGMLLAEMEKKEAGGNGGGEVGYDAQMMIDECKTFFFAGHETSALLLTWAIMLLATHPAWQDKARAEVAAVCGGGAPSPDSLPKLAVLQMVINETLRLYPPATLLPRMAFEDIELGGGALRVPSGASVWIPVLAIHHDEGAWGRDAHEFRPDRFAPGRPRPPAGAFLPFAAGPRNCVGQAYAMVEAKVALAMLLSSFRFAISDEYRHAPVNVLTLRPRHGVPVRLLPLPPPRP

SEQ ID NO: 169805 - protein, 167 aa, Oryza sativa
  Clone ID: PAT_MRT4530_68191C.1.pep
MACAFSVSSAAAPLASPKGDLPLVGNKAPDFEAEAMFDQGFIKSKCMFVSSAEITAFSDRYEEFEKINTEVLGVSIDSVISKSFGVLIPDQGIALRGLFIIDKEGVIQHSTINNLAIGRSVDETLRTLQALQYVQENPDEVCPAGWKPGEKSMKPDPKDSKEYFASI

SEQ ID NO: 169806 - protein, 940 aa, Oryza sativa
  Clone ID: PAT_MRT4530_68192C.1.pep
MEINEKIDDREANLQYTQKGITSLSDLEKEKGEEQEKSTDSGKKSQGLKIMKQLAGKIEAGTSTDSVNSKSGTEEKILKISNDLKKADEKQLQEVKTSRGFETDTDKKAQRFKTMKQLPGIFEDGTCTALVQSNSGLAFLEKNYNTTQSYKMQENRDNIKSGNKGHLSDIGSKIEKKNTTNQTCLALLEENYNTTLSYRVQENMDITKTGKGKIMKQIAGNSKDFSETEAKLDKTKNSEADIGCSALNESEKSIIENNDKGTISCMNMQEINSENGANNAKVDYENNVLSLLDQDYIADSFISYTSLMEHIISSQPKRCNELKDKSLEQTSEIGYSNVDNQSQHAWSLDIFNLQESVQEPILEQSSDIGNISGNGVDDDVMNDELLTEEDIEQFLEEEQQEALKGNNAIIDRKYIPELDQKFKSIIEAHNYFNFYAYMAGFSIVNVHSARTTSKKRNREVIRVTFKCYKYVKADCNTKPETVDETATGERKTNEVIGTECKCVMVISERNLEWIITRLDLDHNHELSPPNKVRFLRSHKYLSTEERVLIRTLKECHIPTRNMIVILSVLRGGLTSLPYTKKDISNVRTEINRETSSNDMMQCLTYLKKKQEKDPNFFYEFDLDENRKAQLRKTLELQVEEIKKFKCYAVFEAENVISKQIRKRKYLVMMDLDTEEYTCICAMFQKDGILCSHILKIMLHLSIKEIPEKYIMHRWRKNHKSTEIIIGKEIIPVSESSVLRFNILSRKFAEIASKGAKTVEAYKFLMEESEKIDEKLNTMFSHEFEGADKQQGHEENNSFSPTAEVNEKSENTHIHGDIRNEEDYIEDPDIANSKGRPKQRYKTIREQIEDKETNHCSHCGRTEHTFPTCPFKHIEFDLARKRKRKIPSKPQKSGEEEKKEATSKKRKPNKKENTEISKSHQDEVQQLSKRVKKKSEINTSK

SEQ ID NO: 169807 - protein, 681 aa, Oryza sativa
  unsure (1)..(681): unsure at all Xaa locations
  Clone ID: PAT_MRT4530_68193C.1.pep
RCIVYSYKHGFSGFAAMLTESQAEXLQAKLPEVLSVNPNIYHQAHTTRSWDFLGLNYYEQSGLLKKANYGEDVIVGVIDSGIWPESESFNDSGYSSVPTRWKGKCQTGMAFNATSCNRKIIGARWYSGGIQDESLKGEYLSPRDANGHGTHTASTIVGGQVWNASHKRGGLAAGSAHGGAPRARVAVYKACWGAAGGGISCSNAAVLAAIDDAINDGVDVLSLSIGGPVEYLSSRHAVARGIPVVFSAGNDGPTPQTVGSTLPWVITVAASTIDRTFPTVISLGNKEKLVGQSLYYKAPAKSGKFEMLVDGGFSCDKETLALINVTGKIVLCSAPLQAKLNPPRLMLPAIIGDVANAGAAGLIFAQYTVNILEDLDACNGSMPCVLVDYEIANRIRSYVASTRMPVVEVSPAMTVVGSGVLSPRVAAFSSRGPSSLFPGILKPDIAAPGVSILAALGDSYEFMSGTSMACPHVSAVVALLKMVHPDWSPAMIKSAIVTTASVTDRFGIPIQAEGVPRKVADPFDFGGGHIESDRAVDPGLVYDIDPREYAKFYNCSINPKDECESYMRQLYQLNLPSIVVPDLKYSVTVWRTIINIGVAEATYHAMLEAPVGMTMSVEPSVIKFTNGGSRSVTFKVTFTTRQRVQGGYTFGSLTWQDGITHSVRIPIAVRTIIQDFVADTS

SEQ ID NO: 169808 - protein, 118 aa, Oryza sativa
  Clone ID: PAT_MRT4530_68194C.1.pep
KQPSLAPPRAGGAPIPPSGPLPCLGPRAAGPPPPGWGAPPWSGIGPSPRPVGLLRAPPKWGPPPGFWGPPAPSPPRGGPGMGFSRKGGRGFKISPEIPLWAPGTLGGYKKKKRWPSFF

SEQ ID NO: 169809 - protein, 1212 aa, Oryza sativa
  Clone ID: PAT_MRT4530_68195C.1.pep
MEINEKIDDREANLQYAQKGITSLSDLEKGKGEEKEKSTDSGKKSQGLKIMKQLAGKIEAGTSTDSVNSKSGTEEKILKISNDLKKADEKQLQEVKTSRGFETDTDKKAQGFKTMKQLPGIFEDGTCTALVQSNSGLAFLEKNYNTTQSYKMQEKQRQHKIRGHLSDIGSKIEKKNTTNQTGLALLEENYNTTLSYRVQENMDITKTGKGKIMKQIAGNSKDFSETEAKLDKTKNSEADIGCSALNESEKKNGANNAKVDYENNVLSLLDQDYIVDSFISYTSLMEHIISSQPKRCNELKVEGTQNDTIETGIGQDYQKVDESLNSHVEYQSEQRCSMDILNLQESVQDKSLEQTSEIGYSNVDNQSQHAWSLDIFNLQESVQEPILEQSSDIGNISGNGVDDAVLNDELLTEEDIEQFLEEEQQEALKGNNANIDRKYIPELDQKFKSIIEAQNYFNFYAYMAGFSIVNVHSARTTSKKRNREVIRVTFKCYKYVKADCNTKPETVDETATGERKTNEVVGTECKCVMLSPPDEVRFLRSHKYLSTEERVLIRTLKECHIPTRNMIVILSVLRGGLTSLPYTKKDISNVRTEINRETSSNDMMQCLTYLKKKQEENPNFFYEFDLDENRKGRNFFWTDGRSRDWYHKFGDCISFDTTFLTNRYNLPFAPFVGVSGHGNTILFGCAFLHDETTETFEWLFITFLKCMNGKQPKTIITDQDGAMRAAIKNIFREAKHRNCFFHIISKALKRSGSLFKKRQGLYAIYSDIIHNCLTEEEFEVLWQDMIQEFNLQEINFLAHMWHIRKRFIPVYFKTNFCLFIQSTALSEGTNSRFKKNVGPQYSIRSFLTEYERVMETIQNLEQHDDHESRTKRPTSFWSNYSIEYQAVKLYNNKIFKRFQAQLRKTLELQVEEIEKFKCYAVFEAENVISKQIRKRKYLVIMDLDIEEYTCICAMFQKDGILCSHILKIMLDLSIKEIPEKYIMHRWRKNHKSTEIIKGKEIIPVSESSVLRFNILSRKFAEIASKGAKTVEAYKFLMEESEKIDEKLNTMFSHEFEGADKQQGHEENNSFSPTAEVNEKSENTHIHGDIRNKEDYIEDPDIANSKGRTKQRYKTIREQIEDKETNHCSHCGRTEHTFPTCPFKHIEFYLARKRKRKIPSKPQKSGEEEKKEATSKKRKPNKKENTEIGKSHQDEVQQLSKRVKKKSEINTSK

SEQ ID NO: 169810 - protein, 1029 aa, Oryza sativa
  Clone ID: PAT_MRT4530_68196C.1.pep
MKQLAGNSKNFSETEAKLDKTKNSEADIGCSALNESEKSIIENNDKGTISCMNMQEINSENGANNAKVDYENNVLSLLDQDYIADSFISYTSLMEHIISSQPKRCNELKVEGTQNDKIKTGIGQDYQKVDESLNSHVEYQSEQRCSMDILNLQESVQDKSLEQTSEIGYSNVDNQSQHAWSLDIFNLQESVQEPILEQSSDIGNINGNGVDDAVMNDELLTEEDIEQFLEEEQQEALKGNNANIDRKYIPELDQKFKSIIEAQNYFNFYTYMAGFSIVNVHSARTTSKKRNREVIRVTFKCYKYVKADCNTKPETVDETATGERKTNEVIGTECKCVMLSPPDEVRFLRSHKYLSTEEWVLIRTLKECHIPTRNMIVILSVLRGGLTSLPYTKKDISNVRTEINRETSSNDMIQCLTYLKKKQEENPNFFYEFDLDENRKVRNFFWTDGRSRDWYHKFGDCISFDTTFLTNRYNLPFAPFVGVSGHGNTILFGCAFLHDETTETFEWLFTTFLKCMNGKQPKTIITDQDGAMRAAIKNIFREAKHRNCFFHIISKALKRSGSLFKKRQGLYAIYSDIIHNCLTEEEFEVLWQDMIQEFNLQEINFLAHMWHIRKRFIPVYFKIDLCPFIQSTALSEGTNSRFKKNVGPQYSIRSFLTEYERVMDTIQNLEQHDHHESRTKRPTSFWSNYSIEYQAVKLYNNKIFKRFQAQLRKTFELQVEEIEKFKCYAVFEAENVISKQIRKRKYLVMMDLDTEEYTCICAMFQKDGILCSHILKIMLHLSIKEIPEKYIMHRWRKNHKSTEIIKGKEIIPVSESSVLRFNILSRKFAEIASKGAKTVKAYKFLMEESEKIDEKLNTMFSHEFEGADKQQGHEENNSFSPTAEVNEKSENTHIHGDIRNEEDYIEDPDIANSKGRPKQRYKTIREQIEDKETNHCSHCGRTEHTFPTCPFKHIEFDLARKRKRKIPSKPQKSGEEEKKEATSKKRKPNKKENTEIGKSHQDEVQQLSKRVKKKSEINTSKSCVMKRKE

SEQ ID NO: 169811 - protein, 76 aa, Oryza sativa
  Clone ID: PAT_MRT4530_68197C.1.pep
KVKPRSSFDKINMANGRSNLRKELTVKLCTLMLSASINDRQLIDHQLQSNIKRQLIDHQLQSNINRQFIDVLCGLF

SEQ ID NO: 169812 - protein, 189 aa, Oryza sativa
  Clone ID: PAT_MRT4530_68198C.1.pep
MEINEKIDDREANLQYAQNGITSLSDLEKGKGEEQEKSTGTKEKKLKISNVLKMADEKQFEAGKTSSGKKSQGLKIMKQLAGKIEAGTSTNSVNSKSGTEEKILKISNDLKKADEKQLQEVKTSRGFETDTDKKAQGFKTMKQLPGIFKDGTCTALVQSNSGLAFLEKKYNTTQSYKMQENRDNIKSAN

SEQ ID NO: 169813 - protein, 447 aa, Oryza sativa
  Clone ID: PAT_MRT4530_68199C.1.pep
MREILHIQGGQCGNQIGAKFWEVVCAEHGIDATGRYDGDSDLQLERVNVYYNEASCGRFVPRAVLMDLEPGTMDSVRSGPYGHIFRPDNFVFGQSGAGNNWAKGHYTEGAELIDAVLDVVRKEAENCDCLQGFQVCHSLGGGTGSGMGTLLISKIREEYPDRMMLTFSVFPSPKVSDTVVEPYNATLSVHQLVENADECMVLDNEALYDICFRTLKLTTPSFGDLNHLISATMSGVTCCLRFPGQLNSDLRKLAVNLIPFPRLHFFMVGFAPLTSRGSQQYRALTVPELTQQMWDAKNMMCAADPRHGRYLTASAMFRGKMSTKEVDEQMLNVQNKNSSYFVEWIPNNVKSTVCDIPPTGLKMASTFIGNSTSIQEMFRRVSEQFTAMFRRKAFLHWYTGEGMDEMEFTEAESNMNDLVSEYQQYQDATADDEGEYEDEEEEADLQD

SEQ ID NO: 169814 - protein, 328 aa, Oryza sativa
  unsure (1)..(328): unsure at all Xaa locations
  Clone ID: PAT_MRT4530_6819C.1.pep
ALPTRHVEVRECFATEARRPVLTWPSWAPRGNRAARPKVATSTRPAGGGARAPMVAAGDHWRGGAAAERGEGXGERRRRSTAHPGATAAAEEAAGAKGGGGAARVDGVGGAPVVGERNGGVDEVGKDAAKLKKAAPRWEAVRGDDGGGPELGGDGGERERRRELESGEEEGRREAETDGRSAGRVXIGQGRERAAERGRKPARRSRAPSMAPVGLGEGFPNESKGEREGKLGGKGEGITGSDSPHLNARGDGGXGGFDGGGGAXAQAERRERREVGDDGWAPPVSEGGGRARPSAARALGEAEWAAGRRRERGREMGRAGPRGGGGGF

SEQ ID NO: 169815 - protein, 93 aa, Oryza sativa
  unsure (1)..(93): unsure at all Xaa locations
  Clone ID: PAT_MRT4530_681C.1.pep
SGRRWCXCSGPTPPAGAPEVRPPSLTWPPRRHPGCPATKLSRHRGLDDPPRHGLAPSGQAERVSGGAAAAPGRLRCPPPPRPGRPRRAAAYAW

SEQ ID NO: 169816 - protein, 63 aa, Oryza sativa
  Clone ID: PAT_MRT4530_68200C.1.pep
TIQQVLSASKELTWTQTACLPPRPLASRKRKRPNKEIGRKRDFTATTSLSRLVYTRAFACGVL

SEQ ID NO: 169817 - protein, 624 aa, Oryza sativa
  Clone ID: PAT_MRT4530_68201C.1.pep
MASTASALVSSQLCGSSRWSTTWIWVRVEREVRQQRRREGAAVVGLDYEERRARRYEGKEDAYAVAVGCSCSSFSCCRRALMLSPASAPRCLLYVSSRQRCHSMASHAHVALALSASRPATRPPQPPSFAAPPLPTPITMRRTLPLLRSDLTSRWARSQLEAEEFGGDLGFGVGKKGEEKMREILHIQGGQCGNQIGSKFWEVVCDEHGIDPTGRYAGTSDLQLERVNVYYNEASCGRFVPRAVLMDLEPGTMDSVRTGPYGQIFRPDNFVFGQSGAGNNWAKGHYTEGAELIDSVLDVVRKEAENCDCLQGFQVCHSLGGGTGSGMGTLLISKIREEYPDRMMLTFSVFPSPKVSDTVVEPYNATLSVHQLVENADECMVLDNEALYDICFRTLKLTTPSFGDLNHLISATMSGVTCCLRFPGQLNSDLRKLAVNLIPFPRLHFFMVGFAPLTSRGSQQYRALTVPELTQQMWDAKNMMCAADPRHGRYLTASAMFRGKMSTKEVDEQMINVQNKNSSYFVEWIPNNVKSSVCDIPPRGLSMASTFVGNSTSIQEMFRRVSEQFTAMFRRKAFLHWYTGEGMDEMEFTEAESNMNDLVSEYQQYQDATADEAEYEEEEDAIQE

SEQ ID NO: 169818 - protein, 463 aa, Oryza sativa
  unsure (1)..(463): unsure at all Xaa locations
  Clone ID: PAT_MRT4530_68202C.1.pep
MREILHIQGGQCGNQIGAKFWEVICGEHGVDPTGTYTGTSPQQLERINVYFNEASGGRHVPRAVLMDLEPGTMDSLRSGPIGGIFRPDNFVFGQSGAGNNWAKGHYTEGAELIDSVLDVVRKEAENCDCLQDNRVIRQLGSIDNEQSGFQVCHSLGGGTGSGMGTLLISKIREEYPDRMMLTFSVFPSPKVSDTVVEPYNATLSVHQLVENADECMVLDNEALYDICFRTLKLTNPSFGDLNHLISATMSGVTCCLRFPGQLNSDLRKAAVXNLIPFPRLHFFMVGFAPLTSRGSQQYRALTVPELTQQMWDAKNMMCAADPRHGRYLTASAMFRGRMSTKEVDEQMINVQNKNSSYFVEWIPNNVKSSVCDIPPVGLSMASTFVGNSTSIQEMFRRVSEQFTAMFRRKAFLHWYTSEGMDEMEFTEAESNMNDLVAEYQQYQDATAEDDYDEDDDAAAADEA

SEQ ID NO: 169819 - protein, 447 aa, Oryza sativa
  Clone ID: PAT_MRT4530_68203C.1.pep
MREILHIQGGQCGNQIGSKFWEVVCDEHGIDPTGRYVGTSDLQLERVNVYYNEASCGRFVPRAVLMDLEPGTMDSVRTGPYGQIFRPDNFVFGQSGAGNNWAKGHYTEGAELIDSVLDVVRKEAENCDCLQGFQVCHSLGGGTGSGMGTLLISKIREEYPDRMMLTFSVFPSPKVSDTVVEPYNATLSVHQLVENADECMVLDNEALYDICFRTLKLTTPSFGDLNHLISATMSGVTCCLRFPGQLNSDLRKLAVNLIPFPRLHFFMVGFAPLTSRGSQQYRALTVPELTQQMWDAKNMMCAADPRHGRYLTASAMFRGKMSTKEVDEQMINVQNKNSSYFVEWIPNNVKSSVCDIPPRGLSMASTFIGNSTSIQEMFRRVSEQFTAMFRRKAFLHWYTGEGMDEMEFTEAESNMNDLVSEYQQYQDATADEEGDYEDEEEQVPEDE

SEQ ID NO: 169820 - protein, 379 aa, Oryza sativa
  unsure (1)..(379): unsure at all Xaa locations
  Clone ID: PAT_MRT4530_68204C.1.pep
MVVAGVGGRREDGVDDGEEGVDEVVREVSDGGGVAAKETWGDSKHRLAYLAETTVIFKDIVQMRDEQWWRALTSGYVTQWEAMHPQXERFCTTPGCKAYLVVSGGGHYPCXEEAATVLKWPKVVCKERRFKIFDLAVGALSGPSHSEVPVLQAVYSSMRGIIRMHNPSVIITVANVDAKIKDAFRMAADSAINHIAFVLLPRNSISKVLWMATLHPTSLPNWNRMRISGNIITQNRAKSLRRLLASLRNTYYVGDEVPISFNMDSRVDAATLNTVNSFDWPHGGKTLRQRIIQGGLIRTQQAGGQQLRPPRWLTPFSLSVTIQGSHAWLAATFPLRAEDGGYGGQSGGQRERLGPPPRRSVGKASTIVKGHRWWCGSAR

SEQ ID NO: 169821 - protein, 153 aa, Oryza sativa
  Clone ID: PAT_MRT4530_68205C.1.pep
MAADSAWNPRGPHMSGCHVGQPLPSFPVPSFRLDLLGCNVISRAAGGGEGVARVRGPTAGGRCGGGNVAAETREKGKAADQRCGGEAAAGVRVSWRRGRRRPKATAWASVEARDGEAAAPPVASSLSGFSSSGWAGGEVRLPEPFQLPAPLPS

SEQ ID NO: 169822 - protein, 144 aa, Oryza sativa
  Clone ID: PAT_MRT4530_68206C.1.pep
FSKGTICIGELEVASITKFQSIWSCSGATFYEPQEIPDGFHCLGHYAQQNDRPLQGFLLVAREAASCQSINLKPALEKPLDYTLVWTSTDLNDDDNSDCGCFWSPSPPDGYEALGYVVTRGPKKPSLDAVRCVRGDLTDECENF

SEQ ID NO: 169823 - protein, 115 aa, Oryza sativa
  unsure (1)..(115): unsure at all Xaa locations
  Clone ID: PAT_MRT4530_68207C.1.pep
GQSPFTKEFLMDVKKALVFVMNGKLSFPFFFPGQIFGLGVPGRISFFKKKVLEDFFNLSLAGSPPLAGPCLPPRSKLSXSPAPLAGPEASSPLADSSDSVKMKVISQKIGLSKTS

SEQ ID NO: 169824 - protein, 79 aa, Oryza sativa
  unsure (1)..(79): unsure at all Xaa locations
  Clone ID: PAT_MRT4530_68208C.1.pep
SEIPELILQIHSLVDGMEGGLRGIGGGLQGLHSLRAFSIWGCPTFLSSYYSTSLSCFPXPSSLQKMYLSDVRAWRLCSL

SEQ ID NO: 169825 - protein, 165 aa, Oryza sativa
  Clone ID: PAT_MRT4530_68209C.1.pep
MATVFRRSTATAEGRTRTATRRRPRRRPSRAAMTTGATAAHGWSCGGDGSARSHGARALRATADEDEGGGGVGAGVSQLIGLVQQEVLSQSRWRWEEEGRVRARRKGDAHWWGEWEELRSSGHGRKGWVLIDLMVNTWWRMCVPNNSSLQFFNIVDHAKTAIDAR

SEQ ID NO: 169826 - protein, 43 aa, Oryza sativa
  Clone ID: PAT_MRT4530_6820C.1.pep
MVSFFTLEPRNRSTTSPLVINRAKTVDLAEKADPCRSSPTSSR

SEQ ID NO: 169827 - protein, 388 aa, Oryza sativa
  Clone ID: PAT_MRT4530_68210C.1.pep
MASRRGIPELPWELQDAILARLPLRDAARSSVLSSSWGRSWRHLGELDFVSSPPPAAASLPVAAATAVACDKAAIDAILLHQHPGPVQRVRLRVTDELLPGVPAWMASLSEKGIQSLDLTVRAMYRPPPHPMHRSIFACRALRRLSLGRFALPAAPEHFAGFPALATLSLTGTAFRNARDLEALVAMSPRLEELRMCCIAVDVDCREHGGDGRRKVRMVSSSLRFLRIDGMGNVEFVGARLPRVSQADFAQASYPSAPNLLSAMVTSLETLDYYYYALPLSPTKLLKGLPSSYKNLKRLKVHLDFNHAPPILSTLNFLRTAPNLTQLVIQDFTDDSYAQSPYPLAAELYGNLCPSLLFLQMSYVTSQNNEMDFIRLILSKARMLQDPR

SEQ ID NO: 169828 - protein, 764 aa, Oryza sativa
  Clone ID: PAT_MRT4530_68211C.1.pep
MWRHGERCVILAVAAVALVAAATATAAAAVGGERRTYIVHMSRSAKPNDFVEHGEWYAASLQSVSDAATVLYTYDTIVHGYSARLTRAEAEALESQPGVLLVNPEVRYELHTTRTPEFLGLDRTDALFPQSNTGSDVIVGVLDTGVWPERPSYDDAGLGPVPAGWKGKCEEGNDFNASACNKKLIGARFFLTGYEAAKGPVDTSKESRSPRDNDGHGTHTSSTAAGSAVRGADLLGYAAGTAKGMAPHARVATYKVCWVGGCFSSDILKAMEVAVNDGVDVLSLSLGGGTADYYRDSIAVGAYSAMERGIFVSCSAGNAGPGSATLSNGAPWITTVGAGTLDRDFPAHVVLGNGKNYSGVSLYSGKQLPTTPVPFIYAGNASNSSMGALCMSGSLIPEKVAGKIVLCDRGTNARVQKGFVVKDAGGAGMVLANTAANGEELVADAHVLPGAGVGQKAGDTMRAYALSDPNPTASIVFAGTQVGIQPSPVVAAFSSRGPNTVTPGILKPDLIAPGVNILAAWSGSVGPSGLAGDSRRVGFNIISGTSMSCPHVSGLAALLRAAHQDWSPAAIRSALMTTSYNGYPNGNGILDVATGLPATPLDVGAGHVDPSKAVDPGLVYDIAAADYVDFLCAISYGPMQIAALTKHTTDACSGNRTYAVTALNYPSFSVTFPATGGTEKHTRTVTNVGQPGTYKVTASAAAGSTPVTVSVEPSTLTFTKSGEKQSYTVSFAAAAMPSGTNGFGRLVWSSDHHVVSSPIAVTWT

SEQ ID NO: 169829 - protein, 69 aa, Oryza sativa
  Clone ID: PAT_MRT4530_68212C.1.pep
RRVRPYTGVGSLWRAGHGSTNVAINGSPNAAVNGSMKVGTCGSFHGISLAKGRNMSALVKTLKRMIPKA

SEQ ID NO: 169830 - protein, 415 aa, Oryza sativa
  Clone ID: PAT_MRT4530_68213C.1.pep
MGYPAASAPAPPSPFPVPHGLSPTAFLGGSPGLFSPTGNFEMSHQQALAQVTAEAVHSPYSMINQSDFSLPFSSTTTSVLASQHVNSSANVSSPREIPTLPSHTDNSNIESTEVSHGFQTTALTEDKPADDGYNWRKYGHKAVKGGEYPRSYYKCTHLSCPVKKKVERSSDGQITPILYRGQHNHQRPTKKSPKMVALYLNEADVSREKEDASIRSEQGSQDYSGKFKASNDGGPSSSRRGDRGEQISGSSDSKHQGEEEVKVEGRATSDGNANKRHVPAPAQRIIVQTTSEVDLSDDGYRWRKYGQKVLKGNPHPRSYYKCTYQGCDVKKHIERSSQDPKAVITTYEGKHSHDVPAARNSSHSSANANVSSSSNLPPKGQGATVVVQRWFAECIFSFFLPVKGGGGMAGNLGGV

SEQ ID NO: 169831 - protein, 90 aa, Oryza sativa
  Clone ID: PAT_MRT4530_68214C.1.pep
MWDQGPSHQLQGDGRGNCHGHRLIVPCHVESNGSRVIVVLLRLQAVDRELSSLDIGPAPPDRGLVSPGASSALHERGMPIVERLGILGAA

SEQ ID NO: 169832 - protein, 178 aa, Oryza sativa
  Clone ID: PAT_MRT4530_68215C.1.pep
MLMIVHNPLTVQQERILKIRLIGEDRSKKRSGKSCVGMNDDIEAMSKWFGPVCQIIRPNTAHILPTQFTDRGPNISSKLGFFAGVKISIQISEGGYIDRFRTSELVNFARPYADSEDVKSSLVTISFTPSRIPMMISNSAIMECAELICQMFGDRTNQPTPDQEQGDMATRGSCCLAT

SEQ ID NO: 169833 - protein, 99 aa, Oryza sativa
  unsure (1)..(99): unsure at all Xaa locations
  Clone ID: PAT_MRT4530_68216C.1.pep
DLAGEPRRXXPMXDPASPGRIXHLAATXTTTTLRCSTXAAGRRGXTSXRRSPCWLRRXRVXAQASPASRRRHXSXASXRKKAIXVGSHXDALQTGMMVA

SEQ ID NO: 169834 - protein, 77 aa, Oryza sativa
  unsure (1)..(77): unsure at all Xaa locations
  Clone ID: PAT_MRT4530_68217C.1.pep
SVXLLRLLLPXXSRGRXXXFXGXXLVLXXVFALVXVXVXLAWVSSXXXXXXXRVLFXXFLXPXXXLWXFXSGXXXXX

SEQ ID NO: 169835 - protein, 75 aa, Oryza sativa
  Clone ID: PAT_MRT4530_68218C.1.pep
NRHHATKRHRVHIREVRGQPGRKGRRTVGHLLPPCRAGKHTHPLPPRCRESGSRDTDGSTFVRPGVRQVGGRALQ

SEQ ID NO: 169836 - protein, 251 aa, Oryza sativa
  unsure (1)..(251): unsure at all Xaa locations
  Clone ID: PAT_MRT4530_68219C.1.pep
QNKXKKXXXKRXTKXRXXEXXKKKKTXXXXNTKXXXXEXXKKXKXPXXXXGQTKXXXKXXKXKXXXXKXTQRXXXKXKXKGKXKXKXKWDXKERXXGXKXTXGGQRXXXXXXSXPKSXXXXEXXXKXXXPXLWERXPSXXPFXXXXXXXXXXXXXPXXXPXWXPXXXWFXXXWXXGFFFXGXXXXPXXXWXXXXTGXXXPXMXXXRGXXXFPXXPXPLXFXPXTXWGXVXIXXXILXXXXXXXXXKGTEXX

SEQ ID NO: 169837 - protein, 296 aa, Oryza sativa
  unsure (1)..(296): unsure at all Xaa locations
  Clone ID: PAT_MRT4530_6821C.1.pep
RVGPACHLPPRAAPPPARAPRDSLSRFPLFSLSLSLGFVRXNPAIVAGVFNGAEISAAXFPPSPAALSPSRRYIFAPRASLLRFRRSPLALAVGFVLAPSSSLSAVAANLRFAAVVTPDFLPTRRHLHRLRRVVVDPVRSSVSPVDCRSTVALVIPTRAAVSRRFGRRFRRRRCPGVSRGPPFAFPLPSSLSGAAPPRRWSPAVTIGARARRSRRPRRRGRPRARPRGCQVGPAVSRPRPRVRLTRGTHGADRRQPRAPGPPWTVGLTRGPHFPWTRSARPAPLGHLNSELDRSSL

SEQ ID NO: 169838 - protein, 409 aa, Oryza sativa
  Clone ID: PAT_MRT4530_68220C.1.pep
KRSSETPPLGLGFAPPPLPSTRGGAGVHGARRRPGAKVTPNLAMDEEGTRVLNITVLQRLDPAVEDILITAAHVTLYDFDTDLNQWSRKDVEGSLFVVKRNAQPRFQFVVMNRRNTDNLVEDLLGDFEYQLQVPYIMYRNAAQEVIGIWFYNSQECEEVANLFSRILNAFSKATPKPKAPSIKSEFEELEAAPTLVEGPLEPQTSNIIPATTHVQEDPLSAFFSGAINVGSASGLSVAGQLNQSFGSTPLSSHAPTSISISQPPAVHHLLPSQTSSVISPDVHGGTGAVVNRSASLLNPSLFSPLTSSQTTMARTNPVAPTAPPQHPRITQQPHSAPLLQPFPLPTASPSPPYGTPLLQPFPPPNPSPSLASAPVYSPVLSREKVRDALLRLVENDDFIDLVYREIVKG

SEQ ID NO: 169839 - protein, 54 aa, Oryza sativa
  Clone ID: PAT_MRT4530_68221C.1.pep
TFHFPIFFLATTTFFLIPGPSFFGPKNFFRWPPLNPSTAPSSPSFFFTNQTLLP

SEQ ID NO: 169840 - protein, 59 aa, Oryza sativa
  Clone ID: PAT_MRT4530_68222C.1.pep
ILPKDQVGGGGKHEKKMPRRPSGGGVSCITTAPFCRQEVNYENYFICRIIKHHHNYDVL

SEQ ID NO: 169841 - protein, 798 aa, Oryza sativa
  Clone ID: PAT_MRT4530_68223C.1.pep
MPPVIGRNGVAYESPSAQLPLTQADMLDSHHLQQALQQQYFDQIPVTTTAAADSGDNMLHGRADAGGLVDEFESKSCSENVDGAGDGLSGDDQDPNQRPRKKRYHRHTQHQIQEMEAFFKECPHPDDKQRKELSRELGLEPLQNQHERHENAQLRAENDKLRAENMRYKEALSSASCPNCGGPAALGEMSFDEHHLRVENARLRDEIDRISGIAAKHVGKPPIVSFPVLSSPLAVAAARSPLDLAGAYGVVTPGLDMFGGAGDLLRGVHPLDADKPMIVELAVAAMDELVQMAQLDEPLWSSSSEPAAALLDEEEYARMFPRGLGPKQYGLKSEASRHGAVVIMTHSNLVEILMDVNQFATVFSSIVSRASTHEVLSTGVAGNYNGALQVMSMEFQVPSPLVPTRESYFVRYCKNNSDGTWAVVDVSLDSLRPSPVQKCRRRPSGCLIQEMPNGYSKVTWVEHVEVDDSSVHNIYKPLVNSGLAFGAKRWVGTLDRQCERLASAMASNIPNGDLGVITSVEGRKSMLKLAERMVASFCGGVTASVAHQWTTLSGSGAEDVRVMTRKSVDDPGRPPGIVLNAATSFWLPVPPAAVFDFLRDETSRSEVPNLPPIPREFIQFADQILYVIKFIPDEFGFPQWDILSNGGAVQEMAHIANGRDHGNSVSLLRVNSANSNQSNMLILQESCTDASGSYVVYAPVDIVAMNVVLNGGDPDYVALLPSGFAILPDGPSGNAQAAVGENGSGSGGGSLLTVAFQILVDSVPTAKLSLGSVATVNSLIACTVERIKAAVCRDSNPQ

SEQ ID NO: 169842 - protein, 62 aa, Oryza sativa
  Clone ID: PAT_MRT4530_68224C.1.pep
LPRAAPTMLAPSSCHVGSRVPRWQDDGAKEAGAVPLDNGASYSGAPKRTISGISFSRGLLTK

SEQ ID NO: 169843 - protein, 59 aa, Oryza sativa
  unsure (1)..(59): unsure at all Xaa locations
  Clone ID: PAT_MRT4530_68225C.1.pep
MAAAASSAAWKRWIRPEVYPXFLATGXAVSICXGQLVXNITGNPEXRXLKEKXAAGVLE

SEQ ID NO: 169844 - protein, 781 aa, Oryza sativa
  Clone ID: PAT_MRT4530_68226C.1.pep
MERREIFQVADLAHILRGKPVDHLQQPNLLDNHQFQQAFQHQQQQHHLLDQIPATTAESGDNMIRSRASDPLGGDEFESKSGSENVDGVSVDDQDPNQRPRKKRYHRHTQHQIQEMEAFFKECPHPDDKQRKELSRELGLEPLQVKFWFQNKRTQMKNQHERHENSQLRSDNEKLRAENMRYKEALSSASCPNCGGPAALGEMSFDEHHLRIENARLREEIDRISAIAAKYVGKPMVPFPVLSNPMAAAASRAPLDLPVAPYGVPGDMFGGGGAGELLRGVQSEVDKPMIVELAVAAMEELVRMAQLDEPLWSVAPPLDATAAAMETLSEEEYARMFPRGLGPKQYGLRSEASRDSAVVIMTHANLVEILMDANQYAAVFSNIVSRAITLEVLSTGVAGNYNGALQVMSVEFQVPSPLVPTRESYFVRYCKQNADGTWAVVDVSLDSLRPSPVLKCRRRPSGCLIQEMPNGYSKVTWVEHVEVDDRSVHNIYKLLVNSGLAFGARRWVGTLDRQCERLASVMASNIPTSDIGVITSSEGRKSMLKLAERMVVSFCGGVTASVAHQWTTLSGSGAEDVRVMTRKSVDDPGRPPGIVLNAATSFWLPVPPKRVFDFLRDESSRSEWDILSNGGIVQEMAHIANGRDQGNCVSLLRVNSSNSNQSNMLILQESCTDASGSYVIYAPVDVVAMNVVLNGGDPDYVALLPSGFAILPDGPAHDGGDGDGGVGVGSGGSLLTVAFQILVDSVPTAKLSLGSVATVNSLIACTVERIKAAVSGESNPQ

SEQ ID NO: 169845 - protein, 775 aa, Oryza sativa
  unsure (1)..(775): unsure at all Xaa locations
  Clone ID: PAT_MRT4530_68227C.1.pep
MTPARRMPPVIGRNGVAYESPSAQLPLTQADMLXPHLTFLPQIPSSSSASSSSSHGDRRLLLAGEISLRFELSTGGFLACDITRFLEAHQTVLVVKKKMQANGRRSLRLVERFMKEWLHLDGXSRXELSWELAFXPLQGKFWLQNKRTQMKNQHERHENAQLRADNEKLRAENMRYKEALSSASCPNCGGPAALGEMSFDEHHLRVENARLRDEIDRISGIAAKYVGKPMVPFPVLSNPMAAAASRAPLDLPVAPYGVPGDMFGGGGAGELLRGVQSEVDKPMIVELAVAAMEELVQMAQLDEPLWCVASELDAAAAALETLDEEEYARMFPRGLGPKQYGLKSEASRHGAVVIMTHSNLVEILMDVNQFATVFSSIVSRASTHEVLSTGVAGNYNGALQVMSVEFQVPSPLVPTRESYFVRYCKNNSDGTWAVVDVSLDSLRPSPVQKCRRRPSGCLIQEMPNGYSKVTWVEHVEVDDSSVHNIYKPLVNSGLAFGAKRWVGTLDRQCERLASAMASNIPNSDLGVITSVEGRKSMLKLAERMVASFCGGVTASVAHQWTTLSGSGAEDVRVMTRKSVDDPGRPPGIVLNAATSFWLPVPPAPVFDFLRDETSRSEWDILSNGGVVQEMAHIANGRDQGNCVSLLRVNSANSNQSNMLILQESCTDASGSYVMYAPVDVVAMNVVLNGGDPDYVALLPSGFAILPDGPARNGGDGDGGVGAGSGGSLLTVAFQILVDSVPTAKLSLGSVATVNSLIACTVERIKAAVYGESNPQ

SEQ ID NO: 169846 - protein, 171 aa, Oryza sativa
  unsure (1)..(171): unsure at all Xaa locations
  Clone ID: PAT_MRT4530_68228C.1.pep
CFSFRGRLPWXGYQNXLATSPXSLCCFCPQPFRQFIESVVNLKFDEEPNYAKCISLFDGVGGPNPDIRPFNTDGAQKLIYQVGQXXGRLTMDEDDDELPFMKIRMGLPAXHWISVYNARRPLKHRXHFNVADGRFAHLFPAGGVDGLFFRSVASCSFLWAFLLAAGPGFSS

SEQ ID NO: 169847 - protein, 80 aa, Oryza sativa
  Clone ID: PAT_MRT4530_68229C.1.pep
MGPLSLLFLTAMKSMIALLPCSIAGAVCSIILNFDKDTWVAHRKMADASVGPTGRREECGLERIDERRGESLTNRSTLFS

SEQ ID NO: 169848 - protein, 89 aa, Oryza sativa
  Clone ID: PAT_MRT4530_6822C.1.pep
TLHEGLPNGQNTPHGKRLVSNRSVLSALSDQTNSVPSAAVNLATNNPAGLMSPESSVDPISSITGDKEDRYHGSDPSCTGVTAQQGEGE

SEQ ID NO: 169849 - protein, 74 aa, Oryza sativa
  Clone ID: PAT_MRT4530_68230C.1.pep
LLGVYSNCSVRTASLSAAQELWTGSDPEFWTTLFPTKSPTSQVYIEVDSGPCNSSDHPVMTAHFSKAKASTPRA

SEQ ID NO: 169850 - protein, 74 aa, Oryza sativa
  Clone ID: PAT_MRT4530_68231C.1.pep
SLFNKGGKKEEIYATARLQFTSSSPQLSSLLLTFWGCIAVSFCVCQGSDFSFTFRWCNNFKYSAYSILTQGTCK

SEQ ID NO: 169851 - protein, 55 aa, Oryza sativa
  Clone ID: PAT_MRT4530_68232C.1.pep
LVVNHAHTDTYLDEAHSIGAVGQSGRGVCELLGVDPACLNSQEIIQHLKLSCPAH

SEQ ID NO: 169852 - protein, 400 aa, Oryza sativa
  Clone ID: PAT_MRT4530_68233C.1.pep
MDEREMAARRAPSAATTPPTTATRCSTTASSCSSNSNPSVSAAAARTPPPTIVVPWDGVAGGGGCYYPGCRKDANCACEMCLASINATRDLLPPEAASARRWFAAAARDRKPAPRPLFGGADTTPHGSSVTEPWTPPMRSTAKSRRPRQQQEAAGGGGGGAGRKTPGGSHDWALYTATVLGFLLLLWVDSGLVPEIAARGFGPKLSPEAVARLATEARLAPGGLSHKLRALERMLGQLVGGEKGISNCSSHDSVWQFEQNDQRVFYWRCAVYKSAAEEVTVWGSPLRTSGLLPRALPARHLTILSGKITEWSDGRVWPTVRASNGSSWSYGGRSSPAVRLEAETWVVEYQRSVVFEGTRLIPAAAELVASRCSAVARRARQRLARRRFHGGAGGIQANPT

SEQ ID NO: 169853 - protein, 88 aa, Oryza sativa
  Clone ID: PAT_MRT4530_68234C.1.pep
MVKGIVIDRPFFSFHNARSPFAILFTATQGSVPKVVGLWGGQRDYEHHVTQGTNVLAVRQVPSQGMAKDYVKERLQCGYIEDRRVIKK

SEQ ID NO: 169854 - protein, 75 aa, Oryza sativa
  Clone ID: PAT_MRT4530_68235C.1.pep
RRAFSPQRGAPLPQSGKRSYLLPPLKEYPRALFKKSLPPAPLLWGEPKGFPTLYANLCWGTNKNPGSLVGRGLSL

SEQ ID NO: 169855 - protein, 146 aa, Oryza sativa
  unsure (1)..(146): unsure at all Xaa locations
  Clone ID: PAT_MRT4530_68236C.1.pep
MEDNLPLNIYEHHEIAKKALPKVIYDYINSGAEDEHTLRTCLRENIALYGRISLXPHVLVDVSKVDMSTILLGFHPPSPIIVAPMWSXKLAHPECKTKPSFKFEIRVILWFFGTIFFSVSNKYLLKDVKLVIKKKKKKKKKKKKKK

SEQ ID NO: 169856 - protein, 70 aa, Oryza sativa
  Clone ID: PAT_MRT4530_68237C.1.pep
HRCLLVWSHIAGWETPTKKMKSRQNQVQFSDRVLFLTAERYLAVVVAHAAGLWCVECSWWSWEWLLKVTY

SEQ ID NO: 169857 - protein, 82 aa, Oryza sativa
  Clone ID: PAT_MRT4530_68238C.1.pep
MDRGHRGTAGRRLGRRPPGRAGGSGDAGDEDDAGFMRSCSPYLHRSVGVQVVRGFDAEKSLGFGKGEEARDEVGNERRKQRR

SEQ ID NO: 169858 - protein, 69 aa, Oryza sativa
  unsure (1)..(69): unsure at all Xaa locations
  Clone ID: PAT_MRT4530_68239C.1.pep
RANCLRRRRLVYPPTQLVGHTIIVGRLRXADWCPRLYGWLVTPPFMGVLIFTDRLAFAAADWCFCRPAS

SEQ ID NO: 169859 - protein, 90 aa, Oryza sativa
  Clone ID: PAT_MRT4530_6823C.1.pep
RSRSDTGRISNGQPRSHVAPVSAGSGGRYGASQRPEPVYIVRVSCFFLGRDLSTHSESLRSHPKPPAELAKGGLRGLPVRSHELRHNIFV

SEQ ID NO: 169860 - protein, 602 aa, Oryza sativa
  unsure (1)..(602): unsure at all Xaa locations
  Clone ID: PAT_MRT4530_68240C.1.pep
ALLLPTSVLACTVGWSHHRCXASTSSPXGLPLPQPIGVFAYMIGWLIKXSCWASTFSPPACLHRRRLVFPPARLAYYATVVRCLRPHXPACLRRRRLVSSRRQRLHRRPAFVTADXCPRLYGWLVTPPFMGVHVFTDRPSSIAADWCPCLYGWLVTPPSMGVHVFTDRLAFAAADWCLCLHGWPIMPPLVGIFAFTIDRFLEHHHRLAVVAADWCPRLYGWVITPPLLGVVFFTDRPPHPPSTGVFAYTVGWSHHRCXASTSSPTEPSPPPTGVSACTAGLLCRRXCWASTSSPTGLPSPPSIGVSACTAGLLCRRCXASTSSPTGLPSPPLTGVSACTAGLLCRRCWVSTSSPTDRLVRRXDWCFRLHGWPIMPPLLGVYVFTDRPPRPPLTGISACMASLLCRRCWASTSSPTGSLVRRRLVFPXLHGWPVMMPTDAIFFTAGYPPRLRVFVTIDGHHHHHQXLPSPPPIAIADWCFYLHDYASSPPVCLCCLRLVFTSSXLCNFVIMVERLHFYYLRHRQTLLPLLRKFCYFTNHDVYKSFNISACVTKYDTVLFYYNKWCSNLQYFYSDIFDMHLHSSNDYSTTRSYNSRLYVKLFPN

SEQ ID NO: 169861 - protein, 72 aa, Oryza sativa
  Clone ID: PAT_MRT4530_68241C.1.pep
MASRAKRMEEPRLSTLTTSCLRSARAKAVWKFRHWPALRKVTTHISIQQPIILMTFLDLMRDSPFFHTRLAI

SEQ ID NO: 169862 - protein, 415 aa, Oryza sativa
  unsure (1)..(415): unsure at all Xaa locations
  Clone ID: PAT_MRT4530_68242C.1.pep
MLGEHAGRTMLKFYSSRIQFDFRHHLFKIINQIHALSSEVRATGKCTRANCLRRRRLVYPPTQLVGHTIIVGRLNLHRRLAFAAADWCFCLHGWPIMLPLLGVYDFTTGLPPSPPTGVLAYTVGWSHHRSWASSSSPXPACLCRRRLVFLPALLAYYAAVVGRLHLHRRLAFAAADWCFYLHGWPIMPPLLGVYDFTTGLPPSPPTGVLAYTVGWSYHRSWASSSSPTGLPLPPSTGVSTCTVGLLCRRCWASTSSPLACLRRRRLVSLPTQLAYYAVVIGHLRLHXRPASVAADWCPRLYGWLVTPPFMGVHVFTDRLAFAAADWCLCQHGWPIMLPLLDVYVFTDRLAFAAADWCLCQHGRPIMPSLVSIFAFTVDRLRRRRLVSSLLLMDDFVPTLATSAITKGNITKLSHH

SEQ ID NO: 169863 - protein, 881 aa, Oryza sativa
  unsure (1)..(881): unsure at all Xaa locations
  Clone ID: PAT_MRT4530_68243C.1.pep
AAARRSPPARAPPGPSLFVSPWRGPASAIARCAQVSDKREARASVCGSLPYHRSTRRSRLPAGPLSLTGGAHLSSPSSRRARRRARALAPPPPRIAPHPAVPARIKERGITPRDSLSRFPPRRRIRARAVLRSLRHRRRAPFRRRRRSGPPPDSASPPSSSPSGCRPRPPLRFARRPPEHRRHRHPEPRRRLLPLRPPCLRRRRLVYPPTQLVGHTIIVGRLNLHRRLAFAAADWCFCLHGWPIMLPLLGVYDFTTGLPPSPPTGVLAYTVGWSHHRSWASSSSPXPACLCRRRLVFLPALLAYYAAVVGRLHLHRRLAFAAADWCFYLHGWPIMPPLLGVYDFTTGLPPSPPTGVLAYTVGWSYHRSWASSSSPTGLPLPPSTGVSTCTVGLLCRRCWASTSSPXGLPSPPSTGVSAYAAGLXYAVVIGHLRLHHXACLRRRRLVSSPIRLVXTPPFMGVHVFTDRLAFAAADWCLCQHGWPIMLPLLDVYVFTDRLAFAAADWCLCQHGRPIMPSLVSIFAFTXSTAFVVADWCLHCYXMDDFVPTLATSAITKGNITPAHNRGHGYSNSFTLIREHNXACHRRRRLVSSPIRLGGHTAVVGRLCLHRLAASSATNWCFRLYGWLVTPLLLGVYVFTXRLAFATADWCLRLHGWPIMPPLXDVYIFSNRPPRMTPTVAIVFTAGHVAATANRRHHLQRKLSTSAADWFLHFHGCKILPMLIGLIVFTAVPLPLRLVYTATTTDGRHRFHCXAALSDTDWLVHFHGCAPSSSLTGVIVMIVLPSPTGYAAADLVERLHLHYLRNRQTLLPQLRKFCYFTNHDVYKIFDISAHTSRFDAVIFYYNKWFSNFQEFXSDIFNTYLHSSKVYSTTSYSSRLYHL

SEQ ID NO: 169864 - protein, 57 aa, Oryza sativa
  Clone ID: PAT_MRT4530_68244C.1.pep
MGVWDWRRAVTGTEKTIFCDDDEVARDGCSGSNGGHPTRRSGCATVAAATPCADLAA

SEQ ID NO: 169865 - protein, 448 aa, Oryza sativa
  unsure (1)..(448): unsure at all Xaa locations
  Clone ID: PAT_MRT4530_68245C.1.pep
MALGQGRVARHDGRRGLGHRDMNPRWGIGGNRDDDGWEDAAAAASAQLAALSPRELQLVLVYFAQEGRDAYCALEVFDWLRRANRVDGETMELMAAIACGWIERLVGGGGDVXTSPRCLKLCKRLSEADLIGPVRHISIRAQVQTMDDAHAVSLSGSEVTYAHVKLELQMLLRALVKETLEDSDWEGEAAXYIFTVPCIFLAEKELDSSCSSSSELFVGRDYESTYRICKSSVLPSPVGGETRTIVGVGYRTRDCRSMYTLPFGPSNCIVLVYMGKEKGTNLNDKKKEKNAYKGEVAAVRRLLAGVESTSAGRRKKSLSWLLRGYVKGGFYLEASETLMKMLDMGLYPEYLDRAAVLTALRRNIQESGSLESYMKLCKRLSETDLIGPCVIYLYLELQMLLRALVKETLEDSDWEGEAAGFFILKKNEAYCLLKLNLEDEAEHTPSIR

SEQ ID NO: 169866 - protein, 575 aa, Oryza sativa
  Clone ID: PAT_MRT4530_68246C.1.pep
MAAGPRAAARLVVDRAHGREDGGRVRLTGLARSKPRWRRRGAYVAATRAGGRRKKGRPRWTADDGSFTGTPCDGEGDGEHIRTTRRTRKSEPTAQIRQRAASGGESRRRQPAASKGGNDDETTRVRFVGDGASLGLRELVPGVGWGRAAPWKSGDERRPPGAGADGGKLTASSADAWAVSRHIREGKQGGVKEGTQMGIRNSFWGTKHGLNVMKNDLPNGVRERIFLIFSVTMKTHERAANLALAGLSLAPLVVKVNPNANVILTACLAVYVGCYRSVKPTPPAETMSKEHAMRFPLVGSAMLLSLFLLFKFLSKDLVNTVLTAYFFILGIAALCATLLPSIKRFLPKEWNDNAIVWRAPLFHSLSVEFTRSQVVASIPGFFFCIWYAAKKHWLANNVLGISFCIQGIEMLSLGSFKTGAILLSGLFFYDIFWVFFTPVMVSVAKSFDAPIKLLFPTGDAARPFSMLGLGDIVIPGIFVALALRFDVSRGIKNRYFNSAFLGYTVGLTVTIIVMNWFQAAQPALLYIVPGVIGFVAVHCLWNGEVKPLLEYNESKAEEEEACEEDTDSKQNKKKE

SEQ ID NO: 169867 - protein, 64 aa, Oryza sativa
  Clone ID: PAT_MRT4530_68247C.1.pep
KASKTTESTLANTLHASLKPQSTQNPCWKFSLHTNDYKRDKCHIAGLASNHGDHQPPDLVYAVL

SEQ ID NO: 169868 - protein, 50 aa, Oryza sativa
  Clone ID: PAT_MRT4530_68248C.1.pep
LEQLGMMPNSELWATSSPTPASVVRINTLRSSSLHTLRWTPPPPKALFSR

SEQ ID NO: 169869 - protein, 65 aa, Oryza sativa
  unsure (1)..(65): unsure at all Xaa locations
  Clone ID: PAT_MRT4530_68249C.1.pep
RGKLAKGEEKHHHHQNHHKKDNETTTREDSHGEGDYTHKTATTEXTRPAQDKNQRPKNEDKHLKH

SEQ ID NO: 169870 - protein, 485 aa, Oryza sativa
  Clone ID: PAT_MRT4530_6824C.1.pep
SKEDSSAQALNKIKLDQENRVHTLRKEVDHSIKMAELIEYNLEDVDAAIVAVRVSLANGMSWDALARMIKEEKKAGNPVAGLIDKLSFERNCITLLLSNNLDDMDEEEKTAPVEKVEVDLSLSAHANARRWYELKKKQESKQEKTVTAHEKAFKAAEKKTRLQLAQEKTVAAITHMRKVHWFEKFNWFISSENYLIISGRDAQQNELIVKRYMSKGDLYVHAELHGASSTIIKNHKPDNPIPPLTLNQAGSFTVCHSKAWDSKIVTSAWWVYPYQVSKTAPTGEYLTVGSFMIRGKKNFLPPHPLVMGFGILFRLDESSLASHLNERRVRGEDEEALPDVESQKLESNAELDGELDSDSETGKEKHDDESSLDNINVKKIDNPIPSNAPYVKDNADSSEQLSEIRTVVNSTTSTSKGQTSDRTVSSQLEDLLDKNLGLGPTKVLGRSSLLSSNSASVADDIDDLDTKKTSVRDKPYISKADRRKL

SEQ ID NO: 169871 - protein, 169 aa, Oryza sativa
  unsure (1)..(169): unsure at all Xaa locations
  Clone ID: PAT_MRT4530_68250C.1.pep
MPKRILCSYGVDVDAVAGWLGSYGGEDSPSDISRGLFAGTHGTRRMLKLFDKYNIKATWFIPGHSLETFPEECAMVRDAGHEIGLHGYSHENPSDMTLEQQRDVLDKTHKMLTEFCGNXLRGWSPPWWETSRXGXDLMLSYGIEYDHSMSHDDWHMYYLRQGDSWTKID

SEQ ID NO: 169872 - protein, 34 aa, Oryza sativa
  Clone ID: PAT_MRT4530_68251C.1.pep
KKLSMSSARSIVCSSCLNSQLTRPPMEATHAVFR

SEQ ID NO: 169873 - protein, 54 aa, Oryza sativa
  Clone ID: PAT_MRT4530_68252C.1.pep
TGGSLWKGGSKHNGWSRTPNSLRKTSLEGLIHSTRCSWCTQGTKGFLRSPMVGG

SEQ ID NO: 169874 - protein, 98 aa, Oryza sativa
  Clone ID: PAT_MRT4530_68253C.1.pep
MQTNGTYTTRGGVRRRRPPGNGMCGQVAVPANPHKRMRQAALVDGRASPSRVEESSGGGWAALPRTRAATAGPFMRLDAQRSITQADSTNSKQSKSLS

SEQ ID NO: 169875 - protein, 63 aa, Oryza sativa
  Clone ID: PAT_MRT4530_68254C.1.pep
PKTGAFFGAPPGVGGVIPSKKRDPKPTLFLNWNYGETLFNFPPYRGNPPFHKRHFSRRGNFYV

SEQ ID NO: 169876 - protein, 57 aa, Oryza sativa
  unsure (1)..(57): unsure at all Xaa locations
  Clone ID: PAT_MRT4530_68255C.1.pep
MLFFRFLEYLIDFXFFYSFIDLFLLFFNIDSFFFYILFFDFSVITKFFFLYFILFFF

SEQ ID NO: 169877 - protein, 45 aa, Oryza sativa
  Clone ID: PAT_MRT4530_68256C.1.pep
FCFSRSMLNEHLVKRKLESDKSDRQPALQILTQQKPAIKNCKLFF

SEQ ID NO: 169878 - protein, 103 aa, Oryza sativa
  unsure (1)..(103): unsure at all Xaa locations
  Clone ID: PAT_MRT4530_68257C.1.pep
MDHGVSCLQLVIESERHQHQVTVVDSMVAHSMTCRPMKGWLPVSQTMLKRYXAKNDQTELETCYQDDLAVDKEALDLYAGGADVIHSDEAALRESVPLTKVYH

SEQ ID NO: 169879 - protein, 279 aa, Oryza sativa
  unsure (1)..(279): unsure at all Xaa locations
  Clone ID: PAT_MRT4530_68258C.1.pep
EPFGLRQGDPLSPYLLLCAEGFSAILLKAKNEERVGGVKICQGAPCISHLLXADDSLIVIRANGKDATQLQGTPQLYELPSGQMINNDESAVIFSKNTRDQKRSEVMQMLHITKETQNEKYLGLPMXIRKSRAEALEYLKDKTGKQXQVKEIMIKAAQAIPIYAMAYFDLTKGLCDQISTLICRYWWIQQEKEKKXHWISWDNLKKSKKQDGLGFRDIYARILKAXIQALCARILKARYFPTADILSAHLIGNMSYTXRSIVKGVELLKEGIIWRVGNG

SEQ ID NO: 169880 - protein, 254 aa, Oryza sativa
  unsure (1)..(254): unsure at all Xaa locations
  Clone ID: PAT_MRT4530_68259C.1.pep
KYTVDLAQPLREPFGLRQGDPLSPYLLLCAEGFXAVLLKAENEGRIGRVKICPGAPSISHLLXADDSLILIRANGEDAMQLQGILQLYELSSGRMIXSAVIFNKNTRDQKRSEVMQTLHITKGTQNEKYLGLPMYIRKSRAEALEYLKXRVWQRIHRXKEIMIKAAQAIPIYTMAYFDLTKXDQISTLISRYWWIQQEKEKKXHWISWDKLKKAKKQDGLGFRDIYAKILAKFLIDLPSLDWMLVTDPNSPMCT

SEQ ID NO: 169881 - protein, 527 aa, Oryza sativa
  unsure (1)..(527): unsure at all Xaa locations
  Clone ID: PAT_MRT4530_6825C.1.pep
MDNTGNKGYGNDGSDDSRTQANGNEKSINETSPELIQIVVNQTNMLATAFQLLQNRNNPAGATNVQVPTVQQQCKLSEFLKTGPPTFAMAVDPMEASDWLRTVEKKLGLIQCTDQERVGFATHQLVEPASEWWDSYEASRPEGHTITWNEFSSVFKRSHVPAGMITLRKREFRYLKQGDLTVTEYLHEFYRLAHYAPEDVETDEDKQEKFLQGLKDELAVQLLLEDYEDFEKLVDKAMQLESEHNRMTNCKRRIVNIPVFPGGNQRQRTEPLQITGSSVAHQEFPPQEDGRNADNNTSNTNDDDTTNNHGSCPISDHSNKACHVSSIHQDVNDSINDGTQNDNPSNWDSGKDSNGDSNNGTTDANVSKDSQPPIPTPSQNDRPQMDSSVKKTLICYNCKEPGHFSRDCPQPKRNLRHHSGHYARRRQVTRLVVTGANAVPVSLKGSKPKDLIVTRSIHNSRSEEYLVDKVDAKDMNYEKXSGTEVPSSSATIQSKSARGATREKSGEEKIPSITGDRAKQSRVEKFC

SEQ ID NO: 169882 - protein, 98 aa, Oryza sativa
  Clone ID: PAT_MRT4530_68260C.1.pep
MWAYGMTAHVQPRQSLVPYAALRRFAERSPIRWPSFIPSRYPAPRLALKSACVVCSAARVAVCRVRDGGGGGSRPRITASVQGFTHMPRPVIGWYSYL

SEQ ID NO: 169883 - protein, 88 aa, Oryza sativa
  Clone ID: PAT_MRT4530_68261C.1.pep
NGLNKPPIPCLHRALDASYKPYGSSCGEAYWVFAIHEGGFMLQHGAIFSVDPRYQPNWWLTGAHSTEKLPRFAESGLPHVCTLWRSLE

SEQ ID NO: 169884 - protein, 203 aa, Oryza sativa
  Clone ID: PAT_MRT4530_68262C.1.pep
MFSMDGDFGPLLELIKLHRMYGLLLVMDVPWTVGDHCDVGVIGLTKCSDNLGLQPQVKGKCTNLATKATPTRIAIDGDRCSIDPSSPVCYSHFTATIMSSAVFASMRLNATNQSYLAVTKENLADTSFCHQIKLTAELKSYIKEIADCLEESNKFYVVRMNRTFMEQDRVYFATEFSKKYIVNLVRGKTANIRVQIAGRPSTT

SEQ ID NO: 169885 - protein, 448 aa, Oryza sativa
  Clone ID: PAT_MRT4530_68263C.1.pep
MSSCSAVSSPETANYYGADHDMVAREDDVDYAALADIDAFFQSPKCMDYSMMDPCSTFFSPAPESLAAEWEDEASHPNPRGRDTLAFALLVSFLPSAAAAAAARAMGYTKEQLLARLQELNIEFSCYDHPVVLTVEEQAKHVGHLGGALSKNLLLKDKKHRLYVVSALAGTKVDMKILSQRLGLGKGGLRMAPEENLLEVLQVPLGCVTPFALLNESASFFHGYAIAFLTDSYNCVFASSAVSLLLDQGFKSKQSCYFHPLTNDVTIALSSSNLDKFLMSIGRQPAYVDLEASPVVGKDNPPDLADFVPSGVPNSAEPIEKVTPTNVPRQNDVPKEKTCLPEVKAKPKVQNKGAEKTQSKIPTNGANVEKFVNDVFDIMSPLFLSEVSKKLNVKQEELSSIFDGFKEQATIDLESVTTSLKNAAYTAGFEAGFETMLNSGLKGQASRK

SEQ ID NO: 169886 - protein, 135 aa, Oryza sativa
  unsure (1)..(135): unsure at all Xaa locations
  Clone ID: PAT_MRT4530_68264C.1.pep
HRQAGRRKKGHPKPTGRGXXXTNXXRRKRTQXXKNPXXRKKXXXQXKARXXKXXXTTXXPXXXEXHRXXXDXQNXXXAXGXRXKGPKTXXXXXXKKXKHKXRRTXKKKKKKKKKKKKKKKKKKKKKKKKKKKKGG

SEQ ID NO: 169887 - protein, 336 aa, Oryza sativa
  Clone ID: PAT_MRT4530_68265C.1.pep
MLCGPGGSAAPALKHKALQAEALGTDNAMADVAVVGNASQLDHPCMPFSLEVYVVNRESTKTARLPRDRYPKPLIFHDGRLAFLPTPSAALAFFLFLPLGVILSVIRISIGILLPYKISFGAGALFGVRYRTSGLRAPEPGVKRRGVLYVCTHRTLVDPIMLTAALQKPVPAVTYSLSRLSEVIAPIKTVRLTRDRERDAETMSRLLEHGDLAVCPEGTTCREPYLLRFSPLFAELADDMEPVALDAQVTTLYGTTASGHKWLDPVVFFANPQPAYRVDFLGAVPREWTRAGGRAGAEVANWVQRRLGEALGYECTGLTRRDKYMMLAGNDGVVAK

SEQ ID NO: 169888 - protein, 52 aa, Oryza sativa
  Clone ID: PAT_MRT4530_68266C.1.pep
IFSAWDQEGHTWIGSIHGGCQVYLQGAQQSTPNQLQGFFYSIDRSNFHRSNT

SEQ ID NO: 169889 - protein, 66 aa, Oryza sativa
  Clone ID: PAT_MRT4530_68267C.1.pep
TAVRKGPLCGPVSCYNSCEKRDVRIERGFVIISRKAGQYIAAKRLLAIYLLSYSLSASRPKRSLPH

SEQ ID NO: 169890 - protein, 116 aa, Oryza sativa
  unsure (1)..(116): unsure at all Xaa locations
  Clone ID: PAT_MRT4530_68268C.1.pep
FPSAPDKNGYGYLSDRIILGXFGYEYGYFLPDTNTDMVSGFPSDTDYNSDIRKIGFHIRVRSYSILIRFRDNPYSFSYLVKKMKMKMPWLGQLHFVIISVATGEEHFTYASPIALS

SEQ ID NO: 169891 - protein, 143 aa, Oryza sativa
  Clone ID: PAT_MRT4530_68269C.1.pep
PGCRIRHEDSSSSSPARGGGGGDWLVLSPATAPPSLHGDLLPAKHCLSRSLSSPPTFYWTCAARGDLPIWAWIGLFLLVTNLKLARICSEQYHGGETNGCFACCPSWWGSSICEDWCGDESCRRCEGWCSGCSNDSCSNSCCI

SEQ ID NO: 169892 - protein, 856 aa, Oryza sativa
  Clone ID: PAT_MRT4530_6826C.1.pep
MDILSLGLPKLSTELSDDDIRETAYEVLLASLFVSGKILFSEEKKEKKPKFLKGLRSKTEVSNPSPQPENHYSQLLDLIRVQMEARQMFSKNYFSSQDRVSMDWVVSVPDGPVEVLTIIERYNAKLCEAPKKFNLKGETYHWIQSYHLNFRLYEKLLCIVFDILEDGQLVEEADEILETVKLTWTILGITQKLHDTLFAWVLFKKFAETGEILLLKHTCLQTQKLRLHNDAKEIELYTNSFVCSAEACGGNMALSLVDSAILKINKWCFRQLENYHSYFNKVDNSIFEGMLNLVVISETSRTDDDDDDEKAMLIGTPLDATQESKLIHILVVRSIQAAYKHELFLERMDNSESLKEILAATNNFELCVAKKLYLMNEGAVGSLLSKYLKPYMISQFSSPLILQWLHVQHENVLEWTKRTIEIEDWEPLSAHERHATSVVEVFRIVEETIEQFFNSSLPLDTVHLRSLLIGITSSLQVYLHHMENQQGLTMDVKSGIISQQVNQVSNLLVGIDSIVPRATLLPSAPVLTRYAESVNPFAKRKLIVPTVPEEKVANKLNNLTVPKLCAKLNTLQFIRDQLDNIEEGIKQSWVSVQSAVGLLDYLSCIASGRTLPKNLSSEESIDELFTIFDDVRRTALYIHHWKSKGTRAVFWDMRDSLLFSLYRASVESARMEMFIPTIDQVLDQVCDLIVDALRDQVVLRVFQACMEGLIWILLDGGPSRAFLETDVDLMHQDLAMIKDLFIAEGQGLPLDLVEKEARLTHQILDLFVLKKEKFCSSQLNENDFQADTIIDMLINQYYMVVPNGCRDENYDDISTKNAPSKAPMFSDMLKSTSFNWSETGQQSFRVMKKKLQDTWQ

SEQ ID NO: 169893 - protein, 59 aa, Oryza sativa
  Clone ID: PAT_MRT4530_68270C.1.pep
ESWHACMCWYAIAGSTYAFGLSQDHQIHLNGSSSNVLHESFSTMRVMDNNDNPNLAYTY

SEQ ID NO: 169894 - protein, 564 aa, Oryza sativa
  Clone ID: PAT_MRT4530_68271C.1.pep
MQPDAAATAHPSLSFYSAATGLYSSLHPPLPLPSDPSLSLVPHLFSHLPLHHHSLLVDAPTAATLSCADFRRLVSSLAAGLRRRLHIARGSLVLLLLPNSLTFPVAFLAVLATGAVATTMNPSSAPAEIAARLRDTAPSLVLASTHNAAKLPPLAAPLVLVPDTFQQQHDDDQFDFFFHALLETDPETPVEMGVGVGQDDAAAVLYSSGTSGRSKGVVVTHRNLIAMVELFVRFEASQYTRPARDNVYLAALPMFHVYGLSLFAVGLLSLGCTVVVMRRFNVDDAVKAIRKYKVTHLPLVPPIMSALLRANPPLELDSLLQVSSGAAPLNHTLIHHFLHAFPHVDFIQGYGMTESTAVGTRGFNTCKHKKYASVGLLAPNMHAKIVHLESGSCLPPGSYGELWLHGPAIMKEFCFVTGYLNDDDDAFTRKDGWLRTGDIAYFDSDGYLFIVGRLKDTIKYKGFQIAPADLEAVLIRHPEIIDVAVTSDEDEEAGEIPVAFVVRKSGSTLSCTHVMEYVAKQVASYKRVRKVIFVEAIPKSAAGKVLRRLLKDSLVDASSGRSRL

SEQ ID NO: 169895 - protein, 1004 aa, Oryza sativa
  Clone ID: PAT_MRT4530_68272C.1.pep
MAPSNSYDDAMKPERFNGAAARMMYWLTALDLFSVITDQEPQPGEFFPGAIPYADFYQTRNFNCVGRILSMLSDKFYDIYMHHTSARVLWETLEKKYSVPDAGKDLYLVEKYHDFKMTNGKSMVEQTQELQLLVGELNHSKIALPDKFQVGMVIAKLPPSWRDFATALKHRREEMTMDDLVASLDVEEKARAKDAPLVNEDYNSRVNLTDTHQRRNKKNPKENNSGMKPRGKIDKGNGKKNGKGPMSCFECGKPGHFARNCRYKKRNEKVQKDKSDDQTDAKVNMVIDEAEVARTKDEAFEHFKIFKAEAENQLDLKIKILRSDRGGEYLSIEFSKFHQEHGIIHETTPPYSPQSNGVVERKNRTLTDLVNAMLSNSGLPNNMWGEALYTACFVLNRVPAKGTEVNIPVVKKRKLGPKTVDCVFIGYAQNSPAYRFLVVKSETTEVRENTVMESCDATFFEDTFPLKVKSPSSEPISVEPRISILSDDSLNLRRSKRSRTEKMFGEDFIIYLVNDVPSTLSEAFASAEAAYWKEAVQSEMDSILSNDTWEITHLPQGCRAIGCKWIFKKKLKPDGTIDKFKARLVAKGYTQRQGEDYFDTFSPVARMPTIRALVALAAAYGYKIHQMDVKTAFLNGELEEEIYMQQPDGFVIPGQEDKVCKLEKSLYGLKQAPMQWHEKFDKTLISAGFTVNDADKCVYSRFDGDIDLGEAKVILNIKIQEKDKGFELNQSHYVEKLLHRFGHFNSKSAATPYDPCLKLHKNQGHGLDQVKFAQIIGSLMYLANTTRPNISYAVSRLSRYSSKPDSNHWHALECVLRYLKGTINQGLFYSGFPAVLEGYSDANWITYSNEMKSTSGFVFTLGGAAISWKSAKQTILTRSTMEAELVALETACCEAEWLRELLMDIPIVEKPIPAVLLYCDNQAVIAKVTSKKENMKSSRHVKRRLKSVRDLRNTGVVTFDYIKTEKNLADPFTKGLARKPILELSKGMGLRPANELLTVATQPV

SEQ ID NO: 169896 - protein, 68 aa, Oryza sativa
  unsure (1)..(68): unsure at all Xaa locations
  Clone ID: PAT_MRT4530_68273C.1.pep
RQGYIGGGKNRPPPGRQGGHLQISMPPLAAHLQAAPRTVXNRPNGGRQGGRLQISLMAVARERTVVCH

SEQ ID NO: 169897 - protein, 141 aa, Oryza sativa
  Clone ID: PAT_MRT4530_68274C.1.pep
MARRGGRRARVVGWPPVRAFRKNALAALAAASSSKAKFVKVAVDGAPYLRKVDLEAYRGYDQLLAALQDKFFSHFTIRKLGNEEMKLVDAVSGNEYVPTYEDKDGDWMLVGDVPWKMFVETCQRLRLMKSSEAVNLAPRSA

SEQ ID NO: 169898 - protein, 1029 aa, Oryza sativa
  Clone ID: PAT_MRT4530_68275C.1.pep
MAPSNSYDDAMKPERFNGAAARMMYWLTALDLFSVITDQEPQPGEFFPGAIPYADFYQTRNFNCVGRILSMLSDKFYDIYMHHTSARVLWETLEKKYSVPDAGKDLYLVEKYHDFKMTNGKSMVEQTQELQLLVGELNHSKIALPDKFQVGMVIAKLPPSWRDFATALKHRREEMTMDDLVASLDVEEKARAKDAPLVNEDYNSRVNLTDTHQRRNKKNPKENNSGMKPRGKIDKGNGKKNGKGPMSCFECGKPGHFARNCRYKKRNEKVQKDKSDDQTDAKVNMVIDEAEVARTKDEAFEHFKIFKAEAENQLDLKIKILRSDRGGEYLSIEFSKFHQEHGIIHETTPPYSPQSNGVVERKNRTLTDLVNAMLSNSGLPNNMWGEALYTACFVLNRVPAKGTEVTPYELWKGRKPNLNFLKVWGCLAKVNIPVVKKRKLGPKTVDCVFIGYAQNSPAYRFLVVKSETTEVRENTVMESCDATFFEDTFPLKVKSPSSEPISVEPRISILSDDSLNLRRSKRSRTEKMFGEDFIIYLVNDVPSTLSEAFASAEAAYWKEAVQSEMDSILSNDTWEITHLPQGCRAIGCKWIFKKKLKPDGTIDKFKARLVAKGYTQRQGEDYFDTFSPVARMPTIRALVALAAAYGYKIHQMDVKTAFLNGELEEEIYMQQPDGFVIPGQEDKVCKLEKSLYGLKQAPMQWHEKFDKTLISAGFTVNDADKCVYSRFDGDIDLGEAKVILNIKIQEKDKGFELNQSHYVEKLLHRFGHFNSKSAATPYDPCLKLHKNQGHGLDQVKFAQIIGSLMYLANTTRPNISYAVSRLSRYSSKPDSNHWHALECVLRYLKGTINQGLFYSGFPAVLEGYSDANWITYSNEMKSTSGFVFTLGGAAISWKSAKQTILTRSTMEAELVALETACCEAEWLRELLMDIPIVEKPIPAVLLYCDNQAVIAKVTSKKENMKSSRHVKRRLKSVRDLRNTGVVTFDYIKTEKNLADPFTKGLARKPILELSKGMGLRPANELLTVATQPV

SEQ ID NO: 169899 - protein, 210 aa, Oryza sativa
  unsure (1)..(210): unsure at all Xaa locations
  Clone ID: PAT_MRT4530_68276C.1.pep
MSVETERSSTESSAASGLDFEDTALTLRLPGSLAAAAAPDPDRKRSSPSSSDAADAADNSSPLAAAADAPPAPKARVVVGWPPVRSFREDPAGGQVSGWFPWDGVPXLRKVDLDGXTSGYDQLLRALQDKFFSHFTILLXSSPYAGSSPDDERKLVDAVNGTEYVPTYEDKDGDWMLVGDVPWKMFVETCQRLRLMKSSEAVNLAPRAAQ

SEQ ID NO: 169900 - protein, 1191 aa, Oryza sativa
  unsure (1)..(1191): unsure at all Xaa locations
  Clone ID: PAT_MRT4530_68277C.1.pep
MDGGGGHTHARARYLVEKKASCGVTVSMAPSNSYDDAMKPEKFNGNHFERWQTRIMYWLTALDLFSVITDQEPQPGEFFPRAVPYADFYQTRNFNCVGRILSMLSDKFYDIYMHHTSARVLRETLEKKYSVPDAGKDLYLVEKYHDFKMTNGKSVVEQTQELQLLVGELNHSKIALPDKFQVGMVIAKLPPSWRDFATALKHRMEEMTMDDLVASLDVEEKARAKDAPLVNEDDNSRVNLTDTHQRRNKKNPKENNSGMKPRGKIDKGNGKKNGKGPMSCFECGKPGHFARNCRYKKRNEKVQKDKSDDQTDAKVNMVIDEAKVARCVSNMSQKFDKCQPVDWWVDTGATIHEQQGGRSVIGLESKSRVLGSGRVDLKLSSRKVLTLHNVLFVPAAKANLISMNGILTKGGRRYFITFIDDCSKYCYVYLLRTKDEAFEHFKIFKAEAENQLDLKIKILRSDRGGEYLSIEFSKFHQEHGIIHETTPPYSPQSNGVAERKNRTLTNLVNAMLSNSGLPNYMWGEALYTACFVLNRVPAKGTEVTPYELWKGRKPNLNFLKVWGCLAKVNIPVVKKRKLGPKTVDCVFIGYAQNSLAYRFLVVKSETTEVRENTVMESRDTTFFEDTFPLKVKSPSSEPISVEPRISISSDDSLNLRRSKRSRTEKTFGDDFIIYLVDDVPSTLSEAFASAEAAYWKEAVQSEMDSILSNGTWEITHLPQGYRAIGYRAIGCKKLKPDGTIDKFKARLVAKGYTQRQGEDYFDTFSPVAHMPTIRALVALAAAYGYKIHQMDVKTAFLNGELEEEIYMQQPDGFVIPGQEDKVCKLEKSLYGLKQAPMQWHEKFDKTLISAGFTVNDADKCVYSRFDGDIGVILCLYVDDILILGTNLNIISEIKSYLSNKFDMKDLGEAKVILNIKIQKXDKGFELNQSHYVEKLLHRFGHFNSKSAATPYDPCLKLHKNQGQGLDQVKFAQIIGSLMYLANTTRPDISYAVSRLSRYSSKPDSNHWHALERVLRYLKGTMNQGLFYSGFPAVLEGYSDANWITDSDEMKSTSGFVFTLSGAAISWKSAKQTILTRSTMEVKLVALETACCEAEWLRELLMDIPIVEKPIPVVLLYCDNQAVIAKVTSKKENMKSSRHMKRRLKSVRDLRNTGVVTFDYIKTEKNLADPFTKGLARKPILELSKGMGLRPA

SEQ ID NO: 169901 - protein, 150 aa, Oryza sativa
  Clone ID: PAT_MRT4530_68278C.1.pep
MAMPTTTGVDPFLADLSRSPHPGHRALPPVPGKDEDGGSCNRGRRPEQSGTMVAATTEDGAAAGVIAARGHSGGTAAGDGLMNKVAQLMDGVDGARSGKETETQITSRNSVAFFHVSGKARTLAAAAAAHCIDRLQAELDMGQRIKGEYA

SEQ ID NO: 169902 - protein, 476 aa, Oryza sativa
  Clone ID: PAT_MRT4530_68279C.1.pep
MLLAIVPLSIASILKEESDKIEGGMAGNMLHLIVEACIARNLVDTSVYFWPSYVVPVKDASAVEESPWSALMEGSPLMGLKDALMVTPASSLAELEKLQPFAVSGSDEEKLAASKILCGASLLRGWNIQEHVIQMVLKLLSTLLPLDSGSDGFYIHHMPMLHALISGISSIDVVHILSMYGLVPELAAILMPLCEIFGSLPSSDHRNCSFEEASVYSVFSCAFLCLLRLWKFHRPPVEYALSKHGVFVCSEISLDFLLLLRNSHFALNSPYDVSRKSIFQLDPSFQKPVYIDSFPKLRAWYFQNQACIASTLSSSYKRKSILQVANKILKIVCHKMSKSGIPPVSSQSTSSSSMSGSSLGTQDDVSQGPPATAWEVLEAVPFVLETVLAACAHGRLSSRDLITGLRNLADFLPASVAVIVSYFSAEITRGLWKPVMLNGTDWPSPAATLLEVESDIEKALASAGVHINISPRILAL

SEQ ID NO: 169903 - protein, 306 aa, Oryza sativa
  Clone ID: PAT_MRT4530_6827C.1.pep
MDREGVRSKGRRGRGRPCRCDAGGGDGDVGRCTGTAKGAAGVGADETEGEAARATAFRRNTGDAVAWPGKRMAFRCRERWWQRRPAHRGRGRGGRRRNSGGNATVAGGDARPEVFAGNRGHAGEEEVAATLEEATARPAGVLIRRQGRLKTAGGTGERGRRRGGNDFYFGMNLSGRDTMDTQDVAMIEADWREPLIRFLTKQELPQDKDEAERISRRSRLYIIHETELYKKSPSGILQCCVSLEEGRQLLNDIHSGICGNHAAARTIVGKAYRQGFFWPTAVSDADKIVRTCEGCQFFARQTHLPA

SEQ ID NO: 169904 - protein, 1149 aa, Oryza sativa
  Clone ID: PAT_MRT4530_68280C.1.pep
MGMGTQWVPVTRAGVGMGEFFTRERVWVMKREHFISMGVGMGLVKSIDDALHLSDSYGFQRVDFGHTVILFVLSVIKILTDCILEDCGLPTIDGDGHDISYAIGAEKSMNIDGKGSSFDRKDEHRECLRRKNTIMTLEVVEKITANKNTQVFLRLVYRNTYYAGRPENFNILLQRLQLIGALKSKNFGTAHNLLGSLMMNIRKVVTTGHQLHKGNLLGSIDRGIPEGPFPHLHSRLCMLLAIVPLSIASILKEESDKIEGGMVSVRRGELLSSLQVLGQFFGLLSPPPAVVQSANIAARKALVALSVLKDRNERGHNYSKDISSIKAAGNMLHLIVEACIARNLVDTSVYFWPSYVVPVKDASAVEESPWSALMEGSPLMGLKDALMVTPASSLAELEKLQPFAVSGSDEEKLAASKILCGASLLRGWNIQEHVIQMVLKLLSTLLPLDSGSDGFYIHHMPMLHALISGISSIDVVHILSMYGLVPELAAILMPLCEIFGSLPSSDHRNCSFEEASVYSVFSCAFLCLLRLWKFHRPPVEYALSKHGVFVCSEISLDFLLLLRNSHFALNSPYDVSRKSIFQLDPSFQKPVYIDSFPKLRAWYFQNQACIASTLSSSYKRKSILQVANKILKIVCHKMSKSGIPPVSSQSTSSSSMSGSSLGTQDDVSQGPPATAWEVLEAVPFVLETVLAACAHGRLSSRDLITGFYSVSCILLAYLTLVFNYFSAEITRGLWKPVMLNGTDWPSPAATLLAVESDIEEALASAGVHINISPRIRVVVVPWLYVTGPPIPMLPLPIATLISLSITVKMEEFNHLQGIIDKGVEICATSSSWPSMAIIGAFWAQKVRRWHDYIIQSCSETPFTRDKNAVAQLIRSCFSSFLGPLVDGRSCFVADRGVNRLLGQAHQERSPRFSLSPGLLYTRCCRMFPDNYFVCEEILKVVIERARALANECDSSRPHLLKSGRMTLSSATCSVEQIASLAASMLCHAGGIKLVRLLYEQILPTMLLSAGEARLGSAGPVCSSFEGFALAYVLLVSGASTWGVGETSPVYTSVYTSKRQRVVDRHLEFVANVMQGNIELGCGQVTWRTYVICFVGLLVDFAPTWIPEVKLETLKKLASGLWKWHECDLALSLLERGGPKAISTVVEYIL

SEQ ID NO: 169905 - protein, 694 aa, Oryza sativa
  Clone ID: PAT_MRT4530_68281C.1.pep
MAVEAPWLARKQDSESENEELDWGTMAQIPNLDNAPLNLAALREQSQKDLLNILKSIRGKKCVVIDPKLAGTLSLILQTSLLKEYGAELRLLSAEPLQTECAKILYLVRSELKFMKLIASQIKNDEPKGLQREFFLYFVPRRTVACEKILEEEKVHQKLTLGEYPLYLVPLDEDVICFELDHSLQECLIEGDTSSVWHVAKAIHKLEFAFGVIPNVRAKGVASTKAAELLNSMQQEDPVNMDDMGTPEINTVILLDREVDLVTPMCSQLTYEGLLDEMLQINNGSVEVDATIMGAQQDGFSFSHLWEVFCLPLLGRLTSLAFQVVGSDKLYKEIRDLNFEVVVQVLRQKATSIQQDYAEVKSTNTQSVSELKDFVKRLHSLPEIARHVHLAQHLQSFTGKPSFHARLDIEQTILEVQNFEICFEYIEEMIHKQEPIENVLRLLVLLSLTNAGLPKKNFDYLRREILHSYGFEHMPLLYNLEKAGLFKRQESRSNWIGITRALQLIVDVNDTANPSDISYIFSGYAPLSIRLVQHAVRSGWRSIEELLKLLPGPHLDLKRGSSAINSSLDVHQGLGLQQSIDRLFALSGDEGFMRDLIQTYESKPETGVGHRSLVLVVFIGGVTFAEIAALRFLSSQEGMGYDFLVATTKVVNGNTILRPIITNSKELDLYQKSLKGVLDHDLTINRRFRWKRRA

SEQ ID NO: 169906 - protein, 501 aa, Oryza sativa
  Clone ID: PAT_MRT4530_68282C.1.pep
MEVDGEARPFLLFSKPKSSKKKPKQEAEPQVHTQPEEPPNPSPSPAIEPDLRDSDEAPAAAVTEHAGDDAAAAAVPSTFAELGLSQWLVDVCDSLGMRVPTAVQRRCIPRALEGRDVLGIAETGSGKTAAFALPILHRLGEDPYGVAALALAPTRELAAQLAEQFRALGAPLGLRCLAAIGGFDSLGQAKGLARRPHVVVATPGRIATLINDDPDLAKVFARTKFLVLDEADRVLDINFEEDLRVIFGSLPKKRQTFLFSATISDNLRSLLELSGNNSYFFEAYEGFKTVDTLKQLYIHVPPDAKELYLFYLLSKMNEDNIRSVIVFVSTCRTCQYLDFLLEELGHPAVSLHSHKPQSRRLAALHNFKSSKVPVLLATDVASRGLDIQTVDLVINYDVPRYPRDYIHRVGRTARATRGGLSISFITTQRDIRLLHEIEDVVGKQLGAYDGEMRDVNKDATKVFKARRLANMKMADEGHEDKVQARKEQKKRAQERKRKHDE

SEQ ID NO: 169907 - protein, 66 aa, Oryza sativa
  Clone ID: PAT_MRT4530_68283C.1.pep
KMSAPNSLLHRLSNHLNKVHVMRLNTEICEKSKMSKMHDLCTGDRYWSKMNLDKRISILSLFIWEL

SEQ ID NO: 169908 - protein, 46 aa, Oryza sativa
  Clone ID: PAT_MRT4530_68284C.1.pep
IDSLPASLLSSQGTHPSMMIYRQVCKTEGNCFIVAVINLSYGRITD

SEQ ID NO: 169909 - protein, 192 aa, Oryza sativa
  unsure (1)..(192): unsure at all Xaa locations
  Clone ID: PAT_MRT4530_68285C.1.pep
GIRHEGASEIYQKILNLXPDDWESFLHYLGCLLEHDVNLPKSRTSEHPSSLPVDSALALKTSLSDELVESRLASALSFVQKLQVNDTSDCVRGPHLASIEIERQRCRSGNPTDRKFIEALINYFHRFGHLSCAASDVEIYLHMLSSDETTELLDTISRSFDASSLSVKGLGLAITTFKVQELLGNFFSKSTT

SEQ ID NO: 169910 - protein, 78 aa, Oryza sativa
  Clone ID: PAT_MRT4530_68286C.1.pep
YSVQQRWENMANTPDILKKGLISLTVLVVWEIWKERNRRIFDHKEMATSSLLTKIKEEVGLWALAGAKRLREFAPHPV

SEQ ID NO: 169911 - protein, 65 aa, Oryza sativa
  Clone ID: PAT_MRT4530_68287C.1.pep
AGRTCHRLGCAGPWWTESTGQGMGVPRGADVAPTCRPRGRWMDGPDLPSRSSDSRGGARHAAVRL

SEQ ID NO: 169912 - protein, 57 aa, Oryza sativa
  Clone ID: PAT_MRT4530_68288C.1.pep
TVSISGELMRSKQRQRKIFFFMRAFIRRKEWAFFRCKSDSRILPYPQMRIFCALTAV

SEQ ID NO: 169913 - protein, 149 aa, Oryza sativa
  Clone ID: PAT_MRT4530_68289C.1.pep
DSAWQENHCSLAKSLHGISVLPFSPTSSFLGAWHPLLVQLVARTSLCWRSLQFIYILLLMLSTYIMRFSICSSNKFASVCCCWIVLLPPLPLPVLWLVFRRSCSPRSCLSNKRMIVYPRRGKRVSAWQTLNRSRHKAKFIMPIRLSAKI

SEQ ID NO: 169914 - protein, 43 aa, Oryza sativa
  unsure (1)..(43): unsure at all Xaa locations
  Clone ID: PAT_MRT4530_6828C.1.pep
GEPQQXPGMTRVRLTRTRQYAAQLRSMCRVEPPQCSIFAAGQE

SEQ ID NO: 169915 - protein, 74 aa, Oryza sativa
  Clone ID: PAT_MRT4530_68290C.1.pep
SSSTRRRQMTQDGRKSCLSCGRELPFDFSSLDRLPDKTVDQFLVYTASHGTMPIGSLTLFFLQASAAIRSFGLL

SEQ ID NO: 169916 - protein, 110 aa, Oryza sativa
  Clone ID: PAT_MRT4530_68291C.1.pep
KRAQILLLLVILFEFLSFPKKDWGSSPPRGVTDKNPQNFRSHPVGFSPRIREFIVFRRFIFIWFCKPAAQLLSAFVYLVEDSGSNSRLFGGLRARGGGCFEGKRGVGGGG

SEQ ID NO: 169917 - protein, 44 aa, Oryza sativa
  Clone ID: PAT_MRT4530_68292C.1.pep
QGQCRHSHCPNEQCIMHEPFSTWRQGANSKRQCPWRRQYTKTGR

SEQ ID NO: 169918 - protein, 57 aa, Oryza sativa
  Clone ID: PAT_MRT4530_68293C.1.pep
SRGLFFMGVLNLWFLCYMLARLMKHSQRVGGVVQKFYGICFAKVKIYHELCCVKVKK

SEQ ID NO: 169919 - protein, 107 aa, Oryza sativa
  Clone ID: PAT_MRT4530_68294C.1.pep
AAPSPHGNAAVGRSVFTAIAVSVLSVAAAGLKRQYDQQFSEKKLQIKCGAAFGPQCKAAKTAMCNAPRPVRQAGLHHITRTPMLRTKVKSLDPNTTSVARYNKDSYN

SEQ ID NO: 169920 - protein, 81 aa, Oryza sativa
  Clone ID: PAT_MRT4530_68295C.1.pep
PPPPSFLLAPFAGKGFFSRASPSFVLANAFRFSRKGARGLQPSRGDGLGAFPPPPYKGSQDVFFVAESSLVGNADKEYLNK

SEQ ID NO: 169921 - protein, 85 aa, Oryza sativa
  Clone ID: PAT_MRT4530_68296C.1.pep
DAYWSKLYIYPIALLLKLTSFLNSDLNGFLWIDINLGVGQSTGMEKGLYGVLGWMKEATTPTMRIAGLPLADRELPAKMKLDFQQ

SEQ ID NO: 169922 - protein, 99 aa, Oryza sativa
  unsure (1)..(99): unsure at all Xaa locations
  Clone ID: PAT_MRT4530_68297C.1.pep
MAGTCAHAEFFRAQPAWALALAGVRALXXARAALRLALWLYGAVLRLFKPLRRRYGAWAVVSGATDGFGRAMAFRLAASGLGLVLVGRRPVLLSSVSAV

SEQ ID NO: 169923 - protein, 153 aa, Oryza sativa
  Clone ID: PAT_MRT4530_68298C.1.pep
AAIQCLKKKKLYETQIEQLANFQLRVHDQIIMLESAKATTDTVDALRSGSSAVKAIHQSVSIDDIENAIEEANEHTENMRQIQEALATPIGASADFDEDELEAELEDLEEEELENDLPEPPQRTSMEPSARVTTTQPANDLAELTKLQAEMAL

SEQ ID NO: 169924 - protein, 216 aa, Oryza sativa
  Clone ID: PAT_MRT4530_68299C.1.pep
MLKKLLSKPKSKKKEAASSALPTLDSLHETLEMLEKKECFLQKKASAEVERAKDYTKAKNKSAAIQCLKKKKLYETQIEQLANFQLRVHDQIIMLESAKATTDTVDALRSGSSAVKAIHQSVSIDDIENAIEEANEHTENMRQIQEALATPIGASADFDEDELEAELEDLEEEELDHELPEPPQSTRMEPSARVTTSSQPANDLAELTKLQAEMAL

SEQ ID NO: 169925 - protein, 117 aa, Oryza sativa
  unsure (1)..(117): unsure at all Xaa locations
  Clone ID: PAT_MRT4530_6829C.1.pep
LFGAGRAATTPRHRPTPPPNLPLTGPLLSPSSYKNAHHTSLSLFPQLPDLAAPSIALPTPLLTFAARRSPPAARYRRPSHXRAAPFSPSASXSPPTTAPRRSSHRRVVPPPPPASPH

SEQ ID NO: 169926 - protein, 654 aa, Oryza sativa
  Clone ID: PAT_MRT4530_682C.1.pep
MPLLLPPPPTPTPPCASRDPLHAAPRRSRSPSTSRPPSRHRRTASARSTLPAAARDLLADDPTPRAFSALLKAASSSASPPRRPSSLGLGAQLHAQAVVRGFLGGDDSTILATAVLSFYASCREPDLARKVFDGMPRRNAVTWNALIKGYAQAGRREEAILLFRDMKREGSHVAPDRYTFPALLSGIGREGGSGRTLELGGALHAHVIKAGLERDPFVGASLVSLYAARRTLEDAKVAFDQVGSSDPIVWSSMISAYVNCEEEEGALLIFFNMLCQDIKPTQFVYSTVFSVCGRMGILEMGKQVHAHSLKSNTEKDAAMFNALLTMYSDCGCINDAQKVFSSNDCVNVISYNSMISALGQHGYPKEALEHFRQMKFAGLMPDEVTLLNLISSFNHAGLVHEGLQMFNSMVDIEGIKPMYQHYACVVDMLARSGEIGKAMKTINEMPFEAEAPLWRIVLGACSKHRDIETGKRIAEMLFEMEPYEATNYILLGNIYARLGRWTEAEKVRSLMGERGVYKDDAFSWIEMGQRTYRFGVDDRSHPISREIYRNLDRLISTIKVAGYVPDISFAAHNIQRDRKEESLYYHCEKLAFAFGDLAAPSGGTLRIMKNLRVCGDCHCAYKYFSLVTGREIILRDNQRFHHFNSGFCSCGDYW

SEQ ID NO: 169927 - protein, 162 aa, Oryza sativa
  unsure (1)..(162): unsure at all Xaa locations
  Clone ID: PAT_MRT4530_68300C.1.pep
LLARRPPTPVSSHSLTGEHPNPSHPASASNFVSSXPPLAPIPILRAEVAPGVLLLPPHRLSPMAELTTAADVTAAPPPPPGPTPPPEPVVTATVVAEQKVSPTAPPLDVPAPAPPPPKKRKVEEAGFHNSAYYKIRATVADLRVRFVQVYEATDFRNSDAAR

SEQ ID NO: 169928 - protein, 166 aa, Oryza sativa
  Clone ID: PAT_MRT4530_68301C.1.pep
FFFFLPQIKYIINYTSQIHTMNHRFSKKKLYISIHTMNHKFFLKKKEMTNIRAGEGIAGRRRRPPIRLPRAIPSACRCHPLRSTATTGSGREEREAAARAFPAQWLSRPPSHRHSRPAAAADPDSERGEDLTGRGRRGEGEEGDRRSGSEECRSDRDERGRCGRRY

SEQ ID NO: 169929 - protein, 145 aa, Oryza sativa
  unsure (1)..(145): unsure at all Xaa locations
  Clone ID: PAT_MRT4530_68302C.1.pep
MRWKQEDAGRHLARRMGIGASGGRGDEIRGRGRMGWIRMLTGVPELRLSSAEAHTRFRHIVFEVNFIYTTLRSHRPRRMRPSPXPLPSFLLAASLLPPXSSGFYLPPPPNDRHPSPCWSSATTHLSRDSVSGFLFVCMHEHSWSQ

SEQ ID NO: 169930 - protein, 207 aa, Oryza sativa
  unsure (1)..(207): unsure at all Xaa locations
  Clone ID: PAT_MRT4530_68303C.1.pep
MAELTTAADVTAAPPPPPGPTPPPEPVVTATVVAEQKVSPTAPPLDVPAPAPPPPKKRKVEEAGFHNSAYYKIRATVADLRVRFVQVYEATDFRNSDAAREILKEIKVVMELAKKMRHDLGATFEPAKPPEKPLAGVVKDGPVEPPPSAXTITLLRQMGETPRSEIAQGSCVTGGSPIGWNFLVWPGGEVVYYGRTKEVFRAGQAEN

SEQ ID NO: 169931 - protein, 275 aa, Oryza sativa
  Clone ID: PAT_MRT4530_68304C.1.pep
MYGYRLFLLHIEKKIDCTILILSTQQVISASDDAVEARRRTPGATSARRMGIGASGGRGEEIRGRGRGRMGWIRMLTGERMRREQEEDAGATSASRMEIGASGRRGDGSRGAAGEETGRIGEAEVVQRSAAAPPRCRLPMVAPRRAAQKLMSLGVPELRLSSAEAHARFRYIVFEVNSIYTTLRSHRPRCMRPSPRRSPLPSILLAASLLPTHRQAPSSGFYLPPPPNDCHPSPCWSTATTHLSRDSASGFLFACMHEHSWRAILKLGDKIRDLK

SEQ ID NO: 169932 - protein, 171 aa, Oryza sativa
  Clone ID: PAT_MRT4530_68305C.1.pep
MSHNIKKQWESDLVDARYIRELGDDLSIVHLKLGADASKRTAGLFRRRDVVVYERRQTMDDGTLVVAVASLPKEIAAGLLPPGSSSGARGAGLLLQSGWVVEKLDAGDGGDGPPCCVVTYVVQLDPAAGWLPRCFVSRLNSKLVIMIVAKLKKMALATMHSAAADDGEVMP

SEQ ID NO: 169933 - protein, 470 aa, Oryza sativa
  unsure (1)..(470): unsure at all Xaa locations
  Clone ID: PAT_MRT4530_68306C.1.pep
ASRHQSGQDVRTQNVVACQAVANIVKSSLGPVGLDKMLVDDIGDVTITNDGATILRMLEVEHPAGWVLVELAELQDREVGDGTTSVVIIAAELLKRGNDLVRNKIHPTSIISGYRLAMREACNYXLKGHGKSAKDSYLLNGYALNTGRAAQGMPTRVTPARIACLDFNLQKTKMQLGVQVLVTDPRELEKIRQRESDITKERIEKILKAGANVVLTTKGIDDMSLKYFVEAGAIAVRRVRKEDLRHVAKATGATMVSTFADMEGEETFDSSFLGHADEVVEERIADDDVILVKGTKNTSAVSIILRGANDFMLDEIDRSLHDALCIVKRTLESNMVVAGGGAVEAALSVYLENLATTLGSREQLAIAEFAESLLIIPKVLSVNAAKDATELVAKLRAYHHTAQTKADKQHFSSMGLDLSKGIIRNNLEYGVIEPAMSKVKIIQFATEAAITILRIDDMIKLTKEESGNEE

SEQ ID NO: 169934 - protein, 105 aa, Oryza sativa
  unsure (1)..(105): unsure at all Xaa locations
  Clone ID: PAT_MRT4530_68307C.1.pep
SAEPILAPLDAGFGVDVQDCIPMTVGGYFGQFPFHNRHNYLYXKDFTFSLHSHTSSNSSLISLKFSLVVSSWWNRNRVEIRSSEVFGRVRPNRLLPPSLNIRDFG

SEQ ID NO: 169935 - protein, 107 aa, Oryza sativa
  Clone ID: PAT_MRT4530_68308C.1.pep
MAPLEGMTGVYCARMASTQRSESANFMLKSIMPRNSTLNRFIEQFAKLQFDRESDDANAEKANKQKRLWLKPTFPVDGELGESTQYVVTGHVDGVGALRVRPCLVHP

SEQ ID NO: 169936 - protein, 98 aa, Oryza sativa
  Clone ID: PAT_MRT4530_68309C.1.pep
IGSTVALRSHACRCIASLVPQELPLYCHITCHVEASLYALRLHHVLHARIHGAHRYMCGGKYYILVIAELSGARKMLLIASRSTIVLVYAVQCCIGPI

SEQ ID NO: 169937 - protein, 94 aa, Oryza sativa
  unsure (1)..(94): unsure at all Xaa locations
  Clone ID: PAT_MRT4530_6830C.1.pep
GNQVLRHEANPNLKKGKVDPDAPAQLVVDDXDDDGGERRGGGEKPERDVDGDVGGGGDRHRLLRFELHHPRRSINVRTSSSINNDRFSNGPDAW

SEQ ID NO: 169938 - protein, 82 aa, Oryza sativa
  Clone ID: PAT_MRT4530_68310C.1.pep
MRTITARNPHDSLSFCRMHFKRPNLGKSYSHGATRGAEEYMKSSEAREEEDETTMADSCVCPRCHTEDFSSPTKKPPREQHS

SEQ ID NO: 169939 - protein, 104 aa, Oryza sativa
  unsure (1)..(104): unsure at all Xaa locations
  Clone ID: PAT_MRT4530_68311C.1.pep
PGMTVSDLQNLMNEAAILAAXSDLKENIMDEISDXMQRIIAGPENKNAAVSQEMRILVPYHEAVHALVGALMPEYDPLANIHIIPQAQTGVLTFCAPSADRLDP

SEQ ID NO: 169940 - protein, 157 aa, Oryza sativa
  Clone ID: PAT_MRT4530_68312C.1.pep
MEGERSYVTPPPPPPPPPSPTTHVTVIVIVVPIVGVICLGLLAALLFVVFRRRRRARRDEEEEEAKVEEVEDVEVKVTEHVRIVEGVVGEAGVAGVTAGGAIGYGGGGAGGISGGTTAVVAEAVAAGAVVVDDEIKVEEHVVKVTEASARRDHHDHE

SEQ ID NO: 169941 - protein, 95 aa, Oryza sativa
  Clone ID: PAT_MRT4530_68313C.1.pep
SVVDLVVESRWRWNRRQDGGTRRRCFRLCSDNLHKGGIRGGTRGRTRGVKLFSLNLFQSSLIPSKPNKALGKRRGRARGTNTSRCCHSASGLKPM

SEQ ID NO: 169942 - protein, 161 aa, Oryza sativa
  Clone ID: PAT_MRT4530_68314C.1.pep
MEGTRRHLEKDLESWRIIEDVQVKVEAQTKSTSGATRSPGPVCTKTGAQVAYVPGLERSLYGWKSKKITFPMVLVPCSNSFRVNGISLLDEVVSLASKPLPHKAYPLLRLIFFQIQLWGAMCYSGGYGSYVVFGVRGTNIGCAGDFQELQRFSEVYLKHFV

SEQ ID NO: 169943 - protein, 306 aa, Oryza sativa
  Clone ID: PAT_MRT4530_68315C.1.pep
MSTVRYWRRSSVGAGSGSTAADGRHGIASRPHAGASTGVARLRAISSTAVMNCNAPRAEGRCAGGDATDGCRRAVPERRQRKERSRMTAPFRRAWRSSRAFSTSVDCIYLPPLMPSSSSSGAAAVNLAQGHSVTEKLGKAIMHCGKRKLALQLALTNTKKGTMKVAEYVAKMRALGDEMAAAGRPLDEEDMVQYIISGLHEDFSPIVSALCTKSDPITVGELYSQLLNFETLLDLYRNTGQGGPAFVANRGGGRGNKDGARINFNGGSGRGALRARGGGQARGGQGRGTRPWIFHILVLLKNLFRK

SEQ ID NO: 169944 - protein, 72 aa, Oryza sativa
  Clone ID: PAT_MRT4530_68316C.1.pep
MDASKSEECLGDPVGVESESEVKNVATSGGGLLPSSNWYRGYQYRPDSPSASAQQRSETTGTHGPISFIGTA

SEQ ID NO: 169945 - protein, 267 aa, Oryza sativa
  unsure (1)..(267): unsure at all Xaa locations
  Clone ID: PAT_MRT4530_68317C.1.pep
SSSGAAAVNLAQGHSVTEKLGKXNHALWKAQVSAAVRGARLQGYLTGAVKALDAEISVTVDGKTVTKPNPAFEDXEANDQLVLGYLLSSLSRDVLIQVAMCKTAAEAWXAIEELYSSRTRARSVNTRLALTNTKKGTMKVAEYVAKMRALGDEMAAAGRPLDEEDMVQYIISGLDEDFSPIVSALCTKSDPITVGELYSQLLNFETLLDLYRNTGQGGAAFVANRGGGRGNKNGAHNNFNGGSGRGALRGRGGGQARGGQGRGTGPW

SEQ ID NO: 169946 - protein, 38 aa, Oryza sativa
  unsure (1)..(38): unsure at all Xaa locations
  Clone ID: PAT_MRT4530_68318C.1.pep
TCTXLFIYDRXXQXGXLFCXYMSNMKRNLKISXKVVXN

SEQ ID NO: 169947 - protein, 165 aa, Oryza sativa
  Clone ID: PAT_MRT4530_68319C.1.pep
MDAAGSPRRKKKAAAAKKRRGGGDERERGRGRGRDLSPAAPPVGAGGGKDAALAECAAACCVLCACLPLAALCCVARAPVRVARRCWRWRWRRRRPQRRLAPGGSSSFSDAELGDFRPGRPRRAMADQEFRPRGTSPTPSGSRRSPSPAPPHPQQQQPPPHDRRR

SEQ ID NO: 169948 - protein, 411 aa, Oryza sativa
  Clone ID: PAT_MRT4530_6831C.1.pep
MAEKPPASPSSAGELGSVKAKVHKLGLSEVDEANIVLVTMDKLTPEQQKDLEVMMQQARNQFLSSFTKTRKGTLVQKYKVKMTFKEIKVMALKKFKVMVFREFKVEGMIAPIKEKFSSQDFDSLSHLGQKVNGKPMSKMMVDGGAAVNSMPYATFRKLGRNTEDLIKTNMVLKDFGGNPSETKGVLNVELTVGSKTIPTTFFVIDGKGSYSLLLGMDWIHANCCIPSTMHQCLIQWQGDKIEIVPADRKYGLKMNPTKCAFGVSAGQFLGFLVHERGIEITQRSVNAIKKIQSPKNKTELQEMIGKINFVRRLRALAKVTKDKERVARHYNKRVVPKAFSEAVAVSLFLTPPSRADVIIVPCFSSSAAQHPWRRRVYAAAITSQSRAEAGTVPFSFTKEHVSPPTLPSPVN

SEQ ID NO: 169949 - protein, 93 aa, Oryza sativa
  Clone ID: PAT_MRT4530_68320C.1.pep
MELLQAGGAEPRPPGFGSSGSPCRRRHRRRWCSWAARRMGGGRRPQESPAAPVAVAAGSQPLDKLTLTLVASKGLNFVIKDCVNRLLKKNGGG

SEQ ID NO: 169950 - protein, 72 aa, Oryza sativa
  Clone ID: PAT_MRT4530_68321C.1.pep
RPESPASPRHPAQRLTVEVKFLRLSWNLRRRITSRKTKLQQLILQKGIPSRKTKLRCMDISRKGNVLGRHTP

SEQ ID NO: 169951 - protein, 251 aa, Oryza sativa
  unsure (1)..(251): unsure at all Xaa locations
  Clone ID: PAT_MRT4530_68322C.1.pep
LELHRGGRSRTSGSPGLQEVGPGLSSDDIGKIKRRISNILEPGETIIQALKRLKNTSSDKRGKMTEGTKRIFDELTEAAMKLMENGEYNVYSDDRETFEREAAGYERLARARLGLPEAEEDMFADSPKDKTTASLLDMEPGPSAAHTSTTTTTSKEDDSDFDMFGDDDDKTDVKRDSDANAVGSGSNPEQVSHDANETSEGENGSVSSDYVYDPTSGYYYSSITGYYYDSTSXCFCSVSTGAWYSYDAHTC

SEQ ID NO: 169952 - protein, 170 aa, Oryza sativa
  Clone ID: PAT_MRT4530_68323C.1.pep
HYPPLLGLLHPAAAAAGPSRRQLCKPFTSSGKDGAAGAFDLRAAVRSGGMPSTHSAAVVAVATSLGLERGFADSIFGMSVVFAAIVMYDAQGVRREVGNHARVLNNSGTKSSRLNALQSSETEVTEFTQLKEAYTEECDRLSESVGHTELQVAAGALLGFLVTLVVYATL

SEQ ID NO: 169953 - protein, 372 aa, Oryza sativa
  Clone ID: PAT_MRT4530_68324C.1.pep
MPVLPWLAAAATTPVRRSPPLPATPRALLRLPASSFPPWSNCAKSGLPPRGPFATAADTPLGGSLPEPEEERDTLLDGALRAARFRDEESRRPDPLFIDPYAAVLLSLDVASEDKDLLALHLMPSAEHYRLVTRYIDDKLQHFISNSDDLRQIVLLTDGMDTRPYRLSWPRLSVVYDVSPRRVFITASQQLRESPDLQAGLNKNGFNGNRPSLWVLQKWLQTGRNCVVSCFRVGSGCCNYAAHVIDKFDLQERKCEWKSAKGGLPLFTFKSLEDLLLVIGNLAMKGSIFIGEASEQDRLENLFFTQGFRVSFVHYEEVAKDVGLGLDSPPEIHGRAIFIAEQLRFSDAQMESFRMHFERIEDDADEDGFEEL

SEQ ID NO: 169954 - protein, 291 aa, Oryza sativa
  Clone ID: PAT_MRT4530_68325C.1.pep
MAMAQSLLGVPFSRLLPPSSSSSSPPTPTTIPPPPLPSSSWSPPSRRRRRRAVAAASSLHLAPEDIAELVRNKVLIAATAASAVGQLCKPFTSSGKDGAAGAFDLRAAVRSGGMPSTHSAAVVAVATSLGLERGFADSIFGMSVVFAAIVMYDAQGVRREVGNHARVLNKLLTLREKITQNPDDNSLLSSTSELHSSKPETVAELVSVAEKLGSSQGSSANPFPIHSSGTKSSRLNALQSSETEVTEFTQLKEAYTEECDRLSESVGHTELQVAAGALLGFLVTLVVYATL

SEQ ID NO: 169955 - protein, 140 aa, Oryza sativa
  Clone ID: PAT_MRT4530_68326C.1.pep
MIRRVLSPRAVAELCPVACARVRYVQSTVFVFVRGRGRAGSKRTMPWMADLMEFCIMHARARTTGVLDFGGVGNGRDTRCTWAANPSWSVCDLTVVDRLRFVRQQRRDACVLCPWFVSAAPIHKRDGKCWGLGCRGDWTS

SEQ ID NO: 169956 - protein, 96 aa, Oryza sativa
  Clone ID: PAT_MRT4530_68327C.1.pep
MTTQIKIAALHLFGQHTRRMEFIDNEMPSGTAMPTSVEGVALPWPHESLTTPIDTSNTASSLEPRSKPPNYAMGVLNDGCIGVHDSVGVASSSLGR

SEQ ID NO: 169957 - protein, 99 aa, Oryza sativa
  Clone ID: PAT_MRT4530_68328C.1.pep
PGRRLVSARRRPFLQPRRRAGGARLAGPPSSTSSGRCRRSTNNDTNLTGATATATATQSLCMMHGRQLGFSSRDLALARRNNRKRNSEMSLKSSWFAYV

SEQ ID NO: 169958 - protein, 1012 aa, Oryza sativa
  Clone ID: PAT_MRT4530_68329C.1.pep
MQNMTFRINSLSGPIPKESGNLTNLVSLGLGKNRLNGSLPSELGNLYKLQELYIDSAGLSGPLPSSFSKLIKIQEGEREREMDPRLSYCCYLHGCLCVLLLLLLCSWRAADAQAQQPPPHTDPTEAAALNAMMARLGLSAPPSWNISSDPCSGAATDDTPLDDNPAFNPAIKCDCSDHNNTLCHITRLKINTLDVVGPIPEELRNLTHLIKLYIKKNLFTRPIPAFIGDLAALKYNPLAINAWPGPIGIQLGDVTQLESRGLGPNTCNGSLPDELGKLTKLQQLWALDNNFTGQIPDYLGSLTNLTQLRLQGNSFQGPIPRSLYNLVKLRSFVLRNSRISDSLASVDFSKFGSLNLLDLSFNNITGQIPPSIVNLPSLTFLNLVANDFVIDGTDMSGLPWGLNCLQRNTPCFLGSPKSASFAVDCGGSRTISGSDNAMYQADNANLGAASYYVAGTPTWGVSTTGRFMDPPNGSYIIYSSRQFDKTLDSGLFQTARMSPSSLRYYGIGLENGNYTVTLQFAEVDFPDVQSWRSRGRRIFDIYIQVACKLTISLGERKEQNFDIRKAAGGKSFTVVKKQYVVPVTKNFLEIHLFWAGKGTCCIPHQGYYGPAISALSATPIFALAALAGHFIWRQKKRKILLELEELYNIVGRPNVFSYNELRSATENFSSSNLLGEGGYGLVHKGRLSDGRAVPVKQLSQSSNQGKKQFATEIETISRVQHCNLVTLYGCCLESNTPLLVYEYLENGSLDQALFGKGSLNLDWPTRFEICLGLARGMAYLHEESTVRVVHRDIKASNVLLDANLNPKISDFGLAKLYDDKKTHVSTKVAGTFGYLAPEYAMRGHMTEKVDVFAFGVVLLETLAGRPNYENTLEEDKIYIFEWAWELYENSNPLGIVDPNLSEFNREEVLRAIHVALLCTQGSPHKRPPMSKVVSMLTGDADITEDAAKPSYITEWQIKVGSCHHTGSSQVGSASTPPSSGDGGAGQASSQGAGEGSPLTPSPLFTSIIDEGR

SEQ ID NO: 169959 - protein, 1518 aa, Oryza sativa
  Clone ID: PAT_MRT4530_6832C.1.pep
MQTRKGTLVQKYKVKVVADDLGTSSSKGEDGKQAPDGSAQLSDKGATDGSLGSQGDNSQGIHGVQGDGVHRVQGDAAQGLQRGNLNQNSDVAQDFFNNFQDRVDYAVHHALINQSGVLVNTLSNMMKSIADGSIAEHQAVGPVYLQGGVFPNYRPLITDAQPSIQAVSPVAPSCQPTAPASTPLPTPSALAPGQLVNPQLLMREQPQHSGQVVNRPTQDQIQVAIEGGRIKFDDSKKPMRVDDNQFPVNMVHKAGRTADPGRMRGYQVSSARIINKCQRKYDKQQERHHEEDNGGFDPHWGCEFFRFYWNEGMRLPSIEDCPGCSDVAGGSSRLYDGGSWPKQTRVPVHQRLGPVNQRGDSEYDENKKTQWCPPVIFTKNQKRRVQRLRSRERFQEVEQEINHRLKKPKPRQEWSVKNQAPVADDVAADEAKRLAKGKSVVTAPVNMVFTLPAEFRIGQADVDEVEEESAKLVLSPEQAVFEKPEGTENRHLKPLYINGYVNGKPMSKMMVDGGAAVNLMPFATFRKLGRNAEDLIKTNMVLKDFGGNPSETKGVLNVKLTVGIPVIKKNGKVRVCIDFRDLNKATPKDEYPMPVADQLVDAASGNKILSFMDGNAGYNQIFIAEEDIHKTAFRCPGAIGLFEWVVMTFGLKNAGATYQRAMNYIYHDLIGWLVEVYIDDVVVKSKEIKDHIADLRKVFERTRKYGLKMNPTKCAFGVSAGQFLGFLVHERGIEITQRSINTIKKIKPLENKTELQEMIGKINFVRRFISNLSEKLEPFTPLLRLKADQQFTWRAEQQKALDNIKGYLSSPPILIPPQKGIPFRLYLSAGEKSIGSILIQELDGKERVVFYLSSRLLDLETRYSPVEKLCLCLYFSCTRLRHYLLSNECTIICKADVVRYMLSAPILKGRVGKWIFSLTEFDLRYESPKAIKGQAVADFIVEHRDDSIGSVEMVPWTLFFDGSVCTHGYGIGLVIISPRRACFEFAYTITPYATNNQAEYEAELKGLQLLKEVEADAIENIGDSLLVISQLAGEYECKNDTLIVYNEMCQELMKEFRLVTLKHVSREQNMEANDLAQGASGYKPMIKDVQVEIAAITADDWRYDVRQYLHNPSQSASRKLRYKALKYILLDDELYYQMIDGVLLKCLSADQAKVAIGEVHEGICGTHQSAHKMKWLLRRAGYFWPTMLEDCFRYYKGCQDCQKFGAIQRAPASAMNPIIKPWPFRGWGIDMIGMINPRSSKGHKFILVATDYFTKWVEAIPLKKVDSGDAIRFVQEHIIYRFGIPQTITTNQGSIFVSDEFVQFADSVGIKLLNSSRYYAQANGQAEASNKSLIKLIKRKISDYPRQWHTWLAEALWSYRMACHGSIQVPPYKFVYGHEAVLPWEVRIGSRRIELQDSLTADEYYNLMADEREDLVQSRLRALAKVTKDKERVARHYNKKVVPKDFSEGELVWRLILPIGTRDNKFGKWSPNWEGPFQIYKVVSKGTYMLQGLDGEVYGRALNGKYLKKYYPSVWVDA

SEQ ID NO: 169960 - protein, 342 aa, Oryza sativa
  Clone ID: PAT_MRT4530_68330C.1.pep
MANPSRHSRSGDGNGWASPERTMVWRTELKKKQMKQVVVGVVYYLCRQDGQLDHPHFVHVHVPSDSDSDHPRPRLHLRDFIARLSDLRGAAMPAAYSWSAKTTYRRNAGYVWQDLTADDLIPAPSTNHEEYVLKGSPLLHHNSNTPPQHRRCMTSFDLADYHRTTDPVPVPAAAQQSLIGIDEISPPPSSSSPDDTTTQLVTLKQKQQEEDGCTPQQQAATTPAGRMRTSAMLMKLISCGASSIKELQGQAQSQRCRATAWHNNKPDIMDHRDYFSGSLLDNNTTTHPIDLTLRRSSSCNAHRGQSSRLGVVDQDGVPRRQQLHAKSTAARMDSPETDQIRS

SEQ ID NO: 169961 - protein, 56 aa, Oryza sativa
  Clone ID: PAT_MRT4530_68331C.1.pep
PRCPNRHEGSLMCALLFPIIELYYYTILYARELVIHSCDTLLLPSPPITTSYDLAR

SEQ ID NO: 169962 - protein, 137 aa, Oryza sativa
  unsure (1)..(137): unsure at all Xaa locations
  Clone ID: PAT_MRT4530_68332C.1.pep
HQLQTDLAADIEGISGPMSTVRWFXKTYGVYFQMVLVPHQNSYRAVGNLQNKPRISLLDKVNRVSAWLITRENMVLRLWGLRACLFRSRIELCRYSTKSIVXSIPIKRSGPISSLFGSDDDLRHLRLSQGHLHLFRV

SEQ ID NO: 169963 - protein, 291 aa, Oryza sativa
  Clone ID: PAT_MRT4530_68333C.1.pep
MSAAPVVDAEYMAEVERARRDLRALIASKSCAPIMLRLAWHDAGTYDKATKTGGPNGSIRFPQEYSHAANAGIKIAIDLLEPMKQKHPKITYADLYQLAGVVAVEVTGGPTIDYVPGRRDSSDSPEEGRLPDAKKGAAHLREVFYRMGLSDKDIVALSGGHTLGKARPERSGFDGAWTKDPLKFDNSYFIELLKENSEGLLKLPTDKALVEDPTFRRYVELYAKDEDAFFRDYAESHKKLSELGFTPPRSAFIYKSCQKPKSLLMQTAAGVAVAAAVVAWAYLCESNKRLG

SEQ ID NO: 169964 - protein, 41 aa, Oryza sativa
  unsure (1)..(41): unsure at all Xaa locations
  Clone ID: PAT_MRT4530_68334C.1.pep
FPNQPTRPAXLVWRRENTGWVISKMGGTPKXKQPTSVRLSP

SEQ ID NO: 169965 - protein, 34 aa, Oryza sativa
  Clone ID: PAT_MRT4530_68335C.1.pep
AVLPGYTFASLTHTTPPLTTLHHTRHTVHTTHHT

SEQ ID NO: 169966 - protein, 121 aa, Oryza sativa
  unsure (1)..(121): unsure at all Xaa locations
  Clone ID: PAT_MRT4530_68336C.1.pep
ERLILFGYAERRSCRRPXYLYISXVAASMQHMLNQSRVCLLLCTATSLVVYSIPLVGVHRXSGEQVSGTFAFDILHCEKAAIRFLGSTSRDCSLFDHNGSSSSSLTCYAPLSTPTTASTSC

SEQ ID NO: 169967 - protein, 370 aa, Oryza sativa
  unsure (1)..(370): unsure at all Xaa locations
  Clone ID: PAT_MRT4530_68337C.1.pep
EKSRNYRIKQTATKKDHFPLPFVDEMLERHSXFFCFLDGYSGYHQIPIHPEDQSITTFTCPYGTYAYRRMSFGLCNTPASFQRCMMSIFSDMIKDIMEVFMDDFSVYGNTFGHCLQNLDKVLQXFQEKDLVLNWGKCHFMVREEIVLGHRVSEXGIEVDRAKIDVIDHLPPPVTXKEIHSFLGHAXLYRRFLKDFSTIARPLTNLLAMDAPFEFENACLKSFEILKKALVSAPIIQPPDWTLPFKIMCDASDFAISAVLGQTKDKKHHAICYARKTLTGAQFNYATTEKELVAVVFAIDKFRSYLVGAKVIVYTDDATLKYLLTKKDAKPCLLRWILLLQEFDLEIKDKKGVENFVADHLSRLQITNTQE

SEQ ID NO: 169968 - protein, 1415 aa, Oryza sativa
  unsure (1)..(1415): unsure at all Xaa locations
  Clone ID: PAT_MRT4530_68338C.1.pep
NGSIFSPSPRIDCPQFDGENPRAWKMKCETYFRVSGVSPEVWVGVAALQFIGGALTWLQSTNAHVELMSWSEFAEAVCAKFGREEFQSLIRQFNRVRQIGSVLSYAEKFNELMHQLYVHHSSWNLVFFVTEFLDGLKPEIRSAVLLHSPADMDTVVDLACLQEEVLATGRCELRWVEAVVVDRAGQRPRGNGGRTDDKMQPIEDRVAALRAYRKAKGLCHKCGEKWSSEHKCGPTVQLHVVGELLELLDESDDRNVPDETEDDCDTEPDQISEVXQISKEAMLGTESSGTLRLQGLITHHEVMMLVDSGSSHSFISEEMADKLGTTQRSVPSIRVRIVDGGILQCSRXIDCLWLVQGVSFQNNLKVLPLGSYDVILGMDWVEQHSPMQIDWRAKTLKFQYQQVEVCLKGVRANTRSCVTLTANQVQGLIHRDAVMQVVELXLLVTETENSEPLPAAGTQLLDEFAHIFDEPKGLPPSRIFDHAIPLLPGAKPVNLRPYHYNLAQKDEIEKQVTEMLPQGVIQPSSSPFSSPVLLVLKKDLTWRFCIDYRHLNAITVKNRYPLPIIDELLDELAGSTLFTSLDLRAGYHQIRMSSEDEHKITFKTHNGHYEFRVMPYGLTGAPATFHGLMNQILAPLLRKGVLVFIDDILVYSKNLQDHLXLRQVFQLLTDHQLKVKRSKCSFACASLTYLGHVISAAGVSTDPKNIRVVRSWSVPSNVKEVRGFLGLAGYYRKFVRSFGIISRPLTDLLKKNFVFVWTSEHQAAFEALKEALTTAPVLALLDFSKVFEIETDASDKGVGAVLMQAGHPLAFLSKSLGPCNRGLSTYEKEYLAILLAVDRWRSYLQFGEFIIRTDQRSLVHLDDQRLATPWQQRAMTKLLGLQFKLVYKKGLENKAADALSRCHSEEVCQISVVSSGIPEWLADVQLGYTNDPASSLLLTKVXLSPETCPDYSLKDGVLYYQGRIWLGNNSTLQTKVLTVLHCSAIGGHSGIQATFSRVNRLFAWPGIRKAVRQFVSECSVCKQAKAERVRYPGLLQPLPVPDHAWQTISLDFVEGLPMLSGFDCILVIVDKFSKYAHFIALAHPFTAFDVAXAYLNNVYKLHGLPQHLISDRDRIFTRVLXQKELFRLADTQLQMSSSYHPXTDGQTERVNQFLETFLHCFFHACPKKWLRWLALAEFWYNTTLHSALDKSPFEVLYGHPPRHFGVVDGVACAVPDLEEWLKERTVITSLLWQHLXSGRRRMKFQANKRRFDRDFEIGDWVFLKAQPHAQFSLAGRTNHKLAFRYFGPFHILAKVSKVAYHLQLPSDCAIHPVVHVSQLRQASPPSYDSPVRALPVLPAEEEIPVQILARRASKRGARAVEQLKIRLSGQPSSEVTWEDGAALRQRFPDAPAWGQAAFYNFWKSRQTLPLYSSTA

SEQ ID NO: 169969 - protein, 418 aa, Oryza sativa
  Clone ID: PAT_MRT4530_68339C.1.pep
AEVASYCAKRFHIELCNHEDYDSNLSNAMRSAFYSMDEDLQLSDAWRELVIPRNNGWMYFIKAGVCANLSPFPQATYTAPSYEGSTACVVVIRGDQLIVGHAGDFACKKNERLPPEDQMLTCNPDILTMDITDDMEFLVIATEGLWCNMTNQNVVDHTHDRLLEGAEARVICEELVQFGLPSGDNTTVILVLFKPGAYPAVPPVDTDTDTDSHTGDDVDNNDPANEVDPTANAGSDDSNTSDEVKVDATATAVGSSSTTAVAADEATVVSLSTATITIVDNYFFINTSEEVDPTANAGSDDSNTGDEVKVDATASSAAAAKERRGEDGGTATATGRCDDDDDDGGSAATAAAAALLRRRRWRHRCATKTAATTLRRRRRRRRGRRCDDSGGGSAARRRGRQRCDNNDDDQHNYGCEDY

SEQ ID NO: 169970 - protein, 1271 aa, Oryza sativa
  Clone ID: PAT_MRT4530_6833C.1.pep
MAPGQPVNPRLLMREQPQHSGQVANRLTQDQVAAMFLPPQPVVDPIQQQPIQQQPIQQTPPIQQPYPDWFERVPLPNQFKVPDLSKFLGQDGVSTYEHISRFLAQCGEASAIDALKGMIAPIREKFLSEDFDSLSHPIQKVTLHEHRFAEVRKSSKKVNHVCPYIYGLNDDEDDSEIAAAEWVRSKNVIPCQWVKSSGKEEKYDFGITKADKIFDLLLREKQIQLSAGHTIPSAEELGKKRYCKWHNSGSHSTNDCKVFREQIQVAIEGGKISDIVESSSRSYNKGNRLRQTRVSVHQRLGPVNQDHGQEDNVIRKNQWCPSGIFTKNQKRRVQRLRNRERLQEVEQEINHRLKKAKPRQEWRVKNLVPVADDVAADEAKRLAKGKSVVTAPVNMVFTLLAEFGIDQADVDEAEEESAKLVLSPEQAVFEKPEGTENQYLKPLYINGYVNGKPMSKMMVDGEAAVNLMPYATFRKLGRNAEDFIKTNMMLKDFGGNPSETKGVLNVELTVDSKTIPTTFFVIDGKGSYSLLLGRDWIHANCCIPSTMHQCLIQWQGDKIEIMPADSQSKMENPSYYFEGVVEGSNVYTKDTVDDLDDKQGQGFMSADDLVEIDIGPGDRPRPTFISKNLSPEFRTKLIELLKGFRDCFAWEYYEMPGVSQSIVENRLPIILGVRPHQQPPRRYKADMLEPVKAEIKRLYDAGCIRPCRYTEWVSSIVPVIKKNDKVRSKEIEDHITDLRKVFERTRKYGLKMNPTKCAFGVSASQFLGFLVHERGIELEPFTPLVEIESRSAVYLGAEQQKALDNIKEYLSSPPVLIPPQKGIPFRLYLSAGEKSIGSVLIQELEGKERVVFYLSRRLLDAEARYSPMEKLCLCLYFSCTRLRHYLLSNECTVICKAHVVKDMLSAPILKGRVEKWIFSLTEFDLRYESLKAIKGQAMADFIVEHHNDSIGSVDIVPWTLFFDRSGACFEFAYTIKPYATNNQAEYEAVLKGLQLLKEVEADAIEIMGDSLLIISQLAGEYGCKNDTLIVYYEKCHELMKEFRLVTLKHVSREQNVEANDLAQGASGYKPMIKDVKVEIAAMTADDWRYDVHQYLNNPSQSASRKLRYKPLKYTLLDDEVYYWTIDGVLLKCLSADQAKVAIGEVHEGICGTHQLAHKMKWLLWCAGYFWPTMLEDCFRYYKGCQDCQKFGAIQRAPTSAMNPIIKPWPFGGWGIDMIGMINPPSSKGHKFILVATDYFTKWVQAIALKKVDSGDAIQLVQEHIIYRFGIP

SEQ ID NO: 169971 - protein, 243 aa, Oryza sativa
  unsure (1)..(243): unsure at all Xaa locations
  Clone ID: PAT_MRT4530_68340C.1.pep
MARRRKEEEGKGVTPRNSRIEFQADCALKSPSRTSRGILDGTDEAYSSEKPSSNPNSNSGDRGKNRARLSTTHCTQQVIPEWGADVSTGGRGADMRGPLVSDSRVSGSPWTGTTRVVHRRSTGPTAQIALGPIGRXAVEAAAGLGSASKPTGRPGADGGGTRTSRCRRRHPAAEATAQKRRESGGSGRRQRPKATASXGGGDARXNRGSREKGKESSPKGTTASGDEERRRAVDTRRTVTGTT

SEQ ID NO: 169972 - protein, 108 aa, Oryza sativa
  Clone ID: PAT_MRT4530_68341C.1.pep
MACGLKNVSGDLRPLCSGSTAVDQRLCAEEDRPPALSLAPASSPIASILTTRRKYGGGHLLRQRRRKRWAPADYLCDSWASCGRRAATGGKELSNGRDVTEFDRRREV

SEQ ID NO: 169973 - protein, 1071 aa, Oryza sativa
  Clone ID: PAT_MRT4530_68342C.1.pep
MEEAVDASAALDPKLAPLLLFGGHGDATFLYSVPKRALLAPTPTPTRVGDGGVDDMMRGHRWWATAQGWLLMAHRGSPCTFLWDPFTGRRVGLPPDHDGTVLAAEGSHLRRCLLSCCGPMDPTSCVVVVIDLADTELWYCRPGDNHWVRLHQHPYQHSNTEHRDVIIRFLRQFTAIDGKFYSELLIGDDGLVGVLEFSPELTLTKIAVHGVDDDRRPTVYKKRTTCFVESNGELHSVVFSHPIGCDRIVARVGVYRLSINLTTTQGQRSAAWVKVDSLGGRAFFVKIGSFGASLDTEGTGLRGNCVYYSGFNGKVLCVYDMERGTTVVIDPGTNLPYHQSPQVLMPTFSGYHGGTTRSVENIYQVGPTIMENAYEVKDTKVSKVKRVVRFFEDGCTCLPIPIQNTRVTKQKDKLINQKKSKRSTAGRPPYRGEGASSPETKNSYHGCGFPLEPLKRLLEWGRIADAEENLGGIEVREAHLAESLYFISVRQKKLILIHNAYHSIPRSSEITSTGIGGSQFIPRPGQQQQQQVSALNKATPASALCEVGGVGGGAAVRKRQLASVARRERPMRREEETEARLWAPHVSCGMCITDTTAIVANAMWVMQGERRRARAPWGPPDTGGALLERWISRERRSDSRDASGSAKQRSAMGNSLPVESKFTDEKENDRIKYVVSSMQGWGEKMEDAHAAILNLDDTMTSFFGVYDGHGGAEVASYCAKRFHIELCNHEDYDSNLSNAMRSAFYSMDEDLQLSDAWRELVIPRNNGWMYFIKAGVCANLSPFPQATYTAPSYEGSTACVVVIRGDQLIVGHAGDSRCVLSRNGQASALSVDHKPDRDFACKKNERLPPEDQMLTCNPDILTMDITDDMEFLVIATEGLWCNMTNQNVVDHTHDRLLEGAEARVICEELVQFGLPSGDNTTVILVLFKPGAFPAVPPVDTDTDTDSHIDDDVDPTGSNNATASDNNDPANEVDPTANAGSDDSNTGDEVKVDATATAVGSSSTTAVAADEGTGNPPHGALVDTDDEDGLTYSQDMDLPPASTSPPTFPDEDDLPRSNPDKSPPHDDTYHRW

SEQ ID NO: 169974 - protein, 192 aa, Oryza sativa
  unsure (1)..(192): unsure at all Xaa locations
  Clone ID: PAT_MRT4530_68343C.1.pep
RGSGSPWTGTTRVVHRRSTGPTAQIALGXNRTGGGGGGRGARLGIKADRPAMASGDXRACERVAGDGNRRQRRRRKSDAKAAAADGGNDQRRRQARAAATHGESGKXRKGEGVLTEGDGGDRRRGATEGSRHAADGDRDDLKSEKKEIREKERGHRRRECRPNAADMATLTVARRERLFGDGPRLRRGGPGG

SEQ ID NO: 169975 - protein, 466 aa, Oryza sativa
  Clone ID: PAT_MRT4530_68344C.1.pep
MWVMQGERRRARAPWGPPDTGGALLERWISRERRSDSRDASGSAKQRSAMGNSLPVESKFTDEKENDRIKYVVSSMQGWGEKMEDAHAAILNLDDTMTSFFGVYDGHGGAEVASYCAKRFHIELCNHEDYDSNLSNAMRSAFYSMDEDLQLSDAWRELVIPRNNGWMYFLKAAACTSICKATYTEPAYEGSTACVVVIRGNQLIVGHAGDSRCVLSRNGQASALSVDHKPDRDFACKKNERLPPEDQMLTCNPDILTMDITDDMEFLVIATEGLWCNMTNQNVVDHTHDRLLEGAEARVICEELVQFGLPSGDNTTVILVLFKPGAFPAVPPVDTDTDTDSHIDDDVDPTGSNNATASDNNDPANEVDPTANAGSDDSNTGDEVKVDATATAVGSSSTTAVAADEGTGNPPHGALVDTDDEDGLTYSQDMDLPPASTSPPTFPDEDDLPRSNPDKSPPHDDTYHRW

SEQ ID NO: 169976 - protein, 305 aa, Oryza sativa
  Clone ID: PAT_MRT4530_68345C.1.pep
MAKQSLVLTLIMLEPQVDKETRYNNSMATTIGLTSARRGRGAGKRAPPVSGSGESGSPWTGTTRVVHRRSTGPTAQIALGPIGRAAVEAAAGLGSASKPTGRPGANGGGTRASRCQRRHPAAEATAQKRRESGISGRRQRPKATASAGGGDARGNRGTAQRGWAHGGHGPPRPGRHRGPRPREWSTGSHGQGSQGTGAAKTGPAEQRRTVAAAWTDGHRWRWRGTRRATKGRQRKREGSAHRARATARRRRRLLVVARQRWSGIVSRAGTGGRRLEGPGEQGGKASAHPLVSCLPILHHLPQGGP

SEQ ID NO: 169977 - protein, 295 aa, Oryza sativa
  unsure (1)..(295): unsure at all Xaa locations
  Clone ID: PAT_MRT4530_68346C.1.pep
MGNSLPVESKFTDEKENDRIKYVVSSMQGWGEKMEDAHAAILNLDDTMTSFFGVYDGHGGAEVASYCAKRFHIELCNHEDYDSNLSNAMRSAFYSMDEDLQLQLILSQHMKGXTACVVVIRGNQLIVGHAGDSXRCVLSRNGQASALSXVDHKPDRDFACKKNERLPPEDQMLTCNPDILTMDITDDMEFLVIATEGLWCNMTNQNVVDHTHDRLLEGAEARVICEELVQFGLPSGDNTTVILVLFKPGAYPAVPPVDTDTDTDSHTGDDVDNNDPANEVDPTANAGSDDSNTSE

SEQ ID NO: 169978 - protein, 375 aa, Oryza sativa
  unsure (1)..(375): unsure at all Xaa locations
  Clone ID: PAT_MRT4530_68347C.1.pep
MAMTIGLTSARRGCGAGKRGPLVSGSGESGSTWTGTTRVVHRRSTEPTAQIALGADRTGGDRGGRRARLGIKADRXPGLAAAARARRVAGDGIRRRRRRRKSDAKAAAADGGNDRRRRRARAVATHGELGKKRKGEGVLTGGDGGVRRRGATEGGRHAADGDRDDLKSEKKEVREEERGHRRRECRPKAADMATLTDARWEWRSGDEPRRRRGGRGGSRPREPDGGDGAVRRRPQRRLAAAGVAETAAARGCTARERWEAREMGKEREAGFENRIPAISGAGAGGRERGVGAGNAAHARAWSTWPEGGGDVGAATVAGAAARRERREVGEGPDRLGRRTSGCDKLHLEKAKDLRQQYVARKPKPCLEYHILPFIF

SEQ ID NO: 169979 - protein, 65 aa, Oryza sativa
  Clone ID: PAT_MRT4530_68348C.1.pep
MSFVISLTLLTIINDAITGNNLISSWFGMVYSWFGDRSVQPGMVVQNGWACVAWVCCSVLINIDD

SEQ ID NO: 169980 - protein, 279 aa, Oryza sativa
  Clone ID: PAT_MRT4530_68349C.1.pep
PRVRTDVADHPEFASRRRTLEVQWTNVTGFFITDFTLAELKTLRSKQRYAFRDRSYNGGESSRIITFDEFIDTAAGAASRVVGIYPEIKNPVFVNRQVRWRDGKKFEDKFVAALKRRGYGGRYMSPAWAARPVFIQSFAPTSLVYAAGLTDSPMVLLVDDTTVRTEDTSQSYDEVTSDEHLDYMREYVVGVGPWKDTVVPPTTDNKLAAPTDLVARAHARGLQVHPYTYRNENQFLHFNFRQDPYAEYDYWINDVGDLFTDFPASLRRYQEWTTAGRKG

SEQ ID NO: 169981 - protein, 655 aa, Oryza sativa
  Clone ID: PAT_MRT4530_6834C.1.pep
MAEKPPLSPSSASPSTVKEKIQKLGLTDVNEGNVVPIDPEKFTPEQKKDFEAMLQQAWDQFLNSFMQIRKGTLVQKYKVNVDHGTSSSKGEDRKQALDGSAQLSDKGATNGSLGSQGDNSQGIHGVQGDGVHGVQGDADGAGIDSLTCSVSIGTRPAANATKATASAANSVGAVKTANRSADLAPRLNEHIGQGMIAPIREKFSSEDYDSLSHLIQKVTLHEHRSAEARKSSKKVNHVCPYMYGSDDDEDDSEIAAAEWVRSKKVIPCQWVKSSGKEERQQIQVAIEGGKIKFDDYKKPMRVDGNPFPVNMVHIADRIADTGCMRGYQVSLARIINKYQRKYGKQQERHHEEDNGGFDPHWGCEFFRFYWNEGMRLPSIEDCPGCSDVAGGSSRLERFQEVEKEINHRLKKAKPRQEWRVKNQAPVADDVAADEAKRLAKGKSVVTAPVNMAVFKKPEGTENRHFKPLYINDYVNGKPMSKIMVDGGAMLNLMPYATFRKLGRNAEDLIKTNMVLKDFGGNPSKNKGVLNVELMVGSKTIPTTFFVIDGKCSYSLLLGRDWIHANCCIPSTMHQCLIQWQGDKIEIVPADSIVPVIKKNGKVRLLKEVEADAIEIMGDSLLGIFGRQCWRIASDIIRGVKIARSLGQFNERRRRL

SEQ ID NO: 169982 - protein, 65 aa, Oryza sativa
  Clone ID: PAT_MRT4530_68350C.1.pep
MALSSYEFVCIRLLIQGNGTVYTIDSYYKNGGPHAAVTVGRLPEAGSSGWREVERRCERRRWERA

SEQ ID NO: 169983 - protein, 497 aa, Oryza sativa
  unsure (1)..(497): unsure at all Xaa locations
  Clone ID: PAT_MRT4530_68351C.1.pep
MAARRCFALLLALSAAAAGAGAKRTWEPVIRMPGEVVEEEVATVPRGSEGTEEEEKDGVGTRWAVLVAGSSGYGNYRHQADVCHAYQILRKGGLKEENIVVFMYDDIANNILNPRPGXLLSIIHRVKMFMQEFRRITLETKSLQKNFYAVLLGNKTAVTGGSRKVIDSKPNDHIFIFYSDHGGPGVLGMPNLPYLYAADFMKVLQEKHASNTYAKMVIYVEACESGSIFEGLMPEDLNIYVTTASNAEESSWGTYCPGMEPSPPSEYITCLGDLYSVSWMEDSETHNLKEESIKKQYEVVKKRTSDMNSYGAGSHVMEYGDRTFKDDKLYLYQGFDPANAEVKNKLSWEGPKAAVNQRDADLLFLWRRYELLHDKSEEKLKALREISDTVMHRKLLDSSVDLVGKLLFGFGNGPSVLQAVRPSGQPLVDDWDCLKRMVRIFESHCGPLTQYGMKHMRAFANICNNGISGASMKEASIATCSSHNSGRWSSLVQGYSA

SEQ ID NO: 169984 - protein, 125 aa, Oryza sativa
  Clone ID: PAT_MRT4530_68352C.1.pep
MTDAAHIVSLPPSKPRADPTTRTIHQVGSGEERRETAHLHDVFVGVPGKTQQVDGAAAAAKPRRSIGSRPPANPSNSEEHALVGSPRGPLRRHGDAAALRTRELLRPNSVEIAASDHRSSGRTSF

SEQ ID NO: 169985 - protein, 120 aa, Oryza sativa
  Clone ID: PAT_MRT4530_68353C.1.pep
LSGVLLGVLGPAAACGFLRVGARAVARTLCPGRVALGGWLCPSGVCVGAGGDVREGRVHGLYPLLVALLLVFVYVTSVAGIMVCGLACFLGAVLSRGVRRGPAGPTATCWGVCGWFLVTV

SEQ ID NO: 169986 - protein, 69 aa, Oryza sativa
  unsure (1)..(69): unsure at all Xaa locations
  Clone ID: PAT_MRT4530_68354C.1.pep
FSFAPPPPPSKAGANTKTFSIYRWDPDSPSTNPHLRDYQVXLSRCGPMALDRLVKTENDGDPAGELHQL

SEQ ID NO: 169987 - protein, 118 aa, Oryza sativa
  unsure (1)..(118): unsure at all Xaa locations
  Clone ID: PAT_MRT4530_68355C.1.pep
SGHRFLWVVRXPRQDPANLLEHLPEPDLAALLPEGFLERTADKGMVVKSWAPQAKVLRHXATGAFVTHCGWXSTLEGITAGVPLLCWPLYAXXRMNKVFIVEEMKMGVVIDGYXEXMV

SEQ ID NO: 169988 - protein, 884 aa, Oryza sativa
  Clone ID: PAT_MRT4530_68356C.1.pep
MQLLRCYKKNTTIVLRNDQISPGIWYIGYFNGLGPARTQSKMISRGRARSVSTSITVEGCPTSALWGPYCNQTIEMISCSQSSGYNNSRNLMGLNIDKRKTLNTREHTRRINFLSQWNHLEEKGVGSNSTTYSRMDNSITCAISNGSLCLRQGDMKFYFLDVVDLALQFEITATNFGLAQRSSLICYLRYNAFPRRDLHDYSGDISSAPLVLKLPNIGRWYIAIETVNITQMNSTASTPLLDTTCFSLEWQVTGCLNGKAGTNCSWEAYVLQRVPKRSPSVPFESYYVPSDGKASLEYSHFSLEQFLSNSSFEPFAWTYFFLDIPEGSAGALIHVQIKSDKELNYELYSRYGGLPSNESRDYYASRTSSSNGSVYFSLQNSTNSDMDLSIFYAKEGTWCFGVKHPSDKSNSQTYMSISLQGCHKNCNQKGACHSSIDESGLTFYSFCTCDRDHGGFDCNDELVSPNGHIWQSVFLIASNGAAILPAFWALRQKAFAEWILYTSSGISSALYHSCDVGTWCILSFRVLQSNVDTHATQVLAPTAYLGISHRLQGLSEHGQLFHCMSLFLDFWLSFMAVVGTFIYMATIDETSKRAMHTAVFILTALLAATGATRSANIGIVIAIGSLGLLIGWLLEFSTARRFVCWPWRINLNVPQSWPNLRSLFSNSLDLLNKRFRWFYLLLGFITLAFAGTSWKLESNRSYWVWHSLWHITIYTSSFFFLCSMRINTLTGPTLEEELNAIFFLTVCMHRPLQVGQLREGLWNLAGQVTIAADVQRLEQSWLAEDSESSLERQLSNSWRTNSWLDDESGTERRNSHPRWDIEYTTYLKYTSWFCTNSGILPSYNPLLFDILGQREPTCENALNLSKDDHGFLSVHELNEGSSAA

SEQ ID NO: 169989 - protein, 73 aa, Oryza sativa
  Clone ID: PAT_MRT4530_68357C.1.pep
SLHSPPDLAFLEREREENALYQEREREESPHLHLSSRAREREREQAEARWVLPFEPVPILLPKANTRTYYPYL

SEQ ID NO: 169990 - protein, 88 aa, Oryza sativa
  Clone ID: PAT_MRT4530_68358C.1.pep
HTQPIKTTYLIISITLNWAALFKGPNLPPPAIQRHNSSFGTPNSIPLAAVYPRANWKTPCVPPYNRLHQFPFYKLCKYPKCPTGAPFP

SEQ ID NO: 169991 - protein, 364 aa, Oryza sativa
  Clone ID: PAT_MRT4530_68359C.1.pep
MSDGKDSLDLSGLGAAVPNAKELSAEDKANLVESIKNTLQGLAARHTDVLESLEPKVRKRVEVLREIQSQHDDLEAKFFEERAALEAKYQKMYEPLYSKRYEIVNGVVEVDGVTKEAADETPAEQKEEKGVPEFWLNAMKNHEILSEEIQERDEEALKYLKDIKWYRISEPKGFKLEFYFDTNPFFKNSVLTKTYHMIDEDEPILEKAIGTEIEWFPGKCLTQKVLKKKPKKGSKNTKPITKTENCESFFNFFSPPQVPDDDEEIDEDTAEQLQNQMEQDYDIGSTIRDKIIPHAVSWFTGEAAQDEDFEGIMDDEDDDDEDDDDDEDEDDEGDDEDDEDEKKGGRVPAGEGQQGERPAECKQQ

SEQ ID NO: 169992 - protein, 79 aa, Oryza sativa
  Clone ID: PAT_MRT4530_6835C.1.pep
MAASDWNRTRRAAMGDGDEAGFALLLLRWPRWRRSSFGGSVGVEGPSVSWIWTCDDDGLIGRSRGRRMAGWATVSSRAT

SEQ ID NO: 169993 - protein, 151 aa, Oryza sativa
  Clone ID: PAT_MRT4530_68360C.1.pep
LLFHRNDGTLQPAAIELSLPRFEAGSTLNSSVGEVYTPASDGVEGHIWQLAKAYVTVNDYSWHQLVSHWLNTHAVMEPFAIATHRQLSVAHPIHKLLHPHYRDNLFINALGRQSLINAGGSSENTVFLGKYGLSMTSEVYRNWNFTEQALP

SEQ ID NO: 169994 - protein, 151 aa, Oryza sativa
  Clone ID: PAT_MRT4530_68361C.1.pep
MASMKYDLPLLDYKTRFSLWQVKMRAVLVQSSDLDEALESFGKKKKDEWTAEKKRKDCKVLSLIQLHLCNDILQEVLQERTAVELWLKLESIYGSKDLTSKRHMKMKLFSQKLQKTGLVLNHISVFKEIVANLVSMEVQFDDEDLGLLLLC

SEQ ID NO: 169995 - protein, 213 aa, Oryza sativa
  Clone ID: PAT_MRT4530_68362C.1.pep
MGRGFDLCRETEKATARPSRVAALPLETERIYGRWPLIIVDYPIPIPGWLETVVWVGRRRDFDRGGTVIGGGERVGGPKAPAAPVAAAAASAASLPPVPVAASVPVHYTTDCSHKASDSTSIYQYLVLSSNSGVARPATSFVQVTRDLLYRSMIQAARRVVAREHRNSIRQLVVRVNTPIYGYVINSAMSSRVIDPACDAGPIDQQQQPTRGN

SEQ ID NO: 169996 - protein, 67 aa, Oryza sativa
  Clone ID: PAT_MRT4530_68363C.1.pep
PQQLSFQEVHEQHQSMQSSSSEQGPVTDLERMSNLDTDTVPTKRIQSMMFQGRFCLFAVECMVMIGT

SEQ ID NO: 169997 - protein, 269 aa, Oryza sativa
  Clone ID: PAT_MRT4530_68364C.1.pep
MAAAAAAATIGMMDSAYFVGRGEILSWINATLQLSLAKVEEAASGAVQCQLMDMVHPGVVPMHKVNFDAKTEYDMIQNYKILQDVFNKLRLSKNIEVNKLVKGRPLDNLEFLQWLKRYCDSVNGGIMNENYNPVERRSKGCKERSLKGSNKSSKSLQANRLSSANSADGGPCVGKVNVISEEHYIEQIQQLSEKIAGLKISMDSAEKERDFYFSKLRDIEILCQRPELEHLPMTKAVQKILYAADARDSPLPEANEIITRSPSMFPDEA

SEQ ID NO: 169998 - protein, 56 aa, Oryza sativa
  unsure (1)..(56): unsure at all Xaa locations
  Clone ID: PAT_MRT4530_68365C.1.pep
SQLNTVFGSLMVIGSLYRSTHVHVYIHHVYGCSTELQQLYKPXSNARQNYTKKKKK

SEQ ID NO: 169999 - protein, 165 aa, Oryza sativa
  Clone ID: PAT_MRT4530_68366C.1.pep
MAAAAAAATIGMMDSAYFVGRGEILSWINATLQLSLAKVEEAASGAVQCQLMDMVHPGVVPMHKVNFDAKTEYDMIQNYKILQDVFNKLRLSKVLVNKLVKGRPLDNLEFLQWLKRYCDSVNGGIMNENYNPVERRSKGCKERSLKGSNKSSKSLQANRLSSASA

SEQ ID NO: 170000 - protein, 61 aa, Oryza sativa
  unsure (1)..(61): unsure at all Xaa locations
  Clone ID: PAT_MRT4530_68367C.1.pep
XVPQNTPSLSMVLYPATQHSTPTHXTTYARMLPFGPTGSPPRGILQPSHTRXXIPPYSPXR

SEQ ID NO: 170001 - protein, 44 aa, Oryza sativa
  Clone ID: PAT_MRT4530_68368C.1.pep
LTATVDTRTECKNTEARPEIKGKKIPLVSHNEDLYLIDNEDFTA

SEQ ID NO: 170002 - protein, 254 aa, Oryza sativa
  Clone ID: PAT_MRT4530_68369C.1.pep
MATKIFSLLMLLALSTCVANATIFPQCSQAPIASLLPPYLPSIIASVCENPALQPYRLQQAIAASNIPLSPLLFQQSPALSLVQSLVQTIRAQQLQQLVLPVINQVALANLSPYSQQQQFLPFNQLSTLNPAAYLQQQLLPFSQLATAYSQQQQLLPFNQLAALNPAAYLQQQILLPFSELAAASRASFLTQQQLLPFYKQFAANPATLLQLQQLLPFVQLALTNPAASYQQHIIGGASFRLIISCNSIIKFFG

SEQ ID NO: 170003 - protein, 751 aa, Oryza sativa
  Clone ID: PAT_MRT4530_6836C.1.pep
MKNPSYYFEGVVEGSSVYAKDTVDDLDDKQGQGFMSADDLEEVDIGPGDRPRPTFISKNLLIEFRTKLMELLKEFRDCFAWEYYEMPGLSRSIVEHRLPLKPGIRPHQQPPRRYKADMLEPVKAEIKRLCDAGFIRPCRYDEWVSSIVPVIKKNGKVRVCIDFRDLNKATPKDEYPMPVADQLVDVASGHKILSFMDGNAGYNQIFMAEEDIHKTAFRCPGAIGLFEWVVMTFDLKSAGATYQRAMNYIYHDLIGWLVEVYIDDVVVKSREIEDHIADLRKVFERTRKYGLKMNPTKCAFGVSAGQFLGFLVHERGIEIPQRSINAIKKIKPPGNKTELQEMIGKINFVRSHGYGIGLVIIAPWGASFEFAYAITHHVTNNQAEYEAVLKGLQLLQEVAADAIEIMGDSLLVISQLAGEYECKDDTLMVYYEKCRTLISEFRLVTLRHISREQNIEANDLAQGASGYKPMTKDIKIEIATITADDWRYDVEAIPLKKVDSRDAIQFVQEHIIYRFGIPQTITIDQGSIFVSDEFVQFADSMGIKLLNSSPYYAQANGQAEASNKSLIKLIKRKISDCPQQWHTRLAEALWVYRMACHGSIQVPPYRLVYGHEAVLPWEVRIGSRITELQDTLTADEYYNLMADEREDLVQSRLRALAKVTRDKERVARHYNKKVVPKDFSEGELVWKLILPIGTRDSKFGKWSPNWEGPFQIHKVVSKGAYMLQGLDGEVYGQALNGKYLKKYYPSVWVNA

SEQ ID NO: 170004 - protein, 375 aa, Oryza sativa
  Clone ID: PAT_MRT4530_68370C.1.pep
MEMTMSSAATSLPPGFRFHPTDEELILHYLRSRATAGQCPVPIIADVDIYKFDPWDLPSKAVYGESEWYFFSPRDRKYPNGIRPNRAAGSGYWKATGTDKPIHDSATGESVGVKKALVFYRGRPPKGTKTSWIMHEYRLAADPLAAAANTYKPSSSSRFRNVSMRLDDWVLCRIYKKSGQASPMMPPLAADYDHDEPSGVLDDAYSFYAPPMISTTLIPKLPKIPSISELFDEHALAQIFDAAARPAGRPPSACPRRPPLPEPAPRRRRQLPRGVLPVDGVHGHRCRRQAQGEPGRRLRRRRPHAGEEAQRLMLRRGAAVRGGRLASDAVVSPRRTQPPDASSSAILNIFLTSLINGHGNRSNAVDRIYGCYVLA

SEQ ID NO: 170005 - protein, 164 aa, Oryza sativa
  Clone ID: PAT_MRT4530_68371C.1.pep
MEREDEDENSELFRGKRSREEGGFLDSTSRAYGSRNSNAHQVHDWIIFLQKMQLLRVVVTRYVAYYQLWRSRYMPRFAAETVTSTNSGSSHRPMGCGVPALQDGNYESATEHSCTCLGIGGIQKLLTTAGIIAWIIRSAPYNWEQTDEMDLDPIIEGTTACYEV

SEQ ID NO: 170006 - protein, 143 aa, Oryza sativa
  Clone ID: PAT_MRT4530_68372C.1.pep
MPIPVDLGEPDNRRFFVWVEDNILTILPPDADDHEYSGFNMWTVQKPSAGSTAINLLFPGGATAAELMYAVPGASKCSKPEDDDAVYCVEAQDHSHFICSITTIDTIFPVRLGLLSRAVDRPACSAVSGKIDIFVCGRADRTK

SEQ ID NO: 170007 - protein, 76 aa, Oryza sativa
  Clone ID: PAT_MRT4530_68373C.1.pep
MEFMATQTVEDSSRPGPRQTRVGNLLKPLNSEYGKVAPGWGTTPFMGVAMALFAVFLSIILEIYNSSVLLDGILMN

SEQ ID NO: 170008 - protein, 125 aa, Oryza sativa
  unsure (1)..(125): unsure at all Xaa locations
  Clone ID: PAT_MRT4530_68374C.1.pep
MAIAMSTCDDAAADAGERSLEARATTTRSYAASAESSGMRRASATFQGKGAAWMTHAKDGSYSSHDMEESWEPDRGTDHYRTFNFAGSXRHRRPSSKTPRPKIRPYVMRATCPATDRRLRHACIY

SEQ ID NO: 170009 - protein, 186 aa, Oryza sativa
  Clone ID: PAT_MRT4530_68375C.1.pep
MGCTNMLSPSQLSKIKTMLQSRPDICKRNSHLKFCYSLRNRNVFVSKTHKPRLGPLQYKKGKEPVYDGSWQTPTCAKVALEHYNRSNEDEYEMVKALDSVSSFFNGVWVHVNFLAKLKGATQCPDLVPKFFAEVKSDFDGRSCVSCVKIDTGNPEATPIRGCGICQNNEIYHPAVGGHRGDRKSAS

SEQ ID NO: 170010 - protein, 68 aa, Oryza sativa
  Clone ID: PAT_MRT4530_68376C.1.pep
QWRGVATRGRSKKTKTSAWVQWAAGLLMEAAQTIRSAMRWRSGWSELDSTGYPMPWRVVGKTTKRRLN

SEQ ID NO: 170011 - protein, 62 aa, Oryza sativa
  Clone ID: PAT_MRT4530_68377C.1.pep
MPPGLPYLPGMRWDRRRARLIAPVNIARPAPSVPLTGALNAGRGFNGRCDEWTRETMRQPQV

SEQ ID NO: 170012 - protein, 43 aa, Oryza sativa
  Clone ID: PAT_MRT4530_68378C.1.pep
MPPDTGDIPVSGRQGAKTSGSMFTLLVVVALGGHKRETVKDPP

SEQ ID NO: 170013 - protein, 554 aa, Oryza sativa
  Clone ID: PAT_MRT4530_68379C.1.pep
MASGQPQFRYTQPPSKVIHLRNLPWDCTEEELVELGSPFGKVVNTKCNVGANRNQAFVEFADQNQAIAMISYFASSAEPAQVRGKNVYLQYSNRQEIVNSKSSGEAAGNVLLVSMEGVLPDAVSIDVLHLVFSAFGFVQKIATFEKASGYQALIQFCDTETASSAKAALDGRCIPSYLLPELDVPCTLRINYSAHTVLNVKFQSHRSRDYTNPYLPVAPSAIDGSGPDGKKQEAESNVLLASVENMQYVVTIDVLHEVFSAFGFVQKIAIFEKNSGFQALIQYPDIQTAVAAKEALEGHSIYEGGYCKLHLTFSRHTDLNVKVNNERGRDYTGGNTAPTSNQPSILGPQPVYSGAYNNAPSSATGAVVPPGTTLTPPGAPSHPYTSSEPLPQTPAVPSGGAPLYTSQGILQGPPGVPPAQFPGYGSPQFPPGSAQAQMHQQHPVQGSQQMPGQMNHQPPPGSFMQYPGDGGRPVQDAPGQQAMPFHGHGGGQHLPPGYGGQPQFQQGPRPPMPPQQFPMYGDQQFPPGTGPQMMMPFAGQGGGQQHPFRPYNSH

SEQ ID NO: 170014 - protein, 49 aa, Oryza sativa
  Clone ID: PAT_MRT4530_6837C.1.pep
QGIVVVLVSYVSFGLVFHVPVHALLCLYIGSVLFIVCESHVLVRLLAMF

SEQ ID NO: 170015 - protein, 109 aa, Oryza sativa
  unsure (1)..(109): unsure at all Xaa locations
  Clone ID: PAT_MRT4530_68380C.1.pep
STHASRVRSDEMLQNMPTFYILQQFENLADPKMHYERTGPEIXKATARKVDMHECGIXTEPTETTTXKYLMEHNPEIMIYRDEPTESAILYDGRLRPNNMTQRADLLLL

SEQ ID NO: 170016 - protein, 32 aa, Oryza sativa
  Clone ID: PAT_MRT4530_68381C.1.pep
EVSHSTLSSCRNPHGRDSVDHLAFGHVSRSRV

SEQ ID NO: 170017 - protein, 319 aa, Oryza sativa
  Clone ID: PAT_MRT4530_68382C.1.pep
MAASCALTLPSAISVSVSVSSNSPRRFRRSRRVVAMASVGQKVYAPGVAVSEGNGGLPKIDLKSPHGSEAEIYLFGACVTSWKVPSGKDLLFVRPDAVFNGQKPISGGIPHCFPQFGPGTMQQHGFARNMNWSITDSEANEGDPAVTLELKDDSYSRSMWDFSFQALYKVALHSTSLSTTLKITNTDDKPFSFNSALHSYFSASISGVSVKGLKGCKTLNKDPDPKNPLEGKEEREEVTFPGFVDCIYLGAPSELTLDNGLGDKIVISNANWSDAVLWNPHLQMEACYKDFVCVENAKIETLQLGPNQSWVAEQKIELI

SEQ ID NO: 170018 - protein, 173 aa, Oryza sativa
  Clone ID: PAT_MRT4530_68383C.1.pep
MAASCALTLPSAISVSVSVSSNSPRRFRRSRRVVAMASVGQRCTRPAWRSPRAMAGCQRSTSSPRMGGEIFGVDNLCEILGGIVVVWFICIIWDLGYLLTYPSKFQVTIGFFQLTQQSEAEIYLFGACVTSWKVPSGKDLLFVRPDAVFNGQKPISGGIPHCFPQFGPGTMQQ

SEQ ID NO: 170019 - protein, 58 aa, Oryza sativa
  Clone ID: PAT_MRT4530_68384C.1.pep
IISLTSGINTVICECYTDVLHANRRYEKHSHDGEIHLPQEGHTIKVGTQYLNTIAHAS

SEQ ID NO: 170020 - protein, 113 aa, Oryza sativa
  Clone ID: PAT_MRT4530_68385C.1.pep
SFGPQPETNNLRNAVRAYKRIPPSNNQLTLLLASCKDGLFHRAAPNRYYVVDILVSKCLNIWRFFGSRILVLFVCARSFGNGTLGAQLFVGVNKVDPLCFWLFLDKIIVVVFM

SEQ ID NO: 170021 - protein, 55 aa, Oryza sativa
  unsure (1)..(55): unsure at all Xaa locations
  Clone ID: PAT_MRT4530_68386C.1.pep
GTPLGALSGCSVSPRVFQPGXKVGGFPDCWPVFLVPCIAGWFFKHGSCPLFRRNF

SEQ ID NO: 170022 - protein, 89 aa, Oryza sativa
  Clone ID: PAT_MRT4530_68387C.1.pep
LFFVCRLLSPIGGLFKILCGAHCYHPATPNRRRSPAWTTRPDPCMARRTRPECCSTNGGITDCHTAGLNNLQITMNCAHLDQSQGPTTS

SEQ ID NO: 170023 - protein, 42 aa, Oryza sativa
  Clone ID: PAT_MRT4530_68388C.1.pep
WTSNSPVVYGNGNTIVWHYTVIRMKNYSGRRYPRADSCSPGI

SEQ ID NO: 170024 - protein, 152 aa, Oryza sativa
  unsure (1)..(152): unsure at all Xaa locations
  Clone ID: PAT_MRT4530_68389C.1.pep
IYFQITTHHMEHKASHLXSCKIHQIPPYYHYQSINSLHILSFDRAIHSPQHILXALPSCMLQEQHLPNLSPPLPFNNQTPAPTLTTIVRNSHPFWRILGQSLLPPTSSPSTQQPTSSLFPLPARPHSQHLHIGASHSTSAHTTVGXSPCIAT

SEQ ID NO: 170025 - protein, 31 aa, Oryza sativa
  Clone ID: PAT_MRT4530_6838C.1.pep
NWSERLPLAYYRRPTPRKERGAPRQFRCSAG

SEQ ID NO: 170026 - protein, 430 aa, Oryza sativa
  Clone ID: PAT_MRT4530_68390C.1.pep
MVGKPHHHGSSSLVAEELNLLHGGGDGGRGGGGLGQWKCRLLGSLAGLGRPRRARCVVCLQVQHVTGLPPAAEGRGVVVGWRTRGGEGEHTSPVRASRGAAAFDEVFLNYFVAGGATLRSFAVWAALVDDLASTARGGGDLGSFPVDLTEIATAESSNPRFGGKALSFPLGGAAAGAVLTVSVYCRVMEREENHGGANGHARAERKNKGKGSYASCLPDLSCLRNRPSPAAAAASGSARRAASLRSDRGGFITIENSVAEMEGGGAFGRVEDVDEEGAGFITMEKGTISSSRSRSRRPAGEDDEAGDMEDEKPCLLMELAPEEAAAAFEVEKVEEEFLAMLEDKYWARSKEIEKGLGVSLDMGLDLGLDLDSLIKDAEMELAKAEQAWRSKVGAAIVEEEEYMDLVRRWSARDAAAACWPAAAFAFGSPI

SEQ ID NO: 170027 - protein, 545 aa, Oryza sativa
  unsure (1)..(545): unsure at all Xaa locations
  Clone ID: PAT_MRT4530_68391C.1.pep
MEPLGGGGGGPAGAPEIFAGGTGARGSVRRAVVIGNGCAGAENQCLGLLRALGLADRLTLYRAIRPTGGINKWLHFLPISLHKLVDQVLRQMFSSNKFATLFQGAKMAQYTVCNGQSLGLSSVLEADTKRIVTMVNDTFEKEGLALVVACGRDTISYASSIRCLAPDNVFVIQIQHPRYRLDRFDLVVLTVGALHQADSAALRTAASDWHDELANSPKPLVVVNIGGPTRNCNYDVGLAKKLISSLHNVLKTCGSVRVSFSRRTXPHKVSDLILKEFSTHPXKVYIWNGEGPNPHLGHLAWADAFVITADSISMLSEACSTGKPVYVVGTEHCRWKFSDFHNRLHERGAVRPFTGLEDMSDNWSYPPLNDAIDVAAREFLSSHRLQEEVLPFQKENQQVVLVLTSSLVHLGCATGQERENVQSDDFCVGWSFHAQTGCRGLVQSCADSLGKGCPGGSDRSAPAADEAKRHAQNRRVDELAKLKHSLLKCRLPLPWNAATILEQLLRNHHRATLAAMAMECHWLPQSSSSSNMGARSCFAAVARGP

SEQ ID NO: 170028 - protein, 737 aa, Oryza sativa
  Clone ID: PAT_MRT4530_68392C.1.pep
MAAAAAQGERPDLGSLVDELCATGRAAEAHHRVSLLFLSSSSAAVPSRHLDGRAADGLLRRLLRARKPLLTLRLLQAAPPAALVPSLPNYNRLLALLCGSSAPLLLVLLAHRLLLRMRAAPDAATYAALLDGYARIPDPRAVRKLLDEMPRRGVAPSSLARSYLVKALLRSRDVDGAMALVDNHLWSSMERSNGEDQELKNAAFANLVQCLCIEGFFHIVFRIAEEMPQQRCGVADVFAYSQMIDSLCRSGQHHGASRIVYIMGKRGMYPSTVSYNCIVHGLCTSQKPGGRLRAYQLVMEGVRFRYHPREVTYKVLVDELCLENELAKAKDVMELMLKVTPDDDTRTRIYNMFLAALRVVDNPSEQLDVLVSMLQEGCKPDVITMNTVIHGFCKVGRAQEARRIVDDMLNGKFCAPDVVTFTTLISGYLGVGEFAEALHVLSTLMPKHQCLPNVVTYNCVLKGLLSLGLLDRAMEALEEMKSSNVIPDSVTHTVMIKGFCDAGELEKAKSFWDNVIWPSGMHDDYVYSAIFRGLCKLGKLEQACDFLYELVDSGVAPGVLCYNILVDAACKQGLKKLVYQLVKEMRRNGISPDAVTWRIIDRLHLYSDEKQDGELQMSATDGDPSSADDTVDTLISNRDEKHTPSLPSKTSKFGTVVRDDSSKCEEEEVDYSPCASEDPPNIIEPAKEEACPMNNSGAGTTMGNRGMTREEGLMKPDKQPLKRELLSRVARKVFGLL

SEQ ID NO: 170029 - protein, 58 aa, Oryza sativa
  Clone ID: PAT_MRT4530_68393C.1.pep
ANVLHLCVALSGGKARHQRVVEILDGIGCDGPWVLENCECVLGFAVVCATTPPRIECL

SEQ ID NO: 170030 - protein, 48 aa, Oryza sativa
  Clone ID: PAT_MRT4530_68394C.1.pep
SVLSACCRGENHFLGPLLVVLSLRVFGTTRLPSKRSSCGGPSLALTIG

SEQ ID NO: 170031 - protein, 350 aa, Oryza sativa
  unsure (1)..(350): unsure at all Xaa locations
  Clone ID: PAT_MRT4530_68395C.1.pep
AAARRSGTGCQQERPWRRSQRRGGSGGGVRVCVTGGAGFIGSWLVKKLLGAGYTVHATLRSRGDEVKVGLLRRLVPGDAPPERLRLFEADLYHAATFAPAIAGCQFVFLVATXPRQCEESSTVKRVIYTSSMAATSPLKEDSTGFKDSIDESCWTPLAVDYPYRSARFDEYILSKLLSEKELLGHSHAGERRRPAVEVVTVPCSVVAGGTLQGQSTTSLDCVVSPVSRDEGRFRALRLLQRLMGSVPMVHVDDVCDALVFCMEQPSLTGRFLCSAAYPTLDDIVEHFAGKYPHLDLLKETETLPSIQAHTDKLGELGFKYKYGMEEILDESVECAAFXGCLDASKLSLQG

SEQ ID NO: 170032 - protein, 113 aa, Oryza sativa
  unsure (1)..(113): unsure at all Xaa locations
  Clone ID: PAT_MRT4530_68396C.1.pep
TSAETKRTIQAGGLPGCQLLPTGVALPKDGKXVAIEPDRENYYNGRAVFENGREQHKEDFPEGKGLEQHDKLLAKXTLAPRQAGIDFTFVDSDEPNYVKNHEQLMKLVRILWH

SEQ ID NO: 170033 - protein, 688 aa, Oryza sativa
  Clone ID: PAT_MRT4530_68397C.1.pep
MAPDLDDDLIRAEAEAALRLHRNGRRDEALSRAMDLAIQHKRSSPLALNLSGDLNMAAHRRNRRRGRGAGADDKALAERQAKFAATCYKMSLDAVPDCVETFAPYAEALVGPGMGERVEMAKARLRRAIDCYSNARCEDAVAEVLATVEHHGAASAVHGAAKLADRYPSSARAQCLPAYVAVELARERRGGAAYPATAATPRHKTLRRALATMDTAARTFDRSLVVALFRAKLLACLHDYDAAEAECRRALAVDNPDDPAAHEIPLGSAIGEEYDDMVSSLRKQLCDLQKKLVLLAVHDWASMESEKQSQILSVSIDELREHYSKIDQIAANTVSEARRFSKTHGSWCFWICPRSSGQCAGKKFLDTASLLEHLRNKHPDDLWVNLKSFLDTKLCGKFKTENASQDGYSCHDEMLQFQSIDGMIELVLNLPPGGMKSETLSEMRRRKCSELAEILDRIKKKLRACPKDLSSSEFDQVRSEMQDLWLKFTELSVFDYREAVVPLARMYQWKELKKRISEDGSIIAAWSIDDIFGDVPAEHASLDEKVGHQTGENKVTNKSDNLKARAEVRFSLVPQHHYGLTLPLGEPHEKRFTRVFYSGVTEGFDRFVVRKELEKSWYLKDDGFAIRCDIAVVNKLVVKEPVVRPADLERLGMVCNCNDDMCTLHHTLSFAQVAKLKFLEFFLGCFPL

SEQ ID NO: 170034 - protein, 73 aa, Oryza sativa
  Clone ID: PAT_MRT4530_68398C.1.pep
MGMKTTAAALNLESCTKATVEKAPGHMVEQESAPHFTMESDSRQKHGSIGDSTVAFSLTLHCLCMWTEKEEAI

SEQ ID NO: 170035 - protein, 33 aa, Oryza sativa
  Clone ID: PAT_MRT4530_68399C.1.pep
MSMGPGIGLGPRIYKDRGKPGTKDRAGSEAILC

SEQ ID NO: 170036 - protein, 1599 aa, Oryza sativa
  unsure (1)..(1599): unsure at all Xaa locations
  Clone ID: PAT_MRT4530_6839C.1.pep
DVLRNFLRDMXGQKSAAKTYDILEFVRDNSRVRSQPTIXLMAEKQPPPPXSSPGSVEEKMLKLGLTDVNEGNVVPIDPEKFTPEQKKEFEAMLQQAXDQFLNSFMQTRKETLVQKYKIKVVADDPGTSSSKDGDGKQAPDGSAQPNIKGATDGSLGNQGNNSQGVHGGQGDGVHGVQGDGAQGLQGGNLNSDVAQDFFNNFQDRVDYAVHHALINQSGXLVNTLSNMMKSIADGSIAEHQAAGPVYLQGGQPMNPRLLLREHPQHSGQVANRPTQDLVAAMFLPPQHAVDLIQQQPIQQQPIQQTPQIQQVVQPIQQQVMHWADLEKQFHSYFYSGVHEMKLSDLTAIKQQHDEPVHEYIQRFREMWNKCFSLSLTDAQLADLAFQGMIAPIREKFSSEDFDSLSHLIQKVTLHEHRSAEVRKSSKRVNHVCPYMYGSDDDEDDPEIAAAEWVRSKKVIPCQWVKSFGKEEKYDFDITKADKIFDLLLREKQIQLPASHTIPSAEELGKKRYCKWHNSGSHSTNDCKVFRQQIQVAIEGGKIRFDDSKKPMKVDGNPFLVNMVHTAGQTTDRARTRGFQVNSAKIVNKYHRKYDKQQEKHYEEYDDGFDPHWGCEFFRFCWNEGMRLPSIENCPRCKQAMFEKPEGTEDRHLKPLYINGYVNGKPMSKMMVDGGAAVNLMPYATFRKLGRNAEDLIKTNMVLKDFGGNPLETKGVLNVELTVGSKTIPTTFFVIDGKGSYSLLLGRDWIHANYCIPSTMHHCLIQWQGDKIEIVPADSQLKMENPSYYFEGVVGGLSVYPKDTVDDLDDKQGQGFMSADDLEEINIGPGDRPRPTFISKNLSPEFRTKLIELLKEFRDCFAWEYYEMPRLSRSIIEHRLPIKPGVRPRQQPPKRCKADMLEPVKAEIKXLYDARFIRPCRYAEWVSSIVPVIKKNGKVSVCIDFRDLNKATPKDEYPMPVANQLVDAASRNKILSFMDGNAGYNQIFMAEEDIHKTAFRCPGAIGLFEWVVMTFGLKSAGATYQRAMNYIYHDLIGWLVEVYIDDVVVKSKEIGDHIADLRKVFERTRKYGLKMNPTKCAFGVSAGQFLGFLVHERGIEVTQRSVNAIKKIQPPENKTELQEMIGNINFVRRFISNLSGRLEPFTPLLRLKADQQFTWGAEQQKALDYIKEYLSSPPVLIPPXKGIPFRLYLSAGEKSIGSVLIQELEGKERADVVKYMLLAPILKGRVGKWIFSLPEFDLRYESPKTIKGQAIADFIVEHRDDSISSVEIVSWTLFFDGSVCTHGCAIGLVIISPRGXCFEFAYTIKPYATNNQAEXISQLAGEYECKNDILMVYNEKCQELMKEFRLVTLKHVSREQNIEANDLAQGASGYKPMIKDVKVEIAAMIADDWRYDXTSYYAQVNGQAEASNKSLIILIKRKISDYPRQWHTRLAEALLSYRMACHGSIQVPPCKLVYGHEAVLPWEVRIGSRRTELQNDLTADEYYNLMADEREDLVQSRLCALAKVTKDKERVARHYNKKVVPKDFSEGELVWKLILPIGTRDGKFVKWSPNXEGPFQIYKVVSKGAYMLQGLDGEVYGRALNGKYLKKYYASVWVNA

SEQ ID NO: 170037 - protein, 112 aa, Oryza sativa
  Clone ID: PAT_MRT4530_683C.1.pep
QKPNRKEKKASFTRRVEARVELCASRLESRFSFGRGGALQEDGVAVRQPGWQRGGRGEKKSCFLFYLAAGANKGERRGSWFYLNSSFSSSKSMHVENESAAAERIIVTVASK

SEQ ID NO: 170038 - protein, 72 aa, Oryza sativa
  Clone ID: PAT_MRT4530_68400C.1.pep
HWLGKARQGAFLARGAEPYCRQTTITLATSLYIRNLCRWLDNCGGGGNCRTSSWRRSSWTRCSWCQYLISHW

SEQ ID NO: 170039 - protein, 104 aa, Oryza sativa
  Clone ID: PAT_MRT4530_68401C.1.pep
ARALCILLREEQDYFMDAMTMHTCGLLQNHEEFLVRSRKIHKGNSLILGAERPCEVRTHTQFYLIERGRNGGAHAYLARNADMKQPTNGAWPKQIMLGPKPTRS

SEQ ID NO: 170040 - protein, 69 aa, Oryza sativa
  Clone ID: PAT_MRT4530_68402C.1.pep
SAALFSRCLSRLSCRTLVCLIAVTILTIARSDWSPFLGTSFMCVGVRPRGSLHLFTERYALAYSFPIVV

SEQ ID NO: 170041 - protein, 217 aa, Oryza sativa
  unsure (1)..(217): unsure at all Xaa locations
  Clone ID: PAT_MRT4530_68403C.1.pep
SRSSPPLGLPGSKVLGRVASHASRCPYGGGRCNSRSPHASPGTRPKAATPAQPTGGGALVPRWSPPATTGAAERRPREGRKGGNESAVHGSPRVDGDDGNGDRSGERRRRGSGRRGRRRSGDRRPKRRGGRGRRGCGEPEEGDAEAGDGPGRRRRRTGARRXRRRERATARARFRRRXERAASGGNGGGRHGECLYRVGRGRERPDEGETAAEDPAA

SEQ ID NO: 170042 - protein, 315 aa, Oryza sativa
  unsure (1)..(315): unsure at all Xaa locations
  Clone ID: PAT_MRT4530_68404C.1.pep
AITCIRPAISVPRARGGHAGTADGRRRTRAPMVAAGDHRRGGAAPERGEGXGEAKRRSTAHPGSTAATGTATGAEEGGGAARVDGDGGVPAVGNRNGEVDEIGEDAAEPKEATPRREKVRGDDGGGPELDGDGGERERRRELDSGGERERRVAETVEGGTGSVYIALGGRETGRRRGKRARETRPPLMAPARLGEGFPTESEGEREGEMGGKREGITGNISPHFIARGDGGXAAGFTAAAALGHGRGGGSGGRTGMTGGPHPSARVAGGPXRQRRARGEXAEWAAGRRREGERDGPSRPKRGRGEEKDFLGFFFL

SEQ ID NO: 170043 - protein, 216 aa, Oryza sativa
  unsure (1)..(216): unsure at all Xaa locations
  Clone ID: PAT_MRT4530_68405C.1.pep
TRGYNFKWREWGHGGPGAPGXTPAGAVGPMRQPHPRARAADGRAPHGSRGTRPKAAHPXAPMVAAGDHRRGGAAPERGEGRGSEXRRSTAHPGSTATTGTATGPEKDXGAARVDGDGGVPAVGDRNGEVDEVGEVAANPKKATPKREKVRGDDGGGPELVGDGGERERRRELDSGGERERRVAQTAEGGPGSVYIGLGVREGGRMRGKRPRKIRPP

SEQ ID NO: 170044 - protein, 321 aa, Oryza sativa
  Clone ID: PAT_MRT4530_68406C.1.pep
MQKTRRRRSMASKFVVGSSHGPQIRSPHSLDRAKMGGGSGVGDEEAEAEAAAAAEVTGRGGARGDVGGGGGGAGEAAAAVRTGGERRRRCGRVGGVEIPGGVGSQLAANSEVNDSVVPANSEVRLRFQVACLSGSVSTGRYYTPQTHPPPPPENTLDVFMDGDTIPIHTTITSSHSLAAQFINEIARERPQGGLIVGIDTEWRTDHLPNGKTCYKVAVLQLCVGRRCLLFQIYQAGNMVPHELAEFLADPSVRFVGVAVNNDMQRLANDCNLRVACAVDLRYAAAAVLGQPELARAGLKRLALTVMGAHMEKEKNITKSRW

SEQ ID NO: 170045 - protein, 357 aa, Oryza sativa
  Clone ID: PAT_MRT4530_68407C.1.pep
MGGGSGVGDEEAEAEAAAAAEVTGRGGARGDVGGGGGGAGEAAAAVRTGGERRRRCGRVGGVEIPGGVGSQLAANSEVNDSVVPANSEVRLRFQVACLSGSVSTGMPALKGHSRGLLFSPQIPNLSSPKLSPTPMAGRYYTPQTHPPPPPENTLDVFMDGDTIPIHTTITSSHSLAAQFINEIARERPQGGLIVGIDTEWRTDHLPNGKTCYKVAVLQLCVGRRCLLFQIYQAGNMVPHELAEFLADPSVRFVGVAVNNDMQRLANDCNLRVACAVDLRYAAAAVLGQPELARAGLKRLALTVMGAHMEKEKNITKSRWGEPTLTWEQVNYACIDAYVSYEIGRRLLSGEPILAAPL

SEQ ID NO: 170046 - protein, 105 aa, Oryza sativa
  Clone ID: PAT_MRT4530_68408C.1.pep
MVQDHLKAMEERREEVADGVVDDGDGDGADRDEELLSILLRFQRDGGFGRRMFPDFIFAQFNIEIALANLLYHFDWELPCSENRMELDMTESAGLTASRLTDLFG

SEQ ID NO: 170047 - protein, 352 aa, Oryza sativa
  Clone ID: PAT_MRT4530_68409C.1.pep
MKDLRNKVTALMAMLHRSASQGDEALAAPARRKGMLLDRRAAILHRDVFRGGGGTARIRERHAMPLRRVVSSEVAAAVAGLDEAAEAETCTIRQDWSPHYWWARTGQPNQILPPPLPSLLEADGYLYFIPSALCFILAFPRLSPNLNPSGDRSSLQPHPRRRRQEGGALLRRAESSRRQHGRALREGREARQDRKRPRTLSRIKNTRRDIDLLMATPPPPPVRPGEGAAASALTSLSSWLAWVKVSNAAPTSGSPRRRSGSARGEEVAPLRQPPPRQGLWICDSCATTTMMSHPSFRFLSVSGREVAWIRVKTASRSSTCPLRQQTPSARKITPSASNDSWKTLGASPRFVR

SEQ ID NO: 170048 - protein, 1493 aa, Oryza sativa
  unsure (1)..(1493): unsure at all Xaa locations
  Clone ID: PAT_MRT4530_6840C.1.pep
MAEKLPPSPSSASGTVKEKIQRLGLSKTRKGTFIQKYKVKVVPDEPETSTSKEEEGKRVLDDSAQENQGDGSQEVHAVQCDGAHEPQEGNLNQNSETAQDFFNNFQDRVDYAVHHALINQSGVLVNTLSNMMKTIADGSIAEHQAAGPVYLQGGVFPKYRPLITDAQPPAQAVLPSAPSVQPMAPLLTSLPTSSALTPSQLINPWLLMREQPQHSGQTQTPPRQQVVQPIQQTSSRQQVVQSVQPTPPKQQTIQPIPQQALMNQSAGQSTGHAVNQFEPIQQQSQGAAQQRPWADVIADVMREQFGLKPRDTGKLYRQPYPEWFEKVPLPNRFKVLDFSKFSGQDGMIPPIKEKFSSEDFDSLSHLVQKVTLHEQRFAEARRSSKRVNHVCPYMYGSDDDDDDSEIAAAEWVRSKKVVPCQWVKNSGKEEKYDFDITKXLTRFLICCSGRSKFNSPLIQVAIEGGKIKFDDSKKPMKRKYDKQQERRYGEDNDGFNPHWSCEFFRFCWNEESSGRSYNKGNRLKQARIPAHQRLGPVNQDDYLEEDKNTKTQWCPSGIFTKNQKRRVQRLRSREHFQEVEQEIGHRLRKAKPRKEWRVKNQVLGADDIAADEAKRLANGKSVVTAPINMVFTLPAKFGIGQADVDELKEGSAKLVLSPKRAIFEKPEGTENRHLKPLYINGYVNGKPMSKMMVDGGAAVNLIPYTTFRKLGRTTEDLIKTNMVLKDFGGNPSETKGVLNVELTVGSKTIPTIFFVIDGKGSYSLLLGRDWIHANCCIPSTMHQCLIQWQGDKVEIVPADRSVNVASADLALWEMDGLDCLSGKIWGSSVYAKDTVDDLDDKQGQGFMSADDLEEVDIGPGDRPRPTFISKNLSSEFRTKLMELLKEFRDCFAWEYYEMPGLSRSIVEHRLSLKPGIRPHQQPPRRCKADMLEPVKAKIKRLYDAGFIYPCRYAEWVSSIVPVIKKNGKVRVCIDFRDLNKATPKDEYLMPVADQLVDAASGHKILSFMDGNAGYNQIFMAEEDIHKTAFRCPGAIGLFEWVVMTFGLKSAGATYQRAMNYIYHDLIGWLVEVYIDDVVVKSREIKDHIADLRKVFERTRKYGLKMNLTKCAFGVSAGQFLGFLVHERGIEIPQRSILAIKKIKPPGNKTELQGMIGKINFVRSHGYGIGLVIIAPWGESFEFAYAIKHHVTNNQAEYEAVLKGLQLLQKVAADAIEIMGDSLLVISQLAGEYECKDDTLMVYYEKCRTLISEFRLVTLRHISREQNIEANDLAQGASGYKPMTKDIEIEIATITADDWRYDVFQYLQNPSQSASRKLQKYTLLDDDLYYRTIDGVLLKCLSADQAKVAIGEVHEGICGTHQSAHKMKWLLRRAGYFWPTMLEDCFRYYKGCQDCQKFGAIQRAPASAMNPIIKPWPFRGSIFVSDEFVQFADSMGIKLLTSSPYYAQANGQAEASNKSLVKLIKRKISDYPRQWHTRLAEALWAYRMACHGSI

SEQ ID NO: 170049 - protein, 68 aa, Oryza sativa
  Clone ID: PAT_MRT4530_68410C.1.pep
MAAKSRSGTAADESASRGAERAEVMAHLTSPWSNGITTARGLTDRSIDRSHGAAHPETSSLAIAGGGG

SEQ ID NO: 170050 - protein, 48 aa, Oryza sativa
  Clone ID: PAT_MRT4530_68411C.1.pep
MVDSMPPALCFGANNIQDASAVVVGRFCNGHRRNQWHCQSYVLRSVGN

SEQ ID NO: 170051 - protein, 143 aa, Oryza sativa
  Clone ID: PAT_MRT4530_68412C.1.pep
FSASNRMIFLVTTSATAEATAAAGEEHGGVHGELKRAGDERAPRSPEALEQRRLPVAGRLLLVLVLVLAPRALHAGEVELQLIKVGVFEGVADPERRPQVHLRRREISGVRGGWPERRGARRRGGEKREFWGRIVAPAARGST

SEQ ID NO: 170052 - protein, 142 aa, Oryza sativa
  unsure (1)..(142): unsure at all Xaa locations
  Clone ID: PAT_MRT4530_68413C.1.pep
RLPYTFGACSRTDGQHIAIDGCEQCADTVIKDDRPTKGTRLRTLWLNVPMPLLPLDGQPMAHNPVCRCGRIPKLAQIYLVGXYEERXYQLHVSWISXNEVKLLVRDQKEDKDHGSDGGLYNLQEYILDDSAHHTVLLYCDAC

SEQ ID NO: 170053 - protein, 47 aa, Oryza sativa
  Clone ID: PAT_MRT4530_68414C.1.pep
WVWFVCVLIIVELNGCVIVYLRSWSFGGLWVYQSMNLCNVRNPCFSQ

SEQ ID NO: 170054 - protein, 293 aa, Oryza sativa
  Clone ID: PAT_MRT4530_68415C.1.pep
MAPMPLASSSSKLCSLLILCLAFSRPWTGARRASSMRSSSSGGEPHLLLHGWRLRGVALSLDQSQGSCFRSREKYLYVQIDVEIKLIEGDSAGTVCTIYTISEGPWEIHDEIDLEFLGNVTGEPYTLHTNIFANGVGGREQQFRLWFDPTADYHTYSIVWNPKRILILVDGKAIRDFKNNEDQGVPFPTWQSMRTFGSLWSAEDWATQGGRVKTDWKQAPFVTYYRNYNVTWCRPSPGVAWCGDEPKDSTRFDLDANTLSDLQWVRSNSMIYNYCDDSVRFNATTLPKECTLQ

SEQ ID NO: 170055 - protein, 211 aa, Oryza sativa
  Clone ID: PAT_MRT4530_68416C.1.pep
MEVGKPIKDSSLRPPAHGRDVHKKSRRGRPPPWALLDKTAYFADICNATSKTREGHEIPRMTLPLLASWVSLTFGVASCLSMCFMTNLRQATSHCLHESGIGIDEGNASDVRDIAIDLEGCINYVEFEFKGLPHPQRDTLLMAGRPLNGVGCWRMDCRLRSSQISHHMMPTLPNYDTARRPQPSLQKLHVGHPVLSLHDAHLVHLMAKINR

SEQ ID NO: 170056 - protein, 114 aa, Oryza sativa
  unsure (1)..(114): unsure at all Xaa locations
  Clone ID: PAT_MRT4530_68417C.1.pep
MAATSRSTASIAAASSLGPGGGAAAAGEGAEEGEGEGSSGGSGKAAAAAGSSXPNLGADNASPLLSDCTGEVVPVKVELGPRQERHEVEHVKTTTEPQPPDHDEEHDRVDRGHQ

SEQ ID NO: 170057 - protein, 42 aa, Oryza sativa
  Clone ID: PAT_MRT4530_68418C.1.pep
MNGPGPKVVTPVELVVEQASCDLGGPRVTWVDVTGKIVVPDV

SEQ ID NO: 170058 - protein, 165 aa, Oryza sativa
  Clone ID: PAT_MRT4530_68419C.1.pep
MAATSRSTASIAAASSLGPGGGAAAAGEGAEEGEGEGSSGGSGVGAAAAGSSILGWAYRAVWAGRVVEQKGDGRVSILYVLDENVPIFYLCLSSFSPLSLLMLLSDPNLGADNASPLLSDCTGEVVPVKVELGPRQERHEVEHVKTTTEPQPPDLQFRIRHHEET

SEQ ID NO: 170059 - protein, 779 aa, Oryza sativa
  unsure (1)..(779): unsure at all Xaa locations
  Clone ID: PAT_MRT4530_6841C.1.pep
MVSSWKLGRNAEDLIKTNXGNPSETKGVLDVELTVGSDKIEIVPADSQLKMENPSYYFEGVVEGSNVYTKDTADDLYDKQGVRSHQQPPRRCKADMLEPVKAEIKSLYDAGFIRPCRYAEWVSSIVPVIKKNGKRSINAIKKIKPPENKTELQEMIGKKYFVRRFISNLSGRIGKWIFSLTEFDLRCESPKAIKGQAVADFIVDHRDDSIGSVEIVPWTLFFDGSVCTYGCGIGLVIISPRGACFEFAYIIKLYATNNQVEYEAVLKGLQLLQKVEADTIEIMGDSLLVISQLAGEYDCKNDMLLVYNEKCQELMKKFRLVTLKHVSREQNIEANDLAQGVSGYKPLIKDVQIEVAAILADDWRYDVYRYLQDPSLSASRKLRYKALKYTLLDDELYYRTIDGVLLKCLSTDQAKVAIGEVHEGICGTHQSAHKMKWLLRCAGYLWPTMLEDCFRYYKGCQDCQKFGAIQRAPASAMNPIIKPWPFSSWGIDMIGMINPPSSKGHKFILVATDYFTKWVETIPLKKVDSGDAIQIVQEHIIYRFGIPQTITTDQGSIFVSDEFVQFADSMGIKLLNSSPYYAQANGQAEASNKSLIKLIKRKISDYPQQWHTCLAEALWSYRMACRSIVVPPYKLVYGHEAVLPWEVRIGSRRTELQNDLTAHDYYNLMADEREDLVQSRLRALAKVTKDKERVARHYNKKVVPKDFSEGELVWKLILLIGTRDSKFGKWSPNWEGPFQIHKVVSKGAYMLQGFDGEVYGRALNGKYLKKYYPSVWVNT

SEQ ID NO: 170060 - protein, 49 aa, Oryza sativa
  Clone ID: PAT_MRT4530_68420C.1.pep
SQHGFPPWIPACPMWIEMHSLMSTTVPSNTIGGNGRPSRARREASTKTP

SEQ ID NO: 170061 - protein, 156 aa, Oryza sativa
  unsure (1)..(156): unsure at all Xaa locations
  Clone ID: PAT_MRT4530_68421C.1.pep
RRLLRCWLEHTFGCTWQALDAWCPGGGIVKSGTAPGFQDRVCVVAVCGWAPSGPGWSVAAAACVAGRCHELSCRCSRLLAWARLLGRLAQSSTXAGVDSXVTSSRCFRRAXXDQGARSRSMTWSRQLSSARHCWKVVXVXXSXDVCSSDCGLLGGG

SEQ ID NO: 170062 - protein, 47 aa, Oryza sativa
  Clone ID: PAT_MRT4530_68422C.1.pep
KKKKKKKKKKKKKKKTKKKKHKKGGQFNGTKIKKHKHAKTKLSKRDT

SEQ ID NO: 170063 - protein, 112 aa, Oryza sativa
  Clone ID: PAT_MRT4530_68423C.1.pep
SIAPCRRPHTASCSAPRPPSRPHAEPPTLRSPSARRTPHRSCQPPPPPLPPPSRDPAVAAGHRLAALPPLHACAGRHHPGLPPRPPSAAATTSPRLRRPPRQPPPGPAAAPP

SEQ ID NO: 170064 - protein, 116 aa, Oryza sativa
  Clone ID: PAT_MRT4530_68424C.1.pep
METGRFQSLLGPLDKKIGLHFLSIFLSKSYHHREYQATIRSKPEVELFMETTLQNRTNIFKGRKLQKKWRMDSCAEGSTGGSKSTKRKKINSSTEKKKPLSIGNEPLKLTLPHGFV

SEQ ID NO: 170065 - protein, 158 aa, Oryza sativa
  Clone ID: PAT_MRT4530_68425C.1.pep
DVVEPILLEVDQIYHLACPASPVHYKHNPVKTIKTNVVGTLNMLGLAKRVGARFLLTSTSEVYGDPLQHPQVETYWGNVNPIGVRSCYDEGKRTAETLTMDYHRGANLEVRIARIFNTYGPRMCIDDGRVVSNFVAQALRKEPLTVYGDGKQTRSFQY

SEQ ID NO: 170066 - protein, 78 aa, Oryza sativa
  unsure (1)..(78): unsure at all Xaa locations
  Clone ID: PAT_MRT4530_68426C.1.pep
MYFCEHHQCHVSMAQVLAADGHTWHSPRQGGYRXSRFDRLETLEPLRRERTKHGGTEYLDEKNEERGEEGRFVNPTSH

SEQ ID NO: 170067 - protein, 180 aa, Oryza sativa
  Clone ID: PAT_MRT4530_68427C.1.pep
MARKKMKLLRIVIDVKRRVTFRKHLKGLMKKVSEFATLFLMVYGEVEVQATKVWPSVWEATRVLEHFKAMPQLGRYKKMIDLEGILNKQIDKLKEKLHKLGREADESETKLLLIEAINGRHPSLDGLTIEQIISLGRMANSRLKIVNDRLKKLRAPSSFASVLPCPPPPPPPRRPASPPP

SEQ ID NO: 170068 - protein, 209 aa, Oryza sativa
  Clone ID: PAT_MRT4530_68428C.1.pep
MARKKVKLQGIVIDVKQRVTFMKSLKGLTKKVSEFATLFLMVYGEVEVQATKVWPSVWEATRVLEHFKAMPHLVRYKKMTDLEDILNEQVNKLKEQLHKVGRDADESETKLLLIEAINGHRPSLEGLTIEQITSLGWMANAHLKIVNDRLKKLREEGLIPASVSLSSTEVPIQREGLLVDVARGIGSMGYNRFGGSSGSGTAGSNGDMA

SEQ ID NO: 170069 - protein, 74 aa, Oryza sativa
  unsure (1)..(74): unsure at all Xaa locations
  Clone ID: PAT_MRT4530_68429C.1.pep
MKIIFVFALLAIVACNRSPRFDPLSQSYSQYQLXSHLLLQQQXVLSPCSQFVRQQYSIVATPFWQPATFQLINN

SEQ ID NO: 170070 - protein, 354 aa, Oryza sativa
  Clone ID: PAT_MRT4530_6842C.1.pep
MASASTAVASATAGTTRSFEKLSAPWMIGRGHVALPPSPGRYPAVTVAAASRRTGEGGRRRRRARGADQEDGLSLSSEIEAPSSTPPVRTTDKESTKPASETGITKKGSAIRRVTLVVLAAVFFGVSIALRDGVGKASEYFAGYLLEQSLSVDNLFVFVLVFKYFKVPQEYQRFEAVNLLLALILLFTSYKLFAEEDEESDLSDNFIVKTCQRFIPVTDYYDGDRFFTTQEGLWKATPLLLTVAVIELSDIAFAIDSIPAVFGVTRDPLIVLSSNIFAISGLRSLYVLISESMSELDYLQPAIGIVLGFIGTKMVFDFFGYHIPTEASLAIVTTCLSGGVILSLRKASTEEKDK

SEQ ID NO: 170071 - protein, 1175 aa, Oryza sativa
  Clone ID: PAT_MRT4530_68430C.1.pep
MLLVQMGGMDKNHPFGIGQMENGNGSYASEAVTSDENSADGSGIVVEPYGIPCMVEIFHFLCSLLNVVEQIGVDEDLPLFALKLINSAIELGGSSIRKHPKLLSLVQDELFRNLMQFGLSMSPLILSMVCSIVLNLYHHLRTELKLQLEAFFSCIILRLAQPRFGATYHQQEVAMEALVDFCRQKNFMVEMYANLDCDITCRNIFEELANLLSKSAFPINCPLSSMHILALEGLISVIQGMADRIGNATSRPELLPVELDEYTPFWTVKCENFSDPQHWVKFVRQRKYVKRRLMIGADHFNRDPKKGLEFLQGTHLLPEKLDPQSVACFFRYTAGLDKNLVGDFLGNHDEFCVQVLHEFAQTFDFQEMNLDTALRLFLETFRLPGESQKIQRVLEAFSDRYYEQSPQAFANKDTALVLAYSIIMLNTDQHNMQVKKKMTEEDFIKNNRNINGGSDLPREMLSELYHSICRNEIKTTPEQGMGYFEMSPSRWIDLMRKSKSTSLYIVGDSQPFLDHDMFAIMSGPTIAAIAVVFDHSEHEEVLLACVDGFLGVAKISAFHHLEDVLDDLVVSLCKFTTLLNTSLVEEPVTAFGDDLKARLATETLFTIANRYGDYIRTGWRNVLDCILRLHKLGLLPARVASDAADDSEVSAETVQGKPTHSSISTSHIPVMGTPRKSSGLMGRFSQLLSLDSEEPRSQPTEQQLAAHQRTLQTIQKCRIDSIFTESKFLQPDSLLQLARALIWAAGRPQKVASSPDDEDTAVFCLELLIAITLNNRDRIVLLWQGVYEHIANIVQSTVMPCALVEKAIFGLLRICQRLLPYKENLADELLRSLQLVLKLDARVADAYCENITQEVARLVKANAGHVKSQMGWRTVVLLLSITARHPDASEVGFEAIMYIMSEGAHLSLSNYAFCIEASRQFAESRVGLIDRSIRALDLMADSANSLARWSQETKGTGEETDKVLEAIREMWLKLLQALKKLSLDQREEVRNHALTSLQRCLTATEGVCLQSSTWSHAFDLVIFALLDDLLEISQNHSQKDYRNMEGSLVLAMKLVAKVYLQLLPDLFGLSSFCKLWLGVLSRMEKYIKIKVRGKRSDKLQELIPELLKNILIAMKNRGILAKRSTIGGDSLWELTWLHANNISTSLQSDVFPSQEYEQHSSAGSPRGPNGVESRD

SEQ ID NO: 170072 - protein, 92 aa, Oryza sativa
  Clone ID: PAT_MRT4530_68431C.1.pep
NKLSFFFFFFWWFFFNFFFFFSLFFFFKRESKGKEKKKGKKNILKSKKGMFWKKKKPNPLKKKKKKNPAGGGNPENPDRTPEGNQFSQKGGQ

SEQ ID NO: 170073 - protein, 86 aa, Oryza sativa
  Clone ID: PAT_MRT4530_68432C.1.pep
NDLNLDTALQKTGDHLTAHTAFLAFVACNPIIQVLDQIKCQSLEQKLMRMSLCFKNIKKKKEKPGGIGGHMHAACCCSYGDENPMT

SEQ ID NO: 170074 - protein, 185 aa, Oryza sativa
  unsure (1)..(185): unsure at all Xaa locations
  Clone ID: PAT_MRT4530_68433C.1.pep
FFFFFFWPQPASHIIFFFFKSSYKKTKTKKKYKIVGASPLRGLVRQLLLNLSKLSHDLPTLGLIRLPRARIRPPRQHLALRILDARPGRRKHSRGVLGHXDAVLXRXLGQRGSLVQXQXLVPLXRLPQXVDPSQRAREDVGKRRDAPRAARRQPSQXKIRLAAKTXNSSAXARXPGAQSWXRFRR

SEQ ID NO: 170075 - protein, 78 aa, Oryza sativa
  Clone ID: PAT_MRT4530_68434C.1.pep
PRTSSLVRTSSTTVALGSPSSAAASRHAVAAADMVRLWEREEQRSAPPPPPQPRAGASPPPPLGKRGVATEADGWRRI

SEQ ID NO: 170076 - protein, 169 aa, Oryza sativa
  unsure (1)..(169): unsure at all Xaa locations
  Clone ID: PAT_MRT4530_68435C.1.pep
ERGSRTSDAIKDAATPAATSAVGKQAATPATSVAGKETTTPGLSDGTQAQSHGRLLCGGVQVRVVXAVAPLPGIVAGPPDGQKSATMKHQSAAASMRSHIHQSAPRTSAGGDSTTAVDSAASTSARRVGSRGRRPCGHRAPRGIRRWRRSRRLGPPLSPSLPLPPTATV

SEQ ID NO: 170077 - protein, 46 aa, Oryza sativa
  Clone ID: PAT_MRT4530_68436C.1.pep
LSRICTCRLYMMVHACTMFGKTSAIYSDHGYNGAIWSSLYVSLVTS

SEQ ID NO: 170078 - protein, 70 aa, Oryza sativa
  Clone ID: PAT_MRT4530_68437C.1.pep
MYRRPPSSLPIGFITSTVGVRRCRCRPASVAADWCLRLYGWLVTPPFMGVHVFTDRLAFAASDWCFRLHD

SEQ ID NO: 170079 - protein, 76 aa, Oryza sativa
  unsure (1)..(76): unsure at all Xaa locations
  Clone ID: PAT_MRT4530_68438C.1.pep
FXXXXXXXXXXFFFFFFFFFFFFFFFFXKXTHXXXXKRXXXGKXXPEQIXXTPNQPFXRXDRLNXGKQXXXXAKQG

SEQ ID NO: 170080 - protein, 69 aa, Oryza sativa
  Clone ID: PAT_MRT4530_68439C.1.pep
DRSRYAWPDIQEIAKRFICANCMNRALHASIRFALYVQDVLVSVSCWSTDLVFVRKNLLGLLACTSCVT

SEQ ID NO: 170081 - protein, 627 aa, Oryza sativa
  unsure (1)..(627): unsure at all Xaa locations
  Clone ID: PAT_MRT4530_6843C.1.pep
NWLLIALEPAAPSVASTTQPTAPASTPLPATSATASAQPINPRLLMREHPQLAGQTSNQPTQDQPIQXQVAQPAQQTPPIQPVVQPIQXQVVQPVQQAPSTQQHLQPIQQTPPRQRPQLIQQTPYMGGNLRSSLXNQVIPEHLVHHAQPDGTVLPSPQAQYQPAGSAQQQFTPQFGQFEPMQQQPQGAAQQRPWADVIADGKRVCQLNYEHISRYLAQCGEASAVDALRVRMFRLSLSGGVHEMKLSDLTAIKQRYDEPLHEYIQRFREMRNKCFSLSLTDAQLADLAFQGMIPPIREKFLSKDFDSLSHLIQKVTLREHRSADVRRSSRKSPGKEEKYDFDITKADKMFDLLLREKQIQLPTGHMIPSAKELGKRRYCKWHNSEEDINHRLRKPRPRQAVFEKPEGTENRHLKPLYVNGYVNGKPMNVEDLIKTNMVLKDFGGNPSETKGVLNVELTVGSKTIPTTFFVIDGKGKYGLKMNPTKCAFGVSAGQFLGFLVHERGIEYVSREQNLEANDLAQGASEYKPMVKDVKVEIAAMSADDWSRALIGPQSTTKLSSDDASSRSKILLRVFLTSSDKGANALLERLVVLLFQHDDFLQLKGSGHLTIVEQKEKEEVKAEKKASV

SEQ ID NO: 170082 - protein, 89 aa, Oryza sativa
  Clone ID: PAT_MRT4530_68440C.1.pep
MASTCFRAAARMASSACRSAASRSIPSAARRGAPRISRLPVELGCSAGLSLLPLHSAVAAARLTSRLSTASRSCCALSQGTLCRTYPGL

SEQ ID NO: 170083 - protein, 59 aa, Oryza sativa
  Clone ID: PAT_MRT4530_68441C.1.pep
KQTPIFFISTGEKNTRIKQTTNKSPHLLYEFFLGPTKSFWGYGTLGGQNHFRSGDLTMP

SEQ ID NO: 170084 - protein, 113 aa, Oryza sativa
  Clone ID: PAT_MRT4530_68442C.1.pep
SGGAGGQRRRRRLRPSMPKRQGAEAEASGGLGCRDGGGARLGDRWQRRIESSATRRGGEATAEEARRARRRGGGGGGKAAARRAWRRRRRARAQVSGTGGRRAGAGGDRRRGT

SEQ ID NO: 170085 - protein, 155 aa, Oryza sativa
  Clone ID: PAT_MRT4530_68443C.1.pep
MDRLNQKRKERIRNVFGAFLYRLFVERKSPTCSILLQAQQHKPRVRKNGKAQMYNHDDSIDQVAESAPVAANDDDDDDDAPGRGACTVERTTVGERVNSGRTASYRAQYNTKIGFGARIYVGSGISPRICLITQYRNSCEFMYQWYWNCRTLVAD

SEQ ID NO: 170086 - protein, 108 aa, Oryza sativa
  Clone ID: PAT_MRT4530_68444C.1.pep
MARHGRVASRAHREHAEAPTLSSTFDGRGDGVLRTMVAVCISNDGGPPSPYMLSWAARARSQLGQDVRYNPSPPQRGPDVPIGPTHPHSRIPDVPIGEYSIAAKSKAR

SEQ ID NO: 170087 - protein, 89 aa, Oryza sativa
  Clone ID: PAT_MRT4530_68445C.1.pep
CSFVSIILLGKTVALQEESSDAIHIWIDFIDYPVSIIPHLHLLLFAVPYIEDGRCFFVYGVENGNYLLLKLLVRIHIYELMIKYLHRYV

SEQ ID NO: 170088 - protein, 35 aa, Oryza sativa
  Clone ID: PAT_MRT4530_68446C.1.pep
VTGSNYGALTGDITCDGPECWARHRWDQLGLTYSW

SEQ ID NO: 170089 - protein, 91 aa, Oryza sativa
  unsure (1)..(91): unsure at all Xaa locations
  Clone ID: PAT_MRT4530_68447C.1.pep
PKGGELHRAXQDACNSGRVRGEAVPVVTTLPVIRHAALRHHHHHLPPPPPEQQLLPASTTAPLAAAFSSNSTTTTTTVSSSHEQHANTRLR

SEQ ID NO: 170090 - protein, 187 aa, Oryza sativa
  Clone ID: PAT_MRT4530_68448C.1.pep
VPDVEGALPAHVSTVVKGTPGYLDPEYFLTHKLTDKSDVYSLGVVFLELLTGMKPIEHGKNIVREVKKAYRSGNISEIMDTRMGLCSPECVDSFLQLAMKCSRDETDARPSMTEIVRELELILKIMPEGDLIQLETPQTYSGRAMSKDPMSKSTSNSTNGNYLASSQTFTSVDASSSGVLSGMVSPR

SEQ ID NO: 170091 - protein, 78 aa, Oryza sativa
  Clone ID: PAT_MRT4530_68449C.1.pep
SKTANAQCRIVGYASRLLVTVKVDNEGKRRIVGLDNIADEDDYNQHFHGIGQEIPLEEEEEEDDVTSPVTDQSVGPVT

SEQ ID NO: 170092 - protein, 1391 aa, Oryza sativa
  unsure (1)..(1391): unsure at all Xaa locations
  Clone ID: PAT_MRT4530_6844C.1.pep
MAEKPPPPSSPGSVKEKMLKLGLTDVNEGNVVPVNPEKFTPEQKKEFEAISSKDGDGKQAPDGSAQPSIKGATGGSLGNQGDNSQGVHGGQGDGVHGVQVDLIQQRPIQQQPIQQTPQIQQVVQPIQQQVMQPAQPIQQQVMHRRWADLEKQFHSYFYSGVHEMKLSDLTAIKQRHDEPVHEYIQRFREMRNKCFSLSLTDAQLADLAFQGMIAPIREKFSSEDFDSLSHLIQKVTLHEHSSGKEEKYDFDITKANKIFDLLLREKQIQLPAGHTIPSAEELGKKRYCKWHNSGSHSTNDCKVFRQQIQVAIEGGKIRFDDSKKLMKVDDNPFPVNMVHTAGQTTDRARARGFQVNSAKIINKYQRKYDKQQEKHYEEYDDGFDPHWGCEFFRFCWNEGMRLPSTENCPRCSDIVESSSRSYNRGNRLRQTRVSVHQRLGPVNEDHGQEDSVVRKNQWCPSGIFTKNQKRRVQRLRNRERLQEVEQEINHRLRKAKPRQEWRVKNQVHVADDVAVNEAKRLAKGKSIVTALINMVFTLPAEFGIDQADVDEVEEESAKLVLSPEQAVFEKPEGTENRHLKPLYINGYVNGKPMFKMMVDGGAAVNLMLYATFRKLGRNAEDLIKTNMVLKDFSGNPSETKDVLNVELTVGTKTIPTTFFVIDGKGSYNLLLGRDWIHANCCIPSTMHQCLIQWQGDKIEIVPADSPLKMENPSYYFEGVVEGSSVYPKDAVDDLVDKQGQGFMSADDLEEIDIGPGDRPRPTFISKNLSPEFRTKLIELLKVFRDCFAWKYYEMPGLSRSIVEHRLPIKPGVRPRQQPPRRCKADMLEPVKAEIKRFIVLVIKKNGKVRVCIDFRDLNKATPKDEDPMPVADQLVDAASGNKILSFMDGNAGYNQIFMAEEDIHKTAFRCPSAIGLFEWVVMTFGLKSAGATYQRAMNYIYHDLIGWLVEVYIDDVVVKSKEIEDHIADLRKVFKRTRKYGLKMNPTKCAFGVSAGQFLRFLVHERGIEPYATNNQVEYEAVLKGLQLFKEVEADTIEIMGDSLLVISQLAGEYECKNDTLMVYNEKCQELMKEFRLVTLKHVSREQNIEANDLAQGASGYKPMIKDVKVEIAAMTTNDWRKLRYKALKYTLLDDELYYRMIDGVLLKCLSADQAKVAIGEAHKMKWLLRRAGYFWPTMLEDCFRYYKGCQDCQKFGAIQRAPASAMNPIIKPWPFRGWGIDMIGMINPPSSKGHKFILVATDYFTKWVETIPLKKVDSGDAIQFVQAYIIYRFGIPQTIITDQGSIFVSDEFVQFADSMGIKLLHSSPYYAQANGQAEASNKSLIKLIKRKISNYPRKWHTRLAXALWSYRMACHGSIQVPPYKLVYGHEAVLPWEVRIGSRRTELQNNL

SEQ ID NO: 170093 - protein, 226 aa, Oryza sativa
  Clone ID: PAT_MRT4530_68450C.1.pep
MAASIRARARLGVRAFYLRLSSPAPAELTLVYLPAIGGAALELGGRALPPAAPAEVPLRRVGAGGTDAAAYASADRVCVAEGARFEVYAAGKDLVADGVFSRRRGGGGGWRVECRRAAAAAAVAEVVVLEEGGALMRATAKASARGLGCGGTRLEGIPEEGWGCDCECGTCGDDEWEVVGDDGELDTPEMEAETLTWALEMGAWAVCVGVGLLATARRFRRKRAFW

SEQ ID NO: 170094 - protein, 79 aa, Oryza sativa
  Clone ID: PAT_MRT4530_68451C.1.pep
VVPLAYIFLASANRLLRVKRRSTMRKREPEVRMHKYLITRKCAPSVVFSSLSSPAEYMLADWRDGPNSYSSHTSDSSPI

SEQ ID NO: 170095 - protein, 323 aa, Oryza sativa
  Clone ID: PAT_MRT4530_68452C.1.pep
PVLVLSISGKRMDQAGRKKYVKQVTGRHNDTELHLAAQRGDLEAVRQIIAEINAQMTGTGEEFDSEVAEIRAAVVNEPNEVEETALLIAAEKGFLDIVVELLKHSDKESLTRKNKSGFDVLHVAAKEGHRDIVKVLLDHDPSLGKTFGQSNVTPLITAAIRGHIEVVNLLLERVSGLVELSKGNGKNALHFAGRQGHVEIVKALLDADPQLARRTDKKGQTALHMAVKGTSAAVVRALVNADPAIVMLPDRNGNLALHVATRKKRSEIVNELLLLPDMNVNALTRDRKTAFDIAEGLPLSEESAEIKDCLSRAGAVRANDLNQ

SEQ ID NO: 170096 - protein, 156 aa, Oryza sativa
  Clone ID: PAT_MRT4530_68453C.1.pep
GQHGRRRPGLPFSPPPPSSTSPPPEWPPAKSGVSLGSGGGKPPDPHRSGQIWWGGNGRRRQWCIAPGGGVGDGGGGVNGSGGGAPGSGGGTASGGGWSVRRRQLSRLAMVVKGGRPVWAFLGPYPTRSQSGSRVMQNPIVVQVVYILQVPFGVQEA

SEQ ID NO: 170097 - protein, 91 aa, Oryza sativa
  Clone ID: PAT_MRT4530_68454C.1.pep
SWNKKQEEQREGEGKGKEEGKRDRTGEQRKGRGKERRKERGEGGERGHKQGEEQEQELRRGGDREGREEQRERRAAGRKRMRGKRQGERQQ

SEQ ID NO: 170098 - protein, 90 aa, Oryza sativa
  Clone ID: PAT_MRT4530_68455C.1.pep
MGQIQYSEKYFDDTYEYRHVVLPPEVAKLLPKNRLLSENEWRAIGVQQSRGWVHYAIHRPEPHIMLFRRPLNFQQQQEAAAAAAAQMLPK

SEQ ID NO: 170099 - protein, 44 aa, Oryza sativa
  Clone ID: PAT_MRT4530_68456C.1.pep
MVPKQFSLPRGSRLLERLDRHEATRGEAIVVTHVGGRLLLLYGP

SEQ ID NO: 170100 - protein, 343 aa, Oryza sativa
  Clone ID: PAT_MRT4530_68457C.1.pep
FLGKDCGMCFPTAHVEESWQMAEFYNNKVLVEYRNKDADHVEWAKALKELYMPGLRDFVKKHYPLGPSWGPVGGAPVSQPKATAPAPKAPGAKAPPPPALPSAPLFTTEKSPKSAQPKEGMSAVFQEISSGKAVTTGLRKVTDDMKTKNRSDRSGVVSSSTAAPAAAPEKTSRAGSFSFKSGPPKLELQMGRKWVVENQVGKKNLAIDDCDARQSVYVYGCKDSVLQVNGKVNNITVDKCTKVGIVFKHVVAAFEVVNCNGVEVQCQGTAPTISIDNTSGCQLYLSNDSLGASITSAKSSEINVMVPSGATDGDWVEHALPQQYIHSFKDGQFITSPVSHSGA

SEQ ID NO: 170101 - protein, 84 aa, Oryza sativa
  unsure (1)..(84): unsure at all Xaa locations
  Clone ID: PAT_MRT4530_68458C.1.pep
RHCVMFKSIASALFRLIGRKPSMLRALTVDVDCNAYRISREQDRSLTNNRGXQHGAFTPRFKQQYYPGLSNESESETSSNVIDN

SEQ ID NO: 170102 - protein, 120 aa, Oryza sativa
  Clone ID: PAT_MRT4530_68459C.1.pep
MPRRRPGEAVAVHWLRHAMFDAAGDDGAAGGGHGRFMDRNKKFSFLSEIMLLQYELTCLTRLNFDDERINSEEASTFMVRSHEDVQVQNLPSVRLHRPPTPRPSAGVGGRVRLWRGGGDR

SEQ ID NO: 170103 - protein, 329 aa, Oryza sativa
  Clone ID: PAT_MRT4530_6845C.1.pep
MEDQKKNAKPEGSSGSQRGAPPAPDAGLPNPFDFSQFSNLLNDPSIKEMAEQIASDPVFTQMAEQLQKSAHVTGEQGGPALDPQQYMETMTQVMQNPQFMSMAERLGNTLMQDPGMSSMLESLTSPSHKELLEERMSRIKEDPSLKGILDEIESGGPSAMVKYWNDPEVLQKIGQAMSINFPGDAATSTTLSGPEETEEDGGDDDESIVHHTASVGDAEGLKKALEDGADMDEEDAEGRRALHFACGYGELKCAEILLEAGAAVNALDKNKNTPLHYAAGYGRKECVDLLLKHGAAVTPQNLDGKTPIEVAKLNNQDEVLKVLEMDAFL

SEQ ID NO: 170104 - protein, 76 aa, Oryza sativa
  Clone ID: PAT_MRT4530_68460C.1.pep
SSSSSSSICSIIRAPFGGGLIGTTPFFAAPFSPAGMNPAVNGLKVGSAKSKTVFYDRKPKLFKPLRAGQPPSSLWF

SEQ ID NO: 170105 - protein, 261 aa, Oryza sativa
  Clone ID: PAT_MRT4530_68461C.1.pep
VDYTYTKGENKKCPSVALMFQIGEKATYYNMGGCKDMPGSCTSKSCRGQEVDIMHFSVGNAIPGRLYGGNHIDNADGNGGDRFGHLVDLYSWNPHCRYLDGIGPKENNSNAQNDWHGAWWHSSLTFHSGFVDDDSPYGKQDEKGTYYFEFSRPLRTMDRLQQDAQFTIGGPNSMAVAFWYPNDGKPWSKSEHYSASCDWLVLDIQPSMEAAHYRPAPNRSWDAATAFALLLSVVAICISVFVGYGASKNRSSVQFTPLEQI

SEQ ID NO: 170106 - protein, 869 aa, Oryza sativa
  Clone ID: PAT_MRT4530_68462C.1.pep
MGVMNPLLGKLSTLLEEEYGKLKGLHSGIASLRDELRSMEAALEDLSQLEEPSQQVKEWMHQLRELSYDIEDCIDVFVQHLGQDDAHDGLISKIIGWIRTMKVCHHTAGQIGKLKEHAVEISDRRKRLKLDIVPSSSAYVPIDPRLSAFFEEAGRIIGIDVPRDELIEWVTSDTNSIVGFGGLGKTTLACQVYQMIKSQFDCTAFVSVSRNPNINKILRDILSEVLYTSNPMSDYQKDHFWRIKENLNQPLEDHQYFIVIDDIWSKSAWQVIQCAFPYNSNASRIMTTTRIQDVAQSCCFTHEDYIYDIKPLGSDDSRKLFLKRIFGNEDNHPTELKEVTDEILRKCSGLPLAIINIASLLSTKPVTKHEWKKVWNSIGSMLKQNQDLEIVKRILFLSYYDLPHQLKLCLLHISVFPEDHVIKRERLIWRWIAEGLITEEQGLNLEEVGEKYFNELVNRNMVQPVDIDYTGRAKACRVHDIMLDLIICLSIEENFITIIDDQKSMLSTNKVRRLSLQTNHEKTNIWLGTNRFSQVRSLSVFGDLKQMPPFFDLQVLRVLDLEDCSSLKDGDIENIASLFQLRYLSLRNCHISRVPAQIGKLQLLQTLDLRGTRIKELPETITQLQQLVRLLLGRFGVKMPNGISNMRSLEELVVLDGSKNSVDVVVELGNLTNLKVFSIYWHPNGEIHDEGSYTKSIISSLCKIGEHNLRSLHITHGYSLLLDFLVDSWYPPPCHLEMFRMVSHFYFPRLPNWMSSLSELTFLDINVKQFGVEDMKILQNMPALLSLKLYLEESPQETLVISRCGFQSLKLFLMFRKNKKDGLGLMFEEGATPKLQRLEFRYCAHDAMSAYGVDFDFGIKQLTSLKHLG

SEQ ID NO: 170107 - protein, 1025 aa, Oryza sativa
  Clone ID: PAT_MRT4530_68463C.1.pep
MPSSHIHDNLMSGMKHPLENQTSFLNDHIAVAHKDSKMVGVTAIALMGVTNSLLGKLTVLLGREYSKLRGVQAGITSLRDELIIMKAALEDLSQLEDCNSQVKLWIHQLRELSYDIEDCIDIFLHSLDHGSVSDGLINKIISWLRTLKVYRHTGKQIAALKERAVEVNDRRKRLKLDVDILTSKAVAIDPRLPALFEEADRLVGIDGPRDELVEWLTKGNGFAQNRKVISIVGFGGLGKTTLACQVYQMIKSQFDCTAFVSVSRNPNINKILRDILSEVLYTSNPMSDYQKDHFWRIKENLNQPLEDHQLINMIKEYLKNNRYFIVIDDIWSKSAWQVIQCAFPYNSNASRIMTTTRIQDVAQSCCFTHEDYIYDIKPLGSDDSRKLFLKRIFGNEDNHPTELKEVTDEILRKCSGLPLAIINIASLLSTKPVTKHEWKKVWNSIGSMLKQNQDLEIVKRILFLSYYDLPHQLKLCLLHISVFPEDHVIKRERLIWRWIAEGLITEEQGLNLEEVGEKYFNELVNRNMVQPVDIDYTGRAKACRVHDIMLDLIICLSIEENFITIIDDQKSMLSTNKVRRLSLQTNHEKTNIWLGTNRFSQVRSLSVFGDLKQMPPFFDLQVLRVLDLEDCSSLKDGDIENIASLFQLRYLSLRNCHISRVPAQIGKLQLLQTLDLRGTRIKELPETITQLQQLVRLLLGRFGVKMPNGISNMRSLEELVVLDGSKNSVDVVVELGNLTNLKVFSIYWHPNGEIHDEGSYTKSIISSLCKIGEHNLRSLHITHGYSLLLDFLVDSWYPPPCHLEMFRMVSHFYFPRLPNWMSSLSELTFLDINVKQFGVEDMKILQNMPALLSLKLYLEESPQETLVISRCGFQSLKLFYFYPVNGELGLMFRKNKKDGLGLMFEEGATPKLQRLEFRYCAHDAMSAYGVDFDFGIKQLTSLKHLGVSIHCRGARNWEVEAAESAIRNAVYLLPNHPTLEMYRLSEHEIVKDEEEWDDDTGYDGDEHSGSTRWDQTNEYFQQQLS

SEQ ID NO: 170108 - protein, 170 aa, Oryza sativa
  Clone ID: PAT_MRT4530_68464C.1.pep
HASGFIYEFHRDMYELQCLPPTHEPRVTKHIEQIIDLITKIMDNGKAYTIEGDVYFSVDNFPDYLSLSGRKVDQNRPGTRVAVDARKRNPADFALWKSAKEGEPSWESPWGRGRPGWHIECSAMSAHYLGNIFDIHGGGKDLIFPHHENELAQSQTAYPESEGKCWMHNG

SEQ ID NO: 170109 - protein, 273 aa, Oryza sativa
  unsure (1)..(273): unsure at all Xaa locations
  Clone ID: PAT_MRT4530_68465C.1.pep
GTRCGGGITLPSTGAPLPPLHPTPTSPTTRPHHHYYLFSIKQLNSFGAAAVLAFSTTVPLSDIAFALLVIPYLVVLSVLAFPQKHGKPNPGAPVFLCRGRFLLKGHEALGFLVGAALPALYIXSNGLRSGDTAGVAAASPHAFLLAAQIFTEGLAAAWPGRFSLPVRAAVVVMYGARKMFAASEWLRQEMEKRDQFGGGVGGAPAVARRRVVAGRVLAVANLAYWGINLFAFLLPFYLPKALNRYYCGSDSKEDDATAAAGAIDADDAKKKDS

SEQ ID NO: 170110 - protein, 79 aa, Oryza sativa
  Clone ID: PAT_MRT4530_68466C.1.pep
ASRRRSESMTAKARASSEVPLLLASHDLSASQGSTDAKCSSTCLISLVQLTSSCCCRSSSASHALRESTAVAGEAMWPA

SEQ ID NO: 170111 - protein, 310 aa, Oryza sativa
  Clone ID: PAT_MRT4530_68467C.1.pep
MNSNAESVHNPPEIIIHVVDDLAPPPPNAIAVPPRILPPATAFRRRPPPPSEAVRAARGILFIFKVSCFAAIAMASSVTIYFMVHPIKGDSIADERSGVRLMCGFILAVAVIWLLLSYFSCDDKCVILDDEEQQAGNPVAETRGHVQWPGGAGTVVEPSGMHHLLLVAGGAAHLSEAPLHAVKAATRQQGRTQGQDGRTRLLRLGLQGDDVVGTDHPCPTAASALPLILQHQPSPYPFPLEAKSCFAVVELDDGHIGGDRGGRGGTGVDEVGGGGARDCGGTGAFRRPSSVAKERIGMASVGADAPLSRF

SEQ ID NO: 170112 - protein, 120 aa, Oryza sativa
  Clone ID: PAT_MRT4530_68468C.1.pep
MLYCIVIYIYIYIYIYIYIYIYIYIYIYIYIYIYIYMCVCVCVCVCVYIYIYIYIYIYMCVCVYICVYIYIYIYVYIYIYTYIYMCIYIYMCVYIYIYICVYIYIYVYIYAPLVLQCQEH

SEQ ID NO: 170113 - protein, 40 aa, Oryza sativa
  Clone ID: PAT_MRT4530_68469C.1.pep
GHHAIRFTIEISFRAGDEKPPEAQRRFALGCYNLVGTFEA

SEQ ID NO: 170114 - protein, 499 aa, Oryza sativa
  Clone ID: PAT_MRT4530_6846C.1.pep
MAALHGHGFAVTVLLVVLLVQCDAAEATTCAGAVPARPRPETVSIAEFGGVGDGRTVNTWAFHKAVYRIQHQRRRGGTTLLVPAGTWLTGSFNLTSHMTLFLARGAVLKATQETRSWPLAEPLPSYGRGRELPGARYTSFIHGDGLRDIVITGEELKLSLAQLREYSKRHAYILQKRILHTPRKKRLYDSMGQFSLTVPAKELIKIDASDKGIIDGQGDVWWNMWRQRTLQHTRPNLLEFMHSSGIHISNIVLKNSPFWNIHPVYCDNVVITNMMIIAPHDSPNTDGVDPDSSTNVCIEDSYISTGDDLVAIKSGWDEYGIAYGRPSSGITIRRVRGSSPFSGIAIGSEASGGVSNVLVEDCSIFNSGYGIHIKTNIGRGGFIRNITVDNVRMNSVRNGLRIAGDVGDHPDEHFSQLALPTVDAVSIKNVWGVNVQQPGSIEGIRNSPFTRICLANVKLFGWRNNAAWKCRDVHGAALGVQPGPCAELTTSLSSGFCSY

SEQ ID NO: 170115 - protein, 74 aa, Oryza sativa
  Clone ID: PAT_MRT4530_68470C.1.pep
WCFIINLQPPLAFVSHFASSPTVVQQELNLWPLPVAHATISDGSGGLHRASSAVGNQEDGGGHDMSPSQEIKDE

SEQ ID NO: 170116 - protein, 411 aa, Oryza sativa
  Clone ID: PAT_MRT4530_68471C.1.pep
MNALAATSRNFRQAARLLGLDSKLQKSLLIPLREIKVECTIPKDDGTLATFVGFRVQHDNSRGPMKGGIRYHPEVDPDEVNALAQLMTWKTAVAAVPYGGAKGGIGCTPGELSRSELERLTRVFTQKIHDLIGINTDVPAPDMGTNAQTMAWILDEYSKFHGHSPAVVTGKPIDLGGSLGRDAATGRGVMYATEALLTEYSESISGSTFVIQGLGNVGSWAAKLIHQKGGKIVAVGDVTGAIRNKSGIDIPALLKHRSEGGSLEDFYGAEVMDAAELLVHECDVLVPCALGGVLNRENAAEVKARFIIEGANHPTDTEADEILAKKGVIVLPDIYANSGGVVVSYFEWVQNIQGFMWDEEKVNRELQKYMKNAFQNIKDMCKSQNCNLRMGAFTLGVNRVAKATLLRGWEA

SEQ ID NO: 170117 - protein, 82 aa, Oryza sativa
  Clone ID: PAT_MRT4530_68472C.1.pep
KNAKETGTCNRITVLSRADTANLQVTHQNFERQVATFSLEYDRILSANHDNQHSVALKPLQPGLHVSRLINSSSYNSQQRLE

SEQ ID NO: 170118 - protein, 74 aa, Oryza sativa
  Clone ID: PAT_MRT4530_68473C.1.pep
YIYIYVYLYIYIYIYVYLYIHIYTYIYIYTHIYIYIYIYIYIYIYIYIYIYIYIYIYIYIYVCAWLYNYNYYYS

SEQ ID NO: 170119 - protein, 61 aa, Oryza sativa
  Clone ID: PAT_MRT4530_68474C.1.pep
PFALKTAESVGSILEVLPLTALWQNHQTPEKEDEHVQLLVRAKNPKERLGLCTAQFRSLAQ

SEQ ID NO: 170120 - protein, 190 aa, Oryza sativa
  unsure (1)..(190): unsure at all Xaa locations
  Clone ID: PAT_MRT4530_68475C.1.pep
AGQKFFFPPSRVFSFKGGCFSDSFIPLFPTQKNPVGFFLRGGPGPPFXPPGGPFLGPGAPPPKFWGQPQTPVFCRFRGGPPWGFPVFPTGCPFFXAPGNRFSGFPPNPRRPAPFFDVGVFPEGCFCGSVNPPFLRRALFFGYVKGFFPQICSCLKKFLGFPKKKKKKKKKKKKKKKKKKKKKKKKKKKKK

SEQ ID NO: 170121 - protein, 157 aa, Oryza sativa
  Clone ID: PAT_MRT4530_68476C.1.pep
MATNEEDTTIKPRRSRVQRKEEWKLAKHAKDKLKLSTRKLAFKIVLKHIKANHAQAFKLYTYTAIPGGPGNGGKLNIAPLLPSDGSRWMWRFLPTGAIVLLRQGTWRGVRVRWLGLASSGVAAWLRWQRRGGVVTAAAVGGGRGGEELCESRDTGIG

SEQ ID NO: 170122 - protein, 86 aa, Oryza sativa
  Clone ID: PAT_MRT4530_68477C.1.pep
MVLSNDIDLLNPPAELEKLKHKKKRLVQSPNSFFMDVKCQGCFSITTVFSHSQTVVVCPGCQTVLCQPTGGKARLTEGCSFRRKND

SEQ ID NO: 170123 - protein, 851 aa, Oryza sativa
  Clone ID: PAT_MRT4530_68478C.1.pep
MENSEQERTDSPLEYDLRKYLLLLATLVATVTYGAGFSPPGGVWQDTEAGHLAGDSIIRDSQYRRYLMFFYCNATAFALSIVVIILIFILAILHEKGKLQIPMLPLRAAMVLDLLSLIGAYAAGTSRGVLTAGNVSALVATFIYMVAQMVVTLWLDKKQTQDISSGDEKKKRHRKVLMLLATFVASITYMAGLSAPGGYWDNNQEGHHPGDPVLWEHHSRRLRAFFVCNTIAFVASLLIIMLLLDKKQRIFLPLDKIKITITVRTYVLYAYITIALLGLVGAYVAGSCRKPDTTIYVLSLVGAVLLCIGALQAVLFFLPQLSNISCLPIIAKLSCSPGGPSDSSSRKNTSSKTDILEKAQSLVVLLATLVATVTYQAGLVPPGGVWQKNQDGHMAGEPILLSTQAKRYKVFFYCNSTAFAASLVVIVLVRYKPLLRRRILEITMILDLFGLMGAYAAGSCRDITTSVYIIALAGGVLVYVVIHVVFFTLEDNDKEKEVGNTNSVRNGSVVRTQNNSAEGNLAEKDSCIDKRRKRLLLFAVLGATLTYQAGLTPPGGFRVVDDGFGRHAGDPILFYNFPRRYKAFLYCNSVSFMSSLSLIILLVNPNLYRPAIQSYALSVCTVAGLFALLGAYAAGSTQHLKTSIYVFVLVAVVLFIMIILLVCFYQSESKEKRDDISKEPVEKDKDRAKYHAKRKYLMLLGVLAASVTYSQAGLNPPGGVWQGNSDGHGVGHSVMHDNKRYRYLTFFYSNSTSFVASIVVIILLLPTELLKKNRWLRVMNITIVLDLLGLLLAYVAGSSMRWEPSGYVIAFVIGALGCAAIHKFLSFVRRSQQQGQGNDQPSRLPEGGSQA

SEQ ID NO: 170124 - protein, 119 aa, Oryza sativa
  unsure (1)..(119): unsure at all Xaa locations
  Clone ID: PAT_MRT4530_68479C.1.pep
MDDLSGQKRIYVIRDVRGGRXQGFPSGSGLLCCWAAGLWESEKMKKGSGSRFNQVEWLWEPRSNDLTREVGGGGQWEFRLREPATEELLPAINRPTISWMCNAIESCCTDTATDVCCCC

SEQ ID NO: 170125 - protein, 104 aa, Oryza sativa
  unsure (1)..(104): unsure at all Xaa locations
  Clone ID: PAT_MRT4530_6847C.1.pep
TDQARARGIQTVHETINEPSVTATAMNXEADQMSKIVYELDCIHLSIKKAXHMGKETGTHVATERCIMASISIIVARVIRTTAGTIENAPKTSIRNIPGVAPPG

SEQ ID NO: 170126 - protein, 250 aa, Oryza sativa
  unsure (1)..(250): unsure at all Xaa locations
  Clone ID: PAT_MRT4530_68480C.1.pep
LHRRASSGGGTSEEVLVFSPFESPESLLEDDANALVKEDDNLAELVELPKTNPTLRPPVELKPLPSVLRYAFLHGDTESPIIISYKLIDXETSRLTAVLEKHRFVLGYSLQDLKGISPALCTHHIPLDPSYASPREPXXRLNNTMREVVKXKEVLKLLHARIIYPVSYSEWVSTVQVVPKKGGTTVVENSKNKLIPXTYILGWRMCIDYRNLNKATKKNNFTLPFADKMLERLANHSFLYFLYGYSGYID

SEQ ID NO: 170127 - protein, 170 aa, Oryza sativa
  Clone ID: PAT_MRT4530_68481C.1.pep
MDRSMETVEEEVEEYSWREVLLPRLVPVVSDAAPELERETGERRRGRELLVAVDFGPNSKHAFDWALVHFARMADTLHLVHAVSSVNNDLVYEKSQELMEDLAIEALKTSLVRTKARIVEGDAGKVICREAERLKPAAVILGTRGRGLIQRITTDINGRGISTLGSIIIN

SEQ ID NO: 170128 - protein, 86 aa, Oryza sativa
  unsure (1)..(86): unsure at all Xaa locations
  Clone ID: PAT_MRT4530_68482C.1.pep
RXLKKRXAEPKLKVLEPXLSRAXSGFXTXAQSYXXSLXLGIXXHMXPDXDIQCXLQGRXPMXYANCESQHPIRNXLNCXXPLXFYQ

SEQ ID NO: 170129 - protein, 101 aa, Oryza sativa
  Clone ID: PAT_MRT4530_68483C.1.pep
FFFSNSNYIDIKYRFVLNNIPQAALINQQNAIFAKLHSCCISKRPKKTIAETPDNNRYYKLLETVVPITETESDYSVMKVPKLDQLVAKQLQTSQKQMTPR

SEQ ID NO: 170130 - protein, 106 aa, Oryza sativa
  Clone ID: PAT_MRT4530_68484C.1.pep
MCSPRKRRSDDASDPKKPAAESTGVAIRKTSCFELDKKGNVYARRGDRPELLPREEQGCVHQWRRINRGPAASAIAMDGLGVERSDSPTNQPLIAAAAAARISSMP

SEQ ID NO: 170131 - protein, 115 aa, Oryza sativa
  unsure (1)..(115): unsure at all Xaa locations
  Clone ID: PAT_MRT4530_68485C.1.pep
TASFYRTRDGFQLNQITEPNTRMSFGSLPFSSVRKPSVLRQIPYASRHDTXSQSRYRTGCITSTXSTRACVHTQSSPYFVIFFFAALXGGSFSEGPQGSVDILVSHHLMQSLQLQ

SEQ ID NO: 170132 - protein, 52 aa, Oryza sativa
  Clone ID: PAT_MRT4530_68486C.1.pep
PYLTIMGVTKHSKNIYPKSNYTSYVLHINKIQRAFSTPRLDHNPNLNSLLHS

SEQ ID NO: 170133 - protein, 128 aa, Oryza sativa
  Clone ID: PAT_MRT4530_68487C.1.pep
MVERGVATSALGQCVVPIGVNDMFLPLTHHGYWQLGFVLELQHLCLALGYSDEVKYTGVRLPPTGDDDAPQARWESAALLLIGMLGMTYNSKLQHTLFRYHPRRLDPNNYTSFRGISLEDDTTLRHLA

SEQ ID NO: 170134 - protein, 44 aa, Oryza sativa
  Clone ID: PAT_MRT4530_68488C.1.pep
ARGKDVPSHELQVLICCRICHMCTWHTASRVHKLFFFSPGIMMV

SEQ ID NO: 170135 - protein, 52 aa, Oryza sativa
  Clone ID: PAT_MRT4530_68489C.1.pep
MADEKRQEQSPLPCFSVEVTADSRWFHDGRILIKIVIALVVGKEDERQQWRI

SEQ ID NO: 170136 - protein, 201 aa, Oryza sativa
  Clone ID: PAT_MRT4530_6848C.1.pep
MLSSEPGVLTGRYGPPFSETRKEQKEQRNLAPHALSRRYLSRAGHGVVALWPGPPFDLSLLLHSSSSYSAEERRRRRRRAGERRAREDMGRRKFRLSDMMPNAWFYKLRDMRARGGRGATAMQPPSSSSLMRGSRAAQQQAGTWRLGTSSSSSSLLPHRASYYYTTRDREVPPLPPPPPPRGVDDQFPSLTLSPPLPTRNS

SEQ ID NO: 170137 - protein, 145 aa, Oryza sativa
  Clone ID: PAT_MRT4530_68490C.1.pep
MEEREGEAVAGETPSPHPNPTLRHPVPKSPCSTGRGVMEGAPREEEGTGEREGKAVVGEEKPGRGEAPISIWRAEQGRGGDPGGAFGGNRGVRPVPPEKGVFPLDHLHECDLEKKDYLACLKSTGFQSEKCRQFSKKYLECRMER

SEQ ID NO: 170138 - protein, 222 aa, Oryza sativa
  unsure (1)..(222): unsure at all Xaa locations
  Clone ID: PAT_MRT4530_68491C.1.pep
TPRHHCSPALSLPFPCPCAAAALPYLPGFSPPTTAFPSRSPVPSSSLGAPSITPLPVEQGDLGTGWRSVGFGCGDGVSPATASPSRSSMSCPSPAAPSSTLRLFLLATRCSSYPVLCWAPRSCDDGSLGQEATHGPMVGAFGKDTLTQEPDIGLRWETSSRMPGSVAIEMATDLILPLSQPSTTSGRFVLLPGGLLFTAVCLLLNEAASXYCSKLKVVVVLV

SEQ ID NO: 170139 - protein, 36 aa, Oryza sativa
  Clone ID: PAT_MRT4530_68492C.1.pep
MNKTVVAFYYCFWTRKRPHKNFYILFKPHFFLKGRF

SEQ ID NO: 170140 - protein, 99 aa, Oryza sativa
  unsure (1)..(99): unsure at all Xaa locations
  Clone ID: PAT_MRT4530_68493C.1.pep
FPAGNDGKLRDMXICIRQFCVIFFLVXMLLFFAVQGDPMKLQAICPLSLLVFYKLLPSRSDRFQPSLLEGMQAVNSFVDGPTDYEVFSQPDLDWSLDQS

SEQ ID NO: 170141 - protein, 114 aa, Oryza sativa
  Clone ID: PAT_MRT4530_68494C.1.pep
FIATHYYYPKFFSRTHYYPKLLNYISALLHVQLGVETKGNPKHAFPSKETSRPDETQSDSDLPIRPATHRRSDRLSTSGLTAQHTLVRPAHSEETNRLPNFGNILLGVAGQTGS

SEQ ID NO: 170142 - protein, 52 aa, Oryza sativa
  Clone ID: PAT_MRT4530_68495C.1.pep
MAWMTRGYKASEYAIRGELMAWRLYEQSKVMELIDAKMQANGFDEKRQVMQG

SEQ ID NO: 170143 - protein, 1399 aa, Oryza sativa
  unsure (1)..(1399): unsure at all Xaa locations
  Clone ID: PAT_MRT4530_68496C.1.pep
LFGGGLNSRLPKLDFPQFDGSDPQNWWMSCEHYFGVYGTHPRLWVRVATIYFIGRVASXLRSSCAHLIHSDWVVFSEAVNQKFDHNQHQHLIRQIDHIKQTGSVSEFYERFDDLMNQLLVYDPTYNTLNLVHRFTEGLHADIRHSVLMHRPVDLESALVLALLQEELVDAAKTTESRKFGDHGAKFKGAYSLPLPPSKTIVFPDRGVYKADEKKIVDGQRSVQTSGKTSAMKAHRRAQGLCYLCAEKWSLSHKCSGTVQLHAVXELFALFPADDHSSCSSDDNDQATLLALSIHAIQGIVSSSTKRLHGKIQGRDVLILVDSGSSTSFLSVAFADQLEGVQPLRRPLSVKVANGEMLRCLTELPNTVWSAQGFGFCTTFKVITMGGYDAILGMDWLTQHSPMDIDWQAKTIRLTLGTHQVTIQGVXNEVTSYDVISQEQLVALKLRNSVEGLVQLCAVQXEHTDLPVPPQIQTLISEFSVLFEEPTALPPERPYDHTTPLLPLAVPVNVRPYRYTPTXKDEIERQVKDKLQKGIIQPSASPFSSPVLLVKKKDGSWHFCVDYRHLNAITVKNKYPLPIIDELLDELAGACRFSKLDLRSGYHQIRMAAGEEPKTAFKTHNGHYEFKVIPFGLTSAPATFQGVMNSVLVEHLRHSVLVFVDDILIYSKTLAEHEKHLQQVFEILHTNQMQVKLSKCSFAQPSLAYLGHIISEHGVATDPEKIQVVKTWPVPVNVKEVRSFLGLAGYYRKFVCHFGIIVDFXWTVHHQEAFDILKSAFISAPVLALLDFRKQFVVETDASDQGIGAVLMQDQHPLAFLSKALGPRTQSLSTYEKESLAIILAVEQWRSYLQHDEFVIRIDHRSLSFLDDQRLSTPWQQKALTKLLGLRYRIVYKHGLDNAATDALSRRVPDGLSVLCALSVSFPAWLQDVIQGYSVDSDKQKIIASFALGASPNSNFELXDGLMYFKRRVWVGNNVQLQQQILANLHASAVGGHSGIQVTYQRVKQLFAWPGLRKCVHDFVQSCDTYQRAKPEHVAYPRLLQLLQIPEHAXQVISMDFGEGLPCSASYNCIFVVVDKFTKFAHFLPLRHPFTSIIVAQLFMNTIQCIHGLPQAIVSGRDRVFTSNLWKELLLRAGTQLRMSSSYHPQSDGQTERVNQCLEMFLRCFVHACPARWSQWLALAQFWYNTSFHSALVIQWVXPSSLDSWLQDRNNMKLLIHHHLMRAQQCMKHQADSKRTERIFAVGDWVFMKLQPYVQQSVMTRSNQKLAFKFYGPFQVLQRIGSVAYQLELPATILIHPVVHVSQLKKAVAPSEQVQSYLPRLDPDTGHLDVLVLVLQRRLRRKGDKMIVQVLVXWSGSSSATATWEDFEALKHQFSMATAWGQVAFQGGRNVTPSSSPQVN

SEQ ID NO: 170144 - protein, 125 aa, Oryza sativa
  unsure (1)..(125): unsure at all Xaa locations
  Clone ID: PAT_MRT4530_68497C.1.pep
MVYPHEYGRSLYALRKFITKFTDRKIPTRIVLGRHCIMQGPMSPSSTWKPPDLRYKRDPLGGPRASNLIAKTTTTAYEAEPXRSQVAGXSSRTNSTTISLISSYPNTLXIRSTGIPHLTFSGLLI

SEQ ID NO: 170145 - protein, 230 aa, Oryza sativa
  unsure (1)..(230): unsure at all Xaa locations
  Clone ID: PAT_MRT4530_68498C.1.pep
LRLQWLWFKWKEDEKPWVGMELPRDGLDVKLFQAATTISVGNGAKTSFWNDNWLQNQCLKDFAPNCFRLAKRKXRSVQFELNDNKWLSSFRQFTSVEELHELVQLGGLLQSVSLSQEPDDISWKLTSSGSYSSKSAYLFQFXGSFASIDFSSLWTAPTEPKMRFFWLAXFHKKTLTAQILLHRHWPCNXICCLCTCAFEDTNHLFNECPYVRQVWSLVCRFQNFGPASDP

SEQ ID NO: 170146 - protein, 202 aa, Oryza sativa
  Clone ID: PAT_MRT4530_68499C.1.pep
MERVAGGGGGGAGEARGADAPPPPPVAAGGGGGAVKGKSCKGYLFYSSSLRSRDRGPVCAGITRAIPQVPDHMVGEIEMEAIQEGRSLSDFRYGCIGYSMYLDDKKSSEGKGDKHPQLPICVGIELLADRKTSTNQASSHHKKEAPQPRRYKPAQRGDDFLTKFQRNAGLVANGVARNLNKVGAYIKDTMDDIMYPYRKRPK

SEQ ID NO: 170147 - protein, 318 aa, Oryza sativa
  unsure (1)..(318): unsure at all Xaa locations
  Clone ID: PAT_MRT4530_6849C.1.pep
MGLIAQHLIIIIIINKNNNGTNNSALNNQQQQEVQQLGGTPQSASKRKPDIAHWYDPASQSPSPPLLINRSQLSPSWRYGGRHRGSGSGAGGEIEVRRGLRHMSTHGSRKRKKXIEGVSCCDSCAGSAAAASPPPAADSSARVSSIGKRCKTQFRRRKKKREKKKVPKSDGFDRSNRPSNDAARVRFGYILDVLTTTCHANPAVAYSRTPTATYARTHARTARARETNRANTAAXRDREVVCVGSETPRRTPDHRFALCCAACHARARTVTLTQCTTVTRSHPPQHACRCCFYRALRYVTYSNGCSKGITTPSVPKLT

SEQ ID NO: 170148 - protein, 94 aa, Oryza sativa
  Clone ID: PAT_MRT4530_684C.1.pep
MEGIGRWHGVDSGEAGGEDARRRRRGGEGMAVAASAPGAESQKEGRGWRSAGADSGEPASRGRHRAWSRGGWRCRARANRNWRYWLSRAHQDYP

SEQ ID NO: 170149 - protein, 98 aa, Oryza sativa
  Clone ID: PAT_MRT4530_68500C.1.pep
GRGGGPLGGPLFFPGIFGPVLWGFPFFFFWGVFKVWGNNGHNFFLCKIFFLSNFHKNFGPEGLSLNPGVPYGGANSFFLVGVHCPFLIGKNFFARFFF

SEQ ID NO: 170150 - protein, 88 aa, Oryza sativa
  unsure (1)..(88): unsure at all Xaa locations
  Clone ID: PAT_MRT4530_68501C.1.pep
QYGKLRMRLFKEKXVGAKEFYSSSMQLCGVRGGGEAASQAMFWRPRNDLSMVLAFETTRERNTAIMLTRRFAIDCNIILAGPGDKTPW

SEQ ID NO: 170151 - protein, 207 aa, Oryza sativa
  Clone ID: PAT_MRT4530_68502C.1.pep
MDLTIEARQANVTVSAHTPLHRCHRRHHNRRWAQQAPASVTRARLPPWLTSRSHSRAARGYAGPHLALAAHHRHPGGGSGQGAPEPAIPISGPRATIAAAFPTRRRPPPRASPAFSMRTTTTSAYTLVGTPDPAMRGPDLSPPSSKLVADDHHLGSSLHLGSAPSRHARERRQGALPPPSWAAARRRGGGEVVGGGARWSPPVPSQG

SEQ ID NO: 170152 - protein, 65 aa, Oryza sativa
  Clone ID: PAT_MRT4530_68503C.1.pep
MMNRSSSTTATTQTEQKHELTIAEHDRSYKKNTMMLIIASQDTALLESMCRFDTNPCNIFNTGPY

SEQ ID NO: 170153 - protein, 150 aa, Oryza sativa
  Clone ID: PAT_MRT4530_68504C.1.pep
AIALRLHIIKATNIMINKDSILPELNALVSCKSLKMVIDGLCCILWPSFLSLSTSNQEILLSDTLVIVLFVQGQAIEEGNHLDHARLRDTTELLWVYVKRTRLPTHSCTKPRDSRGRASPSPSQPRSRRRWWGSGGGRMHEQFLEKLRPF

SEQ ID NO: 170154 - protein, 117 aa, Oryza sativa
  Clone ID: PAT_MRT4530_68505C.1.pep
MRDVDLAPEFLVTGPPTPDWPTRSSPLDEERFREELYRDYDDGSSRNLSSSDGEGGAGQSGIGGPITGNSGGTGQHAAPKYRSTTHPDKEDFSDIEGCHHLYTHLTPTVGYGANTGN

SEQ ID NO: 170155 - protein, 53 aa, Oryza sativa
  Clone ID: PAT_MRT4530_68506C.1.pep
NFVQFLHVFLKLHHSNDALELIQNAGISFHEKLYSFHGDHRKACSQNGNVVKI

SEQ ID NO: 170156 - protein, 117 aa, Oryza sativa
  unsure (1)..(117): unsure at all Xaa locations
  Clone ID: PAT_MRT4530_68507C.1.pep
MASVQVAMTPMCSGLGLGXVAGAVASLASASGKQRQHIGGRVGGGHGWKAWQRPQMDGVATTDGGGGSGRGPRWQWPRADPAEVPPPPLFSHQEQWWRRRWPQMDGVVTTDGGGGNG

SEQ ID NO: 170157 - protein, 189 aa, Oryza sativa
  unsure (1)..(189): unsure at all Xaa locations
  Clone ID: PAT_MRT4530_68508C.1.pep
TSGSPGLQAKKKPAPNPTPTQKRSNKRKRSWSXADELRILEAMANHANAHGGALPETSDLFAALASSLERGDADLPKLADKVHKLKRWYDNARLPQRCPTDDDDDTRRLFQLCGKVWGPPSTVLRTSPRQRHKVVGVLVQGNGANPQPAAALKVKEKRVRRELSELYVLYPCLAQEVKAHANEYGELIG

SEQ ID NO: 170158 - protein, 148 aa, Oryza sativa
  Clone ID: PAT_MRT4530_68509C.1.pep
MSSPSRRSSSPESNTSGGGGGADERKRKRMLSNRESARRSRARKQQRLEELIAEAARLQAENARVEAQIGAYAGELSKVDGENAVLRARHGELAGRLQALGSVLEILQVAGAPVDIPEIPDDPLLRPWQPPFAAQPIVATAMADAFQF

SEQ ID NO: 170159 - protein, 38 aa, Oryza sativa
  Clone ID: PAT_MRT4530_6850C.1.pep
KLEKSSSNTASMKKLQDDGALPGRGTMQREARGTEPKP

SEQ ID NO: 170160 - protein, 658 aa, Oryza sativa
  unsure (1)..(658): unsure at all Xaa locations
  Clone ID: PAT_MRT4530_68510C.1.pep
TALCDSTQEVRESAGLAFSTLXYKSAGLQAIDEIVPTLLRALEDDETSATALDGLKQILSVRTAAVLPHILPKLVQPPLSSFNAHALGALAEVAGPGLNSHIGTVLPALILAMDDEDADVQNSARKAAETVVLVIDEEGIETLIPELLKGVNDSQASMRRGSAYLIGFLFKNSKLYLADEAPDIMSTLITLLSDTDKATVSACFWKXFAELLAPVPREQLSYTYXNLVRDAVSTARDKERRRRKGVPILVPGLCLPKALQPFLPIFQQGLISGSAETKEQAAEGLGELIDVTSEKTLKGAPGPRTRPLVRILGDRFPWQVKSAILSTLTIIISKGGLALKPFLPQLQTTFVKCLQDNNRSVRTRAASALGKLSALSTRVDPLVSDLLSMLQSGDDAVKESVLSALKGVVRHAGKSVSPVVRSRGCDLLKDLLQADADDVRSSAAKAIGTLCQYMEENETSDLVQTLLNMGTLPDWCTRHGALLTFCSISMHCSSKLCRSMSFPSIVDLLKDSLKDDKFPVREASTKTLGRLLCYQLQSEASTLQLIQLLALALRDDSSEVRRRSLSRLKAAAKINNPALATHLSILGPAIAEALKDTNTPVRVAAERCALHVFQLTKGADNVTIAQKHLNMTGLEVRKIAKLPEESDGSESSDDDKRK

SEQ ID NO: 170161 - protein, 84 aa, Oryza sativa
  Clone ID: PAT_MRT4530_68511C.1.pep
MGERTMVTKRQRGGRYPSWRRDGDGMAMAQLRVSWRESGRSVGGAARAWLALADAAHGHGSGCYTNEHLNLHDTLCLLDPSKRP

SEQ ID NO: 170162 - protein, 691 aa, Oryza sativa
  Clone ID: PAT_MRT4530_68512C.1.pep
HASEVNSCEPSWWPPDFLAKIESVSLSRKQSVFSDKEPRSNLRSSSWKASQLLWSTGTYSGFIPNGFYSIIPDKKLKENFPTIPSLDDLQTLEADGLKADIIIVDVERDKKLFMLKQLSGALVKGLNSSPALVIKKIAGLVFDCFKSLDPDVSPARSPTEDNHFFGNKGSQLLGQIKHGSCRPRAILFKVLADAVGLESKLVVGLPDDGGVGFVDSYKHMSRVVSLNSMELLVDLMRFPGQLIPFSAKAIFISHISAAGESDSAENDSCDSPLEPNSPLYGLSDKVEAEGAFSKKVLVAWFFETAHHAASQILQMPFGGEAREEELLKNLAVLVQVSFTLFVNLLIHLTSQEHTCRSDGLGGASTSKTRRIRGRSISITPEIGDDIVRAVRAMNETLKQNRLQRDHVNEGSPSYVGEDQNNASDCPNNDDTSGGVVATNNGPRNRNGSTQKAMSLPSSPHEYRAQISETINPCDFVRFFGEVFRGIWNGTDVAIKVFLEQDLTTENMEDFCNEIYILSLLFNHNMHTNFENFTISFQPAAASKWGLMCIHRMKIVHRDLKSANCLVNKHWTVKICDFGLSRVMTDSPMTDNSSAGTPEWMAPELIRNEPFTEKCDIFSLGVIMWELCTLSRPWDGISPVQVVYTVANEGSRLEIPEGPLGKLIADCWAEPQDRPSCQEILTRLLDCEYAVS

SEQ ID NO: 170163 - protein, 58 aa, Oryza sativa
  unsure (1)..(58): unsure at all Xaa locations
  Clone ID: PAT_MRT4530_68513C.1.pep
MVAATAETAAXAYTPLRMHYSGNKPASSVLEEGMQPLVASWNTATNGXAPRLLGCIAT

SEQ ID NO: 170164 - protein, 123 aa, Oryza sativa
  unsure (1)..(123): unsure at all Xaa locations
  Clone ID: PAT_MRT4530_68514C.1.pep
RXCAPXRXMCXRXPXXQXXAXLGTVAXPXRLIXXWXSXCXAXQGXKIXGXLXMXXXKFITALAFSFGRXFXLAAXSGXEXDXXPVXXXQLTCPXXGXRYPAXKLXGXLCXNCYVCXRLTLCXX

SEQ ID NO: 170165 - protein, 573 aa, Oryza sativa
  Clone ID: PAT_MRT4530_68515C.1.pep
MVKRQREEEPATASQSGDDDSNSDEWKDFLNLDGGEEAAEVDDDCNLAPPEKDAEAAKASQSGDDDSNTDQWKGYLNLEDGEEAAEVDDDRNLDQPPEKDAEAAKVDVDRKLDQLPEKDAEAAKVDGDRITALQEKARVRILDFLPIKSVILMGSLCKRWREMYGLYWRDVAVDVELPTDGDALSKLEERAGQQEPKRRLRYFFLLVVERKNVQREYFNSCLEYAGKCSPEVIHISDRGGAGRKFKMHLTSKQLVRLSIIGVALGHFQGKFCEGVSFPTLEEIHIKNSTINKMDDLKNLVGACPILRVLDLRGCKTITQIDVDTAGEHLMSLTVMDCERVRRLTAGKHLRSFRYSGNFLTSLSLPDNDSLADLFIGFPRSQSTTPGPENSFKRLPDLSNLTFLTLCSTSLRAVTVAGNTIQTNLRSLRELQLLMFKLEPINLSDVRRFLNTCGYYPQLTKLFVQLPERDCTYTENTSSENVEGEQQDGFEKLDVVKMTNFKYDWNEIRLLQFLFKKAKLLQKLILVRPIPVPVDRPFRLQVPANVQLTDCADDSTVKIAVPALGDHTVTSGFE

SEQ ID NO: 170166 - protein, 284 aa, Oryza sativa
  Clone ID: PAT_MRT4530_68516C.1.pep
MASSWNNPAIFLAAALAVATAAQVVTAGFTTDLYWQQQPAPGAVTPYKTSDWHDGSATFYGDPSGMGDDFGGACGYVSNDIVSLYSTKTAALSTPLFADGNGCGQCYELRCVKSPWCNPGSPSVVITGTNLCPPNWYLPNDDGGWCNPPRHHFDMAPPSFLKLAQRVAGIVPVQYRRVPCQRTGGVRFCLQGNHYWLLLYVMNVGGAGDVSSLSVKTSGGGGAWIQAAHNWGITYQVFAALDNSDGLTVKLTTYSTPQQTIIVSDAISPWWITGLCYQGSNNFY

SEQ ID NO: 170167 - protein, 143 aa, Oryza sativa
  Clone ID: PAT_MRT4530_68517C.1.pep
MELFLHNFACINPSQIKAGHISGACKDQSLQADRPLHPGGGPPAATQWMRFLVALGGPMSSALPWLVYNLATHRRAVSALREELAPIAARKSKGDDGAAAVIFESQETKHLAYQQAALLESLRLYTGCSADEGWIHGEGDENT

SEQ ID NO: 170168 - protein, 60 aa, Oryza sativa
  unsure (1)..(60): unsure at all Xaa locations
  Clone ID: PAT_MRT4530_68518C.1.pep
KEKFSQIMFSENQSXRFGHLAYPTVEMTLIPTCHAQKFISNFRTNLCIKSSSSNQPRYTN

SEQ ID NO: 170169 - protein, 49 aa, Oryza sativa
  Clone ID: PAT_MRT4530_68519C.1.pep
VSELCKVVATAGGGSGSDTAKALEVCKAVDVMHKEVAAPVDLMQEGTAA

SEQ ID NO: 170170 - protein, 91 aa, Oryza sativa
  Clone ID: PAT_MRT4530_6851C.1.pep
MQGEERKRTQVVVGKKQGRQRPKRAGGELWKEGDFAGKAAALTPFYFLHSCYVGTALRYSEKEVQVLEVGVGSGLWRDRGATTLLAGAALH

SEQ ID NO: 170171 - protein, 105 aa, Oryza sativa
  Clone ID: PAT_MRT4530_68520C.1.pep
MQALARAARGILPATAAAPAARVQQARGIVVHVKDGNLERALGVMARKMRSSGIERLIRARSQIHHHVKDSEKRVLARKALMQRVRSQELGKKLRDILIKKIRGQ

SEQ ID NO: 170172 - protein, 45 aa, Oryza sativa
  unsure (1)..(45): unsure at all Xaa locations
  Clone ID: PAT_MRT4530_68521C.1.pep
IINLDLKKGGSGRYLKTDXLGHYGGDXPDFTWEVVKPIKWEKPSA

SEQ ID NO: 170173 - protein, 769 aa, Oryza sativa
  Clone ID: PAT_MRT4530_68522C.1.pep
MPGWMIGLQLFWNAWMIRLAILSSFVAQLLLVFLADVRRRKATGMETLVLWLAYQLANWAPTFALGKLSSIGGSTPSSQSVQLVTIWAALLMFHAGGPDNITSYSLEDNILSWRDMIGFFMQVLGTIYILYKNVFFSSGGTIVRVSSSVMFIMGIVKYGERAFALRRAKLEKMRSSSQKEAEQKKPIKLSNSIRNLRRIGRRKMDNNEQILLAAHDMLHITKGAFIDNMAYEHDVDKQEIVRPETWNENEMLYDVVDMELSLMYDILYTKAAMVHTWGGYAIRFSSHFITSAMFLLFWSQSKEGLQQPDVLITYIVLGGIVILDIKWLLRAVASTWTYSFLHDRPRSWLHHSLLCSGKWRMIRRSIVSLDPSRFFSKDHPTTSYRRWLGIIGQYNLFDECTRDITWKLKMWKSVLELVSLDDRWMEYRYHNSLGFHMLCYQSSDVRNLMFESIWECLKSAYPPIIPDKQPPMVPALELPEQVAAVLAEPQAAMHRELEEALDFAPAFQETILILHITTDIFLLISGEYASSLRHVRAIKALSNYMVFLVVVRPSMLPGLKLRSLYEGALKALNEIKGNQLQSSVNNSVEGKKNLAQLLIDKEKQPKPMRPMNISNWRPGYSTHKSRPELASALFDQNIILSDGTSFALALLSRVMKIPGEKSNITTPKTFSSESPGFDRYKRLKQLIPELKKWDKEDFSMSEMLEHIFMAWVRLLMFASVRCTRDSHAKQLACGGELTTILWILNEHAGVFRIDHRDGKKKKPEEFFSY

SEQ ID NO: 170174 - protein, 73 aa, Oryza sativa
  Clone ID: PAT_MRT4530_68523C.1.pep
MCDLAHTGTSVETAETRGSEARRLVDRGLPPWMERSAEAAAQGAFQRRRRGHREQSAEVAAQGEIQMRRRACR

SEQ ID NO: 170175 - protein, 653 aa, Oryza sativa
  Clone ID: PAT_MRT4530_68524C.1.pep
MALGAGFDLTSDFRLKFAKEGRLVELDEAGARDVPVPGGGVGGGAAAVLRGVPRDVGVDKGDRIRFRSDVLEFNQFTISVSNEIFFGKKEKNSTDSEQNWQRMSELLNQKSSVQGKVPSGYFNTLFDLSGAWMTDAKETKHLAFDGYFISLYKLHLKTSPLVLRDEVRSAVPPKWDPAALSRFIKTYGTHIIVEMAVGGQDVICVKQSPSSTISSADLKLHLEDLGDFLFSDGRNHSPIHRKTRDGKSKVPDVFVRMEQQPNNLHLSSYSESSTKDGLTITCSKRGGDASIASHSKWLQTVPRVPDAIMFKFVPITSLLTGIPGSGYLSHAINLYLRYKPDPEDLQHFLEFQVPLQWAPLFNELILGPQKRKGSYPSLQFRFLGPKLQVSTSQVSSSHKPVVGLRLYLEGRKCNRLAIHVQHLSSAPSMLGDSLSSSMSEWRESEEVGAGYIEPIQWKSYSCVCTSKVDYNPEWLKRVPGGRGVFVVTGAQLVTKGTWSRKVLHLRLHYTHVPGCAIQRTEWAAAPAASQRGSFLTTISTTLSSPFTQLQAAAAPAAPPRNEPAPAALLNSGVYPDGPPVPLQSRKLLKFVDMSEVVKGPHDVPGHWLVTAAKLVKDGGKIGLNVKFALLNYDGTQPATATMAGGDQGHGLLN

SEQ ID NO: 170176 - protein, 119 aa, Oryza sativa
  Clone ID: PAT_MRT4530_68525C.1.pep
VRRRQRTARAGLGCGRGAGSSRTRVCRPSAARGGCRRWRRGRRPSAGATPSRAGGRGARRPRAGRPARPSRRPRPTPSAAPGPSPPPTARTPSAADADAAAAAAGRSGVSRTRGSTRES

SEQ ID NO: 170177 - protein, 107 aa, Oryza sativa
  Clone ID: PAT_MRT4530_68526C.1.pep
MEPLRRLSPRARAPPRRTAVAIAAARSLARAGDFIGARSIRAIHRIGWQRSTPRRAVAVMGRADLGRVRLSATRAHNGPVHFGLAFSIRVGLLFIIKPVNLIFSEFI

SEQ ID NO: 170178 - protein, 317 aa, Oryza sativa
  unsure (1)..(317): unsure at all Xaa locations
  Clone ID: PAT_MRT4530_68527C.1.pep
MSSTMPAQGGVRHHRTCRMYWCYQCGRAIRIISYPSTDVFCPRCFGRFLHEIDPPPRPAPPPPHFFPQPYHPHYDGHPRRWLIYGGEAPPVAAPGRAFRQPAXRCQDARSASPGPRPRPLQRRRRLADXMPSPPPVARRPSTPPAIDPGNYFNGPNLNNLIEELTQNDRPGPAPAPSSAIDSLPTVQITGAHLSDGSQCPVCKEDFELGEAARQMPCKHVYHSDCIVPWLRLHNSCPVCRYQLLSSAAAGXQRQQPSSPRQRQQRWRRRRRRWPGQGADDREVGALLVDVAAAGARRPRRRVGVRTARKARGGRRRR

SEQ ID NO: 170179 - protein, 86 aa, Oryza sativa
  Clone ID: PAT_MRT4530_68528C.1.pep
GFQQVYVDQPSVEDTISILRGLRERYELHHGVRISDSALVAAALLSDRYISGRFLPDKAIDLVDESAAQLKMEITSKPTALDEIDR

SEQ ID NO: 170180 - protein, 141 aa, Oryza sativa
  Clone ID: PAT_MRT4530_68529C.1.pep
MAPPRHLLLLLLLGFLAAASLAFTLTAAVYEDQVGLADWHQKYIGKVKQAVYHSQKSGRRRVVVLTEENVIASLDLRSGDIFWRHVIEKNDPVDELSLSLGKYVVTLSSGGSILRAWNLPDGQMIWETTLQVSKSSKPLLH

SEQ ID NO: 170181 - protein, 221 aa, Oryza sativa
  unsure (1)..(221): unsure at all Xaa locations
  Clone ID: PAT_MRT4530_6852C.1.pep
YSSLFSITLLSLSPALQSARSGGERRRAKPAGRRQPERRRAKPTGRRASGAAAASPRGSRSSGKAVAPALDPNGKVALGRCAPLPSPVAIEPPPTAPGHPWRGALFSAGVGGVGTEXGGRSQHQCRHLHPPPSPPTFPLPPTADLSSASRKSSPNLGNKSDERRAVAGGDNXHSCRARRRPPFLPPPPPPPPPATSVARGLPPPPLCRHASAAVVVAPRRD

SEQ ID NO: 170182 - protein, 88 aa, Oryza sativa
  Clone ID: PAT_MRT4530_68530C.1.pep
MVGRVKAFRSPDGNFSGQHIYALLEAVSGQTPPPRAFLEVCMFLAFPSNGGQEENCMRYADRSSKYAKAWRYSFHFKMYDAIDFSHNV

SEQ ID NO: 170183 - protein, 69 aa, Oryza sativa
  Clone ID: PAT_MRT4530_68531C.1.pep
NRAARAAPPRRRSSPAPRPHAPPPRPRASTPPPEALVPAPPPVEAGAEVEYGRGVVNAHVVSSTTATAA

SEQ ID NO: 170184 - protein, 53 aa, Oryza sativa
  Clone ID: PAT_MRT4530_68532C.1.pep
QNLPMPSIIFILLGENIQNINHSSVMGAISLMKFPCYRPLHDVKYHIKGNALI

SEQ ID NO: 170185 - protein, 96 aa, Oryza sativa
  Clone ID: PAT_MRT4530_68533C.1.pep
MEMSCWRLLDRYQEPHHYSRGGSSFLLKGFMMRKLAAKAYSFKGRLPTNPDLTRTDCNYDLYINTDVGMREAACSVTSLRCFHCTLDEFLEDVVDE

SEQ ID NO: 170186 - protein, 92 aa, Oryza sativa
  Clone ID: PAT_MRT4530_68534C.1.pep
MGYLQEARENHVKKKVEEALRSKMKQKALKECDFYCSKYAECARGRTFSVVWQCRKQAKELNDCLHQFTNDAVLEEMKKAYMVEQESKEKNQ

SEQ ID NO: 170187 - protein, 71 aa, Oryza sativa
  unsure (1)..(71): unsure at all Xaa locations
  Clone ID: PAT_MRT4530_68535C.1.pep
DKFGGPQIRGTFQGFLVLHPTPGWGPLFFGLSPHSLKGXPPVAIGFPAYAPMKGFLKIPPQKKKMSGPGFN

SEQ ID NO: 170188 - protein, 217 aa, Oryza sativa
  Clone ID: PAT_MRT4530_68536C.1.pep
MKKASRFLKGLLSAIVAAVKARSAAVRAKTSAVRTRLIVLGILRNKKLLLSAINRKIHAIVSSGGGGGSSHGEYGGGGESYGGEQQQHLSGIHLVGGGGYRKAAVLHSLPSFVVEQERSAVVLLSSLPSFAMDRDVYGGGGEAEAEEEQGVGGKQQQQSVIELARGAAAAEAGGGAEFRLEDEIDHVADVFIRRFHEQMKLQKLESFKRLCEMLDRS

SEQ ID NO: 170189 - protein, 91 aa, Oryza sativa
  Clone ID: PAT_MRT4530_68537C.1.pep
GVVCTSPSASAPAVIYTINLFPSINWRISIRSIISMRHACIRIKQLAETNLPRKLISSISYKIWSTAKQKQFNESINQRLIYRLMCTDDHF

SEQ ID NO: 170190 - protein, 140 aa, Oryza sativa
  Clone ID: PAT_MRT4530_68538C.1.pep
PRVRGPDGGISASRYCYMGGFDATSNVAAGWLFGIPIRGTHSHAFVSSFMGLDDIIDRTLASSDGSNKCEDFVSLVQNWLARIKDAGSLRRPLRETNLSELAAFTSYALAFTNSFLALVDTYDVMRSGVPNFCAGALALN

SEQ ID NO: 170191 - protein, 44 aa, Oryza sativa
  Clone ID: PAT_MRT4530_68539C.1.pep
PASTVLDNCTIRRLYGAVNSSYMYPVCMVSVVLASYAFCFHTTV

SEQ ID NO: 170192 - protein, 115 aa, Oryza sativa
  Clone ID: PAT_MRT4530_6853C.1.pep
KKKILALPRPESWNPLKSRPPFFVILLNIGWYKKKKKKRAAAPFFFFFFFFFFFFFFFFFFITKKLQLLHCRHVFFQKKKKKKKKEIINHISPVRLPAIKVHMHDELIPFVDPHA

SEQ ID NO: 170193 - protein, 309 aa, Oryza sativa
  Clone ID: PAT_MRT4530_68540C.1.pep
MPSTPLQGPLPRAHQISRGIGSSGHGSGGGGSGGGGGGGGGGGGGGGGGVLAVGGGSTDDGHRHRLRSFFSELDRRRGRIHPSSVKFSGGVMGCSLVSTARPCSCGPGGDAVDHNSDGHGAEGSWDEQTTVLLKNESIFVVQQRVPAGTGTARCQYTSGRSFLYGPNFLLNFLFFTQKVERLYLITIVLMVVNGLHGQVANYKRKGREKIQRVAKVFMRRLSSVCAWFDNTGWRLIAQNCTERSLPSETLVDAIVGSNAPQIIFQTGVSVGLARIGISFCRCCALSQWKHGSGEPDSSLLASFISSDRL

SEQ ID NO: 170194 - protein, 60 aa, Oryza sativa
  Clone ID: PAT_MRT4530_68541C.1.pep
VSRNRNFILTSGKDNVHNLFDPRTMEVCGKFKAMGNRVIEKGWGTDDPTGPFFVGSFKFM

SEQ ID NO: 170195 - protein, 34 aa, Oryza sativa
  Clone ID: PAT_MRT4530_68542C.1.pep
SPQSNRIESPPPGSSRNKPSPVDLLSSHGGSQAH

SEQ ID NO: 170196 - protein, 309 aa, Oryza sativa
  Clone ID: PAT_MRT4530_68544C.1.pep
MAYIIVIKLLKEDFVRKLIHVLQVMDKFENEDPDIKIDVYKDEIMEHAKSLWINWRGDLHRHFVKPAKTMQQAIKNKPKDFDPSDWQWLVQEHFYSKDFIAELVDVVSSDPNLSNVEVMDKCYNGNKRRDHLIGFGGGVKARDNEWAEMRRDYYANCENRSDTGSQRRHERIHSERDDYDANEDAAVVAATTVTATQATRHPARCGVTEGSGAAAQMRRRGGAKAAARWRKRGKDKGERGERGGRVTRRRRGTAAAMATARGDATARRDGDVDGAAAAARGARRWHRARGDATGGSGDVTVGGVARGAR

SEQ ID NO: 170197 - protein, 57 aa, Oryza sativa
  Clone ID: PAT_MRT4530_68546C.1.pep
AVFVTGYRGLGPSLLYEAGYWLFMWVIWVLKKLCFLFFGGRFYEKKVASEGLMVIPP

SEQ ID NO: 170198 - protein, 80 aa, Oryza sativa
  Clone ID: PAT_MRT4530_68547C.1.pep
ERIVSDVGVSAESVRKWIKFIGCYVEWLYVLIILDYPANGLSDNPVEMSDNLHLPDFRDNISASASASYYPHPHLYSPDF

SEQ ID NO: 170199 - protein, 99 aa, Oryza sativa
  unsure (1)..(99): unsure at all Xaa locations
  Clone ID: PAT_MRT4530_68548C.1.pep
TPMVVSGAERRTDGGQADWLGMRLHDQDMACDGDGEGGRRVVEVSDTSKEEPIAVAIGEAIASEQRHEDNSRLHGGGGIIEATPTLMRHNAHSXXXXXX

SEQ ID NO: 170200 - protein, 45 aa, Oryza sativa
  Clone ID: PAT_MRT4530_68549C.1.pep
MESGWRGVKSIAHKVFDRRAEVVDGMGQKKWMSSGAINAIDELGN

SEQ ID NO: 170201 - protein, 2054 aa, Oryza sativa
  unsure (1)..(2054): unsure at all Xaa locations
  Clone ID: PAT_MRT4530_6854C.1.pep
MEFTDGKSPTRTRLGRQCIVQGPMSPSSTWKRRDLRYKRDPLGGPXGESNSQHHHHSLRNPCTSVPQYSLYPVYGYHPSTVARQVGGLGAQGSTTMSSSLVDNSVNTNLNYGLPASTMLAWTQVGEIVFPVYTTMPISAGPSMTRNENAVAVTQDGSTSKVPPGEVENGTSTTSELKKNSNAAKPCRSDKKHKLTRITSKATGSWCPIQKSRKHTLQACWVFLNARTKIRACKERGIQRVSPTRGVYCPIHKTKNHDLSSCKFFLSVTKMPSPKVQQPGKTLRDEDKERGMTLTPDCFIDVIDIGSSEPLVLHLLEDYDSSSTSTRREVLAIDETGTLARANTGAENMTSTPAQHIRTLNAILRETPYDPVLHDDLTQXTERLRESVTNLSNAFEEAAAATHPEQQPTAGANGENPEQRESPYRASPPPHGTSNLCDHPNGNREARRTRENENRPRHHVSSRHHDNGDHHHNRHIRDDRERRTPADTSRGRRHHDEDDRERRRDNNGGRRQDSREHGRRSRNPTPEPSDPSSSSSSSSSTSSDRHPRRTYDRRQPTAPSAGCRAFGRSLHDVRWPKRFRPGAVEKYDGSTDPEEFLQVYSTVLYAVGSDDNALANYLPTALKGSARSWLMHLPPYSISSWADLWQQFVANFQGTYKRHAIEDDLHALTQSSGESLREYVRHFNECRNTIPEITDASVIRAFKSGVRDRYTTQELATRRITTTRRLFXIVERCAHVDDALRRKNDKPKTGVEKKSTTDTPESSKKKNCKNAERKAQAEVLAAEYANPPKRPDPQGSDARKAWCPIHKLNRHSLEDCLVFKKSLEKHMTSEQGKRVRVVKKDTEMTAQESDPAYPDSDLHVSHIFGGSRARYPIVVEPTIRNIKVARVLIDGGSSINLLFASTLDAMGIPRSELTPTDQPFHGITPQSSSKPMGKITLPMTFGQANNFRTEQITFDVAKFDTAYNAIIGRTALVKFMAASHYAYQVLKMPGPKGTIIIQGNAKRAVQCDKWSLDMVEQTPSPPATTEPPKKMSKTNKTLKPDGAITTVPLSSANPDKTELALITFLRDNADVFAWQPSDMPGVPREVIEHKLMVRPDAKLVKQRLRRFAPDRRXAIREELDKLLKAGFIREVLHPEWLANPVMVRKANGKWRMCVDFTDLNKVCPKDHFPLPRIDQLVDSTAGYELLSFLDAYSGYHQISMAREDEEKTAFITLFEAYVDDIVVKTKKSDSLIDDLREMMDNLRRYFPMLNPEKCTFGVPSGKLLGFLVSGRGIEVNPEKIKAIENMKSPTRLKEEQKLTGCTAALSRFVARMGEQGQPFFALLKKQDKFVWTQEAEEAFIALKRYLSNPPVLVAPQPNEELFLYIAATPYSVSTVIVVEREKVQRPVYYVSEALHDAKTRYPQIQKLLYAVIMTSRKLRHYFQAHRVTVVSSFPLGEVVRNKDVVGHIAKWVVELSQFDVHFVPRTAIKSQVLADFVANWTMPDNQSNNQINNETWTMAFNGALNSQGAGAGFILTSPSGDQFKHVIHLNFRASNNTAEYEGLLAGIRAAAALGVKRLIVKGDSELVANQVHKDYKCSNPELSKYLAKVRKLEKRLNGIEVRHVYRKDNIEPDDLARRASRREPLEPGTFLDILTKPSVKEAISEINTAAPDISSEATEAERAIADIETTDDLHTPPIKFINSKELPEDDAEAEKITRKAKIYYMIGNDLYKKAPNGVLLKCVSSDDGRQLLLDIHEGICGSHAVGRTLVGKAFRQGFFWPTTLKDAFDIQAQKATYTSAPDHPSYLAVLVLGARYTRAIPTRTGRLQVPIXVAIDKFTKWIEAVPTGEIKAANAIKFIKGIFCRYRLLHRIITDNGSQFISADFQDDCIGLGXVKICFTSVSHPQSNRQVERANGIVLQGIKTLLWAIRTTPTTSNKETPFFLVHGSEAMLPSKLRHQSTRAQKYSDEEQEEQRNDDVNLLEEHRKRVAVRAAAYQQALHRYHEKRIQARILSIGDYVLRRVQSQAGRNKLSPKWEGPYTITQXLRPGAFKIADGDSRELLNSWNIDQLREFYV

SEQ ID NO: 170202 - protein, 156 aa, Oryza sativa
  unsure (1)..(156): unsure at all Xaa locations
  Clone ID: PAT_MRT4530_68550C.1.pep
SLCFAPFKDEAFNASPPRRGVRASDVACLPISLGWYGPAEENRRLIKSQCFSTEGTANFYMRPIEGLTVLVDMDTAEVLHVSDRGAGIPIPAAANTDXPARTLGADSGGGASARGGTGTRPSACRSMEPPARAPARSSWFDGHTGRWGXWEFHLKP

SEQ ID NO: 170203 - protein, 119 aa, Oryza sativa
  unsure (1)..(119): unsure at all Xaa locations
  Clone ID: PAT_MRT4530_68551C.1.pep
NPTTQGGTNERGHTGSHQDWGEGKPTNPGTNDPNKAETEATPXKDRGQRDNTRXEKDRRPRPEGPARIRXEXDXRVKTKSTTAGKRGNSQIVDHEDGPLGREKLLHEGKTHRTGEEKEQ

SEQ ID NO: 170204 - protein, 135 aa, Oryza sativa
  Clone ID: PAT_MRT4530_68552C.1.pep
HVVRLAIEGLPAHAVEAEAIKQLLNKIGCQFIEWFEPVDACMTQVLAWSSDPSKIPKEFALDIPEPMQDRWREPEVDDADTFEALVFEAPPAPPAEKKCLTFDLLFRTPLAPCHVQALTALCNLEEKGVEGDGVC

SEQ ID NO: 170205 - protein, 776 aa, Oryza sativa
  Clone ID: PAT_MRT4530_68553C.1.pep
MAAASGEKEEEEKKLQERAPIRRTAWMLANFVVLFLLLALLVRRATAADAEERGVGGAAWRVAFACEAWFAFVWLLNMNAKWSPARFDTYPENLAGRCGAAHRPRKSSCISGHLDLMRRQCALMQDRRAAGGRHVRDDGGPGARAAGGDGEQGALAARRRLLPGRRRRRRRRRLACYVSDDGCSPVTYYALREAAGFARTWVPFCRRHGVAVRAPFRYFASAPEFGPADRKFLDDWTFMKSEYDKLVRRIEDADETTLLRQGGGEFAEFMDAKRTNHRAIVKVIWDNNSKNRIGEEGGFPHLIYVSREKSPGHHHHYKAGAMNALTRVSAVMTNAPIMLNVDCDMFANDPQVVLHAMCLLLGFDDEISSGFVQVPQSFYGDLKDDPFGNKLEVIYKGLFYGGTGCFHCRKAIYGIEPDSIVVGREGAAGSPSYKELQFKFESSEELKESARYIISGDMSGEPIVDISSHIEVAKEVSSCNYESGTHWGLERIHAAGWRSAKLETEPPAFLGCAPTGGPACLTQFKRWATGLFEILISQNNPLLLSIFKHLQFRQCLAYLTLYVWAVRGFVELCYELLVPYCLLTNQSFLSKASENCFNITLALFLTYNTYNFVEYMECGLSVRAWWNNHRMQRIISASAWLLAFFTVLLKTIGLSETVFEVTRKEKSTSDGNGQNDEVDPERFTFDASPVFIPVTALTMLNIVAITIGTWRAVFGTTEDVPGGPGISEFMSCGWLLLCLLPFVRGLVGKGSYGIPWSVKLKASLLVALFLFCSNRN

SEQ ID NO: 170206 - protein, 111 aa, Oryza sativa
  unsure (1)..(111): unsure at all Xaa locations
  Clone ID: PAT_MRT4530_68554C.1.pep
GRGGXSWRRSPLAAAANGAGEPSRGGGGRRRRRWRCLFFVDWKYFRRRVDLPPMKIDAACKYIFSSSATNGESCSLPIFSLKFDLRHLAKQNWIAQTKFDGSLTGKKKKKK

SEQ ID NO: 170207 - protein, 57 aa, Oryza sativa
  Clone ID: PAT_MRT4530_68555C.1.pep
EKKRTEILREETRVAGEHYTQIHSSFSHISETRTHLQKHASASCWTAPVRLKESQGT

SEQ ID NO: 170208 - protein, 793 aa, Oryza sativa
  Clone ID: PAT_MRT4530_68556C.1.pep
MAAASGEKEEEEKKLQERAPIRRTAWMLANFVVLFLLLALLVRRATAADAEERGVGGAAWRVAFACEAWFAFVWLLNMNAKWSPARFDTYPENLAGRCGAAHRPRKSSCISGHLDLMRRQCALMQDRRAAGGRHVRDDGGPGARAAGGDGEQGALAARRRLLPGRRRRRRRRRLACYVSDDGCSPVTYYALREAAGFARTWVPFCRRHGVAVRAPFRYFASAPEFGPADRKFLDDWTFMKSEYDKLVRRIEDADETTLLRQGGGEFAEFMDAKRTNHRAIVKVIWDNNSKNRIGEEGGFPHLIYVSREKSPGHHHHYKAGAMNALTRVSAVMTNAPIMLNVDCDMFANDPQVVLHAMCLLLGFDDEISSGFVQVPQSFYGDLKDDPFGNKLEVIYKGLFYGGTGCFHCRKAIYGIEPDSIVVGREGAAGSPSYKELQFKFESSEELKESARYIISGDMSGEPIVDISSHIEVAKEVSSCNYESGTHWGLEVGWAYGSMTEDILTGQRIHAAGWRSAKLETEPPAFLGCAPTGGPACLTQFKRWATGLFEILISQNNPLLLSIFKHLQFRQCLAYLTLYVWAVRGFVELCYELLVPYCLLTNQSFLSKASENCFNITLALFLTYNTYNFVEYMECGLSVRAWWNNHRMQRIISASAWLLAFFTVLLKTIGLSETVFEVTRKEKSTSDGNGQNDEVDPERFTFDASPVFIPVTALTMLNIVAVTIGAWRAVFGTTEGVPCAPGISEFMCCGWLVLCFFPFVRGLVWGKGSYGIPWSVKLKASLLVALFVFFSNRN

SEQ ID NO: 170209 - protein, 214 aa, Oryza sativa
  unsure (1)..(214): unsure at all Xaa locations
  Clone ID: PAT_MRT4530_68557C.1.pep
RVSYHFGLRDDDEVSYLQHAKKCISLNAKTFRSRAFTFVHVSFTRFVQVXFTFIRVRSRFLHVRSCFVHVRSCSFTLSSSSFTFVCVRSRFVHVSFASVRVRSXSVRIRSRSALXVGSEKGGGGLERERESSXGSGGNPRDMVAVAAAVMTTTTARXWRETTAASARGMPXGSGIKGEAEIXRKTSKCWWRRRVRLRHIYTPGSLVPVGETNRD

SEQ ID NO: 170210 - protein, 77 aa, Oryza sativa
  Clone ID: PAT_MRT4530_68558C.1.pep
MKLVVCAMLMLVIISSCTAATSKEKKGAEMNQLKDAVDQALAKAGQHAIYVGLCHLYTSVRKLQYLDCKHWSDNRFT

SEQ ID NO: 170211 - protein, 85 aa, Oryza sativa
  unsure (1)..(85): unsure at all Xaa locations
  Clone ID: PAT_MRT4530_68559C.1.pep
TARRAYMCMTTCLRSSALSTSFPHTPXARTDSQIDTTPDARRRRPRRLLRSLHHRNYSVXXAAAAKQEQLRNPLSYGELWRAGVF

SEQ ID NO: 170212 - protein, 272 aa, Oryza sativa
  unsure (1)..(272): unsure at all Xaa locations
  Clone ID: PAT_MRT4530_6855C.1.pep
LKGFIASAEGKGRADRVHGSGAHAAASRSTVDRVHSGSHRPAPWVPRVSRTQGRGRLTAGPHAAAARCARRRPRRRGRREAARPRPYGRRRRPWAHRSGGRERGGKXETRRRSTAHPRSTATXEKAAGAEEGGGAARVDGDGGAPAVDERNGGVDEVGEHAAKPKEAAPRWEVVWGDDGGGPELGGDGGERERRRELDSGEEEGRREAETDGGGRGRGGGSGGRKGMTGGPHPSARLAGGPARQRRARGERRRRGREMGRAGPRGRGRERGL

SEQ ID NO: 170213 - protein, 107 aa, Oryza sativa
  Clone ID: PAT_MRT4530_68560C.1.pep
LELCSMLHDESVPVQWHQVLMERLEVGDHLRVSCPPMPVTVHHMCHDPVVRINTDAGPPPKCGCPEVIKGIDSNRHSVAGVTQRQVPSRQGDVRLQVQCLPRCGQEL

SEQ ID NO: 170214 - protein, 85 aa, Oryza sativa
  unsure (1)..(85): unsure at all Xaa locations
  Clone ID: PAT_MRT4530_68561C.1.pep
LSCFFDGYVVVRASWLTVVVGNTPAHGXSAALGAAGLVVILNVCLTMYGVDFLREGEPFTAPTLTLTGRKKEADKLKTVDCWAKF

SEQ ID NO: 170215 - protein, 126 aa, Oryza sativa
  Clone ID: PAT_MRT4530_68562C.1.pep
YSSESNLFSPLLLVAPPNELIVGLRRTRAIVTVRLGPHLSSRIGPTCFTSLPLIPRRKIQSQIPKSKPPPPQRAQLRAYPISLSLARARVSAMRTLGSKGIDAIRDMGGVGGVAVVAGKEKGTAKY

SEQ ID NO: 170216 - protein, 990 aa, Oryza sativa
  Clone ID: PAT_MRT4530_68563C.1.pep
CLGVLSSGIVWLSLFTIFVSIPLATSDDHENDRQTLLCFKSQLSGPTGVLDSWSNASLEFCSWHGVTCSTQSPRRVASIDLASEGISGFISPCIANLTFLTRLQLSNNSFHGSIPSELGLLSQLNTLNLSTNALEGNIPSELSSCSQLEILDLSNNFIQGTIPSSLGNLSSLLDLSLTRNNLVGNVPDSLGLIPKLDLLNLNANNLIGHVPSSIFNMSSLTILTMANNSLIGELPSNLGYTLPNIETLVLSNNRFKGFIPPTLLNASDLSLLYMRNNSLTGLIPFFGSLKNLKELMLSYNKLEAADWSFISSLSNCSKLTKLLIDGNNLKGKLPHSIGNLSSSLKWLWIRDNKISGNIPPEIGNLKSLEMLYMDYNLLTGDIPPTIGNLHNLVVLAIAQNKLSGQIPDTIGNLVKLTDLKLDRNNFSGGIPVTLEHCTQLEILNLAHNSLDGRIPNQIFKISSFSQELDLSHNYLYGGIPEEVGNLINLKKLSISDNRLSGNIPSTLGQCVVLESLEMQSNLFAGSIPNSFENLVGIQKLDISRNNMSGKIPDFLGNFSLLYDLNLSFNNFDGEVPANGIFANASVVSIEGNDYLCTKTPMRGVPLCSKSVDKKRNHRSLVLVLTTVIPIVAITFTLLCLAKYIWTKRMQAEPHVQQLNEHRNITYEDVLKATNRFSSTNLLGSGSFGTVYKGNLHLPFKEKDNLHLQEEHIAIKIFNLDIHGSNKSFVAECETLQNVRHRNLVKIITLCSSVDSTGADFKAIVFPYFPNGNLDMWLHPKSHEHISQTKVLTLRQRINIALDVALALDYLHNQCELPLVHCDLKPSNILLDSDMVAHVSDFGLARFVYTRSNAHQYTSTSLACLKGSIGYIPPEYGMSKDISTKGDVYSFGILLLEMVTGSSPIDEKFNGGTTLHEFVDAALSNSIHEVVDPTMLQDDVSVADVMERCVIPLVKIGLSCSMALPRERPEMGQVSNMILRIKHAASNMSVK

SEQ ID NO: 170217 - protein, 66 aa, Oryza sativa
  Clone ID: PAT_MRT4530_68564C.1.pep
FILLLCFSPPFNFLFYIFYNFFFFFFFFFFFFFFFFFLLAIHIPRTIFAQPTMQRGIYCEGMEPVL

SEQ ID NO: 170218 - protein, 336 aa, Oryza sativa
  unsure (1)..(336): unsure at all Xaa locations
  Clone ID: PAT_MRT4530_68565C.1.pep
MSTEWEQKFPLLIHGDANLKSHITTYYKGLFGLPKESQLQXDESKVADIPQVSHIENEALIQEFTETEIKEAIFQMEHNKAPDPDGFPAEFCQVFWSVIKNDLLDLFKEFHNGSLPLFSLNFGTIILLPKYVEAMKIQQYRLICLLNVSFNFFTKVATNRIMCVAQKVISPTQTAFIPGRNIMEGVVILHETLHELXRKNNSGVILKIDFEKAYDKVKWPFVQXTLRMKGFSPKWCEWIASYIQGGHIGIKVNDQIDDNFQTYKGFGQGXDPLSPILFNIVANMLALLIKGLKRMVLLMGVIPHLVADGLSILQYAXDTIIFLEHDLQQAKNLKLI

SEQ ID NO: 170219 - protein, 139 aa, Oryza sativa
  unsure (1)..(139): unsure at all Xaa locations
  Clone ID: PAT_MRT4530_68566C.1.pep
GGDSSWAKRGGSALARLLRLHLHCSRGHGDGSDDGTRAEVDVGSTASGRFVDVFXGRFWYAILGFSRVKMALNMGSERRPCESIAIVHDFADRIIHVVVVLKSHPPQRRTPPMAQRARLGALLAAISLSSMPGLGGSEH

SEQ ID NO: 170220 - protein, 667 aa, Oryza sativa
  Clone ID: PAT_MRT4530_68567C.1.pep
MTKHDMDCVDKANLSLTGSPFTFSNSANKFTVFGCRMLGYLGPGGQSAVGSNLTIGCATSCGQGDDLLSINGEGCSGIGCCQTAIPKGIKHYKVWFDTHFNTSVIHNWSRCSYGALVEEASFKFSTIYATSSNFSNPFGGEPPFVVDWVVANNTCAEARKHLDSYACASSNSVCIDSSNGPGYFCKCSQGFEGNPYLQGHDGCQDINECEDSNKYPCYGKCINKLGGFDCFCPAGTRGDASVGPCRKEFPLAFGIAIGLGVGFGILLLVLTVAFLVRKRKNDIQKQLRKKYFRKNQGLLLEQLISSDECATDSTKIFTLEELKEATNNFDPARVLGSGGHGMVYKGILSDQRVVAIKKPNIIREEEISQFINEVAILSQINHRNIVKLFGCCLETEVPLLVYDFVPNGSLNCIIHADPSMREFTLSWDQCLRIATEAAGALYYLHSAASVSVLHRDVKSSNILLDANYTAKVSDFGVSRLIPNDQTHVFTNIQGTFGYLDPEYYHTGHLNEKSDVYSFGVVLLELLLRKQPIFDSESGSKKNLSIYFLSELKGRPVAEIAAPEVLEEATEDEINIVASIARACLRLRGEERPTMKQVEMSLQSIRNKGFRSGTVSPEDSDELQTPQSEGHVDYHQATGIGINSMANLASPGCYSLQEEFMLSGSLPR

SEQ ID NO: 170221 - protein, 70 aa, Oryza sativa
  unsure (1)..(70): unsure at all Xaa locations
  Clone ID: PAT_MRT4530_68568C.1.pep
LXSLVYADFLSHRAXTLRTXGAAXDISSXNNIDMXYPRDSSRANFSLXFYLHFQPKGVTGLMMNKKAHSX

SEQ ID NO: 170222 - protein, 70 aa, Oryza sativa
  Clone ID: PAT_MRT4530_68569C.1.pep
SELLLRKNSMAFTFDKEWAFPHRVYFNGDNCVMPPPDAYPWLPNASPLTKQPLTLPLLAFWIVLATFLHR

SEQ ID NO: 170223 - protein, 62 aa, Oryza sativa
  Clone ID: PAT_MRT4530_6856C.1.pep
KLWCICKCYRSSCECYSTMSVSTPCSLRETCPSVSVAMHVPVSLPVLDIEGLRNSPNIERLL

SEQ ID NO: 170224 - protein, 261 aa, Oryza sativa
  Clone ID: PAT_MRT4530_68570C.1.pep
MEMDHAAAEKARWRFSDGGVTDLLQARSLHGTAGHLGCVNAIAWNSKGSLLLSGSDDTRIGIWSYANRELLHDIDTGHSANIFCTKFVPETSDEVIVSGAGDAEVRVFNLSRLSGKRPVEISMEPSAVYQCHSRRIKKLAVEIGNPNIVWSASEDGTLRQHDFRECSSCPRARSTNQECRNVLLDLRWGAKKSLADIPRQPLALKSCDISTVRPHQLLVGGSDAFARLYDRRMLPPLSTCQTKKEPPPCIKMFCPMHLADT

SEQ ID NO: 170225 - protein, 80 aa, Oryza sativa
  Clone ID: PAT_MRT4530_68572C.1.pep
KKRGPMCFFKESNPKWAPPESSRPKKKRCPEQCPLCYPGTPLLNRAVPPSAFFNVDFLPPKNASALAGEGARPRAPANCA

SEQ ID NO: 170226 - protein, 60 aa, Oryza sativa
  unsure (1)..(60): unsure at all Xaa locations
  Clone ID: PAT_MRT4530_68573C.1.pep
IRSQTSCIVIFSNAPSEEATIRXVSFGNRDSHFITATAEQHINIRQINPQLQQNQECSSS

SEQ ID NO: 170227 - protein, 148 aa, Oryza sativa
  Clone ID: PAT_MRT4530_68574C.1.pep
GGFVRPPRRLLDSAAEPAVPSIAAGATSPEAERFSSPQPDAASNPHRRWRGDIGQHRPDGAAADGDHLGRVRGLQQGGGGRSRRRRHPGARRWRRRSGSREQLRAQDRPSLRDMVHHRRGDCRIHSVSREERSELQEMKRIHDLFTMT

SEQ ID NO: 170228 - protein, 56 aa, Oryza sativa
  Clone ID: PAT_MRT4530_68575C.1.pep
MVEICRSSTTVVASKQSSPSPSSSAGASQGGALGEAAFAVLTAVHALSVQRSRQAD

SEQ ID NO: 170229 - protein, 97 aa, Oryza sativa
  Clone ID: PAT_MRT4530_68576C.1.pep
MRHMTTDDDDDDDRHRPRDLQRDRSRRPTDGRGSRWLGRRQQEEAIVAAALMRREETKSKTATTRRQPTNDGRMRRWLAGGERRRRACDDRIWWLGF

SEQ ID NO: 170230 - protein, 135 aa, Oryza sativa
  Clone ID: PAT_MRT4530_68577C.1.pep
SGSPGCRCSLSCPHGGDGRPAIARFSPPLTTTPTCPPLHSAIDTPSRSCHSIAAPTGAMVEICRSSTTVVASKQSSPSPSSSAGASQGETLPRGSEMIPPAVTVAESSRWKEQQHQQQAVPWAKLLSQSSRRCMP

SEQ ID NO: 170231 - protein, 496 aa, Oryza sativa
  Clone ID: PAT_MRT4530_68578C.1.pep
MGVKLLADGCAGASSSPALSRVATSAAHGEGSPYFAGWKAYDEDPYDAAANPDGVIQMGLAENQVSIDLLEGYLREHPEAAAWGVAGDGGGDSFRDNALFQDYHGLANFRKAMARFMEKIMGGKATFDPDRIVLTAGATAANELLTFILADPRDALLIPTPYYPGFDRDLRWRTGVNVVPVHCDSANGFQVTAAALQAAHDEAAAAGMRVRGVLITNPSNPLGTTARREALEGILGFVARNDIHLVSDEIYSGSVFAAPDLVSVAELVESSSSRARHRGEDDDGDVGVADRVHVVYSLSKDLGLPGFRVGVVYSRNDAVVAAARRMSSFTLVSSQTQRTLAAVLSDEAFVDAYVAANRARLRERHDHVVAGLARAGVPCLRGNAGLFVWMDMRRLLLGDGGDAATFAGELRLWDRLLREVKLNVSPGSSCHCSEPGWFRVCFANMSLATLDVALERISRFMDAWCKATIGKFNHLQPNRCEVNYFALERYQGHVQQ

SEQ ID NO: 170232 - protein, 44 aa, Oryza sativa
  Clone ID: PAT_MRT4530_68579C.1.pep
ESQVSICCCLDDECVLEMLRGMMGSGCIEPIFFFLLWDVIGADF

SEQ ID NO: 170233 - protein, 160 aa, Oryza sativa
  Clone ID: PAT_MRT4530_6857C.1.pep
MGVHILNRGEEAFALSSARACIQIMHQFALSTSLGLAETRRGVDKRGRHVLQITSQLCRMMSGGSATCFLLHGQQKVFATLRRRIMIPATISTSQKSQNGRPHTPWKMADSSIGHLGLQEKETDDDVLKICIIFCFARPARSSVVGAHRSIKFELVPFTV

SEQ ID NO: 170234 - protein, 611 aa, Oryza sativa
  Clone ID: PAT_MRT4530_68580C.1.pep
MLLSLCLRLLPLLLVLVAASHGDASGDTYDTSMCLQKPTTCGNVSISYPFYFATKTKDINGSSNSYCGYPGLAIDCDDGKPILQLNGTEKYKVNYINYGSITNVSLADLEVVDDSSGCPRVDHNVTIPQISWLFFSGISVDYLVFFLRCSFTTFAPKPANFNPIACGSFINLTRPSFVFPDELVPPGNWSQLCEETFEVPVLKYQLMEMDSNGNAWNNSGYAQPNLLYPYQYSGYAVMDKTRYSILMPFSVPNFLHANIIAGTSSVLLLCLLSFACLFGLKKSRYRRISKGTPRIESFLQRNGTLHPKRYTYTEVKRMTKSFAEKLGHGGFGAVYRGNLSDGRQVAVKMLKDSKGDGEEFINEVASISRTSHVNVVTLLGFCLHGSKRVLIYEYMPNGSLERYAFRNNSEGEHSLTWEKLFDVVVGIARGLEYLHRGCNTRIVHFDIKPHNILLDQEFCPKISDFGMAKLCSNKESIISIAGARGTIGYIAPEVYSKQFGAISSKSDVYSYGMMILEMVGARERNIDANSESSSHYFPQWIYEHLDEYCINSSEIDGETTELVDLGLYSSPSYGIIDTFCEDDVVVPYLVDNLKEFLDKLDCEVVPNICYC

SEQ ID NO: 170235 - protein, 89 aa, Oryza sativa
  Clone ID: PAT_MRT4530_68581C.1.pep
GKGPKPLQKNTAVIRAHMEYKEGVLLQFVEKGYVLSLVFRMHDFQTARRRGEAINPYRLAYHLGELAKIPLDVSRGGDDDEEENDDDKD

SEQ ID NO: 170236 - protein, 113 aa, Oryza sativa
  Clone ID: PAT_MRT4530_68582C.1.pep
MTGAAESSATGGGRPGADLAGKPPSSLPEARSGKPRPDLATLPPLRRRRRRPRRRERGSGNRSRRAPPAPVIVGHPSRPSPSPTSRGARRSPRHPVKDKEQCSAKFNHDQALH

SEQ ID NO: 170237 - protein, 50 aa, Oryza sativa
  Clone ID: PAT_MRT4530_68583C.1.pep
MGLGIRMSFNKMMSPPRNLLYPPPRVVLLVMWLKFFPGNSCESKFLFSYL

SEQ ID NO: 170238 - protein, 124 aa, Oryza sativa
  Clone ID: PAT_MRT4530_68584C.1.pep
MATVARRQATMATAHGGSGREAATRGDGMGGDGARGRAGWRDSGATAWGARRARQAAMARLGAARGRGCYTLMVTAQYEYSSTRVYSPNLISWGGYSSVFNLGCMAMTGCREELGSQGWLLEIP

SEQ ID NO: 170239 - protein, 177 aa, Oryza sativa
  unsure (1)..(177): unsure at all Xaa locations
  Clone ID: PAT_MRT4530_68585C.1.pep
SSHRRHPSRGPPPSPPRLPATDPDAGRPLPPPPPSSPATDAGFAARSXSPTLDPPPPMPPXPPPTPPSPPAIVPVVVGQRRPSPPPDIQGEGGEGPRTAAAXRPPPDPPPPCLPTTDDATLAPFGRRPRGRRPKTPPPPSPDLQGEGGEPAASRPRPALREEGRRGDERMSDGVTRE

SEQ ID NO: 170240 - protein, 263 aa, Oryza sativa
  Clone ID: PAT_MRT4530_68586C.1.pep
MHRRRQHGSSGELDVFGATRYFAGVATAARPIAVVVVREPEDMIIQVKTTTTTSSDKKTTEKEGHHHAGQLDVVGVAKTTHRSKLAAFLGSLVSPESTSFRKKPPPAASSETTTYNYNDDDNLPKMQVPSSSSTSSGRASIDVAAAAATVHGGGGGRHDDDDLGVDAMWEDRRLQGVRVVRCGRCDEERWVVRCGACCAWEEEEEEHHHGHEKKAILAAAATSTRYGSHQVLAGDREVVGDGACSDWESDSSSDLFELDLEIT

SEQ ID NO: 170241 - protein, 490 aa, Oryza sativa
  Clone ID: PAT_MRT4530_68587C.1.pep
MRPYIPKQTFAFCHSLLSSRLLLPSAAAAPTAPALPVQALLTTAGLLPRHPDLSLVALNSLLRVLSRRASSPAHPLLALRLLLLMLSPASPLPPPDHLSFPFALSAAATVSPSPGAQLHALLVKNGHFPSDHYVTTALLQLQLHAARPDDARRVFDELPRREAIHYDLVIGAYTRTGMAGEGLGVFRAMFVDGVAPDAVVLTTAIAACAQAGALECGEWVHRYVEASAPWLLGDAFVGSALVSMYAKCGCLEQAVRVFDGMPERNDYVWGTMVGAFAVHGMAEEAVSCLDRMAREDGVRPDGVAVLGALSACAHAGKVEDGLRLLKEMRRRYGVAPGHEHYACTVDMLCRVGRLEDAVALIETMPMAPLASVWGSVLTGCRTYANVELAEVAAAELGKLGADEGVYVQLSNIYLDSNRKDDARRVRKLIGSRGIRKVPAYSAVEVDGVVRSFVADDQAHPQRVEIWEVLGLLADQMGEEPDEEEAMAALS

SEQ ID NO: 170242 - protein, 89 aa, Oryza sativa
  Clone ID: PAT_MRT4530_68588C.1.pep
MDTGRIQRIRRSKLQSHHHSEEENVPRATVRMLSQPQSDTHESTDMGKPPPLHSRDDQSNDKKAIAADVHTWGYPMRTAVPESGGGFCI

SEQ ID NO: 170243 - protein, 62 aa, Oryza sativa
  Clone ID: PAT_MRT4530_68589C.1.pep
MCYFGVWPFLLNGFSQIFFFRPQSVFPPPFKKKKKKKKKKKKKKKKKKKKKKKKKKKKKKKK

SEQ ID NO: 170244 - protein, 1139 aa, Oryza sativa
  Clone ID: PAT_MRT4530_6858C.1.pep
MPISASPSMAGNENVVGTTQNNSLSKDPPAGAEIGTSTTSEPEKDPSAAKPCLFDKNHEPTRMTSEVTRSWCPIHKTRKHTLQASWVFLNVHAEIRACKERGIQRTSPTRDVHCPIHKAKNHDISSCKVFLSAMKTPPPKVQQSRIPLRDKDKEQGATLISDRFVGVIDIDPHEPSVLHLLEDYGLSSTSTPREVLAIDESGTNAFEEVAAAAHPEQPPTGDANGENPEQRESPHRATPPPRGTGDLRDHLNGRREARRTRDNENRSRRHVSSRRHGNEERGGRSSEDRGRDNRHNRHDHDDHERRVLGDTGQGRRHNDGDDLWQQFVANFQGTYKRHVIEDDLHALTQNSDESLRDYVRRFNECRNTIPEITDASVIRAFKSGVKDRYTTQELATRHITTTRRLFEIVDRCAHADDALRRKNDKPKTGGEKKSTKDAPESSKKKNRKSGKRKAQTEVLATEYADPPKRADPQSSGTKKTWCPIHKSDRHSLEDCLVFKKSLAKHMASEKGKRVRVVKKDAEAATQESDSAYPDSDLHVSHIFGSSAAYSSKREYKKVEREVCSMWQGAAPKMKWSEQKIEFSEEDHPKTAVIPGRYPIVVEPTIRNIKVARVLIDGGSSINLLFASTLDTMGIPRSELTPTDQPFHGITPQSSSKPLGKITLPVTFGQANNFRTEKITFDVTEFDTAYNAIIGRTTLAKFMAASHNAYQVLKMPGPKGTITIQENAKLVVQCDKRSLDMVEHMPSPPATAEPPKKVGKMNKTLKPDGAIKIVPLSSANPDKTVKIGPSDMPGVPREVIEHKLMVRPDAKPVKQKLRRFAPDRKQAIREELDKLLKAGFIREVLHPEWLANPVMVRKANGKWRMCVDFTDLNKECPKDHFPLPRIDQLVDSTAGCELLSFLDAYSGYHQISMAKEDEEKTAFITPFGVFYYVKMPFGLITAGNTFQSTVQGTFSNQLGNNVEAYVNDIVVKTKTSDSLIDDLRETFDNLRRYRLMLNQEKCTFRVPSGKLLGFLVSGRGIEANSEKIKAIENMKSPTRLKEVHKLTGCMAALSRSNNQIDNETWTMAFDGALNSQRAGAGFILTSPSGDQFKHAIHLNFRATNNIAEYEGLLAGIRAATARSQATDRERGFRTSRKPGA

SEQ ID NO: 170245 - protein, 59 aa, Oryza sativa
  Clone ID: PAT_MRT4530_68590C.1.pep
MYYYDVKRWGQQRKKKGAIPSLKQPTGGSINAAHKAVHSLHTGLNASTSSKHHSILAFN

SEQ ID NO: 170246 - protein, 65 aa, Oryza sativa
  Clone ID: PAT_MRT4530_68591C.1.pep
YNRRAKGKEPCCTVDLGQRIGPEHGQRGHPYQHSSTAAVREATRSWTGTRLHPVTGRAFNQGIAA

SEQ ID NO: 170247 - protein, 135 aa, Oryza sativa
  Clone ID: PAT_MRT4530_68592C.1.pep
MAEIESVYRGSMGTSTVTSAMSSSPAATWPRMLAGERRRGGVNGGHLCVEGDAANSPRAWTTTDGNGRRRRRGRSGGDVWVNDDGGAPALFGGNGGRDEDGDDLAIPTAVFSSDDDDRDDGGARLDTRRRRRRKS

SEQ ID NO: 170248 - protein, 637 aa, Oryza sativa
  Clone ID: PAT_MRT4530_68593C.1.pep
MVSLFVPCVGDSMSRESICGDGLGVGLGIRRRPWCKYLLRAAFGYGNYDRINRLPTFDLYLGVNYWTTVRIVNARLDLRPFQEKIYPGSNMTHALVLLSFFRNTVKFGPNRYHFGTDDHQIRFPDDPRDRIWQKYEDVSEWTDVPDTVNGIVQNSPNDTYNVPSAVMRSVSTPLNDSRMDLSWSSDSSMNVDIATKFFVVLYFAEVEAIQGNALRQFDIILDNNTLVSAFSPISMMTSVFSGIVQGSGSHGISLVATSISNLPPLISAMEIFVVRPLNESSTYSEDAHSMMIIQTKFSVKRNWAGDPCSPATFSWDDLNCSYTPHGPPRITGLDLSHNNLSGPIPDFLGQVPSLIFLDLSSNNFSGSIPTNLLQKSQEGLLTLRTENNPNLCGTDKCDLILNQSKRKTKLVLEVVPPVVLVFVVLLILAIFWYCRKKRPADVTGATNPFENRRFKYKELKLIADSFKTIIGRGGFGPVYLGYLENGTPVAVKMRSQTSNQGKTEFLAEAQHLARVHHRNLVSLIGYCNDKKHLALVYEYMDGGSLADHLRGQEDLHTEPLTWLQRLNIALDSANGLEYLHRSCSPPLIHRDVKAHNILLTANFKAKISDFGLTRAFSSETNTHSTTEPAGVGSNSKN

SEQ ID NO: 170249 - protein, 75 aa, Oryza sativa
  Clone ID: PAT_MRT4530_68594C.1.pep
INLAWLLFLLTSLERVTQSRTFRGCFRCLACLSVDYAADIIHGRKIFFQLGLPGHVLNSYLCNSCQECYHLCDGT

SEQ ID NO: 170250 - protein, 96 aa, Oryza sativa
  Clone ID: PAT_MRT4530_68595C.1.pep
DISKAFDSVSWPYLLKVLQSLGFGSRWRNWVSNLLSSSSSKILLNGSPGEEIKYFRALRQGDPLSPLMFILVKEFVQRNCCSLILFFPTRRCLLGK

SEQ ID NO: 170251 - protein, 39 aa, Oryza sativa
  Clone ID: PAT_MRT4530_68596C.1.pep
DREGYPEVLAETSGRRLIAKIFLSAARKFLALLPGTSWQ

SEQ ID NO: 170252 - protein, 166 aa, Oryza sativa
  Clone ID: PAT_MRT4530_68597C.1.pep
MAKLAGRGSNGATDEALREWRHHGSKFYDTFTVSGLRVDAIQPGRVLCSFTVPPRLTEEIEMEARVLGIGETTGCVTVEVRRKGAGEVLAHGRITKSLGGFDPILSDVTAESAWIHAGRWVGRRSPTAGCSGCGAYLAVPPGARSVRCALCHAVTRVPRPRQPQRA

SEQ ID NO: 170253 - protein, 116 aa, Oryza sativa
  Clone ID: PAT_MRT4530_68598C.1.pep
IFFSFSFSFSFILFAASGEEGVWAPLPAAETLPSARNGSVIRAFALRHPRLQGWRNWLHIKRNMSWMKFSAWSLYKNLIDLQAELEVKYYRLCRFNNGFLKMFSAFTVIPPCYAYW

SEQ ID NO: 170254 - protein, 84 aa, Oryza sativa
  Clone ID: PAT_MRT4530_68599C.1.pep
LYHDIEVSSNLHGCTPARVRSSRSRAAPFFFFFPVLLYYAVMHIMFLLWHVLEHTSTILIIYSYCSFCHMMTVYLPWWCSSKLL

SEQ ID NO: 170255 - protein, 93 aa, Oryza sativa
  Clone ID: PAT_MRT4530_6859C.1.pep
MDRFQPKAWALFNKGGPHSLPLERITPRQLGLGQPHLGRIVIINDEDILHYYPLAKTQQGAKGENDEDILHYYPLAKTQQGAKWSSCSRAATV

SEQ ID NO: 170256 - protein, 469 aa, Oryza sativa
  Clone ID: PAT_MRT4530_685C.1.pep
GLQAVGEVAKLREKWPRGTRCSTLLPRRRFCSPLKTPPPSPPPPHLRRLQTLTRALASSSSAMASPPAKKVLVPIASGTEPMEAVITVDVLRRAGADVSVASVDPGSAQVGGAWGVKLAADALLDDLADAEFDLISLPGGMPGSSNLRDCKLLENMVKKHAGKGKLYAAICAAPAVALGSWGLLNGLKATCYPSFMDKLPSEVNAVESRVQIDGNCVTSRGPGTAMEYSVVLVEQLYGKEKADEVAGPMLMLAFNLVLTSFKVMRPQHGVEFSLKELNSTSWNVGETPQILVPIANGTEEMEATMIIDILRRAKANVVVASLEETLEIVASRKVKMVADVLLDDALKQQYDLILLPGGLGGAQAYAKSDKLIGLIKKQAEANKLYGAICASPAIALEPHGLLKGKKATSFPGMWNKLSDQSECKNRVVVDGNLITSQGPGTSMEFSLAIVEKLFGRERAVELAKTMVFM

SEQ ID NO: 170257 - protein, 587 aa, Oryza sativa
  Clone ID: PAT_MRT4530_68600C.1.pep
MPAPSTDSPAADQSPGRGRPRRRLGRKPGPRQGCVPAPAAAEQLAAGWPPWLVAVAGEALRGWTPRRADTFEKLNKIGSGTYSNVYRARDTVSGRIVALKKVRFDNLEPESVKFMAREILILRKLDHPNVIKLEGLVTSRMSCSLYLVFEYMEHDLAGLAASPDVKFTLPQIKCYVQQLLSGLEHCHNNNVLHRDIKGSNLLLDNNGILKIADFGLATFFDPRHKRPMTSRVVTLWYRPPELLLGATDYGVGVDLWSAGCILAELLHGKPIMPGRTEEKIKESCQSMIAIEVEQLHKIFKLCGSPSEEYWKKSKLPHATIFKPQQPYKRCIREAFKDFPPSSLPLVETLLAIDPAERQTATSALQSEVCPYLFLLSIVTENVSVKFGLYQGPHLYEGLNGYFDFQYRFQKFFATEPYACDPSSLPTYPPSKEMDAKMRDEEARRLRAAAKAKGEGVKRTRTRDRSQRAGPAPEANAELQANLDQRRRMITHANAKSKSEKFPPPHQDGAMGNPLGSSRHMEPMYEHQDASFSTVVPIQKGSSQTWSGPLVDPAALGQSRRKKQTALDAKAAAYSKQLQKDKGGTRAR

SEQ ID NO: 170258 - protein, 141 aa, Oryza sativa
  Clone ID: PAT_MRT4530_68601C.1.pep
MPMRGHSGRKCAPRHRAVRGHAYTVHPHPRLLLLEYGVRARTVHPRLGHLRVDPNNRLALQFAEDDACAPCAARSLALAYEPQVRWGGDRSRAARTAAEYAKTTVRSPREGREAAARVPASSSAFRARDLFFYHHHYLSLA

SEQ ID NO: 170259 - protein, 59 aa, Oryza sativa
  Clone ID: PAT_MRT4530_68602C.1.pep
VTLGFRTNGDLSTVNTRCAYGPRGVASQPAVSVVASKSGIPFLTGNPHRGCAPPAQAYA

SEQ ID NO: 170260 - protein, 60 aa, Oryza sativa
  Clone ID: PAT_MRT4530_68603C.1.pep
CLVRAFSRRIPRSSTPGFTIPMKSSFPPDFGKFRIPPVPETEASVAIVNPGPHTPISDHV

SEQ ID NO: 170261 - protein, 45 aa, Oryza sativa
  Clone ID: PAT_MRT4530_68604C.1.pep
GVSFTYSLVETIVKFVYFKREYSNVCNILKITAAWYLHMIIPMLH

SEQ ID NO: 170262 - protein, 117 aa, Oryza sativa
  Clone ID: PAT_MRT4530_68605C.1.pep
KIEPQQLQALRSLSAVKMEQPTSDPSAFLQQQQQQQHLLQLTKQNPQAAAAAQLNLLQQQRILQMQQQQQQQQQQILKNLPLQRNQLQQQQLLRQQSLNMRTPGKSAPYEPGTALSR

SEQ ID NO: 170263 - protein, 931 aa, Oryza sativa
  unsure (1)..(931): unsure at all Xaa locations
  Clone ID: PAT_MRT4530_68606C.1.pep
MVPSGPPNPMGPGQPVGAASLLRTSSSLLSGGQQGMGSGGGMLPSQSPFSSLVSPRTQFGANGLLGGGSNVSSLLNRPFGNGGHMLGPGSMPGGGGLPMNTLQQQRGGLDGAGDLVGAGGSDSLSFPSSSQVSLGNQLGSDNLHPPPQHQQQQQHLDAMQDLQHQHQHQQQLPMSYNQQQLPPQPPQQPQATVKLENGGSTGGVKLEPQMGQPDQNSTAQMMRNASNVKIEPPQLQALRSLSAVKMEQQSSDPSAFLQQQQQQQHLLQLTKQNPQAAAAAQLNLLQQQRILQMQQQQQQQQQILKNLPLQRNQLQQQQQQQQQQQQLLRQQSLNMRTPGKSAPYEPGTCAKRLTHYMYHQQNRPQDNNIEYWRNFVNEYFSPNAKKRWXVWHCEICNRKPGRGFEXSGQIVLDYTKAIQESVFEQLRVVREGHLRIVFNPDLKIASWEFCARRHEELIPRRSIIPQVSQLGAVVQKYQSAVQNSTNLSTQDMQNNCNSHLPSVQVPPKCQKTQCCANGMSLKYVKNYKRKAFWIYGCMVILTVLAPFVACARQLAKALEVPLVNDLGYTKRYVRCLQIAEVVNCMKDLIDYSRQNGSGPIASLHSFPRRTSSGGVNPQQSQQQQPEEQQSIPQSSNQSGQNAAPMTGVQASASANADVTSNNSLSCAPSTSAPSPSVVGLLQGSMNSRQDHPMSSANGPYTSGNSAAIPKVNSTTSLQSTPSTSFPSPVPTTSNNNMMPAPQNTNQLSSPTASSNLPPMQPPATRPQEPDPNESQSSVQRILQDLMMSPQMNGVGQLGNDMKRPNGLTSSVNGVNCLVGNAVTNNSGMGGMGFGAMGGLGPNHAASGLRTAIANNAMAISGRMGMNHSAHDLSQLGQLQQQQQHQHQHQHQHQQQQQQQQQQQHDLGNQLLSGLRAANSFNNLQYDWKPSQ

SEQ ID NO: 170264 - protein, 75 aa, Oryza sativa
  Clone ID: PAT_MRT4530_68607C.1.pep
MDLGRARKQEPISNPLGATVPRGIGDPGSLTAGSGRPRRVRQAAGCCGGREEGKGFGCGSGRGTAAGSQRIETGM

SEQ ID NO: 170265 - protein, 101 aa, Oryza sativa
  unsure (1)..(101): unsure at all Xaa locations
  Clone ID: PAT_MRT4530_68608C.1.pep
MVPSGPPNPMGPGQPVGAASLLRTSSSLLSGGQQGMGSGGGMLPSQSPFSSLVSPRTQFGANGLLGGGSNVSSXLQQQRGGLDGAGDLVGAGGSDSLSFPS

SEQ ID NO: 170266 - protein, 331 aa, Oryza sativa
  Clone ID: PAT_MRT4530_68609C.1.pep
MAGAATVAGGREPTSSGARARGVGRLESVTAGGKWGKRKRVAWGGFLWAREGGTAIGSSGVVGRSRVGTWRSYHLKALDARQDAHHVHYRFWARLCIEGIPMHARTEVTTVKLIGPRCAIYFIEEYSRRHNYNRTFDLWIWTNDPDAIPKMAWLGLVNPDDEPVPIDTPVPDIDPMHNPHLSGPKDGWSSPVIIHLDTIEDHQPRPMLYKQYEWSYGAYDDVSHSRSRPLPIPCRQETSAVQGLDEDPDGNGGRPHPRYRSRSRGTREARSSKKTPRESKRLSSSRQMVIRCFKQPLTPRSLKMIADLVKKGGCKKLKLKATKGKAAVAPA

SEQ ID NO: 170267 - protein, 165 aa, Oryza sativa
  Clone ID: PAT_MRT4530_6860C.1.pep
MASQLVEEHRSGAEVHTGHELCERKARELLVELGLPDGLLPLPSLEEVGYNRAAGFVWLRQTQAGGATHTFDTIGKQVWYAGEVTAFVEQGRMHGVAGVKSKELLIWVSISEIVLSPSGTKLVFRTPAGLGRALPVTAFQLNPAPPEPEKKDAAAADEADAAATN

SEQ ID NO: 170268 - protein, 150 aa, Oryza sativa
  Clone ID: PAT_MRT4530_68610C.1.pep
VLLYVDMPRESQNASGQIVLDYTKAIQESVFEQLRVVREGHLRIVFNPDLKIASWEFCAWRHEELIPRRSIIPQVSQLGAVVQKYQSAVQNSTNLSTQDMQNNCNSFVACARQLAKALEVPLVNDLGYTKRYVRLLQIAEVVNCLKDLIG

SEQ ID NO: 170269 - protein, 202 aa, Oryza sativa
  Clone ID: PAT_MRT4530_68611C.1.pep
MLTLMFFLSRTFFPAVLLFRNSVCLRTCTSRQAIKFLGSVLAQLLLFCFDFFLCIAMASIGDGAPGAVGNGSAPGGGGNGSAPGDNTNEGNTNASTSSALFSGGEEADHGRRRQAEAPLLEKKGSTGIGNGYCIERCPGAASTGVRPRAPASPTGASSSSGSSRSAQIREPQPTIEFGHDTEGFFGEILNNYSFSHNQKLSK

SEQ ID NO: 170270 - protein, 104 aa, Oryza sativa
  Clone ID: PAT_MRT4530_68612C.1.pep
DRVAPRSRTSPPILLAKTSYQYLHVPTLLRPTTPLLPIAVPPSRAHKNPPHATLFRFPHFPPAVTLSSRPTPRARAPLLVGSLPPATVAAPAIAALQPPATTAL

SEQ ID NO: 170271 - protein, 924 aa, Oryza sativa
  unsure (1)..(924): unsure at all Xaa locations
  Clone ID: PAT_MRT4530_68613C.1.pep
MVPSGPPNPMGPGQPVGAAASLLRTSSSLLSGGQQGMGSGGGMIPSQSPFSSLVSPRTQFGANGLLGGGSNVSSLLNRPFGNGGHMLGPGLMPGGGGIPMNTLQQQRGGLDGAGDLVGVGGSDPLSFPSSSQVSLGNQLGSDNLHQPPQHQQQQQQLDAMHDLQQQQHHQQLPMSYNQQHLPPQPPQQPQATVKLENGGSTGGVKLEPQMGQPDQNSSAQMMRHASNVKIEPQQLQALRSLSAVKMEQPTSDPSAFLQQQQQQQHLLQLTKQNPQAAAAAQLNLLQQQRILQMQQQQQQQQQQILKNLPLQRNQLQQQQLLRQQSLNMRTPGKSAPYEPGTCAKRLTHYMYHQQNRPQANNNIEYWRNFVNEYFSPNAKKRWCVSLYGSGRQTTGVFPQDVWHCEICNRKPGRGFXNASGQIVLDYTKAIQESVFEQLRVVREGHLRIVFNPDLKIASWEFCARRHEELIPRRSIIPQVSQLGAVVQKYQSAVQNSTNLSTQDMQNNCNSATHHNAISSIYSQSNEFCPYSGPMGVWFVACARQLAKALEVPLVNDLGYTKRYVRCLQIAEVVNCMKDLIDYSRQNGSGPIASLHSFPRRTSSGVSPHQSQQQQPEEQQSIPQSSNQSGQNAAPMTGVQASASANADVTSNNSLSCAPSTSAPSPSVVGLLQGSMNSRQDHPMSSANGPYTSGNSAAIPKVNSTTSLQSNPSTSFPSPMPTTSNNNMMPAPQSTNQLSSPTTSSNLPPMQPPATRPQEPEPNESQSSVQRILQDLMMSPQMNGIGQLGNDMKRPNGLTSSVNGVNCLVGNAVTNNSGMGGMGGMGFGAMGGLGPNHAASGLRTAMVNNAMAISGRMGMNHSAHDLSQLGQLQQQQQHQHHVQDDTRNLFQQQQQQQHDLGNQLLSGLRAANSFNNLQYDWKPSQ

SEQ ID NO: 170272 - protein, 55 aa, Oryza sativa
  Clone ID: PAT_MRT4530_68614C.1.pep
GTGPGIPGRAHARGYNTSIHNTLRGYYSNVCRHLPPPCGDAKSYSNKPMGRPASD

SEQ ID NO: 170273 - protein, 99 aa, Oryza sativa
  Clone ID: PAT_MRT4530_68615C.1.pep
MDETVAPHPSTNHAIPRSALNPAKPSSRMTQLTPPPSSLHRCHRAVLGLPRRRRLALRKPSTLWHAVAKPPRGRRCKPSTQPHAIAEPPGDRRHVIWPP

SEQ ID NO: 170274 - protein, 123 aa, Oryza sativa
  Clone ID: PAT_MRT4530_68616C.1.pep
MEICLVGLVGGGRRPAGEPAHCPSAAASPVADALLSRLALSASQRLLHPGSQRPPRRQQARRNASLLLLIHPDPVPTATAAIQRPAAATITASWASWAVGDSRPAIEHDKTFILPDLAQLRVK

SEQ ID NO: 170275 - protein, 92 aa, Oryza sativa
  unsure (1)..(92): unsure at all Xaa locations
  Clone ID: PAT_MRT4530_68617C.1.pep
CFLYDHNYFYLYWINHRSYSSTVHLNQKKKVQWQKKNEVHTIVSLIKAIYSFLHVELINWPFLFSXVICKSFSXLYPAKTKIRQGILMIHLR

SEQ ID NO: 170276 - protein, 53 aa, Oryza sativa
  Clone ID: PAT_MRT4530_68618C.1.pep
YTTVPISASPPMTGNENAVATTRGDSMSKDPPCKPAGFSSTSMLSSCKVFLSA

SEQ ID NO: 170277 - protein, 91 aa, Oryza sativa
  Clone ID: PAT_MRT4530_68619C.1.pep
TALASLLPAIVERVARSSLSAPPCSRRSIRGQVAGKKIYSEGDELAHKVAELSEKVEDLIADELKDMFRRAQARVRRYGGLRYHVYQKVTS

SEQ ID NO: 170278 - protein, 1714 aa, Oryza sativa
  Clone ID: PAT_MRT4530_6861C.1.pep
MSFVISLTLLTIIEDAITGNNLISSWFGMMPRYKPEYLFGVECFVQELCTMSFVIGFGTAPFYAQIPHDRHEEKCRVKVTLNSNSEDIPSVMFEAGGRNYIHACQEVARIAIGELRDHYSDQLADTEYRYHPRQPQGSDRGSYLETEGIENDATTRHLVEMLWAMDESRAETVLAAQDREDRNRGKICKLEDKVDRLEKELATLKGEAPPQKARIRLTARKRALFVPRYQLAPKFPPVSLLVPCPCQMVNTRSNGNGPNNPNNNNNGENPTLTQVLVQQTQLMNMMMQQLQNQQNQGNNHAPPQNKLAEFLRVRPPIFSSTTNPVEAGDWLHAIEKKLDLLQCTDQEKVSFASHQLHGPASEWWDHFRLNRTTAEPITWLEFTAAFRKTHIPSGVVSLKKKEFRSLTQGSRSVTEYLHEFNRLARYAPEDVRNDEERQEKFLEGLNDELSYPLMTGDYHDFQKLVDKAIRLEDKYNRMEQKKRRIAQFKTQQGNNQKPRLTLGPQTMPHGGSSSVVRPQRQFFNNNAGNNIRNQAPRPVAAPTQQQPAKREQGSKPVVVPAQNNSAVPASKARVNHVAAAEAQDAPDVILGTFLVNSVPATVLFDSGATHSFLSMSFAGNHGMEVEDLRRPLMVSTPSNQALSLQRSPSVRIEIQGVPFLANLILLESKDLDVILGMDWLARHKGVIDCANRKVTLTSNDGRVVTVHALSSESLRSRLNPITLEEIPIVREYPDVFPDNLPGMPPKRDIEFRIDLVPGTTPIHKRPYRMAANELAEVKRQVDDLLQKGYIRPSSSPWGAPVIFVEKKDHTQRMCVDYRALNDVTIKNKYPLPRIDDLFDQLKGATVFSKIDLRSGYHQLRIKEEDIPKTAFTTRYGLFECIVMSFGLTNAPAFFMNLMNKVFMEYLDKFVVVFIDDILIYSRTKEEHEEHLRLALEKLREHELYAKFSKCEFWLSEVKFLGHVISAGGVAVDPSNVESVTNWKQPKTVSEIRSFLGLAGYYRRFIENFSKIAKPMTRLLQKDVRYKWSEECEQSFQELKNRLISAPILILPDPKKGFQVYCDASKLGLGCVLMQDGKVVAYASRQLRPYEKNYPTHDLELPAVVHALKIWRHYLFGTRTEMYTDHKSLKYIFTQPDLNMRQRRWLELIKDYDIGIHYHPGRANVVADALSRKGYCNATEGRQLPLELCKEFERLNLGIVSRGFVAALEAKPTLIDQVREAQINDPDIQEIKKNMRRGKAIGFLEDEQGTVWLGERICVPDNKDLKDAILKEAHDTLYSIHPGSTKMYQDLKERFWWASMKREIAEYVAVCDVCQRVKAEHQKPAGLLQPLKIPEWKWEEIGMDFITGLPRTSSGHDSIWVIVDRLTKVAHFIPVKTTYSGSRLAELYMARIVCLHGVPKKIVSDRGSQFTSNFWKKLQEEMGSKLNFSTAYHPQTDGQTERVNQILEDMLRACALDFGGSWDKNLPYAEFSYNNSYQASLQMAPYEALYGRKCRTPLLWDQTGERQVFGTDILREAEEKVKIIQERLRVAQSRHKSYADNRRRDLSFEEGDYVYLRVTPLRGVHRFQTKGKLAPRFVGPYKIVSRRGEVAYQLELPQSLAGVHNVFHVSQLKKCLRVPTEEANIDQIEVQEDLTYVEKPIRILETNERRTRNRVIRFCKVQWSNHSEEESTWEREDELNFGIEFDSDRFSLFPSREFPSPLPSPWAFAAASEPL

SEQ ID NO: 170279 - protein, 151 aa, Oryza sativa
  Clone ID: PAT_MRT4530_68620C.1.pep
MEEDEDGILHSNRPGSESGKMTLVAKGAWACWYEEEAAPHGAADTFGDSPNTIHHAGEDEAMAVGRHSPRAWPDRCPSPCAQSRRVRFTNVICPGKLTYVHGMPNGHYRPRQLRDAAAAAQGGGGAATEGGGGGTTDGGSGNWASTAAQSG

SEQ ID NO: 170280 - protein, 224 aa, Oryza sativa
  Clone ID: PAT_MRT4530_68621C.1.pep
MAVVLTCSRSLSGLDPPGLASPRQGHLLVASKRYNAGGGGFMPLDGSRDWCGVFDGHAVPGVPPFSPAPLRPHPPLSLADTAAMASTPQTNRKLAVLHHAIGDGCTAADESWCGDCPYSYLMEIVEQQAANVGGVVQSDLTGVCEQQKHTYSDQENCYAENASEPPESSNPSCAYWLPTLKESTPGAAMLIDEMELRQADEQHPGVHAPQSPAAVSGVTRRAPD

SEQ ID NO: 170281 - protein, 110 aa, Oryza sativa
  Clone ID: PAT_MRT4530_68622C.1.pep
TVLLQQQVLSPYNEFGRHHIGIAPSPSLQSAVFPLRNNQVWHQLALVAHHSHYPDINIGHAIAQDVPLQQAGDLYCDRNLAQAQALLAGNAPCRYGVYPTYYGAPSTITT

SEQ ID NO: 170282 - protein, 150 aa, Oryza sativa
  Clone ID: PAT_MRT4530_68623C.1.pep
AIGTSSQPGPAPLRPHPPLSLADTAAMASTPQTNRKLAVLHHAIGDGCTAADEVGVSSNKPAQEELASSMSYTYLILSCGSSSGSPMVGFAGDCPYSYLMEIVEQQAANVGGVVQSDLTGVCEQQKHTYSDQENCYAENASEPPESSNPS

SEQ ID NO: 170283 - protein, 97 aa, Oryza sativa
  unsure (1)..(97): unsure at all Xaa locations
  Clone ID: PAT_MRT4530_68624C.1.pep
KGGSDTSLAPSQGLTYTGGLPVNRRSSSSSFGNLSNGGRITCMQVGPIEGXIKNLETLSHLPPLTEEDLLNHIESLLPSTRAPRLELTKAGIXYREN

SEQ ID NO: 170284 - protein, 105 aa, Oryza sativa
  Clone ID: PAT_MRT4530_68625C.1.pep
RSPSDSAAAASTPPGRTKVSAPAVQQSMITATSRSRGSPWRSRHWPPPPEEAPPAAATSRCSDRVGVGGGLQVDLEVETRQSSHQVLQREVYTPRRGVRRRRRAT

SEQ ID NO: 170285 - protein, 203 aa, Oryza sativa
  Clone ID: PAT_MRT4530_68626C.1.pep
MPSARVQAGGGGNGGAGGGGSGRFKRALLRNLILGLRKGGVASGEMGFHERKSAIKRAADAALAAARGAAPCWSRSLAAELAQAPQQHRSPPSPSPRKMICRKIVRRSLIRRRRRPIRPANNTTAATTKAYGGGGGGGGGVARAMVRKRASVLKEIVPGGKALDMCALLGETLDYAVSLKAQVDVMQLLVRTLQEQKLKNSGN

SEQ ID NO: 170286 - protein, 53 aa, Oryza sativa
  unsure (1)..(53): unsure at all Xaa locations
  Clone ID: PAT_MRT4530_68627C.1.pep
MCAARMALWCSALAAXACANVFGKGRMTMRKAGGKAKTAWSRCPWYGANRVLY

SEQ ID NO: 170287 - protein, 83 aa, Oryza sativa
  Clone ID: PAT_MRT4530_68628C.1.pep
SSSPHPAAMADAGKPDPVLSSEAPSVKKGVFMRRIFPVPPRRQHFHRSLRFCKDLQERPGKEERSYCCCCSCRCSIVNLQLPQ

SEQ ID NO: 170288 - protein, 103 aa, Oryza sativa
  unsure (1)..(103): unsure at all Xaa locations
  Clone ID: PAT_MRT4530_68629C.1.pep
SGISIHVQDGYLHLFNISYXXKKKKKKKKXEKKKKKKKRAADVGAPKITHSCMQRGGDSIAVQKFNPVAAIVQLFKWEKQGKTRLNPIERHTSKTRWGTNEKA

SEQ ID NO: 170289 - protein, 1375 aa, Oryza sativa
  Clone ID: PAT_MRT4530_6862C.1.pep
MSSSFVDNSVNTNLNQGVPISTMLVWTQVGEIVFPVYTTVPISAGPSMTGSENAVATTQDDSMSKDPPAKAENGTSTTSEPEKDPSAAKPCLSYKNHEPMRMTSEVTRSWCPIHKTRKHTLQACWVFLNVYAKIRAYKECGIQRTSPTRDVYCPIHKTKNHDLSSFKVFLSAMKTSPPKVQQSCIPLRDEDKEQGATLISDRFVGVIDIDPHEPSVLHLLEDYGSSSTSTPREVLAIDGTSTSARANAEAENQVTTPAQHIRAINAILRETPYDPVLNDDLARWIERLRESVTNLSNAFEEATTAAHPEQPPTGDRHPRRTYDRRQPTAPSAGCRAFSRSLRDVRWPERFRPGAIEKYDGSTNPEEFLQVYSTVLYAAGADDSALVNYLPTALKGSARSWLMHLPPYSISLWADLWQQFVANFQGTYKRHAIEDDLHALTQNPGESLSDYVWRFNECRNTIPEITDASVIRAFKSGVRDRYTTQELATRRVTTTRRLFEIVDRCAHTDDALRRNNDKPKTGGEKKPAKDAPESSKKKNRKSGKRKAQAEVLTTEYADPPKRLDPQGSDTKKTWCPIHKSDRHSLEDCLVFKKSLAKHMALEKGKRGAAPKMKWSEQKIEFSEEDHPKTAVILGRYPIVVEPTIRNIKVTRVLIDGGSSINLLFAITLDAMGIPRSELTPTDQPFHGITPQSSSKPLGKITLPVTFGQANNFRTEQITFDVAEFNTTYNAIIGRTALAKFMAASHYAYQVLKMPGLKGTITIQGNAKLAVQCDKRSLDMVEHTPSPPTTAEPPKKRFAPDQKQAIREELDKLLKAGFIREVLHPEWLANPVMVRKANGKWRMCVDFTDLNKACPKDHFPLPRIDQLVDSTAGCELLSFLDAYSGYHQISMAKEDEEKTTFITPFGVFCYVKMPLGLITAGNTFQRTKYTFGIPSGKLLGFLVSGRGIEANPKKIKAIENMKSPTRLKEVQKLTGCMAVIIRSDNQIDNEMWTMAFDGALNIQGAGAGFILTSPSEDQFKHAIHLNFRATNNTAEYEGLLAGIRAAATLGVKRLVCSSPELSKYLAEVRKLEKSFDGIGVQHVYRKDNIEPDGLARRASRREPLEPGTFLDVLTRPSVKEASGEDSPVALNNSSGATEADRAVADIKTTDDWRTPLIKFIGSEELPEDAAEAEKITRKAKIYCMIGNDLYKKAPNGVLLKCVSSDDGRHLLLDIHEGICGSHAAGRTLVGKAFRQEFFWPTTLKDACDMVQRCEACQFHSKHTRLPAQALQTIPLTWPFSCWGLDILGPFPRGQGGYRFLFVAIDKFAKWIEATPTGEIKAYNAIKFIKGIFCRFGLPHRIITDNGSQFISADFQDYCIRLGVKICFASVSHPQSNG

SEQ ID NO: 170290 - protein, 1087 aa, Oryza sativa
  Clone ID: PAT_MRT4530_68630C.1.pep
MAEPGMFRPSLKIQNTTRFGGEVLRKGGGGWKMFYSQFILAKKGPLGTIWIAAHLERKLRKNQVADTDIGVSVDSIIFPEVPIALRLSSHLMLGVVRIYSRKVNYLFHDCSEALLKIKQAFRSTAVDLPPEESTAPYHSITLPETFHLDDFELPEAAFQGDIDHHVSTKEQITLQDNPEKTGYSTSQFGLDERFGDGNSSHIGLDLEEELMLNKDQSIQLEADDGIIIQGRSAVHPTDMEVDDNQNKDESAEGYNMEDGPSSHNKLNPLSADGLVGNSLPNWHTYNVQTPDLNDMLLNNDGNAGPSASYYQPSPFPCDEPASPEFVSAQAPATPGLMEETVPSRVHESPVLSPQRKASPSSNDETAKTAENANDLVGAETTELALTKPVQIESSGAVQEIDSLSQQCATEELPPQAETSNLEATMDKSMINTDGVAASGEATAAKETTEVSLVENSLELCADGPTEPVIENQTQFNDGSVDVQGGGQHAPHAILATADSQVNVEASTQEMASNDIPSDLPTLEFPEREKMLSAPDVELYQANDLGQVTAEKGTTESDGSNKVGSLTSRKRHLEDSLPALESATTEKLSSRPRGKRTIDGIPDDDDLLASILVGRRTPGLRLDSTPIPPKTSSLKRPRLTSKSTTPKRKVQMDDAMVIHADTIRQQLISTEDIRRIRKKAPCTRSEIWMIEKGSLEDDIFHEPIFSCMCKELNDLQYRTYEIVAHPTIHNMEIHVRLDMSQTMADGSNDVGTSGAKDSGNHQDHVVLPDGAESDAMHPEATDAADTRTDFDSHMPSDKQVNNVEGVTEQLTDNEKETAVVEKATTNMGDSAQVDSLDKEYLQDVPADLQRSTNTNTPLFVLDDMPGPDVVLDSSDPVSAQAVDDMKGELSDIVHDNVNAFDNKDMPTSEITVLEFTQNASGFPQPTEDENVLSAMGENSGLQENHVGSVMDLDNMGHDFSLKECSDFGSAIQGVDTDFLMYDDEVDCDEANDDEPNPEEFQSLDNSGWSSRTRGVARYLKTLFDEESGLGRKSVAIDHLLSGKTRKEASRMFFETLVLTTKDFISVDQPNSFDFVSVKPGPKLLKSDF

SEQ ID NO: 170291 - protein, 57 aa, Oryza sativa
  Clone ID: PAT_MRT4530_68631C.1.pep
MTRGRQPYRGGGRPVGEVDLGGSGSAGPTNGVAASQLAKLSRGKGAEQCKIKKNLFI

SEQ ID NO: 170292 - protein, 213 aa, Oryza sativa
  Clone ID: PAT_MRT4530_68632C.1.pep
SLETIDLTANRLEGLIPGNFSRSLYHLRLGCNLLSGSIPESIGNAIRLAYLELDDNQLSGPIPSQLGKCNNMVLMDLSTNKLQGVVPDELRNLQQLEVIKLQTNNFSGYIPRIFSDNHLSGQVPSSFANLKGLIYLSLCYNQLSGPMPELPRGVKVDVSGNPGLTICTEDSDSQYNMASTEDDFRSTTWVATVSFVVGFIISFYWAGIRKYCY

SEQ ID NO: 170293 - protein, 59 aa, Oryza sativa
  Clone ID: PAT_MRT4530_68633C.1.pep
IECQRCSSCVRKRRLSQGTRLVMAGAQLCSSKSRAGSRLLPRLAWNATHRHGSDSRTRD

SEQ ID NO: 170294 - protein, 101 aa, Oryza sativa
  unsure (1)..(101): unsure at all Xaa locations
  Clone ID: PAT_MRT4530_68634C.1.pep
WFRLLLMMXATVETCKLQDLKLSDGTLLLFSKLHFLNVCSDLYQMLCTLHLRWKKMELVFSFCHTINALSICVKSYAPLNLMHITNICIPYTRESNILCIQ

SEQ ID NO: 170295 - protein, 61 aa, Oryza sativa
  Clone ID: PAT_MRT4530_68635C.1.pep
MAFILFIYRARSDPAERVVKAAWYKGAVVTHRPKPVSPIVNQSKNKNKQAKKPKPAAPSKK

SEQ ID NO: 170296 - protein, 342 aa, Oryza sativa
  Clone ID: PAT_MRT4530_68636C.1.pep
MAQASPFCGKPNEDANAHLQQFLEICSTYTIKGVSPDAVRLRLFKFSLLGKAKQWFYANRATINTWDKWSLAFLSKFFPMGKTNALRGRISSFQQTRDESILEAWERLQEYVVACPHHGMDNWLILQNFYNGLTLISRDHLDAAAGGAFFSKTGVQNIQQKEENDVTEKKEEKHEAPAIYEDSFQVPANESGRIPGQPDSSIENVKAITMRGEDKKQLQSLIGKALGCRNKLLKEVEADAVEIMGDSLLVISQLAGEYECKNNVLMVYNEKCRELMDSFRLVTLSHVSREQNVEANDLAQGASGYKPMAKDIDVEVAMIAADEWRVFLANNVRGLLPILQRV

SEQ ID NO: 170297 - protein, 81 aa, Oryza sativa
  Clone ID: PAT_MRT4530_68637C.1.pep
MSKKQSNSNKQEAEATKVASRSSLRRPAAGCSGSAVPIRHHLWRQLALGAIAASLALSGTRSVDGRANFAPLVTELAISVA

SEQ ID NO: 170298 - protein, 145 aa, Oryza sativa
  Clone ID: PAT_MRT4530_68638C.1.pep
MMVADITEKSFLQGTCRRYVAHAVTVSTPSAPPPATSAAPPRLLAAAALRRHRPPPPPGAAAGESRSEGRGEEERGGEGPVADHLSGACENDFRSRPFAATDRRRRREPPPGRVEADHLSGACENDFCSRPLSAPPAKMIFAGAA

SEQ ID NO: 170299 - protein, 105 aa, Oryza sativa
  Clone ID: PAT_MRT4530_68639C.1.pep
LGQIFPLGGSFPCGQNQPNFAECPPSKNGLEKTGLLRYQPIGFRTGKNPPLYVKIPNSFYPKNFLPGKTKSGVGSKPLIPNHFHTNLNKPFVGCVKTGTPPSSVF

SEQ ID NO: 170300 - protein, 299 aa, Oryza sativa
  unsure (1)..(299): unsure at all Xaa locations
  Clone ID: PAT_MRT4530_6863C.1.pep
QKKRSRCLPPPFPAIAGSLSPWKKSWGSGPFLSAVATKSRSPPGVRPGPSPVWGSPSWGLQNPSRPGPPFGLGRRTAEPRRPLLPKPXSRLHQLGCRFPRSPSNRGEPWPAHFVSLSPPFFRPPFLRAYVRRRRPXGRGRAASRRLCRQDRFRARPAAAMWGPAVSRPSLRVRLTRGTHGAGRCNPRAPGPPWTHLGHIRTGLRASVAKHYRXFHMSSGTNEGYTSCGPVVEMSWHRAGVLLLGVQSCLPVPGVPAVGGIGSMYTSDQSIIYSNSRALGYGQAVQCTQVSVLILKTCLT

SEQ ID NO: 170301 - protein, 128 aa, Oryza sativa
  Clone ID: PAT_MRT4530_68640C.1.pep
MVHQMGWRRTTWPRAEISSKRRSPRNHLCTGGIAGEEREKVSLERAGITVKSGGVQNSLGVGIRQIRNIIEYPGLGGHVLTTKFGNICVGKEDLIKAKLEAEIEFGSRAGIGWNPDRLRLGSAGSESG

SEQ ID NO: 170302 - protein, 69 aa, Oryza sativa
  Clone ID: PAT_MRT4530_68641C.1.pep
EIFPHETRTRVITPWTQDAVSLSCSSSDWQHWPRSSEWNLESLNSNFMLGPKWRLARCQHGTRFGAHSQ

SEQ ID NO: 170303 - protein, 104 aa, Oryza sativa
  Clone ID: PAT_MRT4530_68642C.1.pep
MEAATMSTTGRGLQGDGGRWLRTERPTRLAERRRGGLGGADRQGPAGGGWDELEAATAEGKPVEAVGRERRAPVVVVEPASRSRRGHRDPEVDNIDVFEFLHQD

SEQ ID NO: 170304 - protein, 180 aa, Oryza sativa
  Clone ID: PAT_MRT4530_68643C.1.pep
MFPMVTGFMSYGQQTIRAARYIGQSFIITLSHTNRLPITIHYPYEKSITSERFRGRIHFEFDKCIACEVCVRVCPIDLPLVDWRFEKDIKRKQLLNYSIDFGVCIFCGNCVEYCPTNCLSMTEEYELSTYDRHELNYNQIALSRLPISIMGDYTIQTIRNSTQSKIDEEKSWNSRTITDY

SEQ ID NO: 170305 - protein, 269 aa, Oryza sativa
  unsure (1)..(269): unsure at all Xaa locations
  Clone ID: PAT_MRT4530_68644C.1.pep
MERTGQAKWAGRPKAAQARARAREGGERGPVDRAHHARSRVGPACRRLGSPXAGCTRRARVWGGEARRMRAARGEGGGGGPTCSLTAYRGPRARGETEGAAGRVGLXVAAEVAPTWRLRGSHAGRRKVDEGXSRNGRRAAAAIGGASHGDTSDSEYTGWLHGTRGGEPTARIHRRELDGGESRRRQPAAGGEGNGDEVTRGRFPAVGASTRPRELDASVGFGGNTPREAGDVRVLRXRAATAASTWRATASVGAAPANYGRSTRAKTEV

SEQ ID NO: 170306 - protein, 799 aa, Oryza sativa
  Clone ID: PAT_MRT4530_68645C.1.pep
MGKGGEGAVPVGESGGRRRRRPGEDGGDDDDEEYVVEEDEEEECDEDLSASSAGEGGEGTDEEYEEGDEDEEEDETPRPRQPVKSRENGRKGKADPPVARSRRRKYEDDDDYSEEEDDRVDEYGEDLEEEEEDLEEEEEEDDEAPRSKRMKKRGGRNVEGKLPLERSNRRRYEEDMDFDPDMDEEEEEEDVDFDPEVEDEEEEDFEDEEDDELEATKVRVKNMGRRKSTLNQRRGKMKSSSKVASRKVGSVKARNAASIRRRQKKRSMLDRYEDDDFIVEDEVMADWQPRKKARIRKQMEVDPPTPVFEAEIWPTIDSDTTDFEFVTSDEEAAIAEPTRVIKKGRKKRVFVSDSSSDSEFVVSDKELGNLKESEPPESLKVLPSSPRKISVTGNGEHKGKEKKEPQEAGRATCGICLSEEQRVTVQGVLDCCSHYFCFACIMQWSKVESRCPLCKRRFTTITKSSKEDTGLELTNSVIRVEERDQVYQPTEEEIRRWLDPYENVVCIECNQGGDDSLMLLCDICDSSAHTYCVGLGREVPEGNWYCGGCRLDGEAHSYHNHVNGNSGMFGAISPIGTFERQGIDLNVSPREIPRGNHSVESQASTAGASTPSGRQTNATNFRRRQMHDWIRSLLSRPRTTLGPVMHHNGVHQSGFVPSTEPDHMNFCAPLESDTLHNTGSVPQSEPSQNFHVMSEANTSETSFGRHAALSERRQIYERFFMLLSRPSPTIRPDLCHNASEHGSSVPRVEPNHMNFHAPPVANSPQTLLDGIPNRSNGFSFTQAHSNFVDGNNFQGTEGV

SEQ ID NO: 170307 - protein, 166 aa, Oryza sativa
  Clone ID: PAT_MRT4530_68646C.1.pep
TSPFVSASVASISPRSLSPGPVPGSARKLVQGLKEIVNRPDAEIYAALRDCGMDPDEAVSRLLSQDTFQEVKSKRDKKKEVNKEALEPKSRGAVNSNSRATRAGADRSGRSSSVQSGSSGADNMSSRSSILGPGVLATNSTQKQTVPSSTVNRDVLYDGSFEQCTI

SEQ ID NO: 170308 - protein, 896 aa, Oryza sativa
  Clone ID: PAT_MRT4530_68647C.1.pep
MSGGGGGGGGGGGGGRGAAAGPVPGSARKLVQGLKEIVNRPDAEIYAALRDCGMDPDEAVSRLLSQDTFQEVKSKRDKKKEVRTSFYFQFDKFNVVSVGLVNKEALEPKSRGAVNSNSRATRAGADRSGRSSSVQSGSSGADNMSSRSSILGPGVLATNSTQKQTVPSSTVNKDVLHDGSFGAMQPSSGFQNSWCGVPGQMSMADIVKMGRPQVRSSSKPVASTDNAYSGQTSSFSSVVNQNPNKSASTAPPTTFEQRFPVLQDPIPQVKNSSHASADNHETQESDWFQQDGTLPGSQLTVPETSRDISLPVASLESSTLVADDANSYNNSHVGESSSAIPSDRHLEIIDGNNHFNNGLLHNSSAYQSRGNHYDDNDDDDDEDLGSVWLQGWDGMGWDEPTFRGVWLRAEVSNVDVESASANIQHLSLQTEDLVASKSTEDNPAVIIPDHLQLANADCGHLSFGSFGSGAFSGLLPSKVHKNGVEEVPVPDESPSVDQEDVRNQDNNVALNSSTNGDVEARIGTSMENTDEPSVSQPDILTQGAVDVSSLQYNLPSVSDHVYSNTTQPSTMESSQGDIQVQHLPQFSSLLQANTLHNNLLGSNLPNLRDFDFSPLLSTQLATKYNPPVPTTSLPAISMQETLKPGGFSNAQPTQNLPSASIPSGPPLPQQLSVHPYPQPTLPLGPFSNLVGYPYLPQNYYLPSAAFQQSFSSNGPFHQSAATTGVPGVSMKYSMPQYKSSLPATSPPQPSSVVSGFGGFGSSNNIPGNFGLNQNVPSAPTTMGFEEALSTQFKDNSQYIALQQNDNSAMWLHGAAGSRAVSAVPPGNFYGFQGQNQPGGFRQGQQPSQYGGLGYPSFYQSQAGLPQEHPQNLTEGTLNSSQTTPSQPSHQIWQHIY

SEQ ID NO: 170309 - protein, 112 aa, Oryza sativa
  Clone ID: PAT_MRT4530_68648C.1.pep
SWIIITPLKTRHGLPATPVGLSPPILSLVPRNEPCGDQSDGGRPTDGDGDEVETAALFGLTTATMLRRSPTVAKRRTRTATTWRARRRSSRATTMTGTAAAHGLLCSISLSL

SEQ ID NO: 170310 - protein, 138 aa, Oryza sativa
  Clone ID: PAT_MRT4530_68649C.1.pep
MWDPLESLTSPSPGPTIYDACAMPPTRRTRRPSSLHVNHLDDLHHSTRHSTESLLLSPRVCYVEEPRKSILRSPGTEASSSVPLRRSKSSLNRNSHSRRRRALAAARPRSGAPVDSKTSHYTIIFDISKEPKSPSTRS

SEQ ID NO: 170311 - protein, 117 aa, Oryza sativa
  unsure (1)..(117): unsure at all Xaa locations
  Clone ID: PAT_MRT4530_6864C.1.pep
SHXXXQPNPXXPXKXIXSGXXTXKKXIPHNPLPPSXXVRXXXXXLXXFKWLKSPPVXXXXTXGXANXXXXEXXNPXHPXSXVPXXEGXGLXXXYXXLXXXXXXXPPXXXFXXSXSXS

SEQ ID NO: 170312 - protein, 561 aa, Oryza sativa
  Clone ID: PAT_MRT4530_68650C.1.pep
MAAAAAGEEAESSAAGEQRRMPFARGGPVFVPFMVGPVSTVPEFMSSALHELQSLKDELGDPGDEFDEELCVDELRVLSEEELVERALREAMEEGWDSTALSQLEDQRIDGGMSASSTFGNGAITSSSSGERETSRSPTEDTASIPHVHGNNGKTRGVKGETRGRKRKNVTPTLNSSVETEIPGPSVDTAVVPYVPQQGIEGKTGGMKGKSRGRMKKGGNTTSNSLGENLEVVSHESVPPVEDLEVVSHDAAGADGDTKCGKGKKRGRHFDREVRAHILQGSYLTKAVKMAEIKAKQEEDKHAASLHSFSGDSVLAKVSKPSAEKVDVAKSLRYISTTWKSQEFLVLGSQLLTDLRDNIYCFKDKLMNVAKQHVHSGYFLIEDTFYNDTRRSTVDYSKPILDWIKNSRNEAEEKWDAITSGVLKKRQKDLLMGLNVSNVPDFKSAKMEKTRFSDLNFRLGAGYLYCHQGNCKHMIVIRDMRLIHPEDTQNQAEYPLMTFQMQRRLQKCSVCQIFHATKMTVDDKWTLNNPCYFCDKCYYLLHYKEDNSLLYHHTVYDYLQE

SEQ ID NO: 170313 - protein, 240 aa, Oryza sativa
  unsure (1)..(240): unsure at all Xaa locations
  Clone ID: PAT_MRT4530_68651C.1.pep
YISSVVPIGAMFAMIHCLGSSAYLYISVAFAQMLKEIIVVAVFLLRAAFGLEEMSCXMLAIVPVISVGVIVASVGENTISWVCVVYRMGXVITEALRLIFMRFFXKKKGVRLNLISMYYVSPCNIVFLHFVCLYLENXKMNESLXNFPPFTLFLNCICTFTQNPTVFLVISRTSALTARVTGIVRDWTVVLLSALIVADTQLTFINIIGYLIAIAGVVAYNNHKLKVKTHGNEQQGADSK

SEQ ID NO: 170314 - protein, 104 aa, Oryza sativa
  Clone ID: PAT_MRT4530_68652C.1.pep
MATWYNIKEEMDAEMNDGSWQRRGNGVPLVSLSYKKHKEMRRPPLRCSLDASLSSNSPLLAVADRNNRRYQALSATPEWKRKTSRGEDSEELLYPSSVHASKWD

SEQ ID NO: 170315 - protein, 265 aa, Oryza sativa
  unsure (1)..(265): unsure at all Xaa locations
  Clone ID: PAT_MRT4530_68653C.1.pep
CEQPSLQHTCRLNRRIYVSSVIAIGAMFSMTHCLGSSAYLYISVAFAQMLKEIIVVAVFLLGAALGLEEMSCKMLAIMPVISIGVIVASVGENTISLICVVYQMGGIVTEALRLIFXEIFLKKKGXLNLISMMYYVSPCIYLDHLISXLINXKLFLNCICTFTLNPSVFLVISRTSALTARVTGIVRDWTVVLLSAAIFADTQLTFINIIGYLIAIAGVVAYNNHKLKVKPQWNEQQEVLKMLRHHQSRLKKTNLLASHMVVINY

SEQ ID NO: 170316 - protein, 619 aa, Oryza sativa
  Clone ID: PAT_MRT4530_68654C.1.pep
MEPGAPWRDPRQGYLYGVGSAVQMPMQQRSDAAAAGGVLKRSLGDMERWQQHQHQQRQIAMQQQLYLRTVRQRTAAASAAVSPLTSADIAAVLGGPPSQPLVLSGSSMGGAFGSPSSTLSSITTASRAVAMPLMQPQLQRQQQVTYMASSPQVQAFGTARALPPAPATSDLSILQELEKQLLGDDDEVEAAMSGTGSAVTGSEWEEQLNSITAAPSPPLTAATTPNNNNNAVGMTRSPSNSSTSTASSSASCSPPTSATTSRQLLSEAAAAIADGHNETAATHLTALKRAANSRGDVEQRLVAMMVAALSSRIGQTASVPDICGGETRAGSQLLHDISPCFRLALHAANVAIVDAVGDHRAIHLVDFDVSAPQHADLIRCLAARRLPGTSLKVTAVTDPASPFTQSVTATLHLQKLAERAGIDYRFKMVSCRAGEIEASKLGCEAGEALAVNLAFALSHVPDESVSPANPRDEILRRVRALGPQVVALVEQELNSNTAPLTTRFTDACAHYGAILESLDATIPRESAERARAEAALGGRAANAVAREGADRLERCEVFGKWRSRFGMAGFRPVALGPGIADQVLARQGPVAAGFAVKAENGVLRLGWMGRVVTVASAWR

SEQ ID NO: 170317 - protein, 83 aa, Oryza sativa
  Clone ID: PAT_MRT4530_68655C.1.pep
RQAAARSHLQRQDSWRISHRRLRTSPPSTSSAWWPPSSAICDNIGSRIREPPCSPSSLAHLSSLHPPSPAMPSSAVDTFTTPR

SEQ ID NO: 170318 - protein, 127 aa, Oryza sativa
  Clone ID: PAT_MRT4530_68656C.1.pep
MARGRGWWEERSRRQRPRGEERERRPPPAAPLLPLRQHPTSLSTSSPTAALTVTTSKCHGRPLLLPRRWTPPSPPPLWPSTCRPIASSSCAPDAAGEAGSRGTPQRSSGRRQKGIHSFAKCHKGGRI

SEQ ID NO: 170319 - protein, 276 aa, Oryza sativa
  unsure (1)..(276): unsure at all Xaa locations
  Clone ID: PAT_MRT4530_68657C.1.pep
IRSFGKTFSHQKKKKKKKKNIVSRPLSLPPXLRDNLYHGLPVTVKSALRCAIANQLMPKKSRTVAQIKAEMQKTLRWILPIAENTIRSTCTSKLEVEGASARCEMNKKSGSQLSITRVQTLHYADKAKTEQYMLDLVVLLHHLVVQVKNRGYGSKSSKHDQSRSRKGMDLQPESKLNTSPVNNATYPSPLSESERETLDHLSFKRTGYGRSKSCEPPPNRGKKAHRTWDSCRSHGSSPAREFGRNSASELDKTMDLDVIDGLDRLTSYHPTSPTFC

SEQ ID NO: 170320 - protein, 108 aa, Oryza sativa
  Clone ID: PAT_MRT4530_68658C.1.pep
MRGDGVYTGMTRENERERANGLDSPEGVRRRRIAAAATGGEKRGKRRRGHEGPIPGGAAGADGGGDWPVSHQGARARGRRGDLGGIGGNGRESGEGELDAAHGQSGER

SEQ ID NO: 170321 - protein, 100 aa, Oryza sativa
  unsure (1)..(100): unsure at all Xaa locations
  Clone ID: PAT_MRT4530_68659C.1.pep
MTVMAIGKVGNTLQPPXGSNPHRPSKPCIQRLHGRFGRTPRFSRTRGRPNQPTFWLVVSSAASLHRLMNFGPIHRVNFEFLAHSYISLVIDIVRLMYRLS

SEQ ID NO: 170322 - protein, 206 aa, Oryza sativa
  Clone ID: PAT_MRT4530_6865C.1.pep
CFATEARRPVLIWPKWVHGGPGAPGLAPAGAAGPTRQPHPRARAAHGRAPRGSHSAGPKAAMPARPAGGGARAPMVVGGGHRHGGAAAERGEGEGETRRRSMAHPEATAATEEAPGVEEGGGAARVDGDGGAPAVGELDEGVDGDGDGAAKPKEAAPRREAVRGDDGGGPELGGGGGERERRRELDSGEEKARQMVETGEGSAGRV

SEQ ID NO: 170323 - protein, 103 aa, Oryza sativa
  unsure (1)..(103): unsure at all Xaa locations
  Clone ID: PAT_MRT4530_68660C.1.pep
XEXRAPLSXGPTQPXRGSRTPGVAGDPAGLRQVPEAGRSXXPPXXSPXTLFXMSCXFSVYHRXSTPLLPLGSPRGFISIILPIXPPPFIPXGWLAHLPNXPLP

SEQ ID NO: 170324 - protein, 179 aa, Oryza sativa
  unsure (1)..(179): unsure at all Xaa locations
  Clone ID: PAT_MRT4530_68661C.1.pep
MAIRPVRHGPAQIWARHGLRPSGRHGMVGTSGRAVPAHVLHLKLRHSPPVVGPWRDDPKARATYREFCPREIKMLQGEVNELKKEFKDREHCRDDNSAHHPALSPPPPPHYDDSPPASPIPAAPAPPPSPXPPMPSSSHVASAPPASSPVSSRRPSPHPAQCPAPALSLPPPCRLSPAT

SEQ ID NO: 170325 - protein, 137 aa, Oryza sativa
  unsure (1)..(137): unsure at all Xaa locations
  Clone ID: PAT_MRT4530_68662C.1.pep
IREGIVXGYRXGGGPLGEGLDXVFXXGAFYPLGLXDXPDTFAXLKVKELXXXRLXMFSMFGFFXQAIXTGKGPIXNLFDHVAXPXANNAXAXSTNFVPGKLHPGAHRFCSLVTHPPCSCNACLFLNCVVCDPSKKFS

SEQ ID NO: 170326 - protein, 183 aa, Oryza sativa
  unsure (1)..(183): unsure at all Xaa locations
  Clone ID: PAT_MRT4530_68663C.1.pep
FFFFFFSKSIHATNACKSVGAQIYMLHPHPTPMHNNTSYIRTYIHTPLDRRGRELRRGARSGETVTIPXPHIIRHTATVTITITSIQQHSAHIXIQITSVCIGHPPQWHTCRLGCSACIVCWHSGISEVHPSRFCTGPXPVXSAWTDEDRGRRAWRDCHTMISLSLSSLQSPPRSETRKPERV

SEQ ID NO: 170327 - protein, 82 aa, Oryza sativa
  unsure (1)..(82): unsure at all Xaa locations
  Clone ID: PAT_MRT4530_68664C.1.pep
KHDIKKVARITQSPRANCAACGGGQGNSEALTAVRIKAWGAKSSTXTLGLVLPGFTTNDLTSGPVDRMNVPMEDVKFQPAAF

SEQ ID NO: 170328 - protein, 384 aa, Oryza sativa
  Clone ID: PAT_MRT4530_68665C.1.pep
MEVAAASLSLFRTPQAHHLAELRVDGADQSPVAFSDPCAVGRKRRCLFPPFSPRKRMLLELPPFASTPTAPAPGSASPGALSSGGDRSTRTGGSGGGGGGGGGSSFSAMAERVLAPPSVSSGSGAAFAFAFLAASPKQQQPLTPMGSTASCGGAGSGFLPPDPSSSLTPMGSKSNGIGASAFLASPRPATRSANDGGGFAFFRSPEPERTAGDTTRSGAPFSAPPNLVSGPAGSPASAAAKEPSQIIGDGGLVAPPYTISSSPARKSRSSTLWSRRLAHAAAEGRTSPQPPRDEQLQITLPPPPQKVTKTVLAPATGEPSRGATLSSSAATTCCTFLTSPAKATNQEREARASSRMGGGEGATTAAAAAAAVACAGGEVVIRLN

SEQ ID NO: 170329 - protein, 787 aa, Oryza sativa
  Clone ID: PAT_MRT4530_68666C.1.pep
LTRRYEAAKNSQIDSKPGAQIRRAIPKNPGKRAASRSGASSSDGPRFGRFTCYHGEEEKRWHPPANEILRSIQKLYDEAARRLPLDEIPELADPLSNIILNVIAADPVSNIILNAIAHLSGSPPLQLQDHPPPLPRKRTRRSYSEWWGFISSTSLNGLIAFMKVYFRYLTGDQARRYLYLASYDLLLAIKLVHHDRHLPLPPSPLLPDGGKMKNALRIAALKAGHPAPDDLARTMTAQYPSHLLSPIVHKLQGSDLLTTHDVQSIKDLLLNAFQWPPPNMDFLCCPNGESCAQAAPDRFAGISPNHVQFQKLLYISDLTIDSAAIETKLSKCVAKVLGGCEEHGHVNYDASPPCEHILSLNMCLLDTIHCFYIRALAVLPLPVSDDSMRRGRLLRAILMSGQCFGPLDPVSNIIINTLWYDAAYPPLYPKDGGGGDCEVELPQDISDTQAMSRIASRSLNGLVALLRAITTTTTGCSLSKHEAVEYLWSRQCDLTDKLQQTVMTNKNPYSAAAKASEHPQHTMLGSFLMSLCGEKLDRLQHLLRSISDGSGCVISNADWEQLNAMIQEQLTTMIGRKRLPPFDTQALAALSRRRSDYVNRQRFVRSKLEELLVTYSRQHPWEPRYKLDLICGVEEPQSHYWRCYHANFLASTHGTVLKLNREATTTPNPKRTLFFAQFWDSQPGRFNESNSKPICCPVQDSTCFGLCTTCEGNASTILHPPSGYLFEDDVDDAIEVYDVNAAIDVFGSASCSLSKDKDKGLLESDFIYFDHGRNANLTKILNDDSIL

SEQ ID NO: 170330 - protein, 65 aa, Oryza sativa
  Clone ID: PAT_MRT4530_68667C.1.pep
RRPRSSSAISPPSPFLLPPNRSLKIHQKFHKISNHITTNNLSSHGYYLNRYKDQILCRIPAARGS

SEQ ID NO: 170331 - protein, 196 aa, Oryza sativa
  Clone ID: PAT_MRT4530_68668C.1.pep
MALLRRLVVGLKRRDLCGLYIAMHLYSALAMIPDVVICRTELCRFSGAKIYPGKGIRFIRADSQVFLFSNSKCKRYFHNRLKPAKLTWTAMYRKQHKKDIHAEAVKKRRRTTKKPYSRSIVGATLEVIQKKRAEKPEVRDAARESALREIKERIKKTKDEKKAKKAEVAKSPHASGKGNAPKPGKGPKLGGGGGKR

SEQ ID NO: 170332 - protein, 75 aa, Oryza sativa
  Clone ID: PAT_MRT4530_68669C.1.pep
FFFFFFFFFEMGAIAIPPSGNRATKLNQLISPFKNQFKLDRQHQYHNEQSPDYMFGLLLRLLLNSIHPCISIPPI

SEQ ID NO: 170333 - protein, 1473 aa, Oryza sativa
  unsure (1)..(1473): unsure at all Xaa locations
  Clone ID: PAT_MRT4530_6866C.1.pep
MVNTRSNGNGPNNPNNNNNGENPTLAQVLAQQTQLMNMMMQQFQNQQNQGNNHVPPQSKLAEFLRLRPPVFSSTTNPVEAGDWLHAIEKKLDLLQCTDQEKVSFASHQLHGPASEWWDHFRLNRINAEPITWLEFTAAFRKTHIPSGVVSLKKKEFRSLTQGSRSVTEYLHEFNRLARYAPEDVRNDEERQEKFLGGLNDELSYPLMVGDYPDFQKLVDKAIRQEDKYNFMEQKKRRIAHFKAQQGNNQKPRLTIGPQSVPQGGSSSVVRPQRQFFNNNAGNNIRNQVPRPVAAPTQQQPAKREQGSKPVVCFNCGDPGHYADKCPKPRRVKVVPAQNNSAVPVSKARVNHVAAAEAQDAPDVILGMFPVNSVPATVLFDSGATHSFLSMSFAGNHGMEVEDLRRPLMVSTPSNQALSLQRSPLVRIEIKGVPFLANLILLESKDLDVILGMDWLARHKGVIDCANRKITLTSNDGRVVTVHALSSESLRSRLNQITLEEIPIVREYSDVFPDDLPGMPPKRDIEFRIDLVPGTTPIHKRPYRMAANELAEVKRQVDDLLQKGYIRPSSSPWGAPVIFVEKKDHTQRMCVDYRALNDVTIKNKYPLPRIDDLFDQLKGATVFSKIDLRSGYHQLRIKEEDIPKTAFTTRYGLFXCTVMSFGLTNAPAFFMNLMNKVFMEYLDKFVVVFIDDILIYSRTKEEHEEHLRLALEKLREHQLYAKFSKCEFWLSEVKFLGHVISAGGVAVDPSNVESVTNWKQPKTVSEIRSFLGLAGYYRRFIENFSKIAKPMTRLLQKDVKYKWSEECEKSFQELKSRLVSAPILILPDPKKGFQVYCDASKLGLGCVLMQDGKVVAYASRQLRPHEKNYPTRDIELAAVVHALKIWRHYLFGTRTKVYTDHKSLKYIFTQPDLNMRQRRWLELIKDYDMGIHYHPGKANVVADALSRKGYCNATEGRQLPLELCKDFERLNLGIVSRGFVTALEAKPTLIDQVREAQISDPDIQEIKKNMRRGKAIGFLEDEQGTVWLGERICVPDNKDLKDAILKEAHDTLYSIHPGSTKMYQDLKERFWWASMKREIAEYVAVCDVCQRVKAEHQKPAGLLQPLKIPEWKWEEIGMDFITGLPRTSSGHDSIWVIVDRLTKVAHFIPVKTTYSGSRLAELYMARIVCSHGVPKKIVSDRGSQFTSNFWKKTQEEMGSKLNFSTAYHPQTDGQTERVNQILEDMLRACALDFGGSWDKNLPYAEFSYNNSYQASIQMAPYEALYGRKCRTPLLWDQTGERQVFGTDILREAEEKVKIIQERLRVAQSRHKSYADNRRRDLSFEEGDYVYLRVTPFRGVHRFRTKGKLAPRFVGPYKIVSRRGEVAYQLELPQSLAGVHNVFHVSQLKKCLRVPTEEANLEQIEVQEDLTYVEKPISILETNERRTRNRVIRFCKVQWSNHSEEESTWEREDELKSAHPHLFAGSSESRGRDSV

SEQ ID NO: 170334 - protein, 315 aa, Oryza sativa
  unsure (1)..(315): unsure at all Xaa locations
  Clone ID: PAT_MRT4530_68670C.1.pep
MDDAASTTGQYDQQDKDWSCFISPLHQIYRRRYLLRXSALELFMVDRSNFFDFEDTESMXNMLIYRATIHTKPPYLNNIFLATQRPEXICKKLQLTECWARWEISNFDYLMELNTLAGRSYNDIAQYPVFPWILADYHSKTFWIWKICLASAYXDLPKPVGALNPAXLEKPQEHYSSFNDPIIPKFHLXSHCSCPGMVLYYLVRIEPFTALSIQQQCGRFGQYDHTFSCINRTWNSVLEDMNNVKKLIPEIFYLTEXTNVNLVDLGSTQLSGKLCSVELPPWXNPVDFICKHRKALESDHVSAHLHEWIDLIFGY

SEQ ID NO: 170335 - protein, 102 aa, Oryza sativa
  unsure (1)..(102): unsure at all Xaa locations
  Clone ID: PAT_MRT4530_68671C.1.pep
CSSPLPECPRDLQGGXLHGAVSRHCPPHLQDSALDAMVDGPILEKSNNHHRRIPNFLSIAPSPLSIPINGHLPICVNEADAGVRGLAEAVEKPSDRVVVAAA

SEQ ID NO: 170336 - protein, 93 aa, Oryza sativa
  Clone ID: PAT_MRT4530_68672C.1.pep
VKFRQAKPEIVNARRVASRFMAGLASKNQNPHPGSPSNQSRNGPPFQGAWFKNIFLNGAKPSSRESISSHDPGTGGDESSLQNQKPSEQSTRL

SEQ ID NO: 170337 - protein, 63 aa, Oryza sativa
  unsure (1)..(63): unsure at all Xaa locations
  Clone ID: PAT_MRT4530_68673C.1.pep
HSLLSWLSSSLSVWMVVVSYCFISSFCSXSFRRSLLGLRCLCRGVRLLVYVCSFLCRLGSNVI

SEQ ID NO: 170338 - protein, 390 aa, Oryza sativa
  Clone ID: PAT_MRT4530_68674C.1.pep
MRTNTTATVLLAAAVALLLATAARGDGGDGGCGKEDAAAGRDRARARGLKIAAFFSILVCGALGCGLPSLGRHVPALRPDGDVFFLVKAFAAGVILATGFIHILPDAFDNLTDDCLPAGGPWKEFPFAGFGAMVGAIGTLVVDTLATGYFTRALSKKDAATAAAVADEEKQSAAATQQHNHHHNHHVVGDGGGGGEEHEGQVHVHTHATHGHAHGSSALVAAVGEDDKETTLRHRVISQVLELGIVVHSVIIGISLGASQNPETIKPLVVALSFHQMFEGMGLGGCIVQAKFKVRSIVTMVLFFCLTTPVGIAVGVGISSVYNESSPTALVVEGILNSVAAGILIYMALVDLLAEDFMNPRVQSKGKLQLGINLAMLAGAGLMSMLAKWA

SEQ ID NO: 170339 - protein, 65 aa, Oryza sativa
  unsure (1)..(65): unsure at all Xaa locations
  Clone ID: PAT_MRT4530_68675C.1.pep
WVIALIQLVWDYMMETTDYKGXAELDDTDKIVVEQAVVVVLAVRFNALGPXPGGPLYTTGQLISK

SEQ ID NO: 170340 - protein, 58 aa, Oryza sativa
  Clone ID: PAT_MRT4530_68676C.1.pep
TFHFQGIRGETNFQIRGQSKTHAWGWSSSPTRGPSRHNFNWGGIPCLALGGTAISSFV

SEQ ID NO: 170341 - protein, 92 aa, Oryza sativa
  Clone ID: PAT_MRT4530_68677C.1.pep
NQPKLLSKIGSGFLVSFNIYNLHVETSRKIEDPDHTRANSPTFAPLGIGCGCQSARSGGSEHGRNRGWPPEGCPDSLPCLLRTPSRAVIWTA

SEQ ID NO: 170342 - protein, 790 aa, Oryza sativa
  Clone ID: PAT_MRT4530_68678C.1.pep
MAPRLSACLVFLLILVLSLQESPLHAADTLTAEQPLSADQKLISQDGKFALGFFQPAAGGSSSRWYIGIWYNKIPVQTVVWVANRDKPITDPTSSNLTILNDGNIVLLVNHSESPVWSTNIVNNTIASSPVAVLLDSGNLVVRHESNTSEVLWQSFDDFTDTWLPGNKLSRNKKTGVIKRMISWKDRADPAPGMFSIQLDPSGATQYILLWNSSSVYWASGNWTGNTYTGVPELSPTNSDPNSAYTFQFVDNDQETYFNYTVKNDAQLTRGVIDVSGHFQAWVWADAAQAWQLFFAQPKAKCSVYGMCGTYSKCSENAELSCSCLKGFSESYPNSWRLGDQTAGCRRNLPLQCGNNGSVKAKQDRFFMISSVKLPDMAHTRDVTNVHNCELTCLKNCSCSAYSYNGTCLVWYNGLINLQDNMGELSNSIFIRLSASELPQSGKMKWWIVGIIIGGLVLSSGVSILYFLGRRRTIGINRDDGKLITFKYNELQFLTRNFSERLGVGSFGSVYKGILPDATTLAVKKLEGLRQGEKQFRAEVSTIGNIQHINLIRLLGFCSEGAKRLLVYEYMPNGSLDHHLFQNNSAISSWKRRYQIAIGIAKGLAYLHDGCRDCIIHCDIKPQNILLDMSFTPKVADFGMAKLLGRDFSRVLTSIRGTIGYLAPEWISGESITTKADVFSYGMMLFEIISRKRNLTQTETRTEIFFPVLVARKLVQGEVLTLLDSELVDDVNLEELERACKVACWCIQDDESSRPTMAEVLQMLEGLVDIEVPPAPRYLQVLAEGAASKT

SEQ ID NO: 170343 - protein, 652 aa, Oryza sativa
  Clone ID: PAT_MRT4530_68679C.1.pep
MAAAAAGGGGSPDHELKLLGSTNPSPFVTRVELALALRGLTYDLVAVDLDRKTDLLLAANPVHAKVPVLIHRGRPVCESRVILEYIDDAFPFPGGGGAPLLPPADDPLARAAARFWAAHVDDEFVASWRPAYLGSTEGERAEGMARMAAAVGALEGALAAAEGKPFFGGDAPGLVDVTLGSVIPRTRANEALTGTRVLDAARTPLLAAWAERFGELDAARKVLPAVGDVVEYLETRLRRSNVGARAYPEVEQQRRVVAHGCGAVNAGANDDGGCRRCSTCGPWNPTVFGLLPQWQRARVDASTLPRHRLRLMESHDDSTAHALHVLDAGRAARPGDCSREEFSECYAPVVGRLYTLQEEHHVGVGLACVSPVALVEAVAPLWFMAGAVWSFGLEGVWSPPVSSAACVLRGAAVARIGIEPAMGRRQQPEEPDSSNPALQLSASPVDEKPELLPAVLDGGFCFGPLDPVSNIITNAIRHLTTGEDSGADVDEIEMRRGLKTKARGSLKALVGFMTSCFRYLPTLEALNFLCAAEGDLLAAVHLVEAERCMSCAFDIGSCTARTALRCAAGAAGHRDPSRVASEMLSLFSKAYKIASHLLSRTADRLTCSAVEHLRHLLLEKKAMTKFVLNDRYWFSSLHGCHPSSPPSPHLPH

SEQ ID NO: 170344 - protein, 690 aa, Oryza sativa
  Clone ID: PAT_MRT4530_6867C.1.pep
VIWQRVGALLLGAQFCLPVPGIPAAGGIGSVLLFMARMGWELCHVFRPYTVVMDNTGNKGYGNDGSDDSRTQANGNEKSINKTSPELIQKVVNQTNMLTTAFQLLQNWNNPAGATNVQVPTVQQQFKLSEFLKTEPPTFAIAVDPMEASDWLRTVEKKLGLIQCTDQERVGFATHQLVGPASEWWDSYEASRPEGHTITWNEFSSVFKRSHVPAGMITLRKREFRYLKQGDLTVTEYLHEFYRLARYAPEDVETDEDKQEKFLQGLKDELVVQLLLEDYEDFEKLVDKAMQLESEHNRMTNCKRRIVNIPVIPGGNQRQRTEPLQITGPSVVHQESPPQEDGRNADNNTSNTNDDDTTNNHGSCPISDHSNKACNVSSIHQDVNDSINVGTQNDNLSNFDTEKDSNGDSNYGTTDANVSKDFQPPIPTPSHNDHPQMDSSAKKTLICYNCKEPGHFSRDCPQPKRNLRHPSGHYARRRQVTRLVVTGANAVPAASQRTSSSPEASAIHIKEYHLLEISRKMIDKKRLAKMFSSIKEVGRKVIDKQKHALHRSRKTPDCNCPATVTLSLSKQDDLGKSVSMKARSEIFNSVSDATRSEKCKHRLPVDNLSEVDSEDMNHEKFWNGSITELPQPSLSQPKGAPWSKSGEEKIPSATGGQAKQFRVVKFCWKFVKTQRKKSDKKRRPPNLPSC

SEQ ID NO: 170345 - protein, 114 aa, Oryza sativa
  Clone ID: PAT_MRT4530_68680C.1.pep
MPDLQTPNADLRLDVFTASTTGPNANRHNAAVAATDFLLPKMTYPRIDVSRIRIRIPVSGNYGRKPSLQAGNGDAYGRRFPHDSTAAPLKSGGFGAHNHREQSGGSIDGGMLER

SEQ ID NO: 170346 - protein, 827 aa, Oryza sativa
  Clone ID: PAT_MRT4530_68681C.1.pep
MLCLTSSSSSAPAPLLPSLADRPSPGIAGGGGNVRLSVVSSPRRSWPGKVKTNFSVPATARKNKTMVTVVEEVDHLPIYDLDPKLEEFKDHFNYRIKRYLDQKCLIEKHEGGLEEFSKGYLKFGINTVDGATIYREWAPAAQEAQLIGEFNNWNGAKHKMEKDKFGIWSIKISHVNGKPAIPHNSKVKFRFRHGGGAWVDRIPAWIRYATFDASKFGAPYDGVHWDPPACERYVFKHPRPPKPDAPRIYEAHVGMSGEEPEVSTYREFADNVLPRIRANNYNTVQLMAIMEHSYYASFGYHVTNFFAVSSRSGTPEDLKYLVDKAHSLGLRVLMDVVHSHASNNVTDGLNGYDVGQNTHESYFHTGDRGYHKLWDSRLFNYANWEVLRFLLSNLRYWMDEFMFDGFRFDGVTSMLYHHHGINKGFTGNYKEYFSLDTDVDAIVYMMLANHLMHKLLPEATIVAEDVSGMPVLCRPVDEGGVGFDFRLAMAIPDRWIDYLKNKEDRKWSMSEIVQTLTNRRYTEKCIAYAESHDQSIVGDKTIAFLLMDKEMYTGMSDLQPASPTINRGIALQKMIHFITMALGGDGYLNFMGNEFGHPEWIDFPREGNNWSYDKCRRQWSLVDTDHLRYKVVPKYINYMNAFDQAMNALEEEFSFLSSSKQIVSDMNEKDKVIVFERGDLVFVFNFHPNKTYKGYKVGCDLPGKYRVALDSDALVFGGHGRVGHDVDHFTSPEGMPGVPETNFNNRPNSFKVLSPPRTCVAYYRVDEDREELRRGGAVASGKIVTEYIDVEATSGETISGGWKGSEKDDCGKKGMKFVFRSSDEDCK

SEQ ID NO: 170347 - protein, 105 aa, Oryza sativa
  Clone ID: PAT_MRT4530_68682C.1.pep
MVLFGTPEWLAPYPNIAAPATLAPCPCHRGNRAVVEATAGAPPDRGARVAGAPLLHPSKPFCLRASAGAALMDHGAWVAGAALPQPETLLPRGTGWRCPSQPRRQ

SEQ ID NO: 170348 - protein, 191 aa, Oryza sativa
  Clone ID: PAT_MRT4530_68683C.1.pep
MHIRLAQPLYVKNFTTIDGRGADVHVAGGAGIVGNMMPAVARGGGGGGGGGGGGKDQWHWHSVGDAFENGAFFRQVGNRELGQKPPFPLLETRCQVQKTGFREKEKNKRKTGKSANPLQEKHPDMKDIQFSYRRSTRTGRTYSFLQGYKTLGNHSEHRQQNEKKRNPADYQSLLLSVFTKCTNSTSYKNLD

SEQ ID NO: 170349 - protein, 125 aa, Oryza sativa
  Clone ID: PAT_MRT4530_68684C.1.pep
YPGAVVHEGGASRGPEAEGLRWGEEGSASHPGAAVGEGRQPLPGGRTGRKFLGGRKLVGPAKKWARQPCWRRGMRGGATLAGAPFGLVSTSTTALVPRWHGHGASVDGAAMLGYGASHSGVPKRT

SEQ ID NO: 170350 - protein, 68 aa, Oryza sativa
  unsure (1)..(68): unsure at all Xaa locations
  Clone ID: PAT_MRT4530_68685C.1.pep
MPPSSXSSQLSSIENTGAGPAPPVAILLVSVEPSSVWAIAVAAVAAVVTALARALARRRGRRALAGAL

SEQ ID NO: 170351 - protein, 78 aa, Oryza sativa
  Clone ID: PAT_MRT4530_68686C.1.pep
MSYSGGCSTCLETIFSVVLPPLGVFFRYGFCSSEFVVSSALTALFYVPGIVYSVWVVILKTPPEPPGIDGERPYYILA

SEQ ID NO: 170352 - protein, 907 aa, Oryza sativa
  Clone ID: PAT_MRT4530_68687C.1.pep
MSELGDEESELISYSRSERTNRHGQRQRQPMDELWPEVVNINKYAVLMGYLSMAVRGLAFLMFTWTTVVLLGGFVSALNKKDFWCLTMITLIQTAGVGLGPPAGRPGLLVPRLRCRCLRPTHSGLLRESPSGSCRGTSPGMLQPRCAKEVAYSDLLAGLRAGAVTVVAFEEESHRIYFHRVVDDGGGGKDVDTGASEACRSAAEARWPCYARSVPHDEGFLLGLMRDGGADYRSVPRLAAGRLLVDMLNTLLTLWEEWRRRASAVMIGEAAGEGLRCLHERKAEQYLGWLQRLVTDNREGDTNITPALDVFYSLAIFQGVIFTYRVSYSSAAEAIVNDVCRYYHMDARESVWDYLRDTMIGCEEDPSFARGRNMVTYAVEQVESSSSPDGYLSGLRILSTLVGEIASSYACTTTHVEQHRMIKHMLISRHHVVMLKLIQTLEPRGPHDAEARERATVIVAYIAGGVHLERLPRALCCVTSLLDDEYRLAEPYDRDLVLEKLQLRPPPCPDEEVEFVEMYRLVYEREPPHLSLEKYKNLVVQGQRILGKLAADEDNCRIMSDTRGLDDHDDDHRYELSVMAKGSITLIGQLVSVPFQDSRVKLRRQITSCKPAISTMESILRCDGCDAELRRLAAQLLTVLSLDKSSGGMSSENIQGLIRILTDIFVHDSKRSSVRKCAGEELVKLSLESESNASIILKLKLNDSIVVDRLSEMVVDVEDNTFRTSAADILKHLCINHTTDDEHWDKLKNSMTIAIPKVLRELLGCDWRRPERQTVATQANNSGNFSPPDADIEALPDGDPSRVSNGGNNASSCSNQQNGKQYTPEEIEVQEALASLCVTVCDKLISTDPVLADRFDKIAADVCLDSSITANTTANTAFAALVKEAGEVVEKRKAQSIVGIAPAQLVR

SEQ ID NO: 170353 - protein, 225 aa, Oryza sativa
  Clone ID: PAT_MRT4530_68688C.1.pep
MGSGVERGEMCGEERDEGAAFTVSRAPIHPIPTRTTRRLERLTHRRLIPSHVDKLRVHDSARAFANVRGTRRPATRLTAEMSQSAFLLPVAQCRGYRAHAARCPSPPRHSSSIGSRRASVAAVEAEVEVEGASPPPPSPVGSRDGDGRRSFPAANPLLLRSPPICPFCSAHPPPAAGELILLKIKKVCNDKISTGKSTLGSILPPDRVCDLFPRVKWRDWEPKCP

SEQ ID NO: 170354 - protein, 121 aa, Oryza sativa
  Clone ID: PAT_MRT4530_68689C.1.pep
HKNDMPVFTASFQCVTLFGQPASAADAQPLLQGQRPFLHLHARRRRPCGPMLISKSPPYPASEETREWEADGQHEHTDELRETTTTMIDGIRTALRSIGEGEISISAYDTSLVALLKRLDG

SEQ ID NO: 170355 - protein, 663 aa, Oryza sativa
  unsure (1)..(663): unsure at all Xaa locations
  Clone ID: PAT_MRT4530_6868C.1.pep
MDPAPATPRWNLERPYLTGRFHQEAKVAAAAQGAGSKPYSLDSFSRGGGGGGGAESVIXSYTALVQELLVIDDLXAGLLRVEGRYISIKRRRGKEGYVGIXIGSSVDLILEELMLLILHLXLVKVLVYHFIESISLLKIGMGNHALASALGAFLFVSKLMVAQLELEFLLRRLAVQGLWFFCQWKMISWNGVAVQIKKTISDSTSGITSLVVIPSLEXKITSNRAVRSLLEKMTECASAAYLRMLERWVYEGVIDDPYGEFFIAENKSLQKESLTQDYDAKYWQQRYSLKDGIPSFLTNVAATILTTGKYLNVMRECEYTVQVPLSESSKLMGFGSNHQYLECIKSAYDFASGELLTLMKDKYDLIGKLRSLKRYLLLDQGDFLVHFMDIAREELTKKPEEISVEKLQSLVDIALRSTAAASDPSHEDLTCCVERSSLLKKLSTLKDLDCAYPSDKLVAADVDHPMPLSVTGLETFCLSYKGFRSVKILGTPVLRSSILCRSMLKFVNSLLHYLTFEVIQIHDFFLQKCLKECLLLLPELLVVRLLALLYTEVFVAAKIEKLKALCLQYATSIQLLIPSIDVAKPENTSKSRMPRSKIKETKNRGQQLKLASENVVMSESILKFEAEFNSELQSLIPTLSNSSQAEPYLTHLGQCILGVGVDQ

SEQ ID NO: 170356 - protein, 47 aa, Oryza sativa
  Clone ID: PAT_MRT4530_68690C.1.pep
IMIFELYKTKSKFDKKLEDRRGTECYADKFPEQFKAKDGRYIIQEDL

SEQ ID NO: 170357 - protein, 123 aa, Oryza sativa
  Clone ID: PAT_MRT4530_68691C.1.pep
MDHYPDRLPRASAAVRCRCEPPPSCAATVRCRPRLQQGPPEVKRGGRDNGGGKKRGERRGDLRAHLLTAATGSSPSLVCLRQMRCAAASFFFASETRWCGGLRGCDTGKGRGRGGGSSSMAFA

SEQ ID NO: 170358 - protein, 79 aa, Oryza sativa
  Clone ID: PAT_MRT4530_68692C.1.pep
RAASAYHLVVIDSTAMVPSNPIRKGQQGCRSLRNNTGRGWKRLKTSLDSLLFLLLLGGLGVRCRVKRSCSFFIDPGRVG

SEQ ID NO: 170359 - protein, 26 aa, Oryza sativa
  Clone ID: PAT_MRT4530_68693C.1.pep
AGLPPVAIVKHYSLTYYPSACSVILD

SEQ ID NO: 170360 - protein, 55 aa, Oryza sativa
  Clone ID: PAT_MRT4530_68694C.1.pep
LVLDNKHVACIPSYHQYGLNSLFFIRKVDPTPQRRCYVRHKLCRSMGLSINVVSP

SEQ ID NO: 170361 - protein, 43 aa, Oryza sativa
  Clone ID: PAT_MRT4530_68695C.1.pep
MYVWTDIKVEVKFTCGNVDASIRYGVKELDCTIQTLKRSRLIE

SEQ ID NO: 170362 - protein, 802 aa, Oryza sativa
  Clone ID: PAT_MRT4530_68697C.1.pep
MTVLSVLASSILSKVTTFAVEYALDDIKFAWNVKSELEKLKNSLGAICAVLKDAERKQSTHSSLKHWLENLKDVVYDIDDVLDDVGTRVLQQKVRKGEICTYFAQLTIFPFELGRKIRKVRERLNEIAALKRDFELKEEPIDTPSDQFAQRETHSLIGEQNIFGRDKAKNDIVKMISEAAESNSNTLSVLPLIGMGGVGKTALAKLVFNDKSTKDKFDKMLWASVSNAFDLKHIVNIIIQSDSGESNNQLTLEALTKKLHELLRDKRYLLVLDDISNDNVNWEELINLLPSGRSGCMILITTRLTKIASELKTLEPYEVPKLPHEECRKIFVRYAFRGEKAKDRELLKIGESIVQKCDGLPLAARTLGSLLFRKDISMWQEVKENNLLSTGKGKDDILSVLKLSYDALPSDLKTCFSWLSTFPKDYDIFRELIIMYWMAMGLLNPASRTKEAIRVGEKYFNELAGRSLFQDYVFNHDGSISHCKMHSLVHDLAISVSQNEHAIVGCENFTASERVKHLVWDHKDFSTDLKFPTQLRRARKARTFACRHNYGTVSKSFLEDLLATFTRLRVLVFSEVEFEELPSSIGNLKHLRYLDLQWNMKIKFLPNSLCKLVNLQTLQLAWCKELEELPRDVKRLVSLRYLILTSKQQYLPNDALGGWTSMVFLQISACPMLTSLTEGFGSLSALRELFVFNCPKLPSLPSSMNRLVTLQKLVIHNCDELDLMEPEEAMGGLKSLESIELAGLPKFETFPDSFASAASSLQYLKVSDCPQFEELPDFIKRFSSLKKIEIPKSRAPSTITWA

SEQ ID NO: 170363 - protein, 138 aa, Oryza sativa
  Clone ID: PAT_MRT4530_68698C.1.pep
MAPPYRGSLKRFHFQSKSPKIFADVCNRTNANHVTVQDLPWLHRLVLMHSWLGTHVFCDRSPEKIRQVLFIGDELCRSRHSFKQLPLFETTQMPPASLQGCQALSWTPNPDIQGSRGCFGNQQEPQRAERAWGSWASI

SEQ ID NO: 170364 - protein, 41 aa, Oryza sativa
  Clone ID: PAT_MRT4530_68699C.1.pep
DKYHIGAPPFSRCLMELIWISPSQARGYMSVNEILISKICN

SEQ ID NO: 170365 - protein, 354 aa, Oryza sativa
  unsure (1)..(354): unsure at all Xaa locations
  Clone ID: PAT_MRT4530_6869C.1.pep
MDLLRQPRGGARGPGPRGWGPRGSLTVHGGPGAPGLAPTGAVGPTRQPHPRARAADGRAPRGSRGARPKAATPAQPTGGGALVPRWGGKGETNRRSTAHPGSTATTGTATGADRGGGAARVDGDGGVPAVGDRNGEVDEVGEVAANPKKVTPKREKVRGDDGGGPELGGDGGERERWRELDSGGERERRVAETVEGGTGKVYIGLGVGEGGRTRGKRARKIRPPLMXPARLGGKFPNESEGEREGKMGGKXREGITGNISPLLIARGTDGSGGIRGGGGARARARRRERREEGDDGWAPPVSEGGGRARPSAARARGGGRMGRGEEGXRGKGMGRAGPRGRGGGKGNFLGFFFL

SEQ ID NO: 170366 - protein, 70 aa, Oryza sativa
  unsure (1)..(70): unsure at all Xaa locations
  Clone ID: PAT_MRT4530_686C.1.pep
LHFNVPIVERHSLTLHPKXXSLASNINTSXPYFXLXALSESISKLRMXGSSREXLRVLDNDEDLSSAPXD

SEQ ID NO: 170367 - protein, 89 aa, Oryza sativa
  unsure (1)..(89): unsure at all Xaa locations
  Clone ID: PAT_MRT4530_68700C.1.pep
GGDLETGGPMGIGSPARPQLGWMERHEPAQTNQPPKYKAYQYAMGAGESDRMIGGDGAXLGKVLKGKNGNDGCHWGHYLNRGPARAGAG

SEQ ID NO: 170368 - protein, 75 aa, Oryza sativa
  Clone ID: PAT_MRT4530_68701C.1.pep
MANPSNVATNGNVTKGSCCLLTLWVIYKLLQKIQIKKLAISIHRELAGGGNAMQAARARAGQGLQLCERGRDAQQ

SEQ ID NO: 170369 - protein, 119 aa, Oryza sativa
  Clone ID: PAT_MRT4530_68702C.1.pep
MARNRRVILGLMYGYYEEALDALSLDRVYFGFADPVNNIIANTLRVVPSELPDSDGAMIPKRETTMASRSRVARASGEMVLSKIVTGGDVPSPPEAHTVAERSLEGLITLTSYYHYLPT

SEQ ID NO: 170370 - protein, 171 aa, Oryza sativa
  Clone ID: PAT_MRT4530_68703C.1.pep
MERKPDEPEKAASGAGAGDPPPPPFLEVKCRSSGEVRRFAFGTTARYALHAVNRKLAPGAPAALHVEAVKDGEEPVSFGPAAPLADYGDGWKLQTITEQDAPGYYQTPASDTRRDDTKQSAKNPRDQETMAAYITKIVLAFVFIFLLGGLFTYLLETLPDMFQPASEPQPL

SEQ ID NO: 170371 - protein, 358 aa, Oryza sativa
  unsure (1)..(358): unsure at all Xaa locations
  Clone ID: PAT_MRT4530_68704C.1.pep
RYYRGNCGCGVAHLICAGQTIHGVPLLTGYLMVGVDDVPSQYRGHVLEFPLEEGVDSLGDTFHDVILWPKRYIVVTSNEWTGDPSNGGSSHTGEWCPGVAPSPHRXRNPSPPPPHDNTPSQPRPPEKSXSTPTPKKDSTTSASQRSTSSNKSXTPXTKADSVSVPTTGLPKKMVSGSASLLFGPKKPEELKIPIPKSAIDHFIKCARLKPPKKPISDFWGTIRNKDLHDQAKEXFIAEKAANEVTFCKSAGQDNLEDLDNHLEAEVVLXSTNLENPWSLTYASPPFSRQIGSSSKXPVSINEHLNCDVQMPSACSFSIPTASQGYHMPKALVVHHHWNLCIFNPEFSRKHTNNSLHLG

SEQ ID NO: 170372 - protein, 316 aa, Oryza sativa
  Clone ID: PAT_MRT4530_68705C.1.pep
MALTFTRHSLVVIVGALLLQLFFLAGLAPAAAAAGPTGQVTVFWGRNKDEGSLREACDTGLYTMVVMSFLNVYGARGGEYRLDLAGHPVGCIGGDVKHCQRKGVLVSLAIGGGAYSLPTNQSALDLFEHLWNTYLGGGGGKGAVAAARPFGDAVLDGVDFFLDRATPAERYDVLATELAKRGKPPRRALHLTATTRCAFPDRGAARALATGAFERVHVRFYGGGGGGDDNCTVYWEDAWDRWTAAYPRSRIYFGLPAAPAVAEEEQDGRSGYVYPKTLYYRYVPELQKAANYGGFMIWDRYSDKQSGYSGYVKNWA

SEQ ID NO: 170373 - protein, 2036 aa, Oryza sativa
  Clone ID: PAT_MRT4530_68706C.1.pep
MAEDHDAEGVRMTGEGAADGCDAHSLAGGEEEIGDQRRRRRASSTHRPPPPPRGYLRGRWPSSTSPPLGPSTPAHEGLATEDERSGAPDAPPAVGERGGASRVLDGEAGDAEVVGESANAVLAVIPLGGGKRGTDAGGGMAEEPPETASDLEAALDVARTAASPSTEVAMKVVSLSHDAEQGMRQFVTEVVSVGRFRHRNVVPLLGYCRRRGELLLVYDYMPNGGLDQWLHGQVHLRRRCPVLRATIYLQRCLGIASSPLQRVAGMLGDNAWERIQLLWNFQEDVQDMKSKMTDLKVALSYADKHSRETDDDALVLRHWLNKYKSVAYDMEDTLDELLTNAMIWENNPCTVKLFFSSINPLIVRITMSSKMRNIRMKLDKIAEDQKKFPSMQLANPTGQDSTDKWRETFIGHTDEIEMVGRAREKKEILIKVLQNDGGQEISIIPVVGLGGMGKTTLAKAVYTDKETHMFDVKAWVHVSMEFQLNKIVSGIISHVEGSTPANIADLQYLKSQLDRILCNKLYLIILDDLWEEGWSKLEKLMEMLQSGKKGSKIIVTTRSEKVVNTLSTIRLSYFHTVDPIKLVGMSIDECWFIMKPRNMENCEFSDLVDIGKEIAQRCSGVPLVAKALGYVMQKHRTREEWMEIKNSNILDTKDDEEGILKGFIQDTDGQPLQKVAMEYVNELLGMSFLTIFTSPTVLASRMLFKPTLKLHMHDMVHELARHVAENRNTKRDNLNFHYHLLLNQNETSSAYKSLATKVRALHFRGCDKMHLPKQAFSHTLCLRVLDLGGRQVSELPSSVYKLKLLRYLDASSLRISSFSKSFNHLLNLQALILSNTYLKTLPTNIGCLQKLQYFDLSGCANLNELPTSFGDLSSLLFLNLASCHELEALPMSFGNLNRLQFLSLSDCYKLNSLPESCCQLHDLAHLDLSDCYNLGKLPDCIDQLSKLEYLNMTSCSKVQALPESLCKLTMLRHLNLSYCLRLENLPSCIGDLQLQSLDIQGSFLLRDLPNSIFNMSTLKTVDGTFTYLVSSKVEKLRENLKLEGCCKLDGGSTDLCSRITELKKTHCHELEIQGLEDFKHLEGIEHAILLNSLKLTKLIFSWQPKQYTNETAHHKTVLGMLVPPRSVHHLAIKGYCGIELPKWMLDIRSYLPHLTTIFLHGLMECNRLPPLGCLPHLRALLMTKMPKIKSVGPEFYGDYGSCQKLRMIILASMDNLEEWWTTRSSKQDNELSLIPDLQMLWASDCPKLKFLPYPPRSLTWFIENSNHVLPEHGFGNLTSATYPLHLSIERAPNSREMWRRAQHLSSIESLTLMSIAGLRALPEAIQCFTSLWRLSILGCGELETLPEWLGDYFTCLEEISIDTCPMLSSLPESIRRLTKLKKLRITNCPVLSEKCQGEDRHKIAHILEPIFLLADTVSRVLVTANWRSKPLDFRWHLSLLKKRKGWLSCRSSLSVAAYQAGLNLDICLSVRQVSRWGSEKFRTGGGAHIRESVPPNHMEDYPSGRSKAAIGFLRRGGGFSSRNQSTEERTIQNYDGPGITTRLNPMKTRLSDNQERPRYLRDSFRSSTSMAIHGSSSKVPLRKFGDEKRRQTLLAGVDIAESSSRNAGGKHLEGSNKRIVVDDRSSDVLHTETEGLATEQDQLIAPNAGVSDSASSSDISEHAVESLVRSAAPSSRTRRQKDKELNLGQSGVCSSSCTNRPTISRYAPADVKRPCNHASGVQQHGHNNLDCTSVPNFLPSGCSSGSVYSRRFDAMRKRTSDGGSFSRSRGLSGTASLDDSPPAYPAIAGPRIRTTTTERASQQNALRSRRNFQDSAVSVRTRRPPWGARFRISEEREDGMISQRDSSIGNQQSDQVHSSSEEASTESSSRPFSAELPHAIYSSRGEGSNAFTARRRRSSSLYEERPPQTFHDLFRERNGRRHISIEGIAEVLLALDRIEQEAELTYEQLMVLETNILLGAFTSHDQHSDMRMDIDNMSYEELLALGDRIGSVSTALSEEQFVKCLRRSIYIPVATKANAQVVDDIKCSICQGVYCY

SEQ ID NO: 170374 - protein, 117 aa, Oryza sativa
  Clone ID: PAT_MRT4530_68707C.1.pep
QGRLQVRGRLRWFLGHPASGNGATLSAAEGYDGEDSVSTLPDDLRVARLPVKDATRTAALASRWRRVWSSTPLVLRGADLLLSAGEAVGVAAVGRALACHPDPFRVVVLGHCMFACY

SEQ ID NO: 170375 - protein, 611 aa, Oryza sativa
  Clone ID: PAT_MRT4530_68708C.1.pep
MAKQEQSRDTETNNVAAALQWLRHGELTTPYNGIGMSFGGFDPILSDVAAESAWDPRGPHMSDIHVHRGSAAGRVLAVALALAGRVPAPVRAARPRRPSPPRSPPYAPAYTRSTCTPWNLVLITGTCAPGTGWRLELGDSRRLRQRGGKRAEEVAVDVGWADDEHIDVGAAAVDAEVVGAEGEHQGGGLVGHAVGEHRAAVSSALSYRPSSRRRLSSRAVLSRSAGVGRLSRLAPPCHSVDQQPERSRIARRARPRQWRRTALLSAALVPRQPPATPALLPAASKETEWSSTESSAASGLDFEDTALTLRLPCSLAAAVPDPTASAPPPKPTRPTTPPPSPPPATTIGFPTAAAAATADRAMPTPASPRLRHGTSKKQYLYEELMSGHQPKTSSVNHPSCHSSRLKMQGITKALRFHGKQLKLTVLQHMNKGIFSWATLISRIQTESPTVIIPHIGLENIRVREILNAKGEAKAGAVYWCCTSHFVHEAIKHMTAHNVGALVVLKSGDEKQLAGIVTERDFARKILLPGRPSEETRVGDIMTEEDKLITVSSNTNILQAMELMTERHIRHVPVFDEKVVGMITIGDVVKTIVDQQHQEVKQLKKYIRGDYY

SEQ ID NO: 170376 - protein, 178 aa, Oryza sativa
  unsure (1)..(178): unsure at all Xaa locations
  Clone ID: PAT_MRT4530_68709C.1.pep
AVAFVVRRRKRGCALSDRFLAIRPDWRKLGVSFFFLFLVQGSEKFRTGGGAHIRESVPPNHMEDYPSGRSKAAIGFLRRGGGFSSRNQSTEERTIQNYDGPGITTRLNPMKTRLSDNQERPRYLRDSFRSSTSMAIHGSSSKVPLRKFGDEXRRQTLLAGVDIAESSSRNAXGXTSGG

SEQ ID NO: 170377 - protein, 129 aa, Oryza sativa
  Clone ID: PAT_MRT4530_6870C.1.pep
ILRSSILCRSMLKFVNSLLHYLTFEVLEPNWHLMHDRLQTARSIDEVIQIHDFFLQKCLKECLLLLPELLVKIEKLKALCLQYATSIQLLIPSIDVAKPENTSKSRMPRSKIKETKNRGQQLKLVSFFF

SEQ ID NO: 170378 - protein, 52 aa, Oryza sativa
  unsure (1)..(52): unsure at all Xaa locations
  Clone ID: PAT_MRT4530_68710C.1.pep
LAQVDGLAAARVELGXCSRALTWLLTYSLHSYSCPTPNHPPEEKKNRGRPDC

SEQ ID NO: 170379 - protein, 86 aa, Oryza sativa
  unsure (1)..(86): unsure at all Xaa locations
  Clone ID: PAT_MRT4530_68711C.1.pep
MADQATALVLSFGSYHLGVHSRGSDIDVLVVGPSYVDRDFFGALAAALAETAAVAELQPPXVPGAHVPVIKTRFHGVQVDLVYAGA

SEQ ID NO: 170380 - protein, 159 aa, Oryza sativa
  Clone ID: PAT_MRT4530_68712C.1.pep
RPVDDSPPAYPAIAGPRIRTTTTERASQQNALRSRRNFQDSAVSVRTRRPPWGARFRISEEREDGMISQRDSSIGNQQSDQVHSSSEEAPTESSSRPFSAELPHAIYSSRGEGSNAFTARRRRSSSLYEERPPQTFHDLFRERNGRRHISIEGIAEVIL

SEQ ID NO: 170381 - protein, 149 aa, Oryza sativa
  Clone ID: PAT_MRT4530_68713C.1.pep
MARYFGPAQARHGPTEVGPVPARADHRAVPGPLHRHVGPARHDGPAARPAQRGGTKNILILKKARWTTHAFRPARHGPTAGGPCLGGRCSPWAGTARHEVPIEPCRPDGCWAVPSRARAGPCRAGPLAIYNHACNVICSSLRLNYFLTK

SEQ ID NO: 170382 - protein, 119 aa, Oryza sativa
  unsure (1)..(119): unsure at all Xaa locations
  Clone ID: PAT_MRT4530_68714C.1.pep
IVPPYPTPQHPAIPPPXQPPSPRXGPHARPRPPTSPRRPSPSPPQLPNPSAPPTHPPQHIELLTPPPNHTPSFPQNPDATPTHTPRPPHPRSHDTPDSPPKPFSPTTPRTPIRPPPPLR

SEQ ID NO: 170383 - protein, 83 aa, Oryza sativa
  Clone ID: PAT_MRT4530_68715C.1.pep
NRSRWALARTQGFRKPMSPNPVTKFLKYTRSKGKRVFFSNRTSPSGKNGMFCFNPIQTPPLGPMKVSFFFPRFGLNPPITIGA

SEQ ID NO: 170384 - protein, 78 aa, Oryza sativa
  Clone ID: PAT_MRT4530_68716C.1.pep
GESPSLFGAKNPGGGSGGSVCVMGKNSLQTSGGFLQIPPRFKAATGFLPILFDGSSPGAAKFGSLKIRRPPLSPIFAK

SEQ ID NO: 170385 - protein, 888 aa, Oryza sativa
  Clone ID: PAT_MRT4530_68717C.1.pep
MAVGLPIVFGCHDYSGFTNIDCGFVDGESYTDSTTNLTYVPDHEFVEGGTHHEVVPKLISGSTDEQEKTLRSFPDGQRNCYTIPSTSGKKYLIRTTFTYGNYDGLRSSENGSLFLFGLHIGVNFWTTVNLTKQDSSDTIWKEVLTVAPDEFIYVCLVNFGSGTPFISALELRQLDDPMYPFLNLFVSVSYFTRMRFGAVDDFITRYPTDLFDRFWEAAQCYSYPWLNLTTNQTVNKLPGNDNFQVPTLIVQKASTINSGFSWLNISITAGDNLNGQSLELLPIFHFAEIEKNRPNRTFQIYSDGNELHQAFSPSYLQVDSVYLRDRYLHESGTTFTLCKTNSSELPPLINAFEAYSLVRMENLTTDTIDVSSMKQVKTQYNVQRRSWNGDPCSPKEYTWEGVKCNYYDGKQNPRIILVNLSASRLSGWINPSFRNMSLEILDLSHNNLSGTIPYNQVNSLKSLNLSYNQLIGSVPDYLFKRYKAGLLELRLEGNPMCSNISESYCAMQADKAKKNTATLLIAVIVPVVAITLMLFLWMLCCKGKPKEHDDYDMYEEENPLHSDTRRFTYTELRTITNNFQSIIGNGGFGTVYHGILGNGEEVAVKVLRETSRALSKDFLPEVQTLSKVHHKNLVTFLGYCLNKKCLALVYDFMSRGNLQEVLRGGLEYLHESCTPAIVHRDVKTANILLDENLVAMISDFGLSRSYTPAHTHISTIAAGTVGYLDPEYHATFQLTVKADVYSFGIVLLEIITGQPSVLVDPEPVHLPNWVRQKIARGSIHDAVDSRLMHQYDATSVQSVIDLAMNCVGNVSIDRPSMTEIVIKLKECLLAGTGKKQLVSGSYKQKDAMDAGIARQFQLLISGVPIDGDGCACATHREEMINHCNGKMK

SEQ ID NO: 170386 - protein, 156 aa, Oryza sativa
  Clone ID: PAT_MRT4530_68718C.1.pep
VPGPRPWDFFFFSPGFPQAKTPPPFSPFLGRAFLVLKNPKLGFLGEKGCFPKFGPVPGKKKKEKAPILPVWFFLFFRGKPTPPGLENWGGWVYKKRFFKPPRGGVSFSPVLGPGAAFPGGFFFKPLRKKMGVPFFLRFDQNFGGGNFLFFGPVVFF

SEQ ID NO: 170387 - protein, 51 aa, Oryza sativa
  Clone ID: PAT_MRT4530_68719C.1.pep
THQSTLLYTTGLFIKGTGTHPHIHLFHTQLKYTKLTLSLPNCSKLISNKFP

SEQ ID NO: 170388 - protein, 117 aa, Oryza sativa
  Clone ID: PAT_MRT4530_6871C.1.pep
PRVRLFTDDQDVLHHIYLGIPFVSLTQPINALAFVFDGINYGASDFGYAAYSMASQLILVAIVSIIFIVTLASYNGFVGIWIALTVYMSLRMLAGFLRIGTARGPWTFYAAQRMHSY

SEQ ID NO: 170389 - protein, 960 aa, Oryza sativa
  Clone ID: PAT_MRT4530_68720C.1.pep
MGRTSIMEKKEAALKELEPLLESVSKLLKSGRFTDAHERHGLAFLEMELGAIVAYLRMPMSPSIGDHDDGAHYDLMTWMSVLIGVRNTVTAIVKFLSNQPCVPLRKATRRFRRRRSFGYDIPRKVYPLYLVFNGLRSELMPSPPQAAQVEACTVHDHLVAIDGTANELLGWLMAADESLRVMAIAGPAGIGKTTLAMELHRRLRCQTHFQCHIVANFSRRPHGSKLVPQTILKQIIEQLEAPSSPNSSEITMLGDDLELLARNISERLKDKRYFALIDNIFNESDLELIKGAFPNNNCGSRILFTAGDERIAGWCLSNYNGIVHKMKPLSHSDSEKLLHIKAFGSMDDCPPENLKLLCDEILMKCRGIPSFITGMADWLKQHQQQHGSSAIPRVEEVRLLLKQFEHWLSFDYSDELRQSLLYLSMLPQGYVFEKDRLVMKWLDEGLLSELHFSEMVDRNIITPAARNCGHNLDEDDLCLWQVNPFILRFLAYRAAEKGYVITSATLNSAPRGGGKNTRIARRLALHHPDPQLPEMLQEMDLSHTRSLLISGAVNRTTVPLDKFGYLVSLDLQGWENLKDEDLLQICKMLVLSYLSVSNTKVSKLPPQIKELRTLNALDISHTHISEIPSEVCEPGSLRMLDLRGTQIKHMPEQIVRLKMLKHFLIDLSEFSERSVKYLGDLHDLKILAITWAFHQCNDKAYQQALLSSLGKWRQLKSLTIHCGLGCSMEFLRSLSDPPKFLDEFKVTAGKFANVPQWIEGLEHLTFLQITVCKQVAGDVKILAGLVKLQRLILGLEFIPEEAIVIESKGFKELEKFSLDCPVPRLTFEEEAMPKLTYLRLNLHTSPMSEMSVPSGIGNLKMLSEVALCYNVRYMNSPNIKRKVEAVSKEVAKHRNPIDLFIRGMQIEVNQAGEEEAEGATRFNQVNSPEDVVQAADEAAPRRETEFQSEIEDEGETECHA

SEQ ID NO: 170390 - protein, 771 aa, Oryza sativa
  Clone ID: PAT_MRT4530_68721C.1.pep
MDGFVALGNVTQVAKQFAASSVGQLARIEGLVTLSCLLVVILVFSNSRRRHQSNGFLGFLVWAAFMFNYPVISYTIGLMQSSSVRNELFVVWACFLLLLLGSADAMTAFSFNDTQQHARSMMNQALHIIYLLFLILYYKAQLRMNLKVPLFILWSLSVARLVLRINAYRTTSRDNGLIRENQIVFEYMKHKLLDGSIVGKYDPDPSSMKEYIYLVDGKEEESSSMAIHLRYDAPDTVSVDKVWECKGELLSCSSSAGSRGAARRRDLCLSFALFRLMRLRFGADHVGDLNFHSNNDLSRTLVVDRLLSDDRDLDRAFRVVEAELGFLFDFFYARYPSLKDNLVFDLILYLLTMVTSLFTLFSSVLLHYRPSTTAKVNIIIHSFNLDLFVTRLVVALYIFLESYQLLSLVLSDWHKVKLMCQYVLKVSWHRARVDTPLKVLCHFNVSRYWKNAINQYSLLDNAGYLYRVQLLLSTLTLQLLDPWIMASSIVLPPQVKQAVLCALKDALKPTNGKITDGRRWLHQNGILDRDLDYDLFSHKTYAPYILVWHIATSICCYGESKFDMAQADAELRYHYEVATVLSGYCSYLVAFAPDLIPDGTYTSQLLSCRVLKDAHAYLAECRTTSDKYDKLMKLGRDGWKEQEAGCPLLYEGAVLALNLVDRKKDAEERWKVLAHFWANLLLYIAPSDRASVHASKLATGGELLTIVWALLNHAGVVNKLQENNGCQPLDTLPRAPRTPIFHRQGTIVDSNEDDGDGDYPMYEIMQEDYSV

SEQ ID NO: 170391 - protein, 361 aa, Oryza sativa
  unsure (1)..(361): unsure at all Xaa locations
  Clone ID: PAT_MRT4530_68722C.1.pep
MDISRANEGYMSCGPVVKMSWHRAGWVGNYVTSSVRIPWWYVARGYTIQIQICIIGIHGFKLISYASGMYQSKHHHRLVVVAADWCPRLYDWVVTPPLLGVIVFTDRSPRPPXTAYYAAVVGRLRLHRRLAFPAIDWCLRLHGWPIMPPLMGIYVFTAGSPPSPPTGVSACTAGLLCRRXWASTSLPIGLSSPPPTGVSACTAGLLYHRCXASTSLPTGXPRLPPNGVSACTADLLCRRXIGVNVFTXPAASSAADWCLRLHGWPIMPSLLGIYIFTDRPPRMTPTGAIVFTAGHVAVAANRRHHLQRTSSSSLLAALSDADWFVRLHSCASSSSLTGVIVIACCSPPPMVSRLYVQLFPN

SEQ ID NO: 170392 - protein, 84 aa, Oryza sativa
  Clone ID: PAT_MRT4530_68723C.1.pep
SKRRYGGAVSSSEEVELSPIFSAVSTHIRIPLLRQPLSSASPLLPIVRLRSTSTAATVKPPQVRMTNGRVPDSMEVKEYQITCL

SEQ ID NO: 170393 - protein, 145 aa, Oryza sativa
  Clone ID: PAT_MRT4530_68724C.1.pep
MEVMKPIDSRRRQLALKMMTPISGDGDVASCEDNSSSWCHTRRPVGEDVDAQQRRHDRPAVQAETPVGGRRGGRSVKTLTPINGGIIAEVADVGTKSSINGNENISHRSSLSRLRMKVKTPMNSGIIGQLSRQKHQSATTKASQR

SEQ ID NO: 170394 - protein, 65 aa, Oryza sativa
  unsure (1)..(65): unsure at all Xaa locations
  Clone ID: PAT_MRT4530_68725C.1.pep
HPQSAGAVPMSCLLFLKSLLLLRXXLFPTPTPFXXLPSPERAPVKPRGRKDGGGGALLVSSRSGG

SEQ ID NO: 170395 - protein, 46 aa, Oryza sativa
  Clone ID: PAT_MRT4530_68726C.1.pep
TKHNALELQMIAPREEITSPILDLVVYDSMLQRDHHVPTCRLLNNS

SEQ ID NO: 170396 - protein, 55 aa, Oryza sativa
  Clone ID: PAT_MRT4530_68727C.1.pep
PTNQLLAINQSCNEHRHMSDDYPLYPLTSKKVFLVSTNNWATGERMNQVFEAGYW

SEQ ID NO: 170397 - protein, 68 aa, Oryza sativa
  unsure (1)..(68): unsure at all Xaa locations
  Clone ID: PAT_MRT4530_68728C.1.pep
AHICLDSYMNMGNARKSYDMKWRKYLLVHIWLCISSLILVFILSMMVSXIYEKLNVCKKKNXXXXXXX

SEQ ID NO: 170398 - protein, 679 aa, Oryza sativa
  unsure (1)..(679): unsure at all Xaa locations
  Clone ID: PAT_MRT4530_68729C.1.pep
MLGILIDVALRLDHSAMSEVILCVKDSLGVQLARSEFLSXALNGQNSSEDVIVALENHNDYLKEVVDNLRQAVSIINRKHEKYLDEIEAFKNNQSRELHEVKCLSGELEESMAELEESRRKLAVLQLQTGGGSLMNTSAPNGVNGSVSTDKSSDKGMGWRDLKDAVEEAKTLAANRLFELHETQEDNLILSKQLEDIQDQLKDENYIVTSKPYTILSDQLHHLNAEIERYRGLVEVLQAKIEDLEHEIQKLMAEKNDLEIKAEEALQDSGKKDFKDEIHVMAASXLQNERNQLLPKEEKMLAKAESVDAVQQSITTYKAKIEDLEHEIQKLXWLKRMNLEIKGLRKPGQDSGSKRQQGEDPSCERATHXREGIVGHSIEXRSKNAATEPLVLREKADYXEISNLRRKGHNGCNLXELMKLNESKRIKNAELDGRLSEIETIGQXHXDMQTLNQHHLKQVADRDDFNIKLVSDSVKMKQAYGSLLAEKNMLQKQLQHVNSSLESSKLKITSGEEQMKTYVAQAMKSSSENRHLAISLERTMLEVSDAEKELKWLRSATGSAEKEYEINQKKIAELKMELERERNERIKLEEEYEEVKNEVSELTSETEETTIQKLQDEIKECKAILKCGVCFDRPKEVVITKCFHLFCSPCIQRNLEIRHRKCPGCGTPFGQSDVREVKI

SEQ ID NO: 170399 - protein, 47 aa, Oryza sativa
  Clone ID: PAT_MRT4530_6872C.1.pep
HRVGLSAGAGAGVVIGVGGGRPWDSTRIDHSTCTSSHGHDLTSSYRM

SEQ ID NO: 170400 - protein, 142 aa, Oryza sativa
  Clone ID: PAT_MRT4530_68730C.1.pep
MRPASCGGGAKLRSRAGPNPGPEAGATRRKGTHCRGALGQTRGTCEWSAGWGHSESLDPGPLYSQARELGAAPGSGGHRRGGGARRRGGDARRRGGGARRQRCSAVGWRRSAAWGRRSAAGWWRPATEVLGGGGARRARAWA

SEQ ID NO: 170401 - protein, 45 aa, Oryza sativa
  unsure (1)..(45): unsure at all Xaa locations
  Clone ID: PAT_MRT4530_68731C.1.pep
MSQSTGSSSTRKTPRQRDHKRDGAGLRADGDGLLPVSWYSLSTDX

SEQ ID NO: 170402 - protein, 459 aa, Oryza sativa
  Clone ID: PAT_MRT4530_68732C.1.pep
MLAKPESVDAVQQSITTYKAKIEDLEHEIQKLMAEKNDLEIKAEEALQDSGKKDFKDEIHVMAASLSKEMELLDNQMNRSKDAASEALALREEADYLRTLLAKKIETLDQEKQELQFIVDMLGKECSESRAISEIEESENRARKQAEYLRKCLEEHNLELRVKAANEAETACQQRLSIAEAELEDLRAKVDASERDVMKLKESIRIKEAEVDGHISEIETIGQAYEDMQTQNQHLLQQVADRDDFNIKLVSDSVKMKQAYGSLLAEKNMLQKQLQHVNSSLESSKLKITSGEEQMKTYVAQAMKSSSENRHLAISLERTMLEVSDAEKELKWLRSATGSAEKEYEINQKKIAELKMELERERNERIKLEEEYEEVKNEVSELTSETEETTIQKLQDEIKECKAILKCGVCFDRPKEVVITKCFHLFCSPCIQRNLEIRHRKCPGCGTPFGQSDVREVKI

SEQ ID NO: 170403 - protein, 365 aa, Oryza sativa
  Clone ID: PAT_MRT4530_68733C.1.pep
MDAAALQYENQKLVQQLEAQKSKMRALEGKFKELRDEQCSYDNTLICLNKMWNQLIDDLVLLGVRAGGDLNGLQALDHEEMSEESLESCPSEEIFLFRLLNSRNFRNNDDSSLSKLVEEALALRYSTTVTLMKSLQEAFAVQQARSESLSLALNGQNSSEDVIVALENHNDYLKEVVDNLRQAVSIINRKHEKYLDEIEAFKNNQSRELHEVKCLSGELEESMAELEESRRKLAVLQLQTGGGSLMNTSAPNGVNGSVSTDKSSDKGMGWRDLKDAVEEAKTLAANRLFELHETQEDNLILSKQLEDIQDQLKDENYIVTSKPYTILSDQLHHLNAEIERYRGLVEVLQVCCFSSVVLFYNGIVV

SEQ ID NO: 170404 - protein, 44 aa, Oryza sativa
  Clone ID: PAT_MRT4530_68734C.1.pep
MWLGYQITMKKADGELRRVRRRRRAQNQAVFRALTSSILKNPEV

SEQ ID NO: 170405 - protein, 213 aa, Oryza sativa
  unsure (1)..(213): unsure at all Xaa locations
  Clone ID: PAT_MRT4530_68735C.1.pep
MTAGGGRSLGGPRERGWLPPCACGPSGSLHSSPLLPYDLVRLCLRLHPSRRCHHHLLEAPPPGGAPRPSPSEVNEDVEATLSLNVRAVAMAQLGGDRGRRGWVERRLKRRGSGGIGSSGRGGGSNMAFHGGAGVGAGWAADRGIDLERRRHVGGGRPSWSGGRLRVDERRPASVPPPSSSGLRAVXPSSDGVERLRGAGGVGRRPPPSASPPM

SEQ ID NO: 170406 - protein, 34 aa, Oryza sativa
  Clone ID: PAT_MRT4530_68736C.1.pep
MAELCPSMASSGTDQARSRTQDLDLRILLERGQA

SEQ ID NO: 170407 - protein, 108 aa, Oryza sativa
  Clone ID: PAT_MRT4530_68737C.1.pep
MTYIVKQREYCGSEESGWMGGRASAPAHGLGWWASATAKASSSPISSLPTTVEGSGSGGGRGREVWPPYSCAAAEDRERANPAAPSPLRPHDTDENEVDGNDNDSGFK

SEQ ID NO: 170408 - protein, 550 aa, Oryza sativa
  Clone ID: PAT_MRT4530_68738C.1.pep
MEEYENRRVEAEERAHVDLVDIKKVLEVRLPVVEKVGGTRATGQGRRREVGADGGAHGGTPGAAARTAARSGWRRGGGEGGGSAVCRRRGSGSCFVHILMLDLIISYGVFGQRNADFEVAAVAATKTVDDDEANAAGKEGVQAWSSLYFPDDPLIVVADVVPHASPALPLSPTPPPCLLTGHVRRPPAHPCAPLPAFASAASRPHDLRVRRRPPARPPPASSVAPWPVLLRRKFTFSHSQASISLPDEVGAGKRLDAVEWSWLRLHARAGCLDEELRRESLPTSRSSSEKEVTPWRAVRSSAWCATPPSRTVVLVHADAFPVPSRAAVPPSPFPVTIATAGNLRANPVSYAVELVRAPKGGVGAIPGVASFLIPYRVTGAILLPTWQGGAEVAGERAKSLAPSSNRTAPERLAPSSCHSGGSVSRWGGGRWRWEGEVGIGFRGRAWEAADQRWVADKGGRRGGAVGLAAGGGPVMVAGAKRGKGEEAGRPGPRRRGQGGSTVGKESLAPSSNGMEPERLAPFSCHRGGSALRWQGERANALNWGISQDST

SEQ ID NO: 170409 - protein, 320 aa, Oryza sativa
  Clone ID: PAT_MRT4530_68739C.1.pep
QVIAKFENYRVFPIKDGPTAIVWPPNNDMWSNRRCSGDDLGHRSLTQRPMDKTELRCHALVPYWAGSSVSCFGGFRWAGTGFLLTNNSDYRDGPVAWSGTIRKNAGIRPPRVHDDRRKRTESEDSRVYSHFTTSRHSRITQYNANTHNARALTPMNTRTQTYPYEHLRRLDRQILERLTKLSQASRCRRHNAVKSWNESRISVLTRCCKTVGLKKSARFSMAIKYFRIYHKEACMHQQHARVAACFGYLTLTKAAHRTAHMFPLASPKEQTTYKRDQLILVSGRRPCATSSIAFLPAFSVPTARAACRTMVDKSMCNSRL

SEQ ID NO: 170410 - protein, 97 aa, Oryza sativa
  Clone ID: PAT_MRT4530_6873C.1.pep
ACTSTTPVWAAPATRPRCSPAATRSPRTTYTATRHRLLTLLKIGTASMRGAARTRCSPTSITLSACSPLTLLRRISITSVEVATTTRCSSPTSTPAP

SEQ ID NO: 170411 - protein, 55 aa, Oryza sativa
  Clone ID: PAT_MRT4530_68740C.1.pep
QARIATFASNRHPVHISSNSVAHPCSLPQENQHSHQHYHLSTIKIGLFTRTLRPS

SEQ ID NO: 170412 - protein, 884 aa, Oryza sativa
  Clone ID: PAT_MRT4530_68741C.1.pep
MWTLHVILSLFFLPLFPFSLSTSAFCKRRWRQRQRRRRWREGRRWRHWSGGGDGRGPEWRRRFGLELAWMEAEAATEEMAGGRGPERRRVGGEPGGRWWLAGRELVAKAAPIFLPPRRAPHAPAPIGGADYAVGSVPRAAKGGRLGLRGGLTDGDAGLAEEGCGRRATITAEESAVANRTAAGTRLAISTSSNFHKAASAKKKRRSQKKTTRETTQLQESLGSSLSPFWVVSVILQELSCSSSLLGLKVDFCTGTAKALGIVLQKAQQSEAYCPSLSLLLLLKTMATFFSSSTNQRDLTGGGGDGGDMSFQHYPPPSNPYSDSSAGGLIPLPASIVSHSHIAHGGGDEPAAFREAATADGGEMGLQTQLLMAHGAAARGHQGGLSLSLGTQVPVSLYQYRPAGMAAASLLSPSQSSPMAGRSAQNSIYVQNSRFLRAARELLDEVVNVRDAIKRKGDKNQGKDSGECKGGDAAGDDKAGSNPQEQESNSAPELSPSERQDLQNKVTALMAMLDQVDRRYRHYHHQMQIVMSSFDAVAGGGAARPYTALALQTISRHFRSLRDAIGAQAQAARRGLGEQDASAQGGGGLSRLRYIDQQLRQQRAMQQFGMMQQPQHAWRPQRGLPESAVSVLRAWLFEHFLHPYPKDSEKLMLARQTGLSRGQVSNWFINARVRLWKPMIEEMYKEEFGAEMDSNSSSENGGGGGGKGKDEAISSEDRDEFQSPSSAAAARHAGVAGQLNNPFKSEAMGGAALDVGVGVVGLSSCLGGAMGTYATGLNLNHHVHHPGAGGTSLLHDALHHHHHGGGGDARFVSYGDMADFGGGGGYDGGSVSLTLGLQHCNNAGPVPAEQQGLLYGSAGDFDYINGSDDRQRFGPASQLLHDFVA

SEQ ID NO: 170413 - protein, 65 aa, Oryza sativa
  Clone ID: PAT_MRT4530_68742C.1.pep
MFTGDLFGDMVPRTSLSITGCWRARRALSYWSYCSQEGVVEQVDRNKAFDRSSNGVRGFSKSTKS

SEQ ID NO: 170414 - protein, 627 aa, Oryza sativa
  Clone ID: PAT_MRT4530_68743C.1.pep
MAAATASSPATAAAANSDDEDNYEEYIPVAKRRAMEADRLRRLRLSKPAPPSSSAAEAASDLPPPPPPPPNQPSAGGGGGGLEASAKPSLLVKATQLKRAAPEVTHTEQLIMQEKEMIEHLSDRKTLMSVRELAKGITYSDPLKTGWKPPLRLRRMPRAKADELRRKWHILVDGDDVPPPARDFRDLRLPEPMLRKLREKGIVQPTPIQVQGLPVVLSGRDMIGIAFTGSGKTLVFVLPLIMVALQEEMMMPIVPGEGPFGMIICPSRELAKQTYDVIEQFLVPLKEAGYPEIRPLLCIGGVDMRAQLDVVKKGVHIVVATPGRLKDLLAKKKMNLDNCRYLTLDEADRLVDLGFEDDIREVFDHFKAQRQTLLFSATMPKKIQNFAKSALVKPVIVNVGRAGAANLDVIQEVEYVKEDARIIYLLECLQKTPPPVLVFCENKADVDYIHEYLLLKGVEAVAIHGGKDQEERENAIEFFKNGKKDVLVATDVASKGLDFPDIQHVINYDMPAEIENYVHRIGRTGRCGKTGIATTFINKNQTETTLLDLKHLLKEAKQRIPPVLAELNDPLEDEETMAKESGVKGCAYCGGLGHRVTDCPKLEHQKSMAIAGSRRDYYGGGGYRGEI

SEQ ID NO: 170415 - protein, 429 aa, Oryza sativa
  Clone ID: PAT_MRT4530_68744C.1.pep
MERGGGGGGGGMDALPDGVVQHILSQLSSARDVAACAGVSRGMRGCVPFLPALYFPRGAFDAAGGAAAADDAIGRMVEAAARLEELVIYCPFSAARLPRWLAARSASLRVLELRMDSAVSSGAGSGHLDCIGAVANLEELRLWGLTMTRAPAWGQLERLRVLEIVGAAVRDVAVNGAVGACPNLTDLALIGCECSGAVAMTLPLVERCRLDFVGSGNCSLALAAPLVESLEIQGFCWISLQGGIRLKHLTIAKNTGTGSVYNIEIGKLPELEKLSLRGVQWSWGAISSVLQCAREVKYLVMKIEFCGDHDTLEPFPEVDLVDFFNSHPKLIKFEIHGAMFAAMCQKNSLKNLDSRFSIPCLEEVLITVRSPLNAELKLNTLESLVKYSPRMRRMVVRISQMKNCHGSADGFFEEICKFMYMNNGRVRIE

SEQ ID NO: 170416 - protein, 299 aa, Oryza sativa
  Clone ID: PAT_MRT4530_68745C.1.pep
MNSIVINILPGAQAATFTISNRCGYTVWPGILSNAGVAPPSTTGFALSPGQTLAVSVAAAWSGRIWGRTLCGQDSSGKFTCATGDCGSGAVECSGRGAAPPATLAEFTLAGGSGGGGGDDFYDVSLVDGYNLPMLVAPSTPPPASGGAASNNGSSCQVTGCVMDLNKSCPAELQVVAASAARRAVAACKSACEAFGTAEYCCSGAHGSPATCAATAYSRFFKGACPRAYSYAYDDATSTFTCAAAGGGYDVVFCPGMSSNVGKITVIIISQYCVGFNGHKLQGNGILKDEIDQLLLRTA

SEQ ID NO: 170417 - protein, 58 aa, Oryza sativa
  Clone ID: PAT_MRT4530_68746C.1.pep
KKGGGPEQKGGHMIPAKQNPHDKTVSVKAHLPNFTQSNHYLWAKANVFLFLPFTSQKQ

SEQ ID NO: 170418 - protein, 196 aa, Oryza sativa
  unsure (1)..(196): unsure at all Xaa locations
  Clone ID: PAT_MRT4530_68747C.1.pep
RKGATNAIRSSSPNRCTKLSLLLNLNPPTEAPPPTXPLGPSWELPGPRRPRPQSRTPHPRAERGPPPACAARRPQPLRRRRPPPRRRPPRRRRQPPPRPPPPPPPPRRHPPPPRAPRSGHPRPPSXTPXPQPQPLPPHPPPPPPPPPPPQSXVSRTRGAGGARPLRTLPHGSLPPLPPIYAPTRSPPPPPQRHTPP

SEQ ID NO: 170419 - protein, 123 aa, Oryza sativa
  unsure (1)..(123): unsure at all Xaa locations
  Clone ID: PAT_MRT4530_68748C.1.pep
HRALPPLSIAPGHPPRLSPPLLPSHWSAPPHPHRLAPPPPRTRKPHLPPTPPPPDPKRWQLAASTIVLDDTPTPPKRRPPSVXPTGPPPWWPIRPGSRSPNQLILTSCHQLTSDNPPPAIAEP

SEQ ID NO: 170420 - protein, 1008 aa, Oryza sativa
  Clone ID: PAT_MRT4530_68749C.1.pep
MGEGSERPRSSRAARARNPSFEVEVVVEEEEEDEEEAAVAAARRVKREVADDLNGEPAEEEDDDEEEVVVEEDEEVVVASDEEGGDGEADGGGEVAVAFEPRTLEEALVPRVGAVFDSVDEAFSLYKTYAYRTGFHAVRRTCHNYEGLRYRSTFTCTHGGKARADASPSDGSGARYPLRSSKRAANAQEKRARRGAAEKTGCKAMLIIRDRRADDKWKVEFVELEHNHPCTPDMVRFLKAYREMPDSAKKKAKISDEMDDRVEKSLSEIAETRKFPTRPKRSVGGGASVGGFRFSRSDSFVQRFGDDDLIALKKFIEAMQRKKPNFIHYWDLDQETHVKNFFWTDSRSQAQYRYFGDVITLDVMYLQHSRASLPLATILGVNNHGHLVLLGCGLLCSDKKENYVWLLKRWLGCMNGKPPEAITTTYSDAVAEAVAEVLPNARHRFCFWHILKKLQENVGRTNEKEAISLRFKEVVYDTVTLTDFEREWGPMVEQYKLKDNDWFSALYSCRKQWAPGYVNHSFWAGTSAIRKVEKPDPYFDGVVTTKTTLPVFLEQYETTLRGKLEREAYDDLRSYYSRLTSLSGLPFEEQLMELYTVPMFQAFQDEIKQLIHVICKEVDRSGNSITYMASELIQGKKVNYTVVYNSADKDVWCICRSFPSRGILCSHALSVLKQENVLMLPSKYILNRWRKDFRVLHATASSSSISSDRDLSIFNDLYVRGHEYLEDVIDIGAREPELKEFVLTVMKEAKDKLVRPDHIHQADQRVDVNMSVTGQVSADRGVDVNISSNSTSLIQGDRRVDTNVTSNTTAMVHGHGDSMTSNTTAMIRGDRRVEMKIPTPHLIHGDGRIDMNMASPLLMQRDRRVDMNMASPHMIQGDRRVDMNLASPHFIQSDRRVDMNLASSHLIQGDRRVDMNMTSPHLIQGDTRVDMNMVSTAQNGMHSFDLVNVNLESGPLPMAATDFMQMHQHPPVYHPKQLLNMRDQVMDTNKRPNMETNTYFMGGGMHVG

SEQ ID NO: 170421 - protein, 92 aa, Oryza sativa
  Clone ID: PAT_MRT4530_6874C.1.pep
MDRELAAAQATYGAMTVSVDSPHSFIYAFVNCYLDSDIWRGTATHSAAAAAASSSAPSASSANRTTLPYGAVRLRKASANAPPFLMKIWELN

SEQ ID NO: 170422 - protein, 103 aa, Oryza sativa
  unsure (1)..(103): unsure at all Xaa locations
  Clone ID: PAT_MRT4530_68750C.1.pep
DFNNKAXAAXHRGGVRIDGGGGVPAKLRARASPERLFPDDRSCASAVNGRRLGPNTPCLSDRRLRWRRRPPRRRRRSVTLPTAYISSAPAAEYPPNSYTPTTT

SEQ ID NO: 170423 - protein, 37 aa, Oryza sativa
  Clone ID: PAT_MRT4530_68751C.1.pep
RRDTARKLQEPENITGNSIFTTSNVYVHLHIDRLLHS

SEQ ID NO: 170424 - protein, 149 aa, Oryza sativa
  Clone ID: PAT_MRT4530_68752C.1.pep
PSSFSSSRPPRRPRRSPSAAAAVAPRPHRPSRCPRTGTATTPTPTCRPSSPSPAARARRRGAGTRCSALRSAPGTSSARWRRSCCTTASATRGASTSARPAAACSKPSATGASATCSPTRRSARSTLPSSTTCAAPSPSAAASPPSTAT

SEQ ID NO: 170425 - protein, 713 aa, Oryza sativa
  Clone ID: PAT_MRT4530_68753C.1.pep
MASNNGAGTLRSTSINGVKLYSITGNRYVAPWVLSKKKRALRKDAGILTRLTLICSLYFGFFFLVQMTCIYPPQVKVYELKELSMKFERHMISEIVDFQVLGDDYSKLAFLCADRSVCLHAKYGRHYSLRIPRMGRDMAYDCWSCDLLCAASSPDVYRINLEQGRFLASLSSQSPAINVVSRSNIHGLIACGGEDGVVECFDMRRKSSVGRINTAVSPEDFNQEVTSLQFDENQGYLMAVGSSTGKVAIYDLRMSSPLRVKDHMYGSPILSIKWHQTLNSTEPKLITADKHIVRVWDPNTGNNMTSIEPDGGTINDVCVFRNSGLMLLALDNSQIPAHFIPALGPAPKWCSHLDNLTEEMEEKTENIVYEDFKFLTKDEMDRYDLSKYIDQGLVRAHMHGYVMKLQLYKKLLATSAVDPENIQEKVKQKKIEEQRKSRITQVVKIPKVNRQIMDNILKEEEEMDADLENDEKSGIKKKKKKLEMNKALLTDPRFKEMFENKDFEIDEQSREYLALHPQTSLKEPRLIEEHFETVSDDEEQEDASSSDASAESDSDNGMQSSKRIRLYEVKDDRHAEAFLNSTSLANEDALPIGDRVAALERQRNSNALDEVKYGPGGSREISFIARGSRRRNEESDDEEPKDFKRRGVQSLGLKQGKAEYYLFGGSRGRGRGRGGGGGRGRGGGGGGGRGGGGGGGGGRGGRGRGRGRGRGRG

SEQ ID NO: 170426 - protein, 51 aa, Oryza sativa
  Clone ID: PAT_MRT4530_68754C.1.pep
LPVFLKPRKKKNPGLTKLNNLAPNPLFKNWRNIKKAQTNLLSKKFPTLIGK

SEQ ID NO: 170427 - protein, 90 aa, Oryza sativa
  Clone ID: PAT_MRT4530_68755C.1.pep
KKIKKKKKKKKKKKKKKKKKKKKKKKKKKKKKKKKKKKKKKKKKGGPFKRNKGNGPGEGDVKVLGGGTLFLITGPWFKKGGRGKPGGFPN

SEQ ID NO: 170428 - protein, 86 aa, Oryza sativa
  Clone ID: PAT_MRT4530_68756C.1.pep
LHTTTHQNNWRRHAPINMEDPVNWGAPADDMAGGHLDQAQRMVAHHRERVVKIQGATLRVALAGAVVQAEDALRDRGELDQLPLAH

SEQ ID NO: 170429 - protein, 154 aa, Oryza sativa
  Clone ID: PAT_MRT4530_68757C.1.pep
MVKLTMIARVTDGLPLVEGLDDGRDLKDADFYKQQAKLLFKNLSKGQHEASRMSIETGPYIIEGRVCYLTMCDHSYPKKLAFQYLEDLKNEFERVNGNQIETAARPYAFIKFGPYLQVCPCCHCDWDSTDALLGQEQDMVTESNSQASCYGAGT

SEQ ID NO: 170430 - protein, 331 aa, Oryza sativa
  Clone ID: PAT_MRT4530_68758C.1.pep
MQPPPRTRDPAIAIAGDGAARRGPPPMQPPGPPPVRHGPPPVRQQHGYYYEEEQRPLHLHVRTARSSSSALASCLVAAAFLALAVGGAGAALFVLFRPRPPDIAVAAVRLPAFASGPNGTVAFTFEQTAAVRNPNRAPLAHFDSSLRVAYAGGELGSVYIPAGLIDGGRTKDMSASFAVPAFAAATPPSLPQEQMAAAAAASAQQQQPAAAAAVMEVDSLLVVKGRVTVLRVLTHHVEAAKVCRVGVSPVDGKMRDKPSKHLLSQNRFGVHGELKFQHRNRRPDCYSQSPYLVLDPKEHQYYSNHNGNKGILANKGLKTIEGKPCHRRENR

SEQ ID NO: 170431 - protein, 2139 aa, Oryza sativa
  Clone ID: PAT_MRT4530_68759C.1.pep
MEEPDGEARGREDHAAVGRLGGEEGAVGGGGLALLAVPEIGGELGDGGKVCGGQERRLPTEEDGVRDNGGGSAAELVESAVNVSTPFEGRGQIGGEKESSMQEGSMNMAGEKHGSYHVESAEPSNLQTCHAPNGGVSNKTLFAPFSEVFSSDNSHMRYLLDKATEGSICEHGDLADSKDDLGGATDVKTNTEDLQMVCTKPHCDSEGLSDLHNDSERWPQVVDGVGFTIKGNNELKQVDLIPKIEAEVSRSVEDDSIPSFSGGIDDSLRKAGCACETLNDMGMSHMANGDLWCNVLYAPLSEGCQSKDARHIAVMGNKVTQGSQCGQGDLACDGIVLRGGVDVEKSLDDLQMCSKEPQCDNKGFPYLTEFGVQQPSYGMNVICSKTDPNHQLEKDELLTNTRGEFSSSIHEDSVPSISVSSVDFTFDGNAGQIGKTSEHRAIMEKVSHGSQRGGVLSCESRSLKESHADENQSSTLEVKTCEEGLQTGQVEPCHSIVALSDSGKYGTDILPRGGDGLRSMTGANHELVKDDFHPKSDVVVSCPVDEASIPSNYNSPIDVLLYKEDGLVGEISENRIGVEKLAHDLLGEVMLSFDSRPQTEASGDENQHFWMDVPKGSTASVCEVENTGTRRSCDPCAEIEFPLQQSREKHVISESPPERDLTSSSHNLPCENEPCYSGRETPAFCLGHQDSAGLGLESSDCLVQELNTCTSTDDKACSVDFVENGNGSHNQKEVPVIFFRRRNPVRAASSRNSNFEKCDQINKSGNSTRKSKKVDSVSSLLKSTMIKFPNKTTKGRSGINRPLNSSAWGSLQKLMDGFNQNCGPSTSRSHQTCLGKEISNRGSSEKKQLSIRKIRTSRCSKYKNTSLSDIGYLAGELNGQPTCSVRIDTNVSSDALFNSPNGAHKAAQCVEGNHTLKLTSSLTDTQQFGLENVTQETCPGYIHGECGTSTSERSLNNIVGFSPDSVLDIASVTCESNTSATLDVIVHENPSCPGGLIGGGLRASALSTSHCENHHASSLMDLEQQVKTVRENDMGEEDVIPSHAMMYNDIGEGKQTLAKSNTMRKGRNVGKQECRKKDGKKGKNINKNRSSTKISSSEASKLVSFSNDSPSLDPSELLLHTRPPKFGSCSKVVTSAIHDVGMHGYDNMRPFGIDNDDEGSAFDNVKSLRRKKKDSHGGKKGKVRDPHGKGRSKKKNIADNTYGDLIPAAELVFKNSSAVSVELPAVVACKTDGASVPPAPAWVCCDDCEKWRCIPTELADKISKENLRWTCKENEDKTFANCSIPQEKTDDEINAELGLSDASADEANGDGSNSKASGEPNFALLRSNLFLHRNRRTQSIDEFQRRTYAKLGKFHTGKKGYGLQLKEDVSEGRFLIEYVGEGNMLCLNVDYVGFTFVVLDITAYESRQRYYASKGQKHFYFMALNGGEVIDACTKGNLGRFINHSCSPNCRTEKLYSYFESIKLLFPCEQWMVNGEVCIGIFAMRNIKKGEELTFDYNYVRVSGAAPQKCFCGTAKCRGYIGGDISGADMITQDDAEAGTFEPMAVQEDAEEVLGANGLSSHGTHLDIVDHEASTKTEDSNDCPSVNPPELESEQQTSGTLFDTSEPENSLEALSPQDDEDVVRTPVHVSRTVESTSRQFPEYGTRSSEILQRAPCTLDGPKVPSTTNGIPPSSDLGSHWVPGFHANKKTNVKHHLILNPSSAPIDSEHILGGLHMTVNDRYLTCTVEGRLNSLLDVNGGISKRKDATNGYLKLLLVTAAEGDNAGGTSKSVRDLSLILDALLKTRSNSVLLDIINKNGLQMLHNILKQNKSDFHRIPIIRKLVKVLEFLASKGILTSEHINGGPRCAGTESFRESMLGLLRHNDMQVQQIARNFRDRWIQWAPRNISRNEPTEYSRASISAHDIHVISTAGGSFPTSANTMDWKSIRRKRKSRWDYQPDDHYKMGGLKIQKVCPVQSEFRTGSVGNKLHGNWGTNSSHNDVPVVGSSADGADDEAPPGFESQQESRPGQACLESGVSPGLYLESILEPQKLKEGHVAKTGKSHLVCLSSPFHHCRPIQEGVLVLPLRCLSMNTTVWDIVAGLQIETGEYIGIGEMGREQNFHTIIKDGDFLTIIKDFESCLLPPTSQEQGDPGPRGRE

SEQ ID NO: 170432 - protein, 971 aa, Oryza sativa
  unsure (1)..(971): unsure at all Xaa locations
  Clone ID: PAT_MRT4530_6875C.1.pep
MVPQMVPEHLVRNTQPNLHNYQGGNLSYQYQPPSPQAQYRPGGLAQPQFASQFGQFEPMQQQPQGAAQQRPWADVIADVMREQFGLKPKETRSLYRQPYPEWFERVPLPNRFKVPDFSKFSGQEGVSTYEHISRFLAQCGEASAVDALRVRLFRLFLSGSAFTWFSSLPYGSINSWANLEKQFHSYFYSGVHEMKLSDLTVIKQRHDETVHEYIQRFREMRNKYFSLSLTDAQLADLAFQGMIPPIREKFSSEDFDSLSHLIQKVTLHEHRSAEVRKSSKKVNHVCPYMYWSDDEEDDSEIAAAEWVRSKKVIPCQWGKSHGKEEKYDFDITKADKIFDLLLREKQIQLPAGHTIPSAEELGKRRYCKWHNSGSHSTNDCKVFRQQIQVAIEGGKIRFDDSKKPMKVDGNPFPVNMVHTAGQAANRAHAKGFRVNSAKIINKYQRKYDKQQERHYEEYDDGFDPHRGCEFFRFCWNERMRLPSIENCPGCSDIIEGSSRSYNRDNRLKQARLPVHQRLADEVKRLGKGKSVIAAPINMVFTLPAEFGIDQADVDEVEEESAKLVLLPEQAVFEKPEGTENRHLKPLYINGYVNGKPMSKMMVDGGAAVNLMPYATFRKLGRNAEDLIKTNMVLKDFGGNPSETKGVLNVELTVGSKTIPTTFFXVIGGKGSYSLLLGRDXIHANCCIPSTELQEXDRLGFLVHERGIEVTQRSVNAIKKIQPPENKTELQEMIGKINFVRRFISNLSRRLEPFTPLLKLKANQQFTWGAEQQKALDNIKEYLSSPPVLIPPQKGIPFRLYLSAGEKSIGSVLIQELEGKERVVFYLSRRLLDAETRYSPVEKLCLCLYFSCTRLRHYLLSNKCTVICKADVVKYMLSAPILKGRVGKWIFSLTEFDLRYESPKAIKGQAIADFIVEHRDEYYNLMADEREDLVQSRLRALAKVTKDKERVARHCNKKVVSKDFWRENLYGS

SEQ ID NO: 170433 - protein, 168 aa, Oryza sativa
  unsure (1)..(168): unsure at all Xaa locations
  Clone ID: PAT_MRT4530_68760C.1.pep
PQPPRRPLSGMVAGFLCSSPCLLVLLRWRFRSSYFPCYGCGCVDLVKEFWRKSSVVRLMIQFTCRCFNLHIREAPSGFMHRHYLLQLALFQALPDSSSKKLPSTLQAAQREGLDCFLIFSLGPFLQNDLKCNXTFLQGFMCKTGCTPVMCACCTGKLMFFYDILIIKP

SEQ ID NO: 170434 - protein, 183 aa, Oryza sativa
  Clone ID: PAT_MRT4530_68761C.1.pep
MRMQDELARTKTRWPTPAQLEMIERMKEEEEDDEIVASDNRTPSVVETKVQVPEIVEQNVVERDERLRTSDDNDDYEDEPIVRRDGHGGGGGGRRAYGDIGGYHGSKGRWPREPEVEKLEREKEMLKYGIMSKPTTTRKVKIVHRMIRPPNQYGAAGSAPPPTAGGGHQPATSSYLRPIYYHY

SEQ ID NO: 170435 - protein, 123 aa, Oryza sativa
  Clone ID: PAT_MRT4530_68762C.1.pep
PAWVCCDDCEKWRCIPTELADKISKENLRWTCKENEDKTFANCSIPQEKTDDEINAELGLSDASADEANGDGSNSKASGEPNFALLRSNLFLHRNRRTQSIDEVWVDLLTFYFLIDILLFSVC

SEQ ID NO: 170436 - protein, 144 aa, Oryza sativa
  Clone ID: PAT_MRT4530_68763C.1.pep
VHCEFRTGSVGNKLHGNWGTNSSHNDVPVVGSSADGADDEAPPGFESQQESRPGQACLESGVSPGLYLERYQHNLTISYGIPIAFVEHFGTPEVEGGPCRKNWKVAPGVPFQPFPPLPPYPRGSPCPSTQMFQHEHNSLGHCGR

SEQ ID NO: 170437 - protein, 117 aa, Oryza sativa
  Clone ID: PAT_MRT4530_68764C.1.pep
YLCSLLKPFLLYVFTFSDKVFGPATTTRHVYDIAAQHVVSGAMEGINGTVFAYGVTSSGKTHTMHGEQKSPGIIPLAVKDVFSIIQDVICSFLCSPQTPGREFLLRVSYLEIYNEVL

SEQ ID NO: 170438 - protein, 119 aa, Oryza sativa
  unsure (1)..(119): unsure at all Xaa locations
  Clone ID: PAT_MRT4530_68765C.1.pep
AVPANKRTQASYNGPMPXAKAGRITNAYVSSFPFIRSPSHSPQYASPAAYPSPPTTVYSNRSPPYPYSPEIIPGSYQGSPIGYPAYNGYCNGPVPAPAPPVYHPHHHQHHQFHHQQHYY

SEQ ID NO: 170439 - protein, 182 aa, Oryza sativa
  Clone ID: PAT_MRT4530_68766C.1.pep
MGSRDGWRLLILLLGFLLVAPTCRAREAQPLPVLEEEEVVADAAGGRGGAGAAAGGGNRRAPVRHELSLDFYAKTCPAVDQIVGNVTAPRFRDNPAAGPAVLRLFYHDCFVEGCDASILIAPTANNGGGAPRVERDMEENRNLPQEAFDTVEMANAAVEKACPGVVTCADVLALAARDFVHL

SEQ ID NO: 170440 - protein, 78 aa, Oryza sativa
  Clone ID: PAT_MRT4530_68767C.1.pep
MANVARQDRWKNEPTDVQPPFLLLLLLLLLLTMMMKTKGIASGGLDLIQGVEIGELELLIGKIMEFSAGLRQSRTGVG

SEQ ID NO: 170441 - protein, 63 aa, Oryza sativa
  Clone ID: PAT_MRT4530_68768C.1.pep
MMPADIPNHIDSFLTTQVIHLPHRLILVTIPTPQQLFTKHKQTNLRNGNHLTSAHYRGHAVRT

SEQ ID NO: 170442 - protein, 35 aa, Oryza sativa
  Clone ID: PAT_MRT4530_68769C.1.pep
MAHSPSEVLKVAYETCKYWVAALSPSKSRSKSANG

SEQ ID NO: 170443 - protein, 253 aa, Oryza sativa
  Clone ID: PAT_MRT4530_6876C.1.pep
MAVLTRTTLIAFFWLGDSKWTLIDSKLEYPVTCVVHCRDSFVAIGSLGEISMFSGNNTDGVALLTASPSLLMPPPAHICQRSYLDMNNKMHLVSTILRVSSLKEISIFSGSNSDGVAPLTASPLLLVLPFAHIYQHSYLDMNGERYLFNGCHFACDQLDKNSWCSKVEDVEDTSFFVSNISISNWNRVYLYEPMLCHQDQEDTNDRHLQMVDITDIRFASLQPHHSCPCISPDTNVTFYPAMTRGGPRIGPQF

SEQ ID NO: 170444 - protein, 203 aa, Oryza sativa
  Clone ID: PAT_MRT4530_68770C.1.pep
MGEFFTRERVWVLEWGHLISMGVGMGVTTDGEKGSVWLARRSWVAASNQGSCWEVGSIRQEPRHVAVTSGAHTSQILSGDVALSVLARLEFLMASAWGRSSPAPFSTFSPLANLKLLFLIDNSMYGAVPPSMGELVRPRTAGLILGGRCGALGGVPCPRGSLAVAAVGGSSPFAFHPSPFNRVLKKIRKRGGERRKKELADDM

SEQ ID NO: 170445 - protein, 599 aa, Oryza sativa
  unsure (1)..(599): unsure at all Xaa locations
  Clone ID: PAT_MRT4530_68771C.1.pep
MASPSPAARPQRTPDEVEDIITRKILLVSLTPPSTPNPAVAYLELTAAELLSESRPLLALRDASERLLIDRLSLPDQPAGSPSPFAYLVSSFRRAADEARKISTIRDAALRARLAASIAHLRGLILSYARIVAGNPDTFPSPHNAPHPAAELLVFHLAEAADPLDPTPAPGAPPPPGFLDEFFANADYETVEPAMGELYGRLRQSVEKVSALGDFQKPLRVLRRLVGIPNCAKALVNHPRWIPKNQIMLIGEGRIMEISSVLGAFFHVSAIPDREFASKPDIGQHCFSEASSRRPADLMSSFTTIKSVMNNLYDGLKDVLLALLKNMDTREKVLEFIAEVINKNAGRSRMQVDPLKSASSGMFVNLSAVMLRLCEPFLDRMESKKDKIDVNYLFCNDRIDFKNLTAINASSEEVSSWIENRGYEHAEDSASGEARFVESQEATSSGNNSTVSLSSKGGSLVNCSKKENFSFICECFFMTARVLNLGLMKALSDFKHIAQDGKEGQNXASDVLFQKMKMNRWDSGINRFPFLAVCVHRRFRFSIHAEEAKRRRGWEALAALGCDVTGRTGRGDSAVGQRVHLRHWGRRRREAMRWVVKAG

SEQ ID NO: 170446 - protein, 296 aa, Oryza sativa
  Clone ID: PAT_MRT4530_68772C.1.pep
MSYTTRTCGPLQALRRHTQRHGCSSLGFSDKETYKLNKIITNPSYLRNIYVSERYRTIICLIPKATSMNWVRTLMILEGAINSTNGLAPQEIVHAAKKHLRVLGQYKPDKRLGILRNYSSAIFVRNPYSRLLSAFRDRLEKYPNRNLSHRKWFNKNIYLKFGNHSPAEMPDRSMPSEKYNVTFKEFVDFYLSVKKTQDVHWREQYKVCPPCFDYDYIGNVETYADDFKQTVQIFDATSKVPLVKAPHATNSSEDGVLRRYYETLSDLQMKKLEKLLSSDMKLFGYSIPRAIQRNSF

SEQ ID NO: 170447 - protein, 91 aa, Oryza sativa
  unsure (1)..(91): unsure at all Xaa locations
  Clone ID: PAT_MRT4530_68773C.1.pep
AANAAWHMGEWAHRAEXVSRLDDGDENKLRIXYEEARVYVERARRCLATELAALVLESYERAYNNMVRVQQLSELEEVIDYCTLPMESTNS

SEQ ID NO: 170448 - protein, 88 aa, Oryza sativa
  unsure (1)..(88): unsure at all Xaa locations
  Clone ID: PAT_MRT4530_68774C.1.pep
MWGVTVLSRSLFVFSVLYAVVGAVEIPRTEVLKRLWAYNKQNNRKEPAGKRATEREDKGKARXAGQERKGGLEGAKGKDPHPERGLPG

SEQ ID NO: 170449 - protein, 303 aa, Oryza sativa
  Clone ID: PAT_MRT4530_68775C.1.pep
MDHEFHDYFKDASLMEQRPIDTSSVTCETISCTDLDNEKVVIRPSQAESTKGKSVIIGDPRLDTIRINNAKAEDRKVTKDELSSSIKTKKPKLTFEMPMAKYKKGLASQRFHNRTNDSKRPRSSCRKRFGQTPNQSEPSTIPTPYKPPVAMPWYPYPMSPFGYPFMYYMPWMPQFSTPFHQGWKESTRSVPNHSSNSRQHCFLLKNRSGGSKVKKVKKVWVRKEAKAPEVVAIKEDSQDVHVPIMQAKEIEADTVIVKSGGLTEAFGSLDEIGRITDQGWSDRHCMAGITGGDRWSDRLYMAV

SEQ ID NO: 170450 - protein, 82 aa, Oryza sativa
  Clone ID: PAT_MRT4530_68776C.1.pep
DPSQRALPCRSPLVNQFGAGFSLPRPPPIFCFCSCETSKPILGPLLFRWGCNVSYPVNCPFFFFQKKKPLKKKIKKKKTPII

SEQ ID NO: 170451 - protein, 634 aa, Oryza sativa
  Clone ID: PAT_MRT4530_68777C.1.pep
MKGGGGGLWRPRVESRGTFRRRLLTVTAGCFLFFIVFLLSSRHDAIVLLDTRLGVGRPTAASLRSPAAADTLPDAGSAGRRNHEAPSSPAFSSGVRETVTGVETNDDGAERGAEPGGARQRRAGRRGSHLRRRSRSTTRFVFHNRAPTLSTVVDKCTDSKFDLQFCKPWMRRTYRYSSRGCGAGPRQILADRRRHRNVSSTARTTSIDHATACNSGSSPGETTTRADSVDQPRHPLCDLSDHRTDVCDLAGDIRMDANASAFVVVVDPAVGADGPTYKVRPYPRKGDATSMGRVTEITVRTTAAGAPPPRCTTTHAAPAVVFSISGYTGNLFHDFTDVIVPLYNTAARYCGDVQLVVTDGNAATRRWLARYGAVLRGLSRHVPLDLAAEAAAGGGEVHCFGHTVVGLRAHGELIIDRERSPDGLGMPDFTRFLRRALSLPRDAPTRPGGGHGDATKPQPRPRLLIISRRGTRLLLNTDAVARAAEQVGFEAVASELDMAGADHDDVARVARLVNSFDAVVGVHGAGLTNMVFLPPGAAAVQIVPWGGLRWLARADFGEPAVAMGLRYIQYEVAAGESTLKDKYPRDHEIFTNPTALHKKGFTFMRHTFLNGQDIIVDIDRFKPVLLRALNSLAR

SEQ ID NO: 170452 - protein, 61 aa, Oryza sativa
  Clone ID: PAT_MRT4530_68778C.1.pep
LNTKYRQYNKDRNNLIFIIFLFYFLLFFFFFFFSHKKLFSIRHTCDIHLNKSTYITTPTAK

SEQ ID NO: 170453 - protein, 36 aa, Oryza sativa
  Clone ID: PAT_MRT4530_68779C.1.pep
LYGIEVQNNSLHSKVDLTKEFTYNKAFGRTHYTLIP

SEQ ID NO: 170454 - protein, 97 aa, Oryza sativa
  Clone ID: PAT_MRT4530_6877C.1.pep
GFGVGTTTIAFPLARRSSMMQSSATGTQAAVQGPSAVASAVPMTPVTAAPTTVPSTTTARAGTDSAIAVASAGSTTVSTVAVAPSLPVAPTATLPWI

SEQ ID NO: 170455 - protein, 99 aa, Oryza sativa
  Clone ID: PAT_MRT4530_68780C.1.pep
MRREKGIQVYRNGRGTCDATRYDLGEGGEQGAGRKRRGAEVTFAELEERTGGGGEETDLAGGYNLSVVPELKMGWMDGGGEGGGSDRSQLVVTGELKSA

SEQ ID NO: 170456 - protein, 79 aa, Oryza sativa
  Clone ID: PAT_MRT4530_68781C.1.pep
MAMEFQDMGFNADAVGGNEGMGVRDGKGYAFVHIATGFSHCPHPLYLKQMQQCRRGHHQKQKQKALECKKLQKPKDETL

SEQ ID NO: 170457 - protein, 190 aa, Oryza sativa
  unsure (1)..(190): unsure at all Xaa locations
  Clone ID: PAT_MRT4530_68782C.1.pep
YAAPLRDLSGRAVRERDVTRSPAPPPLSPPDAGRRPPCPPRLTXSPPSPPDAASPSMSCHHRRSSSSPRRRRSSSRPRRPTPPPPRSTVAPPLLLPVXRRPFSSWQGSNIPAKRRACPPRRADEPPPPLLLAEPPRVCLPAARPPCRPAARPPRXASASPPHVLLAARPRRPAARPPRRTAAAAPLCHGH

SEQ ID NO: 170458 - protein, 417 aa, Oryza sativa
  Clone ID: PAT_MRT4530_68783C.1.pep
MGSRGDHGGGGGGRGAARATQLKVLVPSSFRKMRICDELAAQLGVGVGGGGAPRAATARVASPLGKAWDVGVVRDGDGRAFLGRGWAEFAAAHGLGVGWFVVLRHGGGVLAVEAFDTTCCLRVFGAPPAEAGRATDTSRKPQFLTVLLPGIMDKMRIPDKFVRDYITGENLNSNMAIILSPLGKSWRVELDKDQSGVFLGGGWLQFLSFHGISRGDVVIFSVFGPNGRQKDFKAKGISIYQGTGEQQEAPSFSRRKCNNKKKSRFGEDDGNQQEMPCSRKGSGNKGRTSDRETKRMRKTRSVYEIGPRSWIKKEINEYVLERCILSLARTFCESIGLVEESSITLMMIDTTSTQGDQGGSSSSSRSWEVTGRRYKDACYLLGAGWRRFCEDNGVRSGDVCVFTVLDTTLWRVDIERC

SEQ ID NO: 170459 - protein, 388 aa, Oryza sativa
  unsure (1)..(388): unsure at all Xaa locations
  Clone ID: PAT_MRT4530_68784C.1.pep
IFQETCAWRNNWPKTCEDAPPSNSNLTGDQLLGDLLSAAFSWQSCRSRYXSPAHKPSPYLVAKLRSHEALQVRCGPGTAPYEKALRQPKSGDGAIAADGDDDDCRYVVSIVYDRGLGNRVIPIISAFLYAVLTERALLVAPYNGDVDALFCEPFPGTTWIHPGGRRFPLRRLRDLDGKSRESLGTLLKSNAVSVDAGGNVSSSWSGLVSAQRLLRGTPWLLMKTDSYLVPGLFLVPSLRGELERMFPEKDAVFHHLSRYLLHPANAVWHAITAYHRDHLAGAGHLVGIQIRVYHEETPPVSQVVLDQVLSCARREKLIPFPTAGTTTNTSSSDQAVLVTSLNSWYSDRIRDELGGGGGVHQPSHEGWQRMGDTAHDMRALSEMYLLST

SEQ ID NO: 170460 - protein, 659 aa, Oryza sativa
  Clone ID: PAT_MRT4530_68785C.1.pep
MGSAGGGGWDDDDDGDEQCATPPPPRSFSPMMMTEAGMKLVTPPWRRWRRWRGGCAESGRAVRAACVAAAVVLAVVVLSYYARWGGDQDEMPTSLFTTRVQGGESVGLRGKTVGDDDPTVDSGYGLAGHLAAIDLRRRKAGIEGRERRPAVGERGLAGSEGATSANLTDDQLLGGLLTAAFSPQSCRSRYEFAGYHKRKPPHKPSPYLVAKLRSHEALQKRCGPGTAPYDKALRQLKSGDGAAAADGDDDCRYLVSISYNRGLGNRIIAIVSAFLYAVLTERALLVAPYNGDVAALFCEPFPGTTWLLPDGGRRFPLLHLRDLDGKSKESLGALLKSNGIVSVAAGVNGSTSSSWSGRPPPPYVYLHLDGGADYHDKLFYCDEQQRLLRGVPWLLMKTDSYLVPGLFLVPSLRGELERMFPEKDAVFHHLSRYLLHPANAVWHAITAYHRDHLAGAGHLVGIQIRVYHEETPPVSQVVLDQVLSCARRENLLPAAGNTSSSDQAVLVTSLSSWYYEKIRDELGGGGGGVHQPSHEGLQRMGDTAHDMRALSEMYLLSTCDALLTTGFSTFGYVAQGLAGLRPWIMPRRPWWEKEAATAVPDPPCARVATPEPCFHSPSYYECAARRNYDDIGKVVPYVRRCEDVSWGIQLVNGSSQSQW

SEQ ID NO: 170461 - protein, 392 aa, Oryza sativa
  Clone ID: PAT_MRT4530_68786C.1.pep
MEASLDQLPDQLSRGLEDAPPSNSNLTGDQLLGDLLSAAFSWQSCRSRHEALQVRCGPGTAPYEKALRQPKSGDGAIAADGDDDDCRYVVSIVYDRGLGNRVIPIISAFLYAVLTERALLVAPYNGDVDALFCEPFPGTTWIHPGGRRFPLRRLRDLDGKSRESLGTLLKSNAVSVDAGGNGTSSWSGRPPPYVYLHLDGGADYHDKLFYCDEQQRLLRGTPWLLMKTDSYLVPGLFLVPSLRGELERMFPEKDAVFHHLSRYLLHPANAVWHAITAYHRDHLAGAGHLVGIQIRVYHEETPPVSQVVLDQVLSCARREKLIPFPTAGTTTNTSSSDQAVLVTSLNSWYSDRIRDELGGGGGVHQPSHEGWQRMGDTAHDMRALSEMYLLST

SEQ ID NO: 170462 - protein, 327 aa, Oryza sativa
  Clone ID: PAT_MRT4530_68787C.1.pep
MATHKLDSAEFRILTDYKLHYYTFYGLRNNGKRLMTFFGACTDAFAGLTRLYLQNLRLAETDIPNIIATCKRLESLRMFMCQTEGTVLQLQVEHQRLVELDICHGCLKLVKLNSLPKLERLVFNSWRHPQEPLYFGNVPQLSSLSLTNVGLRLHNLIRLSQFLSNVTSIRDLHLNLKSERDVITRFFLEAAPFLKELCITIWDHWCNIVTDKVEREEEGYCDKTNVQWESSSPDGFRHCNLVKLTIYGFQPDDNFLGYIRHIMETAVNIEEISLYDRKVEDCCEELDPKIKVAPSKYPQTVEEQELLRKQITEGLVMASPHVINFRS

SEQ ID NO: 170463 - protein, 486 aa, Oryza sativa
  Clone ID: PAT_MRT4530_68788C.1.pep
MISCSTSYKSAPVTVMVVDRFTTLPDDVLLNILDRLNTPDAVRTCLLSKRTLHLPRMLSHFRIALLSFAPDPDYITFKDTIGMNAAVAAATDNVLNFRAKDIPLRQLSICFYLKYYDCLTIGKAVARAMTTHKLDSAEFRILTDYKLHYYTLDGLRNNGKQLMTFFGACTDAFAGLTRLYLQNLRLPETDILNIIATCKRLESLRMFMCQTEGTVLQLQLEHQRLVELDICHGCLKLVKLNSLPKLERLVFYSWKHPQEPLYFGNVPQLSSLSLTNVGLRRHNLIRLSQFLSNVTSIRDLHLNFESERIWVQPERPKLLVPVLQNLQVLNLEDLPEGCDITWTRFFLEAAPFLKELCITVWDHWCNIVTDQVEREEEGYCDKTNVQWESSSSNGFRHYNLVKLTIYGFQPDDNFLGYIRHIMETAVNLEEISLYNRKVEDCCEELDPKIKIAPSRYPQTIEEQELLRKQITEGLVMALPHVIHFRS

SEQ ID NO: 170464 - protein, 82 aa, Oryza sativa
  unsure (1)..(82): unsure at all Xaa locations
  Clone ID: PAT_MRT4530_68789C.1.pep
MDVLPSSTAGDCTMAXAFPCDGGRQAGSQRRRRASDCFLLGWEPPFGCLGILAGIGAAGTNVYGVVHLPQVLKDETWPGSMG

SEQ ID NO: 170465 - protein, 1288 aa, Oryza sativa
  Clone ID: PAT_MRT4530_6878C.1.pep
MVEKPPLSPSSASPGTIKEKIQKLGLTDVNEANVVPIDPEKFTPDQKKDFDAMMQQARDHFLNSFMQTCKGTLVQKYKVKVVADDPETSSSRGADGKQAPDGSAQPSDKSATDGSLGSQGDNSQGVQGVQGGGQLVNPRLLIREQSQHAGQNVDRLTQDQVASTFLPPQNTIDPTQQQPIQQTPPRQQQTPLRQQVIQPIQQQSSLNASAGFATPGGQPVQHAVNQVFPEHLVHHVQPDGAVIPQIVPEHLSQGTPQQQPWADLIADVMKEQFGLRPKDSGNLYRQPYPEWFERVPLPNRFKVPDFSKFSGQDSTLTYEHISRFLAQCGEASAVDALKKVTLHEQKFAEARKNSRKVNHVCPYMYGSNNDDDDSEIATAEWVRSKKVIPYQRGKKPRKEERYEFDITKADKIFDLLLREKQIQLPAGHTIPSAEELGKKRQQIQAAIEDGKIRFDDSKRPMKVDGNHFPVNMVYTASQVANVGRTKGFQKTKPRQEWRVKNQVPVADEAPDDEAKRLAKGKSVVTAPVNMVFTLPAEFGEVGRNAEDLIKTNMVLKDFGGNKTITTTFFVIDGKGSYSFLLGRDWIHANCCIPSTMHQCLIQWQGDKIEIVPADRLVNVASADLALWEMDGLDCLSEKVWDGDFLKVSDSDIQPIEDGEPKLLFLGRRGGFRVRPHQQPPRKCKTDMLEPVKAEIKRLYDVGFIHPCRYAEWVSSIVPVVKKNGKVRLVEVYIDDVVVKSKEIEDHIADLRKVFERTRKYELKMNPTKCVFGVSAGQFLGFLVHERGIEVTQRSVNAIKKIQPPEIKTELQEMIGKINIVRRFISNLSGRLRHYLLANECTVICKADVVKYMLSAPIFKGRVGKWIFSLTEFNLRYESPKAIKGQAIANFIVEHRNDSIGSVEIVPWILFFDGSATNNQAEYEAVLKGLQLLKEVEADAIEIMGDSLLVVIQLAGEYECKNDTLIVYNEKCQELMKEFRLVTLKHVSREQNIEANDLAQGASGYKPMIKDVKVEIAAMTADDWQYDVQRYLQNTSQSASRKLRYKALKYTLLDDELYYRTIDGVLLKCLSADQAKVAIGEKFGAIQRAPASAMNPIIKPWPFRGWGIDMIGMINPPSIKGYKFMLVATDYFTKWVEAIPLNKVDSGDAIQFVQEHIIYRFGIHQTITTDQGSIFVSNEFVQFAKSMDNKSLNSSPYYAQANGQAEASNKSLIKLIKRKISDYPRQWHTRLAKALWSYRMACHGSIQVPPYKLVYGHEAVLPWEVRIGSRRTELQNDLTADEYYKPYGR

SEQ ID NO: 170466 - protein, 93 aa, Oryza sativa
  Clone ID: PAT_MRT4530_68790C.1.pep
HSANTVVMIAVVQCILELLRDSWCHFGAFFLVNHLSWVVDEAVEPFWFLRLVYTFEMFCDNLYISDRFTHLRCSSARGSPVFSPANCLFPRLL

SEQ ID NO: 170467 - protein, 38 aa, Oryza sativa
  Clone ID: PAT_MRT4530_68791C.1.pep
YAGKTARRRGADGVVGRKAMARTRSSVSVPVLFSLAQH

SEQ ID NO: 170468 - protein, 374 aa, Oryza sativa
  Clone ID: PAT_MRT4530_68792C.1.pep
MAAAGADGLPPGLRFDPSDDELVGRYLLRRLQGQPLPLDGVVLDADPLSAQPWRLLADHGRGGDEAFFLAEAHAKNAKGKRQKRTVEGGGFWQGQRMCVDGKKLLVPGGDDGGGGGEVLEIAWRKYVLSFFAEGERGSSGWVMHEYSVTAPADLASSPLRLYRIRFSGYGKKRKREPEDDGRAHGAPRRAEAETALFDLEVGPPPPPLLVPPPAAAAADHGTDQSSSGVTDMVFRDLPDLIADAGAALPDQNQQDWSEVADQSSFCVMGDDSSLLLPDLPGMIDDNEHQQFVRECDMPHLFVPQAEEAIAGGGAASAPSADNQNCEFNDGEDMALSDFEFPESIDEVLSYIDFSTSDTSCRDFTMDELFDLPVD

SEQ ID NO: 170469 - protein, 585 aa, Oryza sativa
  Clone ID: PAT_MRT4530_68793C.1.pep
MEFLSQMWSLLGLLTILQNVLPTQLLSLLHSLWQSLQDSLTPYSYFDVPEFLGSAAVEPNALYRHVQLYLHRSLLLSSPPPPRLTLSLPRSVAVSGGGGGHDAGAAAAAATPSVSLSPNHSVADSFDGHRAVWTHHADTLQDSLEERRSFSLRLPKRHAAAVLPAYLAHLAAAADHLERSSRARRLHTNAASPRGAAAWSSVPFCHPSTFDTLALDPELKARLLADLTAFADGSEFYRRTGRPWKRGRNKRRRLLHATAASDDDSSDSDSDGGDNHRSKVTLSGLLNFTDGLWSCCGEERIIVFTTNHVDGIDPALLRPGRMDVHVRLGACGAHAMRELVGRYVGVEDHEMLDAAECCVRGGAEMTPAEVGEVLLRSRDDPDAAVTELAVELKARQSAAADELQWEDSAAELSDESPRKKGLGWEGKVRSPSKFDLMFKSQDCVLLGIEWAANGPVQPFIQAGPSKPKPLIHGISSMEAMGKYRCGVPCSWSLDLGKATAHGTNAHNLFGEMSSQGEVSQEDLKISKAVPINSPMNKEEKMMDEALDQILEKLEQMKTKRRCNEKIDQILEKLDEIEANRRYSWP

SEQ ID NO: 170470 - protein, 74 aa, Oryza sativa
  Clone ID: PAT_MRT4530_68794C.1.pep
MQAGSEVVDAHERWRKHKSAAAKASRLAETPVGGDEGRPAANEKKSTSASLPGHDAVIGGSRRISLIEDHADTT

SEQ ID NO: 170471 - protein, 61 aa, Oryza sativa
  Clone ID: PAT_MRT4530_68795C.1.pep
MEEALYPVFRLRDVIHTSARDEGEILYHPKYLQKWPLPPKWRVTSFYFHLVRSSRHPTALR

SEQ ID NO: 170472 - protein, 37 aa, Oryza sativa
  Clone ID: PAT_MRT4530_68796C.1.pep
VYISARALHLGGECKRPWMLPCRMLPNLQRKMRIHTK

SEQ ID NO: 170473 - protein, 1424 aa, Oryza sativa
  unsure (1)..(1424): unsure at all Xaa locations
  Clone ID: PAT_MRT4530_68797C.1.pep
MEKVWESGRRMSRSIGRGMGMEAWGVDEAFMPQNSGGGGGSRGRRRSGRGGTADDDEEALRWAAIERLPTYSRMRTAILSSAEEEAXAAAAGAGKQQYKEVDVRRLGVGERQEFIERVFRVAEEDNQRFLQKLRNRIDRVGIELPTVEVRFEELMVQARCHVGSRALPTLLNTARNIAEAALGLVGVRPGRQATLTILRGVSGAVRPSRMTLLLGPPSSGKTTLLLALAGKLDPSLRRGGEVTYNGFELEEFVAQKTAAYISQTDVHVGEMTVKETLDFSARCQGVGTKYDLLTELARREKEAGIRPEPEVDLFMKATSMEGVESSLQTDYTLRILGLDICADTIVGDQMQRGISGGQKKRVTTGEMIVGPTKVLFMDEISTGLDSSTTFQIVKCLQQIVHLGEATILMSLLQPAPETFELFDDIILLSEGQIVYQGPREYVLEFFESCGFRCPERKGTADFLQEVTSKKDQEQYWADKHRPYRYISVSEFAQRFKRFHVGLQLENHLSVPFDKTRSHQAALVFSKQSVSTTELLKASFAKEWLLIKRNSFVYIFKTIQLIIVALVASTVFLRTQMHTRNLDDGFVYIGALLFSLIVNMFNGFAELSLTITRLPVFFKHRDLLFYPAWIFTLPNVILRIPFSIIESIVWVIVTYYTIGFAPEADRFFKQLLLVFLIQQMAGGLFRATAGLCRSMIIAQTGGALALLIFFVLGGFLLPKAFIPKWWIWGYWVSPLMYGYNALAVNEFYSPRWMNKFVLDNNGVPKRLGIALMEGANIFTDKNWFWIGAAGLLGFTMFFNVLFTLSLVYLNPLGKPQAVISEETAKEAEGNGDARHTVRNGSTKSNGGNHKEMREMRLSARLSNSSSNGVSRLMSIGSNEAGPRRGMVLPFTPLSMSFDDVNYYVDMPAEMKQQGVVDDRLQLLRDVTGSFRPAVLTALMGVSGAGKTTLMDVLAGRKTGGYIEGDMRISGYPKNQETFARISGYCEQNDIHSPQVTVRESLIYSAFLRLPEKIGDQEITDDIKIQFVDEVMELVELDNLKDALVGLPGITGLSTEQRKRLTIAVELVANPSIIFMDEPTSGLDARAAAIVMRTVRNTVDTGRTVVCTIHQPSIDIFEAFDELLLLKRGGQVIYSGQLGRNSQKMIEYFEAIPGVPKIKDKYNPATWMLEVSSVAAEVRLNMDFAEYYKTSDLYKGNANSLRMVIGAMYTAVMFIGINNCATVQPIVSIERTVFYRERAAGMYSAMPYAIAQVVMEIPYVFVQTAYYTLIVYAMMSFQWTAAKFFWFFFVSYFSFLYFTYYGMMTVAISPNHEVAAIFAAAFYSLFNLFSGFFIPRPRIPKWWIWYYWLCPLAWTVYGLIVTQYGDLEQIISVPGQSNQTISYYVTHHFGYHRKFMPVVAPVLVLFAVFFAFMYAICIKKLNFQHR

SEQ ID NO: 170474 - protein, 390 aa, Oryza sativa
  unsure (1)..(390): unsure at all Xaa locations
  Clone ID: PAT_MRT4530_68798C.1.pep
TRPALMGVSGAGKTTLMDVLAGRKTGGYIEGDMRISGYPKNQETFARISGYCEQNDIHSPQVTVRESLIYSAFLRLPEKIGDQEITDDIKIQFVDEVMELVELDNLKDALVGLPGITGLSTEQRKRLTIAVELVANPSIIFMDEPTSGLDARAAAIVMRTVRNTVDTGRTVVCTIHQPSIDIFEAFDELLLLKRGGQVIYSGQLGRNSQKMIEYFEAIPGVPXIKDKYNPATWMLEVSSVAAEVRLNMDFAEYYKTSDLYXKNKVLVNQLSQPEPGTSDLHFPTKYSQSTIGQFRACLWKQWLTYWRSPDYNLVRFSFTLFTALLLGTIFWKIGTKMGNANSLRMVIGAMYTAVMFIGINNCATVQPIVSIERTVFYRERAAGMYSAMPY

SEQ ID NO: 170475 - protein, 63 aa, Oryza sativa
  Clone ID: PAT_MRT4530_68799C.1.pep
MRRDRCGGKWLHSTVRESDKALERGGDFDLELVEGDRKGSAYTETEVSHLMLGLKMTATTSSS

SEQ ID NO: 170476 - protein, 360 aa, Oryza sativa
  Clone ID: PAT_MRT4530_6879C.1.pep
MVPGGGVPQGAEGGRAMAAAETAATAAAAGERAPGTEVDAFRRQVEDLVSKTDQLERRVNEVVGFYDGKKHGSGGRKAGRKDSSLSKGMPDLMRQFGTIVRQITSHEWAEPFLKPVDVVGLQLDDYYKIITKPMDFSTIQKKMEGKDDNKYNNVREIYSDVRLIFANAMKYNDERHDVHIMAKSLLEKFEEKWLQLLPKVENEERKQKDEESNGVPKVNISPEEAIAKLAKDTDNELIEINKQLEELRQMVVQKCRKMTTYEKRKLGAGLCHLSPEELTKALEMVAQDNPSFEAKGDELELDMDAQSETTLWRLKFFVREALERQANVASGRTDENAKRKREICNALARTASKRVKQQPN

SEQ ID NO: 170477 - protein, 820 aa, Oryza sativa
  Clone ID: PAT_MRT4530_687C.1.pep
MAGGSSPAIRPIGKSAVHRICSGQVIFDLSSAVKELVENSLDAGATTVELLTAMCASQALALKHHTSKISDFGDLASVATFGFRGEALSSLCALGKLTVETRTKDEPVGTRLEFAHSGVVTGERKMARPVGTAVTVEKLFSTLPVRSKEFSRNIRKEYGKVISLLNAYALIAKGVRLVCTNTVGKNSKSAVLRTQGSSSLKDNIITVFGLNTFKCLQPFNVTISEGCQVDGFLSKPGPGSGRNSGDRQFFYVNGRPVDMPKVSKLVNELYRSSNAKQYPVAVLNFCIPTTSYDVNVAPDKRKIFFSSEHAILLSLREGIENLYCPQQCSFSINSVEDPGKEMDPAIDGSDEDMCLTEKENVSAPENDDDMDETDSDDEVTPENQKVPSSVTTRVATGSTPKDVSPLSRGPPAQLDRSTLLSAYRYEQREKTPTRVKSYPAQANHVRTGLAAKSSPSSAVQPSIMKFLSQNKRKHEDSCNLISEAPVLRRGTCLEQVRRTDLGVNSPTALTSRVSNIPEVNAPQGTNPLRHHSLQSFVPEMPEDSPQHSEPPNIVSHRDEVPQLRPCDVHATESEVVRCYKAATLDNYVPDNEEGKSNSLAAATSELDKLFSKDDFGEMEVVGQFNLGFIIGKLDQDLFIVDQHAADEKYNFENLSQSTTLNIQPLLQPLRLDLSPEEEVIVSMNMSTIRKNGFVLAEDLHASPCNRYFIKAVPFSKNITFGAQDVKELISMLADSQGDCSIISSYKLDRTDSICPSRVRAMLASRACRMSTMIGDPLTKTEMKKILKNLTGLRSPWNCPHGRPTMRHLADLHAIKTEEKE

SEQ ID NO: 170478 - protein, 76 aa, Oryza sativa
  Clone ID: PAT_MRT4530_68800C.1.pep
TAASYPLVGSPLPPTLTPGCHRLPSRWIWWRGGSFHRAADAFADPARRPPPLSAASQKRGGETRLEGVLVPNSAAR

SEQ ID NO: 170479 - protein, 111 aa, Oryza sativa
  Clone ID: PAT_MRT4530_68801C.1.pep
LLLDGAVSDLDSHDIAETTTRAGLGQEILTGLQLTQLETTTAVTSKETEGEDTDVPYTSAPRRSCTTTITPNRASLGEIFPGTRPITALPSQHSSEPALHHWHLLWQSICP

SEQ ID NO: 170480 - protein, 131 aa, Oryza sativa
  Clone ID: PAT_MRT4530_68802C.1.pep
TRRPGGGLKPPPKRGGEPPPPDWPKKPPLSHPTRGGSFSPPPTGPFKRTTPPPPSFFLGAPPPPNAGSGEGGGGTPPNQGKRAPAGKKNGWGGPPAGGPPLLGGLGAPLPLKDGAENKGLPGPPAGGPGGV

SEQ ID NO: 170481 - protein, 69 aa, Oryza sativa
  Clone ID: PAT_MRT4530_68803C.1.pep
MAQGRLAGDGEEEDDEDDVVDSTGSRRTARTPGALAPLEVSVASVSSSPINCQASTRLEEPSQWPLGPP

SEQ ID NO: 170482 - protein, 118 aa, Oryza sativa
  unsure (1)..(118): unsure at all Xaa locations
  Clone ID: PAT_MRT4530_68804C.1.pep
WVNSPTLGSVWFPMIERADIXGSKSNVGMXAGLPQASYPCGNLCDSSRXIKTGLTARXPTLSRFVFVLSISIXELVAVLFHARFVFSSSSXLGRVRCLFPDGSPQAGSPPSNVAARIV

SEQ ID NO: 170483 - protein, 218 aa, Oryza sativa
  Clone ID: PAT_MRT4530_68805C.1.pep
MAAASATQATAAEAAAPCSTTKTESTSSSSFLRARCATTRYPDVCYDSLLPYASTFQTSHVKLAVAAADVAAAHLRAFSARVKDMLLHRGGGSEEAAASSGGGAARVDAVLHDCASTISAAANLAKRSSAELTRLDADTAASTETSTSGGSRQARWQLSNAKTWLSAAMTNEGTCSDGFEDAGAAATASPAGKEVAAGVASVTQHTSNALALVNGIPL

SEQ ID NO: 170484 - protein, 106 aa, Oryza sativa
  unsure (1)..(106): unsure at all Xaa locations
  Clone ID: PAT_MRT4530_68806C.1.pep
XFXXFCFXXFXFFXXXXXFPPLLFXXCLANKPQGKPNPRNNGIIIYPFNXFSNLEGFNRMTDFMIPPXXGXAXWAGWHPPFQTSLXRKDRXXXRVRPAEQYFRXLW

SEQ ID NO: 170485 - protein, 441 aa, Oryza sativa
  unsure (1)..(441): unsure at all Xaa locations
  Clone ID: PAT_MRT4530_68807C.1.pep
SEDEVYCTWALSTTTRAISSKKLWRIQKQLIRCCATETTKLLMEDLGDEFFXILADESSDVYQNEQLALCLRYVDKKGRVVERFLGIVHVENTTALILRDAIKNLLMQQSLSLSKVRGQGYDGASNMKGEVNGLKKLIMNESPSAYYVHCFAHQLQLTLVAVARENVAQAQEIVEALELGEIESGQGLNQEMGLGRPGDTRWGSHYKTVQHILIMYRSIRKVLLQVGKDRSQSTEAIKAQTALQSFVSFEIVFMAHLLNTILGYTDDLNTALQRRAQDIVNAVELIVLTKMQLEMLRQDDGQLRELNDRFDEVNTDLLVCVASFNPTNSFGSFDKEMLVKLAQFYPNDFSANDIMHLPIQLDRFIIDMRRDERFREVNTIAELSVKLVDTNKHINYTLVYKLLKLVLVLPVATASVENVFSTMNYVKNKQRNRIGDEYLND

SEQ ID NO: 170486 - protein, 493 aa, Oryza sativa
  Clone ID: PAT_MRT4530_68808C.1.pep
MAAATADGHGGRRRLRVFFLPFFARGHLIPMTDLACLMAAASTDAVEVEATMAVTPANAAAIAATVAGNAAVRVVCYPFPDVGLARGVECLGAAAAHDTWRVYRAVDLSRPAHESLLRHHRPDAIVADVPFWWATGVAAELGVPRLTFNPVGVFPQLAMNNLVAVRPDIVRGGADGPPVTVPGMPGGREITIPVSELPDFLVQDDHLSMSWDRIKASQLAGFGVVVNTFAALEAPYCDEFSRVDARRAYFVGPVSQPSRAAAAAVRRGGDGDVDCLRWLSTKPSQSVVYVCFGSWAHFSVTQTRELALGLEASNQPFLWVIRSDSGDGGGERWEPEGWERRMEGRGMVVRGWAPQLAVLAHPSVGAFVTHCGWNSVLEAAAAGVPALTWPLVFEQFINERLVTEVAAFGARVWEDGGGKRGVRAREAETVPAGVIARAVAGFMAGGGGRRERAAAMATALAESARVAVGENGSSWRDIRRLIQDLTDATASQP

SEQ ID NO: 170487 - protein, 685 aa, Oryza sativa
  Clone ID: PAT_MRT4530_68809C.1.pep
MAEEAPPPPPPPKLLYIAVSDAAARRAFRYTRPVLQGTLQLMGCKARHAFKISKRVFNVMRSEFLDASKSDTADNEENAPSLVKDVEMLKPKILEATLSSIPFELYKTQTTIVVSREKFLSVVCDALSSYKYVGPNQKADFLLACRIKERKESVTVLLCGTSGCGKSTLSSLLGSRLGITTVVSTDSIRHMMRGFTDEKQNPLLYASTYHAGECLDPVAVAQAKAKRKAQKLDIVSHPNTNEGRDDTSDDKAHHGSSELPPRTELIGSKQMAIEGFKAQSEMVIDSLDRLITSWEEQKQSVIVEGVHLSLNFVMGLMKKHPSIIPFMVYIANEEKHMERFAVRAKYMTLDPAKNRYIKYIRNIRAIQDYLCNRADKHLVPKINNTNVDQSVAAIHATVFSCLRRREAGEQLYDLNTNTVAVVNEEYRNQRAANSLGSKGMFQLIQRQGSSRNLMAILNTDGSVTKAWHVDKNNGNGSLDGTSSDKSTKNPMYDTFGKAEPVNLQFGSFGISAWMSDTGGTSHTGSVDDLRADGIETGGRYYSSCCSSPKVSDCPSKELMEDDYSVFGSEEDADDPPDAGTDEDLTDEERDMHEIEAGSVDEHSTKSDEEYDDLAMQDVMENGYWSDDEQAASSTKNSSNQEKNIHGAADGDVVDDEGSGNDRFHHNLAFFLKMSKKVAATELPCA

SEQ ID NO: 170488 - protein, 497 aa, Oryza sativa
  unsure (1)..(497): unsure at all Xaa locations
  Clone ID: PAT_MRT4530_6880C.1.pep
MPGLSRSIVEHRLPIKPGVRPHQQPPRRCKADMLEPVKAEIMRLYDAGFICPCRYAEWVSSIVPVIKKNGKVSVSAGQFLGFLVHERGIEITQRSIKAIKKIKPPENKTELLRHYLLSNECTVICKADAVKYMLSAPILKGRVGKWIFSLPEFDLRYEPPKAIKGQAIADFIVEHRDDSIGSVEMVPWTLFFDGSCQELMKEFRLVTXSMCLENKILKLXDLAQGASGYKPMVKDVKVEVAAITGDDWRYGVYRYLQDPSQSASRKLRYKALKYTLLDDDLYYRTIDGVLVKCLSADQAKVAIGEVHEGICGTHQSAHKVKWLLRRAGYFWPTMLEDCFRYYKGCQDCQKFGAIQRAPASAMNPIIKPWPFRCWGIDMIADEYYNLMADEREDLVQSRLLALAKVTKDKERIARHYNKKVVPKDFSEGELVWKLILPIGTRDSKFGKWSRNWEGSFQIYKVVSKGAYMLQGLDGEVYGRALNGKYLKKYYPSVWVNA

SEQ ID NO: 170489 - protein, 88 aa, Oryza sativa
  Clone ID: PAT_MRT4530_68810C.1.pep
MARPHVAAALRARCLPPKGKPRGQKRRANSPSRPRRCVPRLPEHADAAGGREYAVAVDDLTGPTVQVQTFAGGIWAAKDSFIRWTIDR

SEQ ID NO: 170490 - protein, 453 aa, Oryza sativa
  Clone ID: PAT_MRT4530_68811C.1.pep
MSGVGFSKIDGNSQQEEEEKEADDLDRDLGMMREELEREVLNTWLWGKDMDSILNEESEWQGTLPGWACPREDNYQSESEFSVDPDECDSFDGYWYEFRYEDGNPYYAAEREERWENQVMEQMKFTVSIAKQRQNDFFCPIFEGSLHVEGPCHLDPDILSTEHLLPQLPKWKNRWVNGYNHRNEPCRRAIQVYDLNVSSPHDEPMEIYGIFAFRDVRNNQQRNHVFQYSRDKPYKLRPGSNKIRPLIWPPRGIYAVGPMLIEYYLVIKGQERKDDKVLIDGHSMYAPSFYSELHRYRWHIDTGHCGTVALEMVALDKAVLGTLELEVLDLGENCFDSLTVVAGYCVQWGQFMIFDGKLSVGKLPPVTLCVDGDGILLLRFFTYNSPSNDKSFSHGGGVNDLLEHVTEDVLFGSMSFVPQNEGSSTASGGCSSCMDGLEISATAKWSPLFEQSD

SEQ ID NO: 170491 - protein, 484 aa, Oryza sativa
  unsure (1)..(484): unsure at all Xaa locations
  Clone ID: PAT_MRT4530_68812C.1.pep
MASPAVATRHPSPSFFGPDPRRRRGHSPSNLGFRRSGLQLKVTAIFGWIKGDTRTRELNPSAESYTLTGSASEADTKPREVSVAVVSSIMDIPSADWDACAVDSVDPDNFNPFLTHAFLSSLEESGSAVKETGWLPLHVVARDENETVVGVVPLYLKSHSRGEFVFDQSWAEAYYSYGLEYYPKLQSCVPFTPVTGQRILVRDTPYRDQVFEALVKELKSLTTKLKVSSLHITFPSEGEFSKLKDSEFLQRIGMQYHWRNRDYRSFXDEFLMDLKQPKRKNIXRQERKKIPAPKFGKWKRLXGDEIKSEHWXTPFYKSYRNTTXDNPGGRPYLTREFFHRLGEKMGDKVMLIVAEHDDKHVAGALNLIGGDTLFGRLWGCLPDAYFPNLHFEACYYQAIEAAIELNLSKVEAGAQGEHKIQRGYLPVTTYSCHYFLDPGFGAAIGNYLVHETAQVKHVIKVLHDSGPYKEDILNEFLLTQGDGV

SEQ ID NO: 170492 - protein, 41 aa, Oryza sativa
  Clone ID: PAT_MRT4530_68813C.1.pep
KEFHKVCPSSTHEFTIGDRPPRTKGRTQLGWVYLLIFYISA

SEQ ID NO: 170493 - protein, 95 aa, Oryza sativa
  unsure (1)..(95): unsure at all Xaa locations
  Clone ID: PAT_MRT4530_68814C.1.pep
MARPRHGEARPTSYRAGTARSALRAGPCRPIIYFLCIGPDCRPIVPCRPGRAGPAQRAGGGAQERPGGRAVPCLGRAKXVVPWAGPSGLGPFGHL

SEQ ID NO: 170494 - protein, 59 aa, Oryza sativa
  unsure (1)..(59): unsure at all Xaa locations
  Clone ID: PAT_MRT4530_68815C.1.pep
FKLXRAXELWGARGGARWGEPIVWRSDHLSSSSPLAPVGESVGEFARNDAGGRGATGXR

SEQ ID NO: 170495 - protein, 389 aa, Oryza sativa
  Clone ID: PAT_MRT4530_68816C.1.pep
MGTSSRPTTVKEGKKLEPPRRAGSRAAMQRSPVDKPPFTLGDIKKAIPPHCFHRSVIKSFSYLLHDLAIAAGLLYFALVGIPALPSILRLVAWPLYWAAQGSVLTGVWVIGHECGHHAFSDYLLLDNLVGLVLHSALLTPFFSWKYSHRRHHANTGSMEKDEVYVAKKKSALPWYTPYVFGNPVGRLVYIALQLTLAWPLYLAFNLSGQPYPRLVTCHYDPYSPLFSDQERVQVLVSDAAILAVLLALHRLTAAYGLWWVVRVYGVPVMIVGALFVLITYLHHTHRALPHYDSSEWEWLRGSLATVDRDYGVLNRVLHNVTDTHVLHHLFPSMPHYHAMEATRAARPVLGEYYKFDRTPIIEATWREAKECMYVEPRERDGIYWYNNKF

SEQ ID NO: 170496 - protein, 65 aa, Oryza sativa
  Clone ID: PAT_MRT4530_68817C.1.pep
LGPVVHMEAFAVRCDCPAVLGVVSKVVRVSFLCGSIWRFRSRGVGGPPHYLINPPLFLPRVRFKA

SEQ ID NO: 170497 - protein, 293 aa, Oryza sativa
  Clone ID: PAT_MRT4530_68818C.1.pep
ENWEEDWRKTKGLMGMRPGWVGGLVEESFFVGCPAHESRKKNEKNIFCLGCCASICPHCAPSHRHHPLLQRESGATTKALILKYIQTAAVRRYVYNDVVRLDDLDKLIDCSFVQPYTINSAKVIFLKPRPQSRPFKGSGNICLTCDRILQEPFHFCCLSCKVDHVMMQGGDLSNILYMSGGSSGEPDLAAGFPRFENLRVDGGGGGGGGLSDDDDDHQVTTPNSILEDPLHHHHHQYYGGGGSSNNGRSTSPAPTTADVPRKKKSGGGGGFFPQIVLSLNNRRKGAPHRSPLA

SEQ ID NO: 170498 - protein, 208 aa, Oryza sativa
  unsure (1)..(208): unsure at all Xaa locations
  Clone ID: PAT_MRT4530_68819C.1.pep
SPPPAATAASASSCTSTTPRPRRTRTTRRSSSSTCHPASPAPTSPPRGPPPPLLPPRTIGSENLLTVKFGKXQSYHRLRVSIGFKVLESADGSQVATMXVTIIXACFLIANKGFIGVSADFMTSDLQPMCALTFGSMLIYHIIICRLVYTGLYYYFITSSSADCLYIIIYIGHIADCLNPIAISWYRHWLLSAIGWNYSIGLSADWLF

SEQ ID NO: 170499 - protein, 1999 aa, Oryza sativa
  unsure (1)..(1999): unsure at all Xaa locations
  Clone ID: PAT_MRT4530_6881C.1.pep
LQDQINCYANISEGELWTYTGVKQISQATCFLSTRFWHARWDLXKVRRQSLLMAEKQPPPPSSPGSVKGKAPKPGLTDIIDDNVMPIDPEKFTPEQKQEFEATMQQARDQFLSSFMQTRKETLVQKYKIKVVADNPGTGSSKDGEVKQAPGGSAQPSAKGATDGSPSDQGDNLQGVHGAQGDEAQGVQDRVDYAVHHALINQSGVLVNTLSNMMKTIADGSIAEHXAAGPVYLQGGVFPNYRSLITDVXPSSQAVPSVAPTTQPTAPTSSPLPAVAAMTPGQPINPRLLIREHPQPTGHIANQPTQDQVAAMFLPPPSIGDPVQQHLLVILIGVTSFSDSAXNEGMRLPSIENCPGCSDVIESSSXPHNRDNRLRQARLPVHQRLGPMNQDCGQGDEAIRKNQWCPSGIFTKNQKRRVQRLRSRERFQEVEXGNQSSAEETKTKTDRSGVSGIRFPXANDAEDDEVKXWQKGRRHYNDFIYIGVXTRIIKLIFITFIESLMGWIHSCKIICHANKLNFIYKICLCECLIKHLAFLSLFLPFLSFLSRHYSLSANRSIPSTACTTSLPAAPVTPVPRRNRASFPSAASDPNPSQTALAAPQXASRCIAPCVASRRTHARARVVPSVPRLEEEPCCRRRHRGSRVAAGHQEKPSSTLRRRCLPLSXHRVELHFAAFCHLAVSRYTLVPVASSIHLIASXRLQNRRXRPWPYQMLHAWETTLGRXLRYGMWRHECHIAMTLMRXFVKENENXNKYFRLGRLEDLGGVRKRLVPSLVSXDRAMKLSMKRPPYNRTSRMGIDLAEXIAERRQLNXMCESSLPGSARTPLTARNLGRLECMRTKIHGAGTAXSEVVERLCHGKSHSLGLRLMCWASRGVRVKCTXHCSVSXTKSIRIAVLVVIEHRDVYYTRLDSKFLNWLGGIRGKPQKTMTTSGGSSIYIFXQSIEEKLGRNAVDLIKTNMVLKVFGGNPSETKGVLNVELTVGSKTIPTTIFVIDGKGSYNLLLGRDWIHANCCIPSTMHQCLIQWQGDKIEVVPADSQSKMENPSYYFEGVVKGSNVYAKDTVDDLDDKQGPGFMSADDLEEIDIGPEFRTKLIELLKEFRDCFAWEYYEIPGLSRSIVEHRLPIKPGVRPRQQPPRRCKADMLEPVKAEIKRLYDAGFIRPCRYAEWVSSIVPVIKKNDLNKATPKDEYPMPVADQLVDAASGNKILSFMDGNAGYNQIFMAEEDIHKTAFRCPGAIGLFEWVVMTFGLKSAGATYQRAMNYIYHDLIGWSVEVYIDDVVVKSKEVEDHIADLRKVFERTRKYGLKMNPTKCAFGVSAGQFLGILVHERGIEVTQRSVNAIKKIQPPENKTELQEMIGKINFVRRFISNLSRRLESFTPLLRLKADQQFTWGAEQQRALDNIKEYLSSPPVLIPPQKGIPFRLYLSAGEKSIGSVLIQELEGKERVVFYLSRRLLDAETRYSPVEKLCLCLYFSCTRLRHYLLSNECTVIWKADVVRYMLSAPILKGRVGKWIFSLTEFDLRYESPKAIKGQAIADFIVEHRDDSIGSVEIVPWTLFFDGSVCTHGCGIGLVIISPRGACFEFAYTIKPYATNNQAEYEAVLKGLQLLKEVEADTIEIMGDSLLVISQLAGEYECKNDTLMVYNEKCLELMKEFQLVTLKHVSREQNLEANDLAQGASGYKPMIKDVKVEIAAMLADDWRYDVHQYLSNPSQSASRKLRYRALKYTLLDDELYYQTIDGVLLKCLSADQAKVAISEVHDGICGIHQSAHKMKWLLRCVGYFWPTMLEDCFKYYKGCQDCQKFGAIQRAPASAMNPIIKPWPFRGWGIDMIGMINPPSSKGHKFILVATDYFTKWVEAIPLKKVDSGDAIQFVQEXITTDQGSIFVSDEFVQFTDSVGIKLLNSSPYYAQANGQAEASNKSLIKLIKRKISDYPRQXHTRLAEALWSYRMACHGSIQVPPYKLVYGHEAVLLWEVRIGSRRTELLNGKYLKKYYPSVWVNA

SEQ ID NO: 170500 - protein, 119 aa, Oryza sativa
  unsure (1)..(119): unsure at all Xaa locations
  Clone ID: PAT_MRT4530_68820C.1.pep
RGRRRRPRRRGRQGGRTSAASCRRPRRRCGRSRCAAGPSPWRRGSPPPPPRASSXARDSRRGPPTCRSSCRTRRAGSSSAAGSTASSRTTARRSTSRSPAAAAPDHRLRRRRDSPSWDP

SEQ ID NO: 170501 - protein, 85 aa, Oryza sativa
  Clone ID: PAT_MRT4530_68821C.1.pep
LFCHSRSSAKSHLLGPPYSRLSRHIFAILSTQVVSALFRISIQVISGPPARLRSLCLLVDFSVEPLHPRELHVEFKCLLPFLLTK

SEQ ID NO: 170502 - protein, 145 aa, Oryza sativa
  Clone ID: PAT_MRT4530_68822C.1.pep
KALPLVVVVVVATAHSRVVIVVVALERGRVGEGRCCRIRAGTAAAAGSVRGRPRAAHRCLPARLPDPPPARSRRRRGGEGRGEGGEEPWLLARRRPPARRSPCRGGEERSRGPPIPPAPAAASPRPPAVSELTAVPPVGCGEGGS

SEQ ID NO: 170503 - protein, 153 aa, Oryza sativa
  unsure (1)..(153): unsure at all Xaa locations
  Clone ID: PAT_MRT4530_68823C.1.pep
QIITPILLLLDIVACNAAELLDVLQHTYIPHQLQSHLLLRQQVLXPCTDLLKQHHTISATPFWHTSYDAIAYYNQLMHLHRCLQLXAVTRXSLYHIIKRAHRTVLQLPLLQSCGAYFAQNRLQDHCLLHFHLPYICDIYPIYYIAPMTIPTRW

SEQ ID NO: 170504 - protein, 320 aa, Oryza sativa
  Clone ID: PAT_MRT4530_68824C.1.pep
MAATMLQRRNPELSGEIDGRQRRLFMPRRRTTAMVDGATSTGLHVITNIENRAISMWYTRSRVSCELWFVGVAGDFIEQLRAPTGGREDGGISGGWRQSLMGEVRVVKEESGESCGQGLGRFGWVYDISWMGMSRARIHVHGLTAQRPVLATSSRTDGTTRMGESSRLEWLPLCQRWSKGEGFGRGVEDLAGTARLGRSLSSSEDIARHVFDGLPKRAECGEEEGNGLGVSWGFTMDDKWGQCFQGPRTEEGFVNGILENGVVGSEVQQWPNNLAQPSRPKRQPPPSSFPWVLPPCAMGATVRRSTIATRRLYGFEYRLH

SEQ ID NO: 170505 - protein, 54 aa, Oryza sativa
  Clone ID: PAT_MRT4530_68825C.1.pep
INRDNRTWFPRVTNIVLAKVVYLAHKIIRIYILPNKCTPFCSLKHIFIKYHKVM

SEQ ID NO: 170506 - protein, 345 aa, Oryza sativa
  Clone ID: PAT_MRT4530_68826C.1.pep
METKPVLCKAIEGGFASLSSPAPAKIVIADLGCSSGPNTLLVVSGVIGMISTSGYSEKTELQFFLNDLPGNDFNYVFRSLQQLKQQLADRKEGLLEPPYYIAGLPGSFYTRLFPCQSVHLFHSSYALMWRSKVPEELSSGVHLNKGNIYIGKATPSHVVKLFQKKFKEDFSLFLTLRQEELVSGGRMVLTFLGRKSSQMLAHGDVGTMWELLAQALQILVQKGRVKEEDLTTFNLPFYAPSVDEVTELIEESGLFDVEHTGVFESSWDPHDDSKSNGDVVADCARSADSIANCSIRAVIKPLITDHFGESIVDELFQVYVPIVAKHLEKGRAMYPVIVVSLKGRL

SEQ ID NO: 170507 - protein, 59 aa, Oryza sativa
  Clone ID: PAT_MRT4530_68827C.1.pep
MAVVGVLALQGSFNEHLAALRRIGVRGVEVYNSTILMVINSFIIYLCFTSLFNNLIIYL

SEQ ID NO: 170508 - protein, 365 aa, Oryza sativa
  Clone ID: PAT_MRT4530_68828C.1.pep
METKPVLCKAIEGVFASLSSPAPAKIVIADLGCSSGPNTLLVVSGVISMISTSGYPEKTELQFFLNDLPGNDFNYVFRSLQQLKQLADRKERLLEPPYYIAGLPGSFYTRLFPCQSVHLFHCSYALMWRSKVFPMKMKNQKFSQAVVDPLVQVPKELSSGVHLNKGNICIGKATPSHVVKLFQKKFKEDFSLFLALRSEELVSGGCMVLTFLGRKSSEMLAHGDVDTMWELLAEALQILVQKGRVKEEDLTTFNLPFYAPSVDEVTELIEESGLFDVEHTGVFESSWDPHDDSKSNGDAVADCARSADSIANCSIRAVIKPLITDHFGESIVDELFQVYVPLVAKHLEKGRAMYPVIVVSLKGRL

SEQ ID NO: 170509 - protein, 76 aa, Oryza sativa
  unsure (1)..(76): unsure at all Xaa locations
  Clone ID: PAT_MRT4530_68829C.1.pep
TTRRRGQVAARAAGXLGXRLGGWPASMVWPVAGXVRFVXGGGGGENGGGEDGAREEGRRDGGGXVXRSRLAXDSGQ

SEQ ID NO: 170510 - protein, 241 aa, Oryza sativa
  Clone ID: PAT_MRT4530_6882C.1.pep
TVGNYLGFFIGYPILPAAAWPAIDPRRCGRLPLAVAGLSAEHLRRTADPAPPEGGAAGSAACRCRPPTLSPRIEAVAVVEPAAAAHRRDPAAPRPAPPDSLITVSCTSSPRAAEPSPSPHDVGSRGSGTANPGSSHHEARVAVRRTPSPRAATPQSSPLPHNVRLGRSGASTVESARRRPLHAVASRRGAHDVGHPEAGIAIRRTLSWEEGWRLGEWDCGSGRVGLGLCIPLSKWANGPKN

SEQ ID NO: 170511 - protein, 85 aa, Oryza sativa
  unsure (1)..(85): unsure at all Xaa locations
  Clone ID: PAT_MRT4530_68830C.1.pep
KPPERQQNTPPPPPPPPPPPPPAAIDSPPSSPRSXSETPPPSPPPLSRAKLRTSQPVSISRLLPMLDVNYQRCCLALWRSSSIGS

SEQ ID NO: 170512 - protein, 723 aa, Oryza sativa
  Clone ID: PAT_MRT4530_68831C.1.pep
MAEGDNQGEREVVKKASTSTSSQALSMVIEGEGNEAAGSGALISGLRGSEAVMLIVGVVLRTSQPIISSLFFSYSVIQLSFALTPLSYCQAVMDNSFVDIPNQPPMNNPFVLMEPSAQSYMVNLGKSTPHMDCLGSAMANYGHGNQNIQCIDSITTRDDGCRLVLGLGPTPNFYSAECQPTGVDKLKEAPSLSGQGLTITDPGTLRLGLQMDVSQTIQPLQAPDGTVHSFTVVDEASASPSVRSIGGYMPSLLFAPRSGSSAVNETHEAETQDSLDLTHSDNDNTQHVQHHLQLSPEPSAMTDTSFGVSSDVVTATTTSEQRNHPRHPKKCRFKGCSKGARGASGLCIAHGGGQRCHKPGCHKGAESSTAYCKAHGGGRRCEELGCTKSAEGKTDYCIAHGGGRRCEHDGCPKAARGKSGRCIKHGGGKRCTVQGCIRSAEGKAGLCISHGGGRRCQFPDCSKGAQGSTLYCKGHGGGKRCIFDGCSKGAEGSTPLCKAHGGGKRCMFEGGGVCPKSVHGGTEYCVAHGGGKRCSVAGCTKSARGRTDCCVKHGGGKRCKVDNCSKSAQGSTDFCKAHGGGKRCTWGTGCEKFARGRSGLCAAHGTLAAKQQERDAANNGAGMIPPGLFSGIVTVAATSSMTNEYSSSGISTASDCDGTVRSQAMMIPPQVLVPRSMMPSSSSEPTVHGGREGGCAVPEGRVHGGGLLSLLGGSFRNADMDKL

SEQ ID NO: 170513 - protein, 1023 aa, Oryza sativa
  Clone ID: PAT_MRT4530_68832C.1.pep
MPAPAATAAAGMGSGGGGGGSGEHHMRGHAHLTNCIHLRHHHAHGLGAGSASSGRRRSPTGSSASASAALMRDLLALQRSRSLRDPSTRRSVDSSSRVAAEPQGVGLGLGDDLHDDSSRPGGALKTLLDQLAENPQPKPSRGPRRRFKGGAGRRAAPASATGGALDRGVDGAAAVSVNSSSQEAVCGNKYLFGVVGGDDDDDDECGVELQRPQASQDSRNVCGIPWNWSRIHHRGKSFLDMAGRSFSCGLSDPKSASAARRSIAATSAGSCGHMDGSRSHPHFPVTARLTSTSSDSDSLPLLVDGVRNGIGGIARSFSGELGIFSNQTSELDSDLASEARSGQRSRGSHRGRHQSLTQKYSPKTFKDMIGQSLVVQALSNAILKRKIGLVYVFYGPHGTGKTSCARVFAKALNCHSPEHPRPCDSCASCIAHNLGKSRSLVEIGPVGNIDLDSIVDILDNVMLSPVPTQHRVFIVDDCNTLPPDTWSVISKVIERAPRRVVFILISPNLDLPHIIVSRCQKFFFPKLKECDIVNTLQWISTSEGLDVDRDALKLIASRSDGSLRDAEMTLDQLSLLGQRISMSLVQELVGLVSDDKLVDLLDLALSADTVNTVKTLRDITETGVEPLALMSQLATIITDILAGTYAFTQERVRRKFFKCPTLSKDDMEKLRQALKTLSEAEKQLRVSNDKMTWLTAALLQLAPDKQYVLPSSSTSASFNQGLLTCPEGDIGRSTAIDHTNIYAGPHGLPRNANLGVDSDNNMAGTRRGKGPAPTVQLMFSSRVNKSKAERSREQVLHAFESVLASAITLEIRYEPKDDARAGHVPAISPYPEDSTSNVALRRSFTRHSSASSRGENLIRRLQKDNVVHGANSNQTRWVQSDPHILTEGEIIEVGPSQVDWHSEPNNSAGVRKENIVLQGREVVNNEHGRQNSIVRGKVSLAHVINKAETCSQQGGDWSLSRVYFVGRLQALLDERVHSIGYLDLPLFESMQLLAFSLKETPYIKAAALQPAYALSQVYPREKR

SEQ ID NO: 170514 - protein, 62 aa, Oryza sativa
  unsure (1)..(62): unsure at all Xaa locations
  Clone ID: PAT_MRT4530_68833C.1.pep
TSGSPGLQEERCHMSRQSVAALWLHLPFLLSSFFCFPWFLFIRIKADIFCGGRGFPFIXMIS

SEQ ID NO: 170515 - protein, 74 aa, Oryza sativa
  unsure (1)..(74): unsure at all Xaa locations
  Clone ID: PAT_MRT4530_68834C.1.pep
YYPLGSSFAGQSALTSTQHTHFPSLSRVQGTHEAHIYRLLAALGKWAPRLSLTKFFPPKFLLVNPTXTAFSTFC

SEQ ID NO: 170516 - protein, 109 aa, Oryza sativa
  Clone ID: PAT_MRT4530_68835C.1.pep
LTSLDTASVEAKWLRDFLMDLPVVEKLVPAILLNSNNQTMIIKVNSSKDNMKSFRHVKRRLKSIKKLKNSEVITLEYVQTAKNMTYQVTKGISCNVIDSASSEMGLRPT

SEQ ID NO: 170517 - protein, 207 aa, Oryza sativa
  Clone ID: PAT_MRT4530_68836C.1.pep
MAQAATTSTLPPTQAPCILNPRRSATIIVEVASCCRRRLHRRHPLPSSPRLPLLSSAFFGNPAAAACLRRLRTPATAACLRRAGNPRPPPVSPHKGAGRPAAAAPPAIDSRYCAVIAHARDLLPPHRSAGWVGDGREWRWRRCSTERLRETRRPVRAQQKGTGRRSPSIGGGAAGGYGMPRRLPGQSPTGGAVATDLAGGAKEGGGA

SEQ ID NO: 170518 - protein, 68 aa, Oryza sativa
  Clone ID: PAT_MRT4530_68837C.1.pep
MVEALSGGVLGTATLGELQHPNLTMAKPGLQKVAAKRALAPIYECGNGREFESLREMMVVRHSGFAAH

SEQ ID NO: 170519 - protein, 35 aa, Oryza sativa
  Clone ID: PAT_MRT4530_68838C.1.pep
MNDNKVNERERERANERERANEQKTLSESSLKPDW

SEQ ID NO: 170520 - protein, 86 aa, Oryza sativa
  unsure (1)..(86): unsure at all Xaa locations
  Clone ID: PAT_MRT4530_68839C.1.pep
CYNPNTLQAXTSYAFNSYFXXNPSPTSCDFGDTGMLVXINPSSGTXLXQTSSAYGYIPGVTVVGGAVTGFMNGVGVVVVVGSGIVT

SEQ ID NO: 170521 - protein, 1383 aa, Oryza sativa
  Clone ID: PAT_MRT4530_6883C.1.pep
MAEKPPASPSSAGEPGSVKAKIHKLGLSEVDEGNIVPVTMDKLTPDQQKDLEAMMQQARNQFLSSFTETHKGTLVQKYKVKVIANVPGTGSSKDGEVKQAPDGAAQSSNKGAADGSRGDQDDGSQGVQGVGSQGTQGDGVQGFQGEGLNQNGNTTQLQFNNFQDQVDYAVHHALINQSGILVNTLSNMVKTMVDGSMAEYQATGPVYLPGGVFPNYRPLITDNQPVVQSIPPNAALAQPTAPVSAPAPAAPSLAPCQLVNPRLLVREQPQHSGQNVNRLTQNQVAAMFLPPPPTVDPTQQQPIQQTPPRQQVVQPIQQTPPIQQVVQPIQQMPPRQQGMIAPIREKFSSQDFDSLSHLAQKVTLHEQRFAEARKNFNKVNHVCPYIYGLDDDDDYEIAAAEWVRSKKVIPCQWVKNSGKEERYDFDISKTDKIFDLLLREKKIQLPAGHTIPSAKELGKRRFCWNKGMRLPSIKDCPGCGNVAESSSRSYNRSNRLKQTRVPVHQRLGPVNQDCNQEDNEDRKTQWCPSGIFTKNQKRRVQRLRNRERFQEVEQEINHRLKKTKPRQEWRVKNQAPVADEPTADEAKRLPKGKSVVTVSVNMVFMLPAEFGVKQANVDKVEEESAKLILLPEQAVFENLEGTENRHLKPLYINGYVNGKPMSKMIVDGGAAVNLMPYATFRKLGRNAEDLIKTNMVLKDFGGNPSETKGVLNVELTVGSKTIPTTFFVIDGKGSYSLLLGRDWIHANCCIPSTMHQCLIQWQGDKIEIVPADSIVPVIKKNGKVRVCIGFRDLNKATPKDEYPMPVADQLVDAALGHKILSFMDGNAGYNQIFMAEEDIHKTTFRCPGAIGLFEWVVMTFGLKSTRVTYQRAMNYIYHDLIGWLVEVYIDDVVVKSKEIEDHIADLRKVFERTRKYGLKMNPTKCAFGVSAGQFLGFLVHERGIEITQRSVNAIKKIQPPENKTELQEMIGKINFVRSLLGGAEQQKALDNIKEYLSSPPVLIPPQKGIPFRLYLSAVEIVPWTLFFDGSVCTHGCGIGLVIISPRGACFEFAYTIKPYATNNHAEYEAVLKGLQLLKEVEADAIEIMGDSLLVISQLAGEYECNNDTLIVYNEKCQELMKEFQLTIDGVLLKCLSADQAKVAIGEVHEGICGTHQSAHKMKWLLRRAGYFWPTMLKDCFKYYKGCQDCQKFGAIQRAPVSAMNPIIKPWLFRCWGIDMIDMINPPSSKGHKFILVATDYFTKWVEAIPLKKANSGDAIQFVQEHIIYRFGISQNIMTDQGSIFVSDEFVQFADSMGIKLLNFSPYYAQANGQAEASNKSLIKLIKRKISDYPRQWHTRLAEALWSYRMACHRSIQVPPYKVVYRHETVLPWEVRIGSRRTEL

SEQ ID NO: 170522 - protein, 80 aa, Oryza sativa
  unsure (1)..(80): unsure at all Xaa locations
  Clone ID: PAT_MRT4530_68840C.1.pep
MDALLMAKDFQALQVRAVLSLELAKLTGKRVHLPAGPXGEPIACHWVPRGDDLNHTKLMALPRPVGDKLVLRIGLRKLLV

SEQ ID NO: 170523 - protein, 375 aa, Oryza sativa
  unsure (1)..(375): unsure at all Xaa locations
  Clone ID: PAT_MRT4530_68841C.1.pep
MPFLSTPSFDLSAGAEPTLGPRSPPPPPDAVHPPTPQQAAPASEAAARRLREAEERLREAIQELHRHQHGGGGDGDGDGKGVDGDEEGGGGGGGGWGCGHEGESCAAHAAGNLCQSFLLSYGVRVGIGILLRAFKLARRRSYSSLLDLKQLVSEKDLIVREEACRVGLLFGGFTGSYHALRCFLRRFRKKETPFNAVXYNSAKSKNRFHFWGSHWRHGDALLFSLASAQCLXSTFKKTFPLYFSLTFVPFVVLRLQKFLESPAATCWRALVGAVRSTTFLSAFVTFFQVALFCMCMGGIMYFLEYEPDTMAPFLRGLIRRFLASKISNPSPPPNPNASYSYLQKLNVLEQPRTQQGPENGLTSSEKYNLEAIPGL

SEQ ID NO: 170524 - protein, 278 aa, Oryza sativa
  Clone ID: PAT_MRT4530_68842C.1.pep
GHEGESCAAHAAGNLCQSFLLSYGVRVGIGILLRAFKLARRRSYSSLLDLKQLVSEKDLIVREEACRVGLLFGGFTGSYHALRCFLRRFRKKETPFNAILAGSVAGLAIVALDDSSRRRTLSLYLLARLAQCAYNSAKSKNRFHFWGSHWRHGDALLFSLASAQVMYSFVMRPESLPKSYQDFIQKTGPVAEPVYKAVRDCCRGGHVDLIGLSAYLANKKNSNLINLTKSPPIIPCSVIHPDRASCLAHNVSVSSSTFKKTFPLYFSLTFVPFVVLRL

SEQ ID NO: 170525 - protein, 143 aa, Oryza sativa
  Clone ID: PAT_MRT4530_68843C.1.pep
PRVRPRVRLESPAATCWRALVGAVRSTTFLSAFVTFFQAAICLHRKVATKDHKFVYWFAGLMSGLSILLEKKARRAELALYVLPRAGDSLWYILINRHLLPNIKNAEVALFCMCMGGIMYFLEYEPDTMAPFLRGLIRRFLAS

SEQ ID NO: 170526 - protein, 202 aa, Oryza sativa
  Clone ID: PAT_MRT4530_68844C.1.pep
MAFVTLQAIGRGELRRPRALTSNLYDMLRRVELQLCVPIACLSRSPLSFGEYISRRGFPSVGVEKFSKDPRHIGVGVNEMTHMRFVGYQKYMSNNIRLVSFLSDKDLYQPMGINMYSRGLCNLSLRSIQFGASPVLHNNRWVDITPLPGAFIINIGDLMQVPVDEKIKHTGLGDLLSSSAGPNMMRCGHASQFDPATDKICK

SEQ ID NO: 170527 - protein, 78 aa, Oryza sativa
  Clone ID: PAT_MRT4530_68845C.1.pep
ALQFEPHISHLSTHVSAFHRAWYSLRCSLQHSPPLGASLSVLRNTINSHRSKARMYTCTHFSEPDQVAPTVTEKSLTI

SEQ ID NO: 170528 - protein, 332 aa, Oryza sativa
  Clone ID: PAT_MRT4530_68846C.1.pep
MAYLVIQLRRQPLRARFTAPSNVSKYADASTQVLSANFPGKGSNSLSLSSAFPHKTVAPSYKKTTRVNQGLFKPGTNRNLTWQKPVSSDNLVISFSDDDSGSDSGMSKQDKRGRKDSSQGTYKTGINVHTGIMREEAPQQKIHAAKVGSANWSAVPLTYRNSGVGRGLSATFARRDPPVRQVTPQKAIHKDGNVVGVSSAVHNLESLRHKIAARENELKVKRPMSPSLLKDSSFPTGQTRLPLEKIGFEASSIGACSHLNGPVGHDIRPIKRLKPNQECSNNQVLVNQIPPVPTGKSLGKSNVQPCERREHIENGIRDCNVNEAVHTVTTET

SEQ ID NO: 170529 - protein, 90 aa, Oryza sativa
  Clone ID: PAT_MRT4530_68847C.1.pep
MERRGAEQGGQNGGGRSRAVEWNRPSLSTTVAPATTVAHAPAAAGSALLTFSLCQHISFAPASMPSSARLGSGLFLLWLPLEPFGLTDAC

SEQ ID NO: 170530 - protein, 129 aa, Oryza sativa
  Clone ID: PAT_MRT4530_68848C.1.pep
TPLRKSPTDASPPPPPRQPPAPPTTSTSSTPELTSRVHAAADAPPPPMASVISPRLPLPLPLSLPDSIGGEEATPEEEEEEEEEEGSTGGRGNLPRLVVIRFGGALDLLLLVVVLDLGPSRGAGTGKST

SEQ ID NO: 170531 - protein, 59 aa, Oryza sativa
  Clone ID: PAT_MRT4530_68849C.1.pep
MDISKALGATAARAATLVAMAEGLLVVVYLYEPYRKVWHVPGPVPLPIIGQLHLLAMHG

SEQ ID NO: 170532 - protein, 39 aa, Oryza sativa
  Clone ID: PAT_MRT4530_6884C.1.pep
MEPQAQVMRSRVTRNSFSDYRLLPTTAIYLTIMGASLQV

SEQ ID NO: 170533 - protein, 41 aa, Oryza sativa
  unsure (1)..(41): unsure at all Xaa locations
  Clone ID: PAT_MRT4530_68850C.1.pep
VNFHNGGGGNICPTKASXCXANSAXGSTRLQRRWIGLAVMV

SEQ ID NO: 170534 - protein, 57 aa, Oryza sativa
  Clone ID: PAT_MRT4530_68851C.1.pep
CRCWAGSGHLSMGVERDIPQAGDVAHVLPDGSTQGVGVNRYRLKLGQPAHLLGDLPL

SEQ ID NO: 170535 - protein, 60 aa, Oryza sativa
  Clone ID: PAT_MRT4530_68852C.1.pep
MGDDDKGAPISEAWGVGASGKRLWRDDEIPRTGTGRRGESITVAMAGHGNGGGCFRSSGG

SEQ ID NO: 170536 - protein, 52 aa, Oryza sativa
  Clone ID: PAT_MRT4530_68853C.1.pep
MSSCGSACVSVAPSIYGTLKAFSPRPRTACLPAATETRSCSNSSEVGLGRYG

SEQ ID NO: 170537 - protein, 901 aa, Oryza sativa
  Clone ID: PAT_MRT4530_68854C.1.pep
MVIPGPFFRRSTALQVFSVLCVLRFVVPDPDIEWPLIHGIPACPPFTCGHLSKVASPFHRRGYECGVASYELTCTDDKATIQIDNGTYFVTGIDYSDSTFWVVDANISDSRNNCPLPRWKRIPYYYDDVSSDDEESSPYNIQVELDPASRWWSFFVNCSKEINNNVMYSPVACMGTSSSFVYVLTGRLSCYIENLEPSCGYLAMTPLDGMGRVAPAVDSLSYEDVVKFMRKGFRVQFPFRHHRNRSFKDCLMESIPKSTGIGKLSDWFSLSVTENFMDCATAKIPSPYNILLGIILYALMFWTMLALEKFLRMQQMLGPTRYAYTDIIAITGHFREKLGQGGYGSVYKGVLLPGDLHVAIKILNGYSNCNGEEFISEVATIGRIHHVNVVRLVGFCSEEMRRALVYEYMPRGSLDKHIFSSERRFSWDKLNEIALGIARGINYLHQGCDMQILHFDIKPHNILLDDNFVPKVADFGLAKLYPRDKSFVSDRALRGTVGYMAPEMVSRSFGIISGKSDVYSFGMLLLEMVGGRRNADPNADSSASKAYYPSWVYDKLIADQQVDEISNFANMHELERKLCLVGLWCIQMKSHDRPTMSEAIEMLEGGVDALQVPLRPFFCDGDGMPPPQVMDSYFHSSDLSAISEEDDGIAELASQLDEIASLAPCRTEAVRKGTCRTAPVRKGTCRTAPVRKGTCRTAPVRQHAPVRQYPVELPQFDSTLSNCPSSTVPCRTAPVRQGLRTEEPRAVAAVVIGSLPSSSPWARLRGAVVRRLSGGSGARRRSGEHGCGRRNEGERGNGAAEGASAAAGRAVEREQAADRVAERERAAEQRRASAAASEFGREGEAAGDQETISSSASSPSPAGGASPSIVGHPRGYGGGGGRARPSQLRPPPATIPGESSG

SEQ ID NO: 170538 - protein, 166 aa, Oryza sativa
  Clone ID: PAT_MRT4530_68855C.1.pep
MHVAVYKSGEAYRGKKVLVVGCGNSGMVVSLDLCDHSALPAMVVRDAVHVLPGEVLGKSTFELAVLLMAWLPLWLVDKILVLLAWFVLGNLAKLGIRRPTTGRLGAMGRRLGGGRAAPAMSEDAIGDVLHMLEDVVGDEATTLVGSSTPCNSHHNSDAELMQSLSS

SEQ ID NO: 170539 - protein, 50 aa, Oryza sativa
  unsure (1)..(50): unsure at all Xaa locations
  Clone ID: PAT_MRT4530_68856C.1.pep
YRGGIFGGILKGKNFTQGKNYKKKKKKXKKKEKRGKGGGGEPPPPQKRGT

SEQ ID NO: 170540 - protein, 75 aa, Oryza sativa
  Clone ID: PAT_MRT4530_68857C.1.pep
EQNGPCIRKKAPRTWGQTGPSIHTPAKTHTLIRGGDIYKKRTAPWLHGHPGRDRILDRTPRGAHGDQLNPLEHTA

SEQ ID NO: 170541 - protein, 298 aa, Oryza sativa
  Clone ID: PAT_MRT4530_68858C.1.pep
MALLRPLALCLLLVSCAAQSPASSPSASNGPPLSAATPQASAASSPQVSAAAPTTAASAPQVSSAAAPTNAASAPQVSAAAPTNAAQAPKVSAAAPTNAASAPRVSAAAPPNAASAPQVSAAAPPTTAAAAPQLAAASPPTATSSPPVSAPTLAVAAPPLATPPTVAAPVASPPLATPPAALPPATAPPTSAPAPLLAAPVLAPVATPTLAPAPAPVSPAPAPVSPAPAPIVAPTPAPILAPELSPLMAPELSPLGSLSPGPSLAPAMASEDESAATRAPAGIAALVALAAAGLVALF

SEQ ID NO: 170542 - protein, 119 aa, Oryza sativa
  Clone ID: PAT_MRT4530_68859C.1.pep
MGTNTAPSLWGTVLFKQALNIIILLSPNSQQVLDIPLMQNATMQTDLLELTKSVGTRDDAGVRQLDATKLDLLQGIAMEEISKVKQMMLKGPGWKNRMLATMAFIQELVEDMLPGTSDL

SEQ ID NO: 170543 - protein, 960 aa, Oryza sativa
  Clone ID: PAT_MRT4530_6885C.1.pep
MAEKQAPPPSSPGSVKGKVSKPGLTDIIDDNVMPIDPEKFTPEQRQEFEATMQQVRDQYLSSFMQTRKGTLVQKYKIKVVADSPGTGSSKDGEVKQAPDGSAQPTNKGATDGSIGNQGDNPQGVHGAPGDVAQGLQGGNLNQNNELAQDFFNNFQDRVDYAVHHALINQSGVLVNTLSNMMKTIADGSIAEHQAIGPVYLQGGVFPNYRSLVTDVQPAMQRLPLLHPQLNQRRQHQLPYLLRQPWCQVAAMFLPPPPIVDPVQQQPIQQTPPIQPVVQPIQQTPVRQQIVQPIPHPGSANASAGFAAPGGQPAQQFVNQIVPEHLVHHAQPDGTVVPQMVPEHLVRNIQSNLHNYQGGQEGVSTYEHISRFLAQCGEASAVDALRVRLFRLSLSRSAFTWFSSLPYGSVNSWADLEKQFHSYFYSGVHEMKLSDLTAIKQRHDEPVHEYIQRFKKMRNKCFSLSLTDAQLADLAFQGGKIKFDDSKKPMKVDGNPLPVNMVHTACQAADRARAKGFQVNSAKIINKYTRKYDKQQERRFEEYDDGFDPHWGCEFFRFCWNEGMRLPSIENCPGCGDVIKSSSRPHNRDDRLRRTRLPVHQRLGLMNQDRGQEDKEVEEEINHRLRKPKPRQEWRVKSQVPTADDAVADEVKRLAKGKSVITAPINMVFTLPAEFGIDQTDVYEVEESAKLVLSPEQAVFEKPEGTENRHLKPLYINGYVNGKPMSKMMVDGGAAVNLMPYATFRKLGRNVEDLIKTNMVLKDFGGNPSETKGVLNVELTVGSKTIPTTKYGLKMNPTKCAFGVSAGKFLGFLVHERGIEAEYEAVLKGLQLLKEVEADTIEIMGDSLLVISQLAGEYECKNDTLMAYNEKCLELRKGFRLVTLKHVSREQNLEANDLAQGASGYKPMVKDVKVEIATISADDWRYDGTFGRRYWKIVSDIIRGVKIVRSLDQFSEHRRRL

SEQ ID NO: 170544 - protein, 182 aa, Oryza sativa
  unsure (1)..(182): unsure at all Xaa locations
  Clone ID: PAT_MRT4530_68860C.1.pep
KLCTGYNFVHGDMHEXKQRQQLHQPSILNCSSCIHQHIGGSISSPANQPTINHTSAQPSPQCPMSFSNATQLAXPSCPTSIKGSSPIQTAFHQGQVQCTLLPGSNHSSLGFLHLSNRVSAHLCAQSPPSNQPITKPSASXSHPRHQRQGSKXTQAAFHGSFSTWPMASNRTNPQANISVXDT

SEQ ID NO: 170545 - protein, 67 aa, Oryza sativa
  unsure (1)..(67): unsure at all Xaa locations
  Clone ID: PAT_MRT4530_68861C.1.pep
APPPPPVTGRTPSPPPVAGPTPSPPPAAQASSASXRPLHGQAPPPPXPPGPPLPPLPPSAARASSTS

SEQ ID NO: 170546 - protein, 773 aa, Oryza sativa
  Clone ID: PAT_MRT4530_68862C.1.pep
MGGRKSPSKSTQVGYPALSNRGGMHVGGSPVFTGNMSAIDGSIQASSSYLTKDGNHNSALGLAAAPVCGNFGPRITYVASVAGGGNIGRTISSAGMSMPTVASPVNLSGSGALNIRGSNQMGGTHQQGLPAMNMLGSSSSAPGGTLSKNQLQAGSSSSGSPGMRHDGPLRQQAFGINAVQQNQEFRIHNEDFPALPRLEGMELHRKDHLPKNANIMQAQHYPMGKSSGFNTGSSCPPRKQHKQTANSVQNTGPENVGPKPVNSPRLPLNPRPREQVIQQNHEPQAQKSVRLQSSSGPESHKVQSPKSSQRTDTTPESYKVQSPKPSQRTDTAPESHKVQSPKSSQRTDTAPDPYDPYGLHGLLRVMKLKEEGPASLALGIDLTTLGLDMNSSDNLYKTFGSPWSSEPVKEEYSYEIPDCYSSMQPPPLQALHFLRFHLMTLFYIFYSMPQDAAQLYAANEICKYGWVYHKELRQWVKRAPNTTPLVKTTTYEQGLCYLFDANIWDAIPKDNFILRYDDIEKIPALPPLLPATQNPATQNGSVRINKWYESSARAWTPSAAASSIGQALVVVDGLTLYARLGAGAGDDLLSGLAFGAADEALLRIKMNTIMSCRPPLDQGDHLLLQAARRGCLWRSEQWTHKRILLHGHHLLVRRQHILGGSLAGLHVLRHRHRLHRRRRRLTTTRRSQIRVCPVVPTSPHLQIREAWMYGDAPHLGILDNFIKLVSVNTARIAVAAATTKEEEDMPSSPCHAATEAANATVAIWTLDKSADET

SEQ ID NO: 170547 - protein, 69 aa, Oryza sativa
  Clone ID: PAT_MRT4530_68863C.1.pep
LLRKSITAPTNQRMTGGTGGRSVIGAYLCFLCPEGVQRSRCAHYDCVMIKVFLNGCGTKIAINMLCNKD

SEQ ID NO: 170548 - protein, 53 aa, Oryza sativa
  Clone ID: PAT_MRT4530_68864C.1.pep
PRAPHKRELWVSRVTGVTIILGPEKKSQVVIAYSINLSISALLNASLQYNWRA

SEQ ID NO: 170549 - protein, 110 aa, Oryza sativa
  Clone ID: PAT_MRT4530_68865C.1.pep
PPGKPIWVSFLEKGLGENFFLGGLFSPLGFPPFLVTNFGKKTGPTFPKKFFFPILGTPNPPPKFYRGANPTKNSPGPILTFKKGVFFPVPIWGAPFGKGFFSPGKRGNGG

SEQ ID NO: 170550 - protein, 54 aa, Oryza sativa
  Clone ID: PAT_MRT4530_68866C.1.pep
HGHVPCISPYERSLISEPGSLHSGRLVPRFVWIARFVHPRLHYPGVLIRLLIHG

SEQ ID NO: 170551 - protein, 184 aa, Oryza sativa
  unsure (1)..(184): unsure at all Xaa locations
  Clone ID: PAT_MRT4530_68867C.1.pep
QRPLWKVSSSRLSEYKVEDLAAALLNSFTYNIGQIAYFVANLSGLKRIFFRGAYICGHEKTMDKISHSLXYWSKSQVQTTFLCHEGFLGTLGAFWSYENMGIDGLAAHEVIREVLLGAPYTGQLPSLPLTHQQDNGEDTTIEGEVERLRHDNAVLKAELERLQRENTELKAKLVKSGKPNTFYH

SEQ ID NO: 170552 - protein, 74 aa, Oryza sativa
  unsure (1)..(74): unsure at all Xaa locations
  Clone ID: PAT_MRT4530_68868C.1.pep
NPXTAPTVAITKNXSRPGTPPCXLXLGGRENRETXRGXELLGDSWSAPTGGEMRDEKYQRSPHTNWAGARCCFF

SEQ ID NO: 170553 - protein, 150 aa, Oryza sativa
  unsure (1)..(150): unsure at all Xaa locations
  Clone ID: PAT_MRT4530_68869C.1.pep
MASEPIKGSGVPGELECSSSMEEWSTDCGGGVAAAVLAGAGHKVVVIEKGNYFTSRDYTSFEGLSMNQLYESGGFVTTMNGGGLLLAGSTVGXCLKTPEFVLREWAAAHGLPLHRRGRARRAWRGRPAVAVEAEVPGRLVAAAEADRAAG

SEQ ID NO: 170554 - protein, 1554 aa, Oryza sativa
  Clone ID: PAT_MRT4530_6886C.1.pep
MAEKPPPSPSSASPGSVKEKIQKLGLLDVNEGNIMTIDPEKFTPDQKKDFEEMMQQARDQFLNSFMQTRKGTLVQKYKIKVVADDPGTSSSKDEEGKQAPDGLAQPSDKGATYGFPANQGDNSQGVTGFKGVQGGGVNQDDNAAQLQFNNFQDQVDYAVHHALINQSGILTNTLANMVKSMVDGSMAEYQATGPVYLPGGVFPNYRPIITDNQPVVQLIPLNAPSAQPTAPVSAHAPAPTLSAPGQVINPRLLQSQGTPQQRPWADLIADVMKEQFGLRLKDAGNLYRQPYPEWFERVPLPNRFKVPDFSKFLGQDSISTYKHISRFLAQCGEASAVDALKVRLFRLSLYGSAFTWFSSLPYGSINSWADLEKQFHSYFYSGVHEMKLSDLTSIKQRHDEPVHEYIQRFREMRNKCYSLSLTDAQLADLAFQGMIAPIREKFSSEDFESLSHLTQKVTLHEQRFAEARKNSRKVNHVCPYMYGSDDDSEIAAAEWVRSKKVIPCQWVKNSGKEERYDFDITKADKIFDLLLREKQIQLPAGHAFPTAEELGKKRYCKWHNSGSQTTNDCKVFRQQIQAAIEGCKIKFDDSKRPRRLMAILFLLIWFSGSMTSSRRSIMKKMMMALILIGVVSSLDFVGMKTRLPVHQRLGPKTKPRQEWRVKNQVLIADEATADEAKRLAKGKRVVTASVNMVFTLPAEFGIKQADIDEVEEESAKLILSPEQAVFEMPEGTENRHLKPLYINGYVNEKPMSKMMVDGRAAVNLMPYTTFRKLGRNAEDLIKTNMVLKDFGSNPSETKGVLNVELTVGNKTIPTMFFVIDGKGSYSLLRGRDWIHANCCIPSTMHQCLIQWQGDKIEIVPADRTKLIELLKEFRDCFAWEYYEMPGLSRSIVEHRLPIKLGVRPHQQPPRRCKADILEPVKAEIKRLYNVGFIRPCRYAEWVSSIVPVIKKNGKVRVCIDFRNLNKATPKDEYPMPFLGFLVHERGIEVTQRSVNAIKKIQPPENKTELQEMIGKINFVRRFISNLSGRLMHYLLSNECTVICKVDVVKYMLSAPILKRRVGKWIFSLTEFDLRYDSPKAIKGQAIADFIVKHRDDSIDSVEVVPWTLFFDGSVCTHGCGIGLVIISPRGACFEFAYTIKPNATNNQDEYEAVLKGLQLLKEVEADAIEIMEDSLLVISQLVGEYECKNDALMVYNEKCQELMKEFRLVTLKHVSREQNIEANDLAQGASGYKPMIKDVKVEIAAMTADDWRYDVHQYLQNPSQSASRKLRYKALKYTLLDDELYYRTIDGVLLKSLSADQAKVAIGEVHEGICGTHQSAYEMKWLLRRAVFVSDEFVQFADSMGIKLLNSSPYYAQANGQAEASNKSLIKLIKRKISDYPRQWHTRLAEALWSYRMACHGSIQVPPYKLVYGHEAVLPWEIRIGSRRTELQNDLMADEYYNLMADEREDLVQSRLRALAKVTKDKERVARHYNKKVVPKDLSEGELVWKLILPIGTRDSKFGKWSPNWEGPFQIYKVVSKGAYMLQGLDGDVFGRALNDKYLKIYYPSVWVNA

SEQ ID NO: 170555 - protein, 184 aa, Oryza sativa
  Clone ID: PAT_MRT4530_68870C.1.pep
PSRGGGTRRRPDLRGPAAALAKVAATVVDEAEVAEFVEMAVAVLVERRWRSRMSGGTRGGGGGGRGGEAALVDARRWWSRASGGAHGGGGGRGRGRGGGAQGGGGGGEGRAEVAAGVDQAATLVGARRSSRRWDEFVRQFLADRLVPDLRGLFLSRDQPIPSTLKPNTFKSGFVPSHPCNQTLP

SEQ ID NO: 170556 - protein, 114 aa, Oryza sativa
  Clone ID: PAT_MRT4530_68871C.1.pep
PSRGGGTRRRPDLRGPAAALAKVAAAVVDEAEVAEFVEMAVAVLVERRWRSRMSGGTRGGGGGGCGGEAALVDARRWWSRASGDAHGGGGGRGRGRGGGAQGGGGGASGGGGRG

SEQ ID NO: 170557 - protein, 222 aa, Oryza sativa
  Clone ID: PAT_MRT4530_68872C.1.pep
NLLTKSGTMTGGISGGMAARSNKWDDSIIESWKKKKNQYESEMSELGSPRELQRRELAVSEKITGLEKKLHYLNVEENNLREKLRRLESEKSNIEEEIDRLEPVKEELETRIGKKEREVRVLEKKINEIVDRIYKDFSKSVGVKNIREYEERQLKDAQALQERKLSLSNQMSKLKYQLEYEQKRDMQAPIIKLKETRESLEKKLKSLQERESEARAEAEQIS

SEQ ID NO: 170558 - protein, 846 aa, Oryza sativa
  unsure (1)..(846): unsure at all Xaa locations
  Clone ID: PAT_MRT4530_68873C.1.pep
MRPTSRILAAGHLLRGSRSRYDPSPVAAAAPIFRRPPTVPRPLPSPLLGGFGPNCWVYPGDGKYAPFGRLSCFMSDSTYPPPPRDVRGHAFSTSANAVAVGKSSDDKVKKDISKKDVDDQIADTQILKNLGKYLLLNDSPDFRFRLILSLGLLVGAKVINVQVPFLFKLAVDWLAALAGAETSLASFTEANATLLALFASPAAVLIGYGIARSGVSACTLVPSRGGGTRRRPDLRGPAAALAKVAAAVVDEAEVAEFVEMAVAVLVERRWRSRMSGGTRGGGGGGRGGEAALVDARRWWSRASGGAHGGGGGRGRGRGGGAQGGGGGGERRVEVAAGVDEAATLVGARRSSRRXFSHLHELDLRYHLSRQTGALNRIIDRGSRAINYILTVMVFNVVPTILEIGMVSSILAYKFGSTFAWITSVSVATYIAFTLAVTQWRTKFRTAMNKADNASSTVAVDSLLNYETVKYFNNEQFEVEKYDKYLKKYEDAALKTQSSLAYLNFGQNIIFSSALSTAMVLSSYGVMSGALTVGDLVMVNGLLFQLSLPLNFLGSVYRESRQSLIDMKSMFQLLEEKPGIKDEPHAQPLQFKGGRIEFENVHFGYVPERKILKGATFTVPAGKSVAIVGTSGSGKSTILRLLFRFFDSSSGSIRIDGQDIREVTLDSLRKCIGVVPQDTVLFNDTIKHNIQYGRLSATDEEVYDVARRAAIHDTIMNFPDKYNTVVGERGLKLSGGEKQRVSIARVFLKEPSILLCDEATSALDSTTEASILNSLKTLSVDRTSIFIAHRLTTAMQCDEIIVLENGEVVEQGPHDFLLSKGGRYAELWSQQNNSDAIDAAAVSLEVS

SEQ ID NO: 170559 - protein, 109 aa, Oryza sativa
  Clone ID: PAT_MRT4530_68874C.1.pep
RTRRARGAPRRWRPWPPSCTPAAPPPPRRAPPPWRAARRSGSAPTPPSVGGSTAPAPTGGSCSRTAAAGTPGTPAGGRWAPGLAQLSARVHGGLHNRSTPRRPQPPRRR

SEQ ID NO: 170560 - protein, 77 aa, Oryza sativa
  Clone ID: PAT_MRT4530_68875C.1.pep
MTIVRCRRSTANHSTGKPTLRQTSGGTPRRGGPHRCRGDDVAAGPPPQSSYRDVLRRVRVLATGLLRDRLTTTVVPS

SEQ ID NO: 170561 - protein, 53 aa, Oryza sativa
  Clone ID: PAT_MRT4530_68876C.1.pep
TSREIYGLHQRQQYRYHALILAGTLAFRTYYTHRFGAPKQTGPKPCFPLEGME

SEQ ID NO: 170562 - protein, 48 aa, Oryza sativa
  Clone ID: PAT_MRT4530_68877C.1.pep
LALMDKTTSCQIKNYKMVLATYFIVSTSYRRSNNRGFAFIQNGLSYLI

SEQ ID NO: 170563 - protein, 52 aa, Oryza sativa
  Clone ID: PAT_MRT4530_68878C.1.pep
LPTRIIAGVITTMVVTSNNNEVPRSLHTINTRQCNILEKLQQECKEDGHHWF

SEQ ID NO: 170564 - protein, 78 aa, Oryza sativa
  unsure (1)..(78): unsure at all Xaa locations
  Clone ID: PAT_MRT4530_68879C.1.pep
MHLLGGPGPGILQGHASLHACRSTLEDPRVPSSNSPXGVTQLNRLAAHPPFASWRNSEEARTDRPSQQLRSLNGEWRL

SEQ ID NO: 170565 - protein, 102 aa, Oryza sativa
  Clone ID: PAT_MRT4530_6887C.1.pep
IIEFIGIRASQAVVHSMRKKDRRAGFVASGEFILGKKGEGSHQSYAKGRKSWAEPGVTFPDPSRRFFSLSRPIIVPSPAIGSALSIHLYFFTFLFFDLSSCS

SEQ ID NO: 170566 - protein, 250 aa, Oryza sativa
  Clone ID: PAT_MRT4530_68880C.1.pep
MEPSSQPQPAIGVVAGGSQVYPAYRPAATVPTAPAVIPAGSQPAPSFPANPDQLSAQHQLVYQQAQQFHQQLQQQQQRQLQQFWAERLVDIEQTTDFKNHSLPLARIKKIMKADEDVRMISAEAPVIFAKACEIFILELTLRSWMHTEENKRRTLQKNDIAAAITRTDMYDFLVDIVPRDDLKEEGVGLPRAGLPPLGVPADSYPYGYYVPQQQVPGAGIAYGGQQGHPGYLWQDPQEQQEEPPAEQQSD

SEQ ID NO: 170567 - protein, 66 aa, Oryza sativa
  unsure (1)..(66): unsure at all Xaa locations
  Clone ID: PAT_MRT4530_68881C.1.pep
SCXIQYDLLSTEVYLIRTIVANDCWENLSTISSLXXLLFSSLLLDXEYMSHQXPQPIDRWLSTEMT

SEQ ID NO: 170568 - protein, 35 aa, Oryza sativa
  Clone ID: PAT_MRT4530_68882C.1.pep
GVSFVFSVGGGVYFRVFVGALWFCYVYGGGCVRLF

SEQ ID NO: 170569 - protein, 55 aa, Oryza sativa
  Clone ID: PAT_MRT4530_68883C.1.pep
MAASPVDGMMQICTSCRGRSNRCALPFMARLDWSLPSAHRYMLHHAIPMFITSDI

SEQ ID NO: 170570 - protein, 137 aa, Oryza sativa
  unsure (1)..(137): unsure at all Xaa locations
  Clone ID: PAT_MRT4530_68884C.1.pep
RQQWRPVRVCELAGARAVDRGIGGHLRVEDIETNPDGGLXAVGGKEGWAAELLLTTALLSAAAASGGDGGGGAATTPKTAGGGGELGARGGGAMGHGRGRERGQTGEDDEGKKEENERNKTPQKPGGIGVGLRRIWR

SEQ ID NO: 170571 - protein, 72 aa, Oryza sativa
  Clone ID: PAT_MRT4530_68885C.1.pep
MGKKFRKRNSQRKKPAQLKEKPPNGKKKRKNGRATKSGAKKKGKKKKKKKKKKKKKKKKKKKKKKKKKKKKQ

SEQ ID NO: 170572 - protein, 577 aa, Oryza sativa
  Clone ID: PAT_MRT4530_68886C.1.pep
MREEVARELAHRVSDGSAGGMPVSVAREAFAAVAGVLWWSMFSEDMDAATTRQLRDVIEKAVVVAGAPNLSDYFPVIAAADVMGVRRRMDNLVGWVYGIIDVQIDRRRRRRIVCEPRKNDLLDVAFDMEGEVESEGWVMNQDTMRGMFMDLLVAGSGSTSSTIEWAMAELLQNPKSMIQLPEELKGLMGTKTHVAESDISQLPYLQAVIKETLRLHPTVPIAFNKAEATVEIQGYKIPQGTTVYVNIWAICRRAKIWDDLDKFMPYSRRDAACLHLMLASLLHRFEWTIPDEVKGDDLDMAEECCCFVGYGQTGQVLPVILALCERSLPGETPAVRPTASQRSDRRWHQEAVATSGLSDRAIYIGQTDGTSVVRPTGQLRLGEAKRKTMVERRLRRTKSKSTFKGKKTKENLKKMFEKVYAAFEPLSDVDGESEDEDKGKNISGVCFMAHGESDSECEDNDTGDQSIRRLCFGQTEHQSDQRYSSGQTDPWSDRLYTFVQRNPSLSRWAEFGPTSSLFRAAHAGPAAARPPLSRVTDMWGPHVGLVFNLRPSRPSRRFAAAFYLQIRLNPTPIPPGF

SEQ ID NO: 170573 - protein, 102 aa, Oryza sativa
  Clone ID: PAT_MRT4530_68887C.1.pep
EYADEATMIPKNTSVLIRRIPGRPRKPIVTEPEETKAMEGRVEETMPSGSAFLADASMKYPEESEWDDEFGNDLYVSDSVPSQLGSQAVDASENKGDEDSQI

SEQ ID NO: 170574 - protein, 62 aa, Oryza sativa
  Clone ID: PAT_MRT4530_68888C.1.pep
MEMLMNVDDGGRMSLDGSGDGLSTISCSVDLPKEDVVVPPHVRLLPDTGVLWTRSPAAEITS

SEQ ID NO: 170575 - protein, 74 aa, Oryza sativa
  Clone ID: PAT_MRT4530_68889C.1.pep
WLKPPPPKILSLGGTNRGFFRAGRAQSFLPTQQGGPMTGPVLPGSIPFTRGDIPPGRHSQRNFGGIFISMPGWD

SEQ ID NO: 170576 - protein, 97 aa, Oryza sativa
  Clone ID: PAT_MRT4530_6888C.1.pep
SQVTELYPQPQDQRLHLPAQQVESQAWRTQPLVVQPQQYNIQQVPPQLVQQQTSSPQAQSAPQVAVLYPPYSSQKPQQKHHEAMPSFYGQGNTVLLP

SEQ ID NO: 170577 - protein, 56 aa, Oryza sativa
  Clone ID: PAT_MRT4530_68890C.1.pep
MSFLDPAGGLAHQSFITDDALDQVFSPVLMESSLFHDADEDLLAPLSETDAALMEY

SEQ ID NO: 170578 - protein, 65 aa, Oryza sativa
  Clone ID: PAT_MRT4530_68891C.1.pep
MGRPAQEGGPKRARGRGGERERTDGPGPSRVVPGGTRLSATRFTVSEVHAGRARVWGGEAWRMRV

SEQ ID NO: 170579 - protein, 373 aa, Oryza sativa
  Clone ID: PAT_MRT4530_68892C.1.pep
MYNAPAFPCYPLQPLALSLLAPRGCSGHQSGAPMAVRVPSMELHRPPPSVSGVRGKSCLQKPFLVQAKRLEGLEKANPRSRGKQSLEQVKKRAPLIRGTVSPPLPVPGHITQPPYVGKKDASEIASEIQMHDKVSIIHMKAACELAARVLEYAGTLVKPSVTTDEIDKAVHKMIIDAGAYPSPLGYGGFPKSVCTSVNECICHGIPDSRELQDGDIINIDVTVYLNGYHGDTSKTFLCGEVDEASKRLVKVTEECMLRAISACKHGTSLKKIGRRISEHAERHGFGVVDRFVGHGVGRIFHSEPMIYHQRNNMPGQMVEGQTFTIEPALSMGSIDCDMWDDGWTAVTTDGSLAAQFEHTILITKTGAEILTKC

SEQ ID NO: 170580 - protein, 113 aa, Oryza sativa
  Clone ID: PAT_MRT4530_68893C.1.pep
IFGFCFGLIGQPMGPYNLFTVAHLSRLPLLLFHPITVAWLCGRARTTCGPSKAKKAELVRCTVWSRPGVSWSVQAAARFSCDLHDEFWLDRRYKFFNNPLCFFPKLFRVLSRH

SEQ ID NO: 170581 - protein, 42 aa, Oryza sativa
  Clone ID: PAT_MRT4530_68894C.1.pep
IINKHDILYYRQILMLSIITRIVITYFLSRINYLVVSSVEKL

SEQ ID NO: 170582 - protein, 47 aa, Oryza sativa
  Clone ID: PAT_MRT4530_68895C.1.pep
MATELDPHVGAFQSNTFLLASVVVTGENLLRKGESMVEWGEEAAKEQ

SEQ ID NO: 170583 - protein, 188 aa, Oryza sativa
  Clone ID: PAT_MRT4530_68896C.1.pep
MANLWTRASPQTLAAKSPASHRCRHSSSSTIARRLHPAAAVSRHLRLLAASPRAAHRRHRVPVRRSQPPSVAAPCPLLHHPLSLPRPSRRLSTPLVPTVLQVTGLVLAIGGKPPPSSATAAVLAGRPCTEVVAAHLHCWGKLVVGCPHGRSPSRGSSSPTTLVVILSSVAVGVVCLSPSRMRLRESPS

SEQ ID NO: 170584 - protein, 371 aa, Oryza sativa
  Clone ID: PAT_MRT4530_68897C.1.pep
MAIPRVATALLAGRRRAAADIVFAGVRVHHHQGAARLLQPGNLAAARLWPPPTAFSYGGRVGSLGLGARRGMSGSSGGGGGRSSGGGIPGGDGKRRLEEWTRSVDSQLEEILTELQQLSAAQMNAVKVSTSSFQSLKRSMERTGKVTTAVISLSVTASVYLVLFALYCVGVKMAYIVDADEFAKKFAHSVLDDEEFKAKLDQTADRLGAIAVSAPFRKAQEWFFGKDSSPQDDLDLEASDTWEDWAVSFSFFALSLIRGMPVYENELWMRLYQLGVRRNKENEELLNILVAVGLISKKKKGKLTTYALVEEQYRECIDAGFRPKIVPILKKGMFRVLNFGFFSLNLAVSESGGCQRHKLLVGGLLIRRQML

SEQ ID NO: 170585 - protein, 135 aa, Oryza sativa
  Clone ID: PAT_MRT4530_68898C.1.pep
MCVAVCTVHYLEYLARGRQLQRSRQGRLACVHLLFDKDDVSVPTASRPGSTPLHLAAHAGSLTASRDGALEGSGDRAGVEEAEIARRICVEGEAEGALRDRLCTTPVNYAGGTSALERDCSRYPYPRAQLLVIYA

SEQ ID NO: 170586 - protein, 167 aa, Oryza sativa
  Clone ID: PAT_MRT4530_68899C.1.pep
LQRSRQGRLACVHLLFDKDDVSVPTASRPGSTPLHLAAHAGSLTASRDGALEGSGDRAGAEEAEIARRICVEGEAEGALRDRLWCAGPTNRVFIARAGSPTTQTASAGARRTYNPPSSAPSWWRRGRRVDTEARLRVRRLAAAARQRDARVRGGGEARVRRGGGLSD

SEQ ID NO: 170587 - protein, 1628 aa, Oryza sativa
  Clone ID: PAT_MRT4530_6889C.1.pep
MADKQPPPPSSPGSIKGKALKLGLTDIIDDNVMPIDPEKFTPEQKQEFEATLQQARDQFLNSFMQTRKGTLVQKYKIKVVANNPGTGSSKDGEVKQAPGGSAQLSAKGATDGSPGDQGNNLQGVHGVQGDGAHGAQGDGAQGPQGGNLNQNNELSHDFFNNFQDRVDYAVHHALIYQSGVLVNTLSNMMKTIADGSIAEHQATGPVYLQGGVFPNYRSLTTDVQPSSQAVPSIAPTTQPTAPASTPLPGTSAMAPGQPMNPRLLIREHPQPTGQIVNQPTQDQVAAMFLPPPPIVDPVQQQPIQQTPPIQPIVQPIQQQVVQSAQQTPPRQQPLQPIQQTPPRQRLQPIQQTPVRQQIIQPIQHPGSVNASAGFAAPGGQPAQQFVNQVVPEHLVHHAQPDGTVVPQMVPEHLVRNIQPNLHNYQGGNLSYQYQPPSPQAQYQPRGLAQPQFGSQFGQFEPMQQQPQGVAQQRPWADVIADVMREQFGLKPKETGSLYRQPYPEWFERVPLPNRFKVLDFSKFSGQEGVSTYEHISRFLAQCGEASVVDALRVREMRNKCFSLRLTDAQLADLPFQGMIPPIKEKFSSEDFDSLSHLIQKLTLHEHRSVEVRKSSKKVNHVCPYMYGSDDEEDDSEIAAAEWVRSKKVIPCQWVKSPGKEEKYDFDITKADKIFDLLLREKQIQLPAGHTIPSAEELGKKRYCKWHNSGSYSTNDCKIFRQQIQVAIEGGKIRFDDSKKPMKVDGNHFPVNMVHTAGQAADRARAKGLQVNSAKIINKYQRKYDKQQERHYEEYDDVFDPHWGCEFFRFCWNEGMRLPSIKNCPRCSDIIESSSRSHNRDNRLRQARLPVHQRLGPMSQDRGQEDEVIRENQWYPSGIFMKNQKRRVHRLRSRERFQEVEEEINHRLRKPKPRQEWRVKNQVPVADDVATDEVKKLAKGKSVIAAPINMVFTLPAEFGVDQADVDEVEEELARLVLSPEQAVFEKPEGTENRHLKPLYINGYVNRKPMSKMMVDGGAAVNLMPYATFRKLGRNAEDLIKTNMVLKDFGGNPSETKGVLNVELTVGSKTIPTTQSKMENPSYYFEGVVEGSNVYAKDTVDDLDDKQGQGFMSADELEEIDIGPAGQFLGFLIHERGIEVSQRSVNAIKKIQPPENKTELQEMISKISFVRRLRHYLLSNECTVICKADVVRYMLSAPILKGRVGKWIFSLTEFDLRYESPKAIKGQAIADFIVEHRDDSIGSVEIVPWTLFFDGSVCTHGCGISLVIISPRRACFEFAYTIKPYATNNQAEYEAVLKGLQLLKEVEADTIEIMGDSLLVISQLAGEYECKNDTLMVYNEKCLELMKEFRLVTLKHVSREQNLEANDLAQGASGYKPMIKDVKVEIAAISADDWRYDVHQYLSNPSQSASRKLRYKALKYILLDDELYYRTINGVLLKCLSTDQVKVAIGEVHEGMWYSSIGSQDEVVALTCRVLLADNAIQRAPASAMNPIIKPWPFRGWGIDMIGMINPPSSKGHKFILVATDYFTKCVEAIPLKKVDSGDAIQFVQEHIIYRFGLPQTITTDQSSIFVSDEFVQFADNVGIKLLNSSPYYAQANGQAEASNKSLIKLIKWKISDYPRQWHTRLAEAL

SEQ ID NO: 170588 - protein, 404 aa, Oryza sativa
  Clone ID: PAT_MRT4530_688C.1.pep
MAATHSGSSLLKAVPMLLLFSSGFILGMISIANFPKFYESPLLSPMLHSLVPSSSRPIMQPSPSPETPCVWPPPLPSSTPTPAPSPPSTPTGLMGFLAPSGVTHNMTDEELLWRASMAPRVSRAPYSRVPKVAFLFLVRAKLPLRLLWEKFFAGHGKELYSIYVHSDPHFAASLPTDSVFYGRMIPSQRTTWGDANLVEAERRLLANALLDLSNERFALLSESCIPIFDFPTLYAHLTGSNDSFVDCFDNAGARARYRPALFAPHNITAAQWRKGSQFFEMDRALAVEVVSDERYFPAFRDSCAGRRGCLIDEHYIPTLVSLLRWRRNANRTLTYTEWRPRRPHPRSHGARDVTEELFGKMRGGAGNCTYNGKASDVCFVFARKFSPDALAPLLELAPKVIGFG

SEQ ID NO: 170589 - protein, 210 aa, Oryza sativa
  Clone ID: PAT_MRT4530_68900C.1.pep
MEIPPPSAGGGGGGGKPDRKTTERIRREQMNKLYSHLDSLVRSAPPTVNSIPSHSNSNSKYHQRKLRILGGAAAATTRPDRLGVAAEYIRQTQERVDMLREKKRELTGGGGGGSSSSSGAGAATAAAPEVEVQHLGSGLHAILFTGAPPTDGASFHRAVRAVEDAGGQVQNAHFSVAGAKAVYTIHAMIGDGYGGIERVVQRLKEAIRSN

SEQ ID NO: 170590 - protein, 103 aa, Oryza sativa
  Clone ID: PAT_MRT4530_68901C.1.pep
FFFFIYCFFFFYPFHSFILLFFFFHVFSIHITLLHQKTQDARALRETTSRRRRRRTRTTGRETCKWGRPWRKLSKPARRGKTHRRRLPIGPGADKINSTENRP

SEQ ID NO: 170591 - protein, 1012 aa, Oryza sativa
  Clone ID: PAT_MRT4530_68902C.1.pep
MRLGGWMLRPLNRGLLLPTLSCPVAPHRRGFAAYAAALQWLEDELTSLAILPSVPGVDSFACARQLQGCIARGDARGGRAVHGHVVRRGGVGRLDLFCANVLLNMYGKLGPLASARRLFDRMPERNMVSFVTLVQAHAQRGDFEAAAALFRRLRWEGHEVNQFVLTTMLKLAIAMDAAGLAGGVHSCAWKLGHDHNAFVGSGLIDAYSLCSLVSDAEHVFNGIVRKDAVVWTAMVSCYSENDCPENAFRVFSKMRVSGCKPNPFALTSVLKAAVCLPSVVLGKGIHGCAIKTLNDTEPHVGGALLDMYAKCGDIKDARLAFEMIPYDDVILLSFMISRYAQSNQNEQAFELFLRLMRSSVLPNEYSLSSVLQACTNMVQLDFGKQIHNHAIKIGHESDLFVGNALMDFYAKCNDMDSSLKIFSSLRDANEVSWNTIVVGFSQSGLGEEALSVFCEMQAAQMPCTQVTYSSVLRACASTASIRHAGQIHCSIEKSTFNNDTVIGNSLIDTYAKCGYIRDALKVFQHLMERDIISWNAIISGYALHGQAADALELFDRMNKSNVESNDITFVALLSVCSSTGLVNHGLSLFDSMRIDHGIKPSMEHYTCIVRLLGRAGRLNDALQFIGDIPSAPSAMVWRALLSSCIIHKNVALGRFSAEKILEIEPQDETTYVLLSNMYAAAGSLDQVALLRKSMRNIGVRKVPGLSWVEIKGEIHAFSVGSVDHPDMRVINAMLEWLNLKTSREGYIPDINVVLHDVDKEQKTRMLWVHSERLALAYGLVMTPPGHPIRILKNLRSCLDCHTAFTVISKIVKREIIVIVGQGNHKGYITFYYLLMEAEGLFVPDHPVIAHLVEMKSIVEKLLNAFLLIIMRYLQMLDDFDDDVLRNRQVTKPSKVLVAVVKSNKNKFLQFLKSCDNIVEASTLEEDDLPNEDAHTEGKLNIFNPKQQEQKHFHTEVKKMTMMMTLDHQSTRTLKSMTEKLEQRTEILTVIFLITHWLRLWAILQKKPEVLAE

SEQ ID NO: 170592 - protein, 675 aa, Oryza sativa
  Clone ID: PAT_MRT4530_68903C.1.pep
MPRSSTTRPAAPVRLRRRPLKTPLVVAAAAASSSAAVGLPRGGGPGTPHLRWGAGEREEEENGGEKGNAVGAPGRRSVRRLAAAVWRLRPAEEAPPPASRHAADRACLEHIPRHLQVQLLRKDHVSTRYGLKNETSSPISVLERHSGELHKGQLHLASDVLPITSLENVTKWEPDGIEGIESDGAYVIASQLNLIEEQKGENYVSNLQVELQQTRDRVGKLEAERISAKKQLDHLFKKLTEEKAAWRKREHKKVQAILEDMKADLEHEKKNRRQLEKINIKLVDELKEVKMAANNLLQEYDNERKTRELTEEVCTKLVRELEEHKAEIEGLKQDSLKLRAEVDEDRKLLQMAEVWREERVQMKLVDAKLTLEAKYEELSKLQLDVEAIIASFSDTKGDDTIVQTAKNILQSIESTREQEIKFTYEPPPASDDILAIIEELRPSEELETRETEPCHKHNSPVHESENQQDSPMTDIFLENPTKLYSNRSHYNESDMGDSSSWETISNEEMQGSSSSRNGSEPSVNKICDKISWTSGDDSEAGQNDNLSGELSKAYFADRKPSKKKESAISKFWKSSPLKNCEIFKIDVVEMMNRRSSNERLSNGMHSSNEGANQDAGLSSPSIGQWSSPDSMNSQLNRGFRGCMELVQKQSLKAKLLEARMESQKIQLRHVLNQKT

SEQ ID NO: 170593 - protein, 86 aa, Oryza sativa
  Clone ID: PAT_MRT4530_68904C.1.pep
PERPSAAPAMPKTRTTARRERGIIGGGGRCNRNEMCVGSLPPLRVETSALFCLGGSFFRSSLFVSMNFLLLISSWWHTCIDYICMT

SEQ ID NO: 170594 - protein, 74 aa, Oryza sativa
  Clone ID: PAT_MRT4530_68905C.1.pep
KNTRKQKGKKGSKKLAHHFIPKTGQGRDSLAPPFGEKMAAMPKSGKKKGSDPGETPHWSVAGGKHGGMGFLGGA

SEQ ID NO: 170595 - protein, 145 aa, Oryza sativa
  unsure (1)..(145): unsure at all Xaa locations
  Clone ID: PAT_MRT4530_68906C.1.pep
MSQSTAEFVPILNQTVAWAPFTVMAGNLEKVVAEGYLPCKXLINWWEDVEEDFPTPNTNEIVVFLPFFQFRLGLPTGNFFQGLLHFHGINVHHLNPNSILQIAIFNYMCEGYYGIYPHFAFFCYLYQLKPQPGKKNPTVVGGSGI

SEQ ID NO: 170596 - protein, 188 aa, Oryza sativa
  Clone ID: PAT_MRT4530_68907C.1.pep
MSPADSHDSTSRLLPAKEETACPPTRTCTSAYWRAPPTCSLAYWAIVESSSSVQLATITHLCPPSSILRACPRHSSSCLPPVCLPARRPISLTAPLLACELCRRADGLLTRTPAYYCFFHRRKSQSRNDHALERYFGDLPCVEVIGEPGRYFAETAFTLATPTRVIGKGTRGELREYWIDDGLYGPLN

SEQ ID NO: 170597 - protein, 133 aa, Oryza sativa
  unsure (1)..(133): unsure at all Xaa locations
  Clone ID: PAT_MRT4530_68908C.1.pep
ALWFHVDKMSSAHVYLRFNKGQTIXISEGVLEDCGQLVKANSIQGNKTNNIDVVYTPGYNLKKTXSMDVGQVGFHNSKLVCCFPPPKASTMPPPLLLLFFLLAGVGATTTVEEPPAALSPPHKNATLSEILLR

SEQ ID NO: 170598 - protein, 114 aa, Oryza sativa
  Clone ID: PAT_MRT4530_68909C.1.pep
GPITPSQVRFRGGKLDQLKTHGKKLSPNQFIFFAIPPKNPFPKKIPPSIFLPSFFPVTPKDDLSTTHLFGPPIGFFYQFGFLNNHWWGGNVYKFFFGGVKRDSPGRAANPPPCQ

SEQ ID NO: 170599 - protein, 540 aa, Oryza sativa
  Clone ID: PAT_MRT4530_6890C.1.pep
MASPARPAAASVSGAFGLPADPAAARCSFDQSRRRPEDLQQEKRMVRTFVNVYGGQENYTKEAVMAAVEECMKKQAEGLLHSLEGIGGRLSQLELYCYKLERSIGELRSDVMDYHSEGTVNFRCLEKNLRQVQKSVQILQDKHEISETPNEFSKLQIAHEFPARANEASAFSTFGRENDHSTQVAKHEVAFMPLQQVNAMQSPAVPVQSSNGYILQQLVPVSLSTQPDQQQPSQAAVYYMQSQNPIKCTESEPSESAVHVIQSQIQNPEARVAVDLSQKSSQVTELYPQPQDQRLHLPAQQVESQAWRTQPLVVQPQQYNIQQVPPQLVQQQTSSPQAQSAPQVAVLYPPYSSQKPASATTEPLLRNMVVHSPYSSPQQKHHEAMPSFYGQGNTVLLPSTDLNIQHQQPQPLQQHGLSSCPPQPSKPNHCSVASYAVQGSGQSYSATFKNPSNCAATVVAVLPQHPASGPMAFHHLGPQVVHNQPFGNMFETASVVGYPRDRVESVALPVVTAAQPADSVAMADKLNAGSNVTSPREWSG

SEQ ID NO: 170600 - protein, 154 aa, Oryza sativa
  Clone ID: PAT_MRT4530_68910C.1.pep
MEAQGAIPAAQACSPIGPLEAHRRRFVIPCIAPCNVVASLAHAWPRVTVASSRAIARGLTNHVLQSMATLDFDQNNPIDCDLNNPVDCEMMKMEKDKKNVLEKMSLTMHIHLSLLTIVTAIPTTSPPTPPMPTEKPSLALAMSSSMIHRLHVFQ

SEQ ID NO: 170601 - protein, 64 aa, Oryza sativa
  Clone ID: PAT_MRT4530_68911C.1.pep
TALAPSGIKVKVGAPPTSKASLCTGGSIVSSLSPFQQMWMPKTESDYSGPSTCPQEMLLILRVQ

SEQ ID NO: 170602 - protein, 109 aa, Oryza sativa
  Clone ID: PAT_MRT4530_68912C.1.pep
MGGCRNGGLRPCQCRRRRSSQGMVPRKRRSKATVAAAVREMSRSQRITGGRQLVVLLLLLIITLFVLTQPMIAMASAARALGENDGNPDCVIRDHPAGENGIPPCPPRP

SEQ ID NO: 170603 - protein, 119 aa, Oryza sativa
  unsure (1)..(119): unsure at all Xaa locations
  Clone ID: PAT_MRT4530_68913C.1.pep
IQIGRLEAGAPPKLTGVCAAARTSATGRWEAEARRWWPEAAGLVVGRTAGSGYASATEDLRTAVGAVAEDGXPRTTTAPIGAGGPRGCGGGRRLFTSAAVALRALAASVGRRPRMAAVL

SEQ ID NO: 170604 - protein, 227 aa, Oryza sativa
  Clone ID: PAT_MRT4530_68914C.1.pep
MATPSVLEVRPPALTSISEPLPFFDGTTRLYICYLCPFAQRAWITRNCKGLQDKIELVPIDLKNRPAWYKEKVYPTNKVPSLEHNSKVLGESLDLIRYIDANFEGAPLFPTDPAKREFGEQLISHVDTFTSGIYPTFKGDPIQQTSAAFDYLENALGKFDDGPFFLGQFSLADIAYVSFLERFQIVFSEIFKHDITAGRPKLATWIQEGNKIDGYKQTKVDREEYLE

SEQ ID NO: 170605 - protein, 98 aa, Oryza sativa
  Clone ID: PAT_MRT4530_68915C.1.pep
TRRLAGSPQPNHPIPQTSPPRRGPAGGDADELPSPPPPIREPPRPPCRRGSSPGAEEGKRPRRRPLVWWRGDPAGGAWMKERNPAVASSALARILAAS

SEQ ID NO: 170606 - protein, 69 aa, Oryza sativa
  Clone ID: PAT_MRT4530_68916C.1.pep
MVTSTSSRTGVGLRNPVTAADAAAALLRMPMPSPSQGSALGKVATAHAPAPTTTFVPFLRRAARAHRNE

SEQ ID NO: 170607 - protein, 34 aa, Oryza sativa
  Clone ID: PAT_MRT4530_68917C.1.pep
TLCFKCKGIINLLVPWDLRALVGLGKAPKHLKNH

SEQ ID NO: 170608 - protein, 2351 aa, Oryza sativa
  Clone ID: PAT_MRT4530_68918C.1.pep
MVSSSSPVVNVYPLANYTFGTKEPKMEKDTSVADRLARMKVNYMKEGMRTSVEAILLVQEHNHPHILLLQIGNTFCKLPGGRLKPGENEIEGLKRKLCSKLAVNSPSFPPNWQVGECVAVWWRPNFETVMYPYCPPHITKPKECKKLFIVHLSEREYFAVPRNLKLLAVPLFELYDNVQRYGPVISTIPQQLSRFQFNMQVVDLKARHPDVLLMVEVGYRFRFFGEDAAVAASVLGIIAHPDHSFLTASIPTFRLGFHVRRLVAAGHKVGVVRQTETAAIKAAHGGGAAGTPFARGLSAVYTRATIEAAAGELEGGGAPDEGSRYLVCVVDKEVDAMGTEGFEVKIGVVAIEVSTGEVVHGEFMDGVSRNGLEAVLLGLAPVEVILGTPISSATEKLMVAYAGPTSNVRVERTSRLCFSEGGALAELLSLFEKSGVDAPTVENGRHLMEMNEENNNPRGIEVPLSSSELTVIAPYDWVSICSLGIMAMPELVIHALALSVRYLKGFGMDRIICFGSSFQPFTANTEMSLSANTLQQLELTHPLCDRNQICTRHDAVSEISESIGSQQYSTNNLQDEVDMSCSSSVRSDLSTILSSVLRMLAGTLDIQRGITRIFHCKATAKEGTSNDTPFGLIILVVLDKDEFVGVVQAILTAGKQLQKLVLEDTDTMSSQHRTVHSPLLRRLINTASSCTVLANAATLVSCLNKDAADQGDMLNLFIASVDQFPEVAEGHATVEMAKQKLELLITEYRKQLGLPVDRKVPSSWMKVNSTKKTIRYHTPEVSKNLENLLLAKEKLAVICRTTWNNFLMDFGRYYAQFQATVKSLATLDCLYSLATLAKQNKYVRPNFVRENEASQIHIKDGRHPVLESLLGVNFVPNDTELHANSEYCQIVTGPNMGGKSCYIRQVALITLMAQVGSFVPASSATLHAVDGIYTRMGASDSIQHGTSTFYEELSEASNILHNCSSRSLVIIDELGRGTSTHDGVAIAYATLHYLLKEKKCMVIFVTHYPKILNILREFEGSVGAYHVSYLATRKLLEVADRQMVINNTETKDLGEITFLYKLVAGASDRSFGLNVALLAQLPSSCIERASVMAAKLQQELSEREKNKFCRLMDVPRESSPKELCAQPYQGLAEACHRILFNVTSAQSNDELTDTLSSLREAREIALKAIKGWGRVGMDLSRFTAPRPGLQIGAAGNGFRACSLRRLRYRVCGGNPMGASALGGCGSRSLFYLAPNHGSPLALRTRGRALRCQGNDSLAYVDGPLEGTNGSVVDNTEDEANSSGLDEEKGDDDAENLRDLLQKARKELEVARLNSTMFEEKAQRISESAIALKDRADKAQSDVSSAVTTIQEIISKEADAKEAVRTATMALSMAEARLQLASEALDAKRGSVGPMEVSIDDVEEEALASAQEEIKECQESLSKCEEELRRIQEKKMELQKEVDRLTELAERALLDASKAEEDVANIMVLAEQAVALEMEAAQRANDAELALQKAEKAISSVDAVVELPAPAEEQVSDEEDNVSEVYDYSSDAIDDIPERDEVSNVERLTVGDLAVEGIEQLESSREMSDDESTDKLLVEPQKEAEPDIDKSKQGKKQEIERKESQPSNAPKASLKRSSRFFPASFFSSKADGEFTPTSVFKGLMKSTRKHAPKLVVGIVLLGAGAFFLNRAEKSSQLFQQQEITTSIEEVTSTAKPIVREMRKIPQRVKKLIELLPHQEVNEEEASLFDILYLLLASVVFVPLFQKIPGGSPVLGYLAAGVLIGPYGLSIIRHVHGTKAIAEFGVVFLLFNIGLEDISAYHFLPAAFCGKAKLNEEVLATTAAVGMIAHRFAVLPGPAAIVIGSGLALSSTAVVLQVLQERGESTSRHGRATFSVLLFQDLAVVVLLILIPLISPNSSKGGVGFQAIAEAMGMAAVKAIAAITAIIAGGRLLLRPIYKQIAENRNAEIFSANTLLVIFGTSLLTARAGLSMALGAFLAGLLLAETEFSLQVESDIAPYRGLLLGLFFMTVQHRGFYYLLWNDDKSLILPVGMSIDPKLLLSNFPAISVILGLLIIGKTMLVTFIGRVFGISTIAAVRVGLLLAPGGVRAFVAFGEAVNQGLLSPQLSSLLFLVVGISMALTPWLAAGGQFLASKFEQHDVRSLLPVESETDDLQDHIIILGFGRVGQIIAQLLSERLIPFVALDVRSDRVAVGRALDLPVYFGDAGSREVLHKVGAERACAAAITLDTPGANYRAVWALSKYFPNVKTFVRAHDVDHGVNLEKAGATAVVPETLEPSLQLAAAVLAQAKLPMSEIAATVNEFRNRHLSELTELCATSGSSLGYGYSRVMSISKSKTVTSDDESETVDGALAI

SEQ ID NO: 170609 - protein, 206 aa, Oryza sativa
  Clone ID: PAT_MRT4530_68919C.1.pep
MKSTRKHAPKLVVGIVLLGAGAFFLNRAEKSSQLFQQQEITTSIEEVTSTAKPIVREMRKIPQRVKKLIELLPHQEVNEEEASLFDILYLLLASVVFVPLFQKIPGGSPVLGYLAAGVLIGPYGLSIIRHVHGTKAIAEFGVVFLLFNIGLELSVERLSSMKKYVFGLGSAQVLATTAAVGMIAHRFAVLPGPAAIVIGSGLALSS

SEQ ID NO: 170610 - protein, 370 aa, Oryza sativa
  Clone ID: PAT_MRT4530_6891C.1.pep
MDNVLLGKVAARGNLPCLEKIADGEVDKEVTIVGPGPGSVAGAEMKGGCAADGDGGRAGARSAKAVFLMTEKPPPSPSSASPGSVKKKIQQLDQSEVNEGNVMTITPDKLTPDQKKEFEAMMQQAWNQFLNLFMLTRKGTVVQKYQVRVVADVPGTGSSKDRGLKQALDSSAQPSDKGTADGSAQENQGDHSQGIHGVQDAIKTADYLADSPARLDESIDWETYSESAEWVRSKKVIPCQWVKNYGKEERYDFDIAKADKIFDLLLREKQIQLPAGMRLPSIEDCPECANVAKCSSRLYIKGNRLRHARVPVHQILGPEVEQEINHRLKKTKPKQEWRVKKQAPVTDEAVADEAKRLAKGKSVVIASVNM

SEQ ID NO: 170611 - protein, 66 aa, Oryza sativa
  unsure (1)..(66): unsure at all Xaa locations
  Clone ID: PAT_MRT4530_68920C.1.pep
XHIFPFTGFXMDQSPXPFKLIRVTGLDWIXLIIERRXTSXTASYXIWERGGGCRTHRNLXEAWPSR

SEQ ID NO: 170612 - protein, 2505 aa, Oryza sativa
  Clone ID: PAT_MRT4530_68921C.1.pep
MVSSSSPVVNVYPLANYTFGTKEPKMEKDTSVADRLARMKVNYMKEGMRTSVEAILLVQEHNHPHILLLQIGNTFCKLPGGRLKPGENEIEGLKRKLCSKLAVNSPSFPPNWQVGECVAVWWRPNFETVMYPYCPPHITKPKECKKLFIVHLSEREYFAVPRNLKLLAVPLFELYDNVQRYGPVISTIPQQLSRFQFNMWASGSPPTSPVSGVRRGACRRAPRKPLPPIAAHVPPFPAPTSTAIAMGKPKQQVLSRFFSPKPRPSAPATADDPPPPPRPPAEPPVAAVVSFSPAKRARALSVSPKTTAKRAKPSPPPSDYVRRRLLEPPRPPPPAAVNPSGKAYTPLEQQVVDLKARHPDVLLMVEVGYRFRFFGEDAAVAASVLGIIAHPDHSFLTASIPTFRLGFHVRRLVAAGHKVGVVRQTETAAIKAAHGGGAAGTPFARGLSAVYTRATIEAAAGELEGGGAPDEGSRYLVCVVDKEVDAMGTEGFEVKIGVVAIEVSTGEVVHGEFMDGVSRNGLEAVLLGLAPVEVILGTPISSATEKLMVAYAGPTSNVRVERTSRLCFSEGGALAELLSLFEKSGVDAPTVENGRHLMEMNEENNNPRGIEVPLSSSELTVIAPYDWVSICSLGIMAMPELVIHALALSVRYLKGFGMDRIICFGSSFQPFTANTEMSLSANTLQQLELTHPLCDRNQICTRHDAVSEISESIGSQQYSTNNLQDEVDMSCSSSVRSDLSTILSSVLRMLAGTLDIQRGITRIFHCKATAKEGTSNDTPFGLIILVVLDKDEFVGVVQAILTAGKQLQKLVLEDTDTMSSQHRTVHSPLLRRLINTASSCTVLANAATLVSCLNKDAADQGDMLNLFIASVDQFPEVAEGHATVEMAKQKLELLITEYRKQLGLPVDRKVPSSWMKVNSTKKTIRYHTPEVSKNLENLLLAKEKLAVICRTTWNNFLMDFGRYYAQFQATVKSLATLDCLYSLATLAKQNKYVRPNFVRENEASQIHIKDGRHPVLESLLGVNFVPNDTELHANSEYCQIVTGPNMGGKSCYIRQVALITLMAQVGSFVPASSATLHAVDGIYTRMGASDSIQHGTSTFYEELSEASNILHNCSSRSLVIIDELGRGTSTHDGVAIAYATLHYLLKEKKCMVIFVTHYPKILNILREFEGSVGAYHVSYLATRKLLEVADRQMVINNTETKDLGEITFLYKLVAGASDRSFGLNVALLAQLPSSCIERASVMAAKLQQELSEREKNKFCRLMDVPRESSPKELCAQPYQGLAEACHRILFNVTSAQSNDELTDTLSSLREAREIALKAIKGWGRVGMGLSRFTAPRPGLQIGAAGNGFRACSLRRLRHRVCGGNPMGASALGGCGSRSLFYLAPNHGSPLALRTRGRALRCQGNDSLAYVDGPLEGTNGSVVDNTEDEANSSGLDEEKGDDDAENLRDLLQKARKELEVARLNSTMFEEKAQRISESAIALKDRADKAQSDVSSAVTTIQEIISKEADAKEAVRTATMALSMAEARLQLASEALDAKRGSVGPMEVSIDDVEEEALASAQEEIKECQESLSKCEEELRRIQEKKMELQKEVDRLTELAERALLDASKAEEDVANIMVLAEQAVALEMEAAQRANDAELALQKAEKAISSVDAVVELPAPAEEQVSDEEDNVSEVYDYSSDAIDDIPERDEVSNVERLTVGDLAVEGIEQLESSREMSDDESTDKLLVEPQKEAEPDIDKSKQGKKQEIERKESQPSNAPKASLKRSSRFFPASFFSSKADGEFTPTSVFKGLMKSTRKHAPKLVVGIVLLGAGAFFLNRAEKSSQLFQQQEVTTSIEEVTSTAKPIVREMRKIPQRVKKLIELLPHQEVNEEEASLFDILYLLLASVVFVPLFQKIPGGSPVLGYLAAGVLIGPYGLSIIRHVHGTKAIAEFGVVFLLFNIGLEDISAYHFLPAAFCGKAKLNEEVLATTAAVGMIAHRFAVLPGPAAIVIGSGLALSSTAVVLQVLQERGESTSRHGRATFSVLLFQDLAVVVLLILIPLISPNSSKGGVGFQAIAEAMGMAAVKAIAAITAIIAGGRLLLRPIYKQIAENRNAEIFSANTLLVIFGTSLLTARAGLSMALGAFLAGLLLAETEFSLQVESDIAPYRGLLLGLFFMTIFFLVQHRGFYYLLWNDDKSLILPVGMSIDPKLLLSNFPAISVILGLLIIGKTMLVTFIGRVFGISTIAAVRVGLLLAPGGEFAFVAFGEAVNQGLLSPQLSSLLFLVVGISMALTPWLAAGGQFLASKFEQHDVRSLLPVESETDDLQDHIIILGFGRVGQIIAQLLSERLIPFVALDVRSDRVAVGRALDLPVYFGDAGSREVLHKVGAERACAAAITLDTPGANYRAVWALSKYFPNVKTFVRAHDVDHGVNLEKAGATAVVPETLEPSLQLAAAVLAQAKLPMSEIAATVNEFRNRHLSELTELCATSGSSLGYGYSRVMSISKSKTVTSDDESETVDGALAI

SEQ ID NO: 170613 - protein, 85 aa, Oryza sativa
  Clone ID: PAT_MRT4530_68922C.1.pep
LLPLTACLMECRIKQDLKIHCSDEDDYFLNSGDLAGIPVVGSDNEDEQDFSSKDNLVSSIHTDDSLEVERRVTQHESDYEHEIQI

SEQ ID NO: 170614 - protein, 88 aa, Oryza sativa
  Clone ID: PAT_MRT4530_68923C.1.pep
MERRMLKHRQAVSKRRSVHEKTDVEQAKDRATRAQEKTRSNVEEERRRPMADGQDHEQAGWAEELDDDRKEQVSGGPVKVLGDGRKSG

SEQ ID NO: 170615 - protein, 442 aa, Oryza sativa
  Clone ID: PAT_MRT4530_68924C.1.pep
MESCFVTPHEDTPETIEEEVKEMESCFVTPHEDTPRQGLWLSPLDIVMVSRGHTPTVYFYQRDTATVAADFFEVGRLKEAMAKALVAFYPLAGRLSVDGDGRPEIDCNAEGALFVVAQSKLTVDAFSDLKPSPELRRLFAPRIEPASIMLGVQVTFLSCGGVALGTVLHHVAIDALSAFHFFQTWSSFCRDGEAAMLELPCHERTLLRTRSPPIVHPDVHSMFSLKLNFCEPSDPISTKIFVISKNQLDALKQICGGLSTFCAMSALVWQCMCIARQLPLDAETRVIFPVNIRRRVKPPLPDRYFGNALVDLKVASTVRDIVLGTLDVTAAQIKNALGRLDDEMLQSAIDYNEMAGMPNKHTKGNLPDTELRMVSWLGMPVYDADFGWGKPEMMSRAESVRGGFVYMMDGIDNDGGGVRVLMCMEARKMEEFERLFYAKFAQ

SEQ ID NO: 170616 - protein, 133 aa, Oryza sativa
  unsure (1)..(133): unsure at all Xaa locations
  Clone ID: PAT_MRT4530_68925C.1.pep
AKKPYESFPFSHEFQTKVSSDDAATFQISTKXXPNSFESXXPFPPPACFRVLPPFLPNSICEYRCLDSQARARAAAPDRAAPVSSPPPSPAXLXFGRRRRRWXACCSVSLDPRVCCAGSSFVRCDGXEGXRKK

SEQ ID NO: 170617 - protein, 63 aa, Oryza sativa
  unsure (1)..(63): unsure at all Xaa locations
  Clone ID: PAT_MRT4530_68926C.1.pep
LNPTTCIELHCRNRFNRLTLSDSNSADSGRSRFGLQLIFTLFPGQSLSRFLLHIXSLDYQIGS

SEQ ID NO: 170618 - protein, 527 aa, Oryza sativa
  Clone ID: PAT_MRT4530_68927C.1.pep
MATLLSKLLALPQQWQLLLLLLLLPIASLLLVIGRNTGGRRRRRHLRLPPGPARLPVLGNLLQLGALPHRSLRDLARRHGPVMMLRLGAVPAVVVSSPEAAQEVLRTHDADCCSRPSSPGPMRLSYGYKDVAFAPYDAYGRAARRLFVAELFSAPRVQAAWRARQDQVEKLIGKLTRPEPEPVELNDHIFALTDGIIGAVAFGSIYGTERFAGGGRKRFHHLLDDVMDMLASFSAEDFFPNAAAARLFDHLTGLVAHRERVFQQLDAFFEMVIEQHLDSDSSNAGGGGGNLVGALIGLWKQGKQYGDRRFTRENVKAIIFDAFIGGIGTSSVTILWAMAELMRSPRVMRKVQAEIRATVGDRDGGGMVQPDDLPRLAYLKMVVKETLRLHPPATLLMPRETMRDVRIGGYEVAARTRVMVNAWAIGRDAARWEEAEVFDPDRFEAKRVEFNGGHFELLPFGSGRRICPGIAMGAANVEFTLANLLHCFDWALPVGMAPEELSMEESGGLVLHRKAPLVLVPTRYIQL

SEQ ID NO: 170619 - protein, 106 aa, Oryza sativa
  unsure (1)..(106): unsure at all Xaa locations
  Clone ID: PAT_MRT4530_68928C.1.pep
ARLHATTGDRGLGRAIREHLCEEDGEANSPTQRTTTXDDERRPATRSDGGSARINFGDGAPAVFSGCEGADGVLLLLANPTVATEGGGDDHSSGAARLKQRRRRQR

SEQ ID NO: 170620 - protein, 27 aa, Oryza sativa
  Clone ID: PAT_MRT4530_68929C.1.pep
FFFFFFFFFFFFFFFFFFFFFFFFLRI

SEQ ID NO: 170621 - protein, 1366 aa, Oryza sativa
  Clone ID: PAT_MRT4530_6892C.1.pep
MAPRAIKATILKESMAYKPSVQAVPSVAPTTQPTAPASTPLLATLAMTPGQPVNPRLLTRDLPQHGGKAMNRLTQDQVAAMFLPPPPIVDPVQQQPIQQTPPIQPVVQPIQQQQTPPRQQPQQPIQQTPLRQQIVQLIQHPGSVNASAGFAVPGGQPVQQFVNQVIPEHLVHRAQPDGTVIPQMVPEHLVRNIQPNLHNYQGSNLSYQYQPPSPQAQYQPGGLAQPQFACQYGQFESMQQQPQGATQQRPWADVIADVMREQFGLKPKETGSLILSAFTWFSSLPCGSISSWADLVKQFHIYFYSGVHEMKLSDLTAIKQRHDEPVHEYIQRFREMRNNCFSLSLTDAQLADLAFHGMIPPIREKFSSEDFDSLLHLIQKVRSKKVLPCQWVKSSGKVEKYDFDITKADKIFDLLLREKQIQLPVGHTIPSAEELGKKRYCKWHNSGSHSTNDCKVFRQQIQVAIEGGKIRFCWNEGMRLPFIENCPGCNDIVESSSRSYSRADEAKRLAKGKSIVAAPINMVFTLPAEFGIDQADVDEVEEGSAKLVLSPEQAIFEKPEGTENRHLKPLYINGYVNGKPMSKMKVDGGAAVNLMPYATFSKLGRNAEDLIKTNMVLKDFGGNPSETRGVLNVELTVGSKTIPTTFFIIDGKGDKIEIVPADSQSKMENPSYYFEGVVEGSNVYAKDTVDDLDDKQGQGFMSADELEEIDIGPDDRPRPTFISKNLSLEFRTKLIELLKEFRDCFAWEYYEMPGLSRSIVEHRLPIKPGVRPRQQPPRRCKADMLEPVKAEIKRFIVPVIKKNGKVRVCIDFRDLNKATPKDEYPMPVADQLVDASAGNKILSFMDGNAGYNQIFMAEEDIHKTAFRGPGAIGLFEWVVITFGLKSAGATYQRAMNYIYHDLIDWLVEVYIDDVVVKSKEVEDHIADSRKVFERTRKYGLKMNPTKYVFGVSTGQFLGFLVHERGIEVTQRSVNAIKKIQPPENKTELQEMIGKINFVRRFISNLSGRLEPFTPLLRLKADQQFTWGAEKQKALDNIKEYLSSPPVLIPSQKGIPFRLYLSAADVVRYMLSAPILKGRVGKWIFSLTEFDLRYESPKVIKGQAIADFIVEHREDSIGSVEIVPWTLFFDGSVRTHGCGIGIVIISPRGACFEFAYTIKPYATNNQAEYEAVLKGLQLLKEVKTDTIEVMGDSLQVISQLAGEYECKNDTLMVYNEKCLELMKEFRLVTLKHVSREQNLEANDLAQGESGYKLMIKDVKVEIAAMSADDWRYDVHQYLSNLSQSASRKLRYKALKYTLLDDELYYRTIDGVLLKCLSADQAKVAIGEVHERICGTHQSTHKMKWLLRRTGYFWPTMLEDCFRYYKGC

SEQ ID NO: 170622 - protein, 119 aa, Oryza sativa
  Clone ID: PAT_MRT4530_68930C.1.pep
MRQRKLWWIGTDRRLIKINALQRPSREGSLKGGSAAEPCGRGHLKERGGNEQEVDKRVMAKGELADERESTATSPEGMGHRPAKLLEEHSSWNKHLDQLLSMPEMRRKDDELYCKYFEV

SEQ ID NO: 170623 - protein, 513 aa, Oryza sativa
  Clone ID: PAT_MRT4530_68931C.1.pep
MALWLKLFLSVFLPVAALVAVAVLVYRRRSSSSRNAQPELPESVAGGGGGGDPAVSPGLGKLNIRYNATSGRAGLRFQQLHHHHHGHVDVRHHHRGGAGAGGAQQGPFQWADHPRLVTEAAENGWAQFVFAVAPPRTRSASSSPLWGLCPACDSGTSRDMADAAWEVPAGSSERMQAVRLNPVVAAAAAAVSASAKKWLPGSIPSPLRGGDHDAAGNSSALCLARMSLPLPGPPLAGAPFPQDAYFEITIIYLNTRRPEWSASRASRRGRDGSSESDRAKLISFAPDAKNAAQETRAATKADDHHDKQRHTVMSFGLAAAASAAPPRPSLAGTYASSIGFHSNGAVYLDGMKLVYESEKSSWAGVDKVVGCGFEPAKRKVFFTVDGQLVHAVSCNADAFSTPMYPVLASSFDVMALVNLGQGKFRYAPANARRTANPCFLRAASAGDDGRSGGSLGLDFDDSGDLFSMGRVDSGWLETASRMSKSRKENGGGGGASAGDPDADSDLFEISLRD

SEQ ID NO: 170624 - protein, 82 aa, Oryza sativa
  Clone ID: PAT_MRT4530_68932C.1.pep
MAAEKGSPLPKFGEWDVNDPASAEGFTVIFNKARDEKKTGGNSQGQDLAAKSEQPSGQGLYPAKPNSSKKWFCCMQPTAAES

SEQ ID NO: 170625 - protein, 108 aa, Oryza sativa
  Clone ID: PAT_MRT4530_68933C.1.pep
MERVAKLASERAVVVFTASNCGMCHAVTSLLVGELGVNAAVHELDKDPRGRDMERELARRLNGGGGGGRALPAVFVGGNLVGGANRVMSLHLAGELVPMLKNAGALWL

SEQ ID NO: 170626 - protein, 29 aa, Oryza sativa
  Clone ID: PAT_MRT4530_68934C.1.pep
MGSCKPLWVDHCICGIELSKVMRDRDEFR

SEQ ID NO: 170627 - protein, 55 aa, Oryza sativa
  Clone ID: PAT_MRT4530_68935C.1.pep
MSTNPIPIRLKSWNVPPGISNASCGRVAVTIEETFEIGHLLFQCRHINPEFVELL

SEQ ID NO: 170628 - protein, 99 aa, Oryza sativa
  unsure (1)..(99): unsure at all Xaa locations
  Clone ID: PAT_MRT4530_68936C.1.pep
PLAENKYKMEENRXQNRQSNNRTLSRIRLADKWAENIKLTQPXSPKFTSLWKGAKEEATCRNWARSAQHMFWLNPSWLHWMQGFDGRLRLAPYDGWRVL

SEQ ID NO: 170629 - protein, 164 aa, Oryza sativa
  Clone ID: PAT_MRT4530_68937C.1.pep
MSDHVSVMDRKTVSAFQAKKSREVSFVVIEPVQGRSDTSVPPNLEVQQDTIVRLMHIQIHYKTAPFTGWFQFGIIGFGGATAQHRWHRRRYLRFINRSCRQYNPMTKEAPNRQMIILGTESLSSTEIFAIGNGDCCINRRSKRGESWSSGKQFVSSETARTHNY

SEQ ID NO: 170630 - protein, 136 aa, Oryza sativa
  unsure (1)..(136): unsure at all Xaa locations
  Clone ID: PAT_MRT4530_68938C.1.pep
RPYSSTEEHTIGSRMHXLVPTTLMLTDPAGQTYAYDSPPCLEDINIGQMIGLKGEQHLXDIGLEEHAFSMGFQACGALELWNYPRVLRDLTAQNLDGTNRSDTINLAVLGAYRDRGRNVPWHXEVRRRLFVISIQS

SEQ ID NO: 170631 - protein, 64 aa, Oryza sativa
  unsure (1)..(64): unsure at all Xaa locations
  Clone ID: PAT_MRT4530_68939C.1.pep
TRAPPGHVSFCYPRALQDTCLNXWGGQPENLKXAQDALLSPPKATSCGGRLGTVHQRIGEGPPR

SEQ ID NO: 170632 - protein, 121 aa, Oryza sativa
  unsure (1)..(121): unsure at all Xaa locations
  Clone ID: PAT_MRT4530_6893C.1.pep
RRSXANRSTGREGEVEYHDEXRGAXTSSSXAIMATTKNAVLAYLXXVXTPSPLLPXASAXSPSLXGSSSSLFSXISLPLPAVVVVXVXERASYRVVGYGFSXSXGXWLKGDXXXSAXXYSL

SEQ ID NO: 170633 - protein, 169 aa, Oryza sativa
  Clone ID: PAT_MRT4530_68940C.1.pep
LIQTEEQIEHQISQEEDTETGHHNHAGEVGFADADHPIKRYAACGDTNGGSIDGRHLHHSAHAGAGGVPAAAAAAAMRRCPPRRRGGAEVASSVCVRRSAADMSSALGLAATAGGAQDVLQPLPVEDPASPWPPISARACSLRVAGGGTGHVAERERVGGEGAGAGGCC

SEQ ID NO: 170634 - protein, 93 aa, Oryza sativa
  Clone ID: PAT_MRT4530_68941C.1.pep
AAPPFLQSGVFLVKNPQVWHHLAVVAPPSPYQDINIVQAIAQQLHLQQFGDLHFDGNLAQAQALLAFNAPSKYGIPPRYYGAPSTITPLAPPP

SEQ ID NO: 170635 - protein, 270 aa, Oryza sativa
  Clone ID: PAT_MRT4530_68942C.1.pep
LIQTEEQIEHQISQEEDTETGHHNHAGEVGFADADHPIKRYAACGDTNGGSIDGRHLHHSAHAGAGGVPAAAAAAAMRRCPPRRRGGAEVASSVCVRRSAADMSSALGLAATAGGAQDVLQPLPVEDPASPWPPISARACSLRVAGGGTGLCTVLPAYMLADGGEWIRDVLLRSTSAGDVDRRGSGHGSKRVLMGEFWLTSFFSMYGDPIRSESDRAKSPPCLILTVLPKSDRKPIKTSDFRSTPYENQLISTSFYNPRSSGFTKSDWFS

SEQ ID NO: 170636 - protein, 88 aa, Oryza sativa
  Clone ID: PAT_MRT4530_68943C.1.pep
DIHLPVNKIPVLALSFSFPNRETHSFFYDLTGVVKKKHRDSFSMRLVAIPSPHIENLILWCLPCGARNSDTGCTASNQQKHRIACLTL

SEQ ID NO: 170637 - protein, 55 aa, Oryza sativa
  Clone ID: PAT_MRT4530_68944C.1.pep
HLGLTGTKCLIYPADLPCYRFIFEIIIFLLSDDACPNGDQTSQCCGQGRPRYIVT

SEQ ID NO: 170638 - protein, 124 aa, Oryza sativa
  Clone ID: PAT_MRT4530_68945C.1.pep
GPLDPRGSLGFVVPPAGPSTFFPPFIGFSASGAFRGFKGSGIRPFKGGDPPKVFPRGRFGAPYFPGGLPYQGGLVPPFRGPSFRVMFFFGEELFGSPCQPGLFWFFRERFFCPVSKEEPFAPKW

SEQ ID NO: 170639 - protein, 46 aa, Oryza sativa
  Clone ID: PAT_MRT4530_68946C.1.pep
MNAFRLAGDMTHIMSVLVLLLKIHTIKSCADQVYADLSHGTVKVFP

SEQ ID NO: 170640 - protein, 78 aa, Oryza sativa
  Clone ID: PAT_MRT4530_68947C.1.pep
MAEDLEQPSSDRRGGGRMPAAAAAAAGDRQKEPWERRRSKRPICADVCACFFTLIGIAAVVLVFVLAYKCFRTTCYKL

SEQ ID NO: 170641 - protein, 185 aa, Oryza sativa
  Clone ID: PAT_MRT4530_68948C.1.pep
TVVHQYSFPCDGPGRGGTCDISAWDGFYLAVFWMLNTIGWVTFYWHWKHITLWQGNVSQFNESSTYLMGWLRDYLWLNSSQLINGYNPFGMNSLSVWAWMFLFGHLVWATGFMFLISWRGYWQELIETLAWAHERTPLANLIRWRDKPVALSIVQARLVGLAHFSVGYIFTYAAFLIASTSGKFG

SEQ ID NO: 170642 - protein, 79 aa, Oryza sativa
  Clone ID: PAT_MRT4530_68949C.1.pep
LQGIKGRGHLKSWAKWPIPTSKKKLKNVSQKNLKGPPFSVGWRQGGDSKSKGNLGGDWRTHQQLAVFPKGKPKHHKVPP

SEQ ID NO: 170643 - protein, 65 aa, Oryza sativa
  Clone ID: PAT_MRT4530_6894C.1.pep
MTALGFMTALGLTPSTRRYAPWLPSGSRRSLAAPSPAAAVPTSRRTGCARSSPAVPWMLPPVRLE

SEQ ID NO: 170644 - protein, 69 aa, Oryza sativa
  Clone ID: PAT_MRT4530_68950C.1.pep
MEAIFNSLILYYIFRPVADLVQKRMHAMKDGERTKDGLLGILLESSTRHADENGHSCPGMTIDKVMEEC

SEQ ID NO: 170645 - protein, 209 aa, Oryza sativa
  Clone ID: PAT_MRT4530_68951C.1.pep
MTGRGGGSRGRRGSSRRRRGSGSSAVLTRRDLLLPRRRSRAARDVGLGARRRQRGDGAGRSVGGRGRRGTRARDARAWHGAAEEAMRRRGEKVRRRGDDAGRRAKVDDRSDARWRRVGEGGGDRGGGRRAWLARRRCGGGASVAQGGGRRTRRGRRRSGRGEEIDSREERARDGEEIDTIGYGNRMVEITRVCQMRLLCQESRPPLRIF

SEQ ID NO: 170646 - protein, 477 aa, Oryza sativa
  Clone ID: PAT_MRT4530_68952C.1.pep
MASAERSKKLRILFIPFFATSHIGPFTDLAVRLAAARPDIVEPTIAVTPANVSVVRSAVKRHGSVASSMVSIAKYPFPDVAGLSPGVENLSTAGDEGWRIDNAAFNEALTRPPQEAVIREQSPDVLITDSHFSWIVYIAEGLGMACFRFCVIGFFSILAMRLLAGAAADANGSDSESLTAAGFPGPKLQIPRSEVPDFLTRQQNFDKFDMRKLQQSQDRCHGIVVNSFLFLDKPYCEKFVCNGFAKRGYHVGPLCLPKPPAVGNVGEPSCISWLDSKPSRSVVYICFGTFAPVSEEQLHELALGLEASGKPFLWAVRAADGWAPPAGWEERVGDRGLLVRDWVPQTAILAHSATAAFLTHCGWNSMLEGATAGVPLLTWPLVFEQFITERVWDGPRSVRYEEKTVVPALTLAQTVARFLEPGGTGDAARIRAQELAAEAHAAVAEGGSSYDDLRRLIDDMVEARAAAGGVAPARQPQ

SEQ ID NO: 170647 - protein, 204 aa, Oryza sativa
  unsure (1)..(204): unsure at all Xaa locations
  Clone ID: PAT_MRT4530_68953C.1.pep
MAGWGLGSGDGDGNLDLATRDSQQRGVACGRQWPVCRSGMVWRAAIAAAAADRSGGTGGDTYLQMTAIVTGGGRRGTRDSGRGDGSEETARVAASAVEGGAGRGTRGAGHGAAEEAMRRRGEEATQGGGRRWMIDPMRGGGALERAAAIAEEAGGRGWYSLNTHELKWARPFXQHAAGRQEDGVRPRREHAYVRLRDTVVLLAV

SEQ ID NO: 170648 - protein, 379 aa, Oryza sativa
  Clone ID: PAT_MRT4530_68954C.1.pep
MTTHRVLEYFLDHVGVRAQGIQIGGDLREQVWLDGAAAGYVVRLDIAGFSKDEVDVRVNGATGRVTVLGQRPAAAGPHVRLRRVIQLPPTADSDRVAARFVGTTLFLTVPKKRPAAAAAATGVVMATTMEVAETETETEKKKERAARWDSGSVVAAAAAAAAAFALGVVVSHGILLYTRNVFSVRGFGPSSTDQCVARLRRSADAVSPNRDHRRERRSLEPSRAPPPPSHQRTAAAKVDSWPPLAVTLPEFLAPPSHWPLPTFPSRRTHARGSPPRPCFRRRRAQPQFRRRPFSPQPLALPPSLSPGETPRCASAAARLAGRARAVPPIPPPHGRRRRPPSRRLSLIRAGGWNRLDSLLLPVSAPHSGSPPFAGAPRPP

SEQ ID NO: 170649 - protein, 921 aa, Oryza sativa
  Clone ID: PAT_MRT4530_68955C.1.pep
MAEEPSPSPSSSCAKHHRSPDPADPAASPKRRRRHHRRRRDVDDDDESPLADADRPPAAEDVEEGEILDDAMDVDAVPDAAPQLSSGNHAHMNSDADATVLHASRLPTHSSSRDETKSNHTAHEPESGGDADDTKGDRQSQRVPKSPLLTREKERKHKDEHRKSYPKDSHSKEQSRRSPSRHHSSQDHARHHSRSRDTGAEANGSRASTREDSDRDSNGRNSKHGRHATRSRDNETERSSSYAVRDEAYDERERYKHERRHRSNPVDRDKVDLHELTHRDRERSSSRSRSDRRESAHHIRDESRESERRSSSSRHKDNERRDRSKDRYKESDKVDSGHERDKTRDDRDRGRHKDLESRKRRNGEAKDRDDRHKDSTRSKYSTSDSHKHRSRSRERGRDAERRGQRSEELKENTFREEDEEEYQEKIEQQLAMQEEEDPEKIKEEARRRKEAIMAKYRQQQLQKQQLESLPRSNDEEVIMQILKSDNDSRFVASEEAENKHDSSDAIVGETDFTVGKSPAHNDGAGTLGNQRTTGVSGLGEGTPKSERSADMFCDDIFGESPAGIRKLGKDDGLRIEKNALHDNWDDAEGYYTYRFGELLDGRYEITAAHGKGVFSTVVRAKDLKAGKDDPEEVAIKIIRNNETMYKAGKQEVSILEKLASADREDRRHCVRFISSFMYRNHLCLVFESLNMNLREVLKKFGRNIGLKLTAVRAYSKQLFIALKHLKNCKVLHCDIKPDNMLVNEAKNVLKLCDFGNAMLAGMNEVTPYLVSRFYRAPEIILGLPYDHPLDMWSVGCCLYELYTGKVLFPGPSNNDMLRLHMELKGPFPKKMLRKGAFTMQHFDQDLNFHATEEDPVTKKAVTRMILNIKPKDIGSLISNFPGEDPKMLSNFKDLLEKIFVLDPEKRITISQALSHPFITGK

SEQ ID NO: 170650 - protein, 1946 aa, Oryza sativa
  Clone ID: PAT_MRT4530_68956C.1.pep
MAEPAKAHDLSPSMSGDDGEPNPRRRARTPPPPPRQSPRREKALERAEGSATSTPTGGGEGRRDGERRLLVYGDGSTPQGALQAAGALLRHPPVAHDPESPAQRWLDDVAKLVMTARQRLDAGGRSSATKASGAATTGSASSRRRARRAAAAVRHSAATPPSTPPTREDLRGEPDARISIERRRNGRRAPHATEGASSSGVSPHHGRGDQPSVPPVGGVGCRAFVASLRNVRWPPRFRPTIAEKYDGSVNPAEFLQVYTTGIEAAGGDDRVMANFFPMALKGQARGWLMNLPPASVHSWEDLCQQFTMNFQGTYPRLGEEADLHAVQRRDDESLRSYIQRFCQVRNTIPCIPAHAVIYAFRGGVRHNRMLEKIASKEPQTTAELFQLADRVARKEEAWTWNPSGSGVAASAAPGSAAQIGRRDRRRKKRSAHTDDEGHVLAVEGASRATRKGRPAGGKKNEAGAPNRERPTGKWCTVHNTSLHDLADCRAVKSLAERTRKWEEERRQERREGKSPAVPSGNRRSEAKQKAPAEDIDDGDDDLGFQEPGATIATVDGGACAHVSRRSFKAMKRELLAAAPTHEATCRAWWSELGRVLIDGGAALNILSPAAFDAIKAPGMVLRPSQPIIGVTPGHTWPLGHIDLPVTFGGSANFRTERVNFDVADLSLPYNAVLGRPALVKFMAAVHYAYLQMKMPVPGGPISVHGDLKVALTCLEQRADHLAAASKPEGGDERLGASAPATPRQRMITGDEVPEDALVSFLRANADVFAWRPADMPGVPREVIEHRLAVRPGARPVRQKVRRQAPERQAFIREEVARLLEAGFIREVIHPEWLANPVVVPKANGKLRMFIDYTDLNKACPKDPYPLPRIDQIVDSTAGCDLLCFLDAYSGYHQIRMAREDEEKTAFITPIGTYCYTTMPFGLKNAGPTFQRTTRISLGNQLGRNVEAYVDDLVVKTRNQEMLLSDLAETFESLRSARIKLNPDKCVFGVPAGKLLGFLVSARGIEANPEKIQAIERMRPPSKLRDVQCVTGCMAALSRFISRLGEKALPLFKLLKRSGPFTWTEEAENALTQLKAYLSSPPVLVAPEPDEPLLLYLAATPQVVSAALVVERDENNSHFTLPHPVPTWPGREKGGEAPEPNGGPRPPTTGVGPLPACQTVLGAPDPQEGPEATVGRPHLSPFDPEANPVLTRPGKEQGEEAPKPNGGLRPLTTEVGPLPAFPTTPGAPDPQDGPEATVGRPPLLSSDPEVISTEDKCAPRGCLDEECPRDAAPSEEDRPHRKVQRPVYFVSEALRDAKTRYPQAQKMLYAILMASRKLRHYFQAHRVTVVTSYPLGQILHNREGTGRVVKWAIELSEFDLHFEPRHAIKSQALADFVAEWTPAPEPVSIPEASTDPSQLPHTAHWVMQFDGSLSLQGAGAGVTLTSLSGDVLRYLVRLDFRATNNMAEYEGLLAGLRVAAGLGIRRLLVLGDSQLVVNQVCKEYRCSDPQMDAYVRQVRRMERHFDGIELRHVPRRDNMIADELSRLASSRAQTPPGAFEERLAQPSARPDPLGETDAPDRPPRPVGVQASGPEGSAPNSLRLIAWIAEIQAYLTDKTLPEDREGSERVHRISKRYVLVEGTLYRRAANGILLKCIPREQGVVLLADIHEGECGAHSASRTLVGKAFRQGFYWPTALNDAVDLVRRCRACQFHAKQIHQPAQALQTIPLSWPFAVWGLDILGPFRRAPGGFEYLYVAIDRFTKWPEAYPVIKIDKHSALKFIKGITARFGVPNRIITDNGTQFTSELFGDYCEDMGIKLCFASPAHPRSNGQVERANAEILKGLKTKTFNILKKHVDSWIEELPALRRDDLDYLEERRRRAALRAARYQQSLRRYHQRHVRARSLCVDDLVLRRVQTRAGLSKLSPMWEGPYRVVGVPRPGSIWLATGDGTELPNPWNIEHLRRFYP

SEQ ID NO: 170651 - protein, 545 aa, Oryza sativa
  Clone ID: PAT_MRT4530_68957C.1.pep
MTAQRRLGAGGWSSATKTSGAATTGSVSSRRRARRAAAVARHSAATPSSAPPTREDQRGGPDARIDIERRRNGRRAPHATEGASSSGESPQHRRGDQPSVPPVGGVGCRAFVASLRNVRWPPRFRPTIAEKYDGSVNPAEFLQVYTTGIEAAGGDDRVMANFFPMALKGQARGWLMNLPPASVHSWEDLCQQFTINFQGGVCGTTACLKRSPPKSPRLPRSFFSSRTEWLARRRPGLGTPPVPVWQLRPPPGPLLGQGGVTGGGRKGRPIPTTRVMSSPSKAFRWPPERGGLRATKRRKPTLPDLGYLEERRWRAALTAARYQQSLRRYHQRHVRARSLCVDDLVLRRVQARAGLSKLSPMWEGAPDPQDGPEATAGRPRLSPSDPEVVGTEAECAPRGLSDGERPEDVAPDEEDRPRRKVQRPVYFVSEALRDAETRYLQAQKMLYAILIASRKLRHYFQAHRVTVVTSYPLGQILYNREGTGRVVKWAIELAEFDLRFEPRHAIKSQALADFVAEWTPAPELVSAPEASSGPSQLPHTALWVM

SEQ ID NO: 170652 - protein, 68 aa, Oryza sativa
  Clone ID: PAT_MRT4530_68958C.1.pep
VYLSTGKAWERSDVIGCGIMPLELATGQTAIKLSRLEEEDNVLLLDHVQKLHTEGNLGPIVYTNLNHA

SEQ ID NO: 170653 - protein, 882 aa, Oryza sativa
  unsure (1)..(882): unsure at all Xaa locations
  Clone ID: PAT_MRT4530_68959C.1.pep
MPGFILTITGKMLCEEGRTCRLLSXHVVDKNDRXTGLTPVMSSADSHDSTSHLLPAKVEVVVGRLIRRGLCEGFSELSHSFVCAKLFQFSPMAEPAKAHDLSPSMSGDDGEPNPRRRARTPPPPPRQSPRREKALERAEGSATSTPTGGGEGRRDGERRLLVYGDGSTPQGALQAAGALLRHPPIAHDPESPAQRWLDDVAKLVMTARQRLDAGGRSSATKASGAATTGSASSRRRARRAAAAVRHSAATPSSTPPTREDLRGEPDARISIERRRNGRRAPHATEGASSSGVSPHHGRGDQPSVPPVGGVGCRAFVASLRNVRWPPRFRPTIAEKYDGSVNPAEFLQVYTTGIEAAGGDDRVMANFFPMALKGQARGWLMNLPPASVHSWEDLCQQFTMNFQGTLARPGEEADLHAVQRRDDESLRSYIQRFCQVRNNIPCIPAHAVIYAFRGXCGTTACSKRSPPKSPRLPRSFFSSRTEWLARRRPGLGTPPVPVWQLRPPPGPPLSQGGGTGGGRRGRPIPTTRXRRWRAALRAARYQQSLRRYHQRHVRARSLCVDDLVLRRVQTRAGLSKLSPMWEGPYRVIGVPWPGSVRLATGDGTELPNPWNIEHLRRFYPYIFDFLKAIKSAYNKKGARRPRKKKEKLLRLAEAWGLTLTRPGAPDPQDGPEATAGRPRLSPSDPEVVGTKAECAPRGLSDGERPGDVAPNEEDRPRRKVQRPVYFVSEALRDAETRYLQAQKMLYAILITSRKLRHYFQAHRVTVVTSYPLGQILYNREGTGRVVKWAIELSEFDLRFEPSHAIKSQALADFVVEWTPAPELVSAPETSSSPSQLPHTALWVIHNRPRGLAPSGGVGPEGDVFALLAPRAEAPRPLVGFCSA

SEQ ID NO: 170654 - protein, 109 aa, Oryza sativa
  unsure (1)..(109): unsure at all Xaa locations
  Clone ID: PAT_MRT4530_6895C.1.pep
FFFFFFSSKLSSLIPQILPNFNVKFVSHLEYTHEHTHRKREILIFSFMEYIISFVVEFLNRFDLSEEMYSVRPMDRSIDQSVGVELGAHVPDLAVEVALAAAVQRDGXV

SEQ ID NO: 170655 - protein, 257 aa, Oryza sativa
  Clone ID: PAT_MRT4530_68960C.1.pep
MAGATSGGRTARAPVPEHSHALQLFAIAEPTSVASSVRSSTSGLLLLTSSSLSSTNAPSEEAGEVVDLKLALVHGGGGLLGRVDEHLVDLCAHSEEGGVGVRVHRNAAGRCCGVGERGGEDRRPWQCGRMDGHGSSASTTTAAQPLIHRLQCVIDQAATTTKSHAPPRPHFTPHRRPTTTTAIFPKLDRPLSNPLRFYLPRTRQIKTPRSAARHPILFACTIAISLDGTGLCTCPLSLLTALCCHTEGIEEEERGES

SEQ ID NO: 170656 - protein, 1417 aa, Oryza sativa
  Clone ID: PAT_MRT4530_68961C.1.pep
MAEQAKAHDLSPSVSGDDGEPNPRRRARTPPLPPRQSPKRGEALERVERSATSPIAGDGEERRDGERRLLVYGDGSTPQGALQAAGALLRHPPVVPDPESPAQRWLDDVAKLVMTVRQRLDAGGRSSATKASGAATTGSASSRRRARRAAAAVRHSAATPSSTPSTQKDLRGGPDARTSIERRRNDRSAAHATEGASSSRVSPQHGRGNQPSVPPVGGVGCRAFVASLRNVRWPPRFRPTIAEKYDGSVNPAEWLANPVVVPKANGKLRMCIDYTDLNKACPKDPYPLPRIDQIVDSTAGCDLLCFLDAYSGYHQIRMAREDEEKTAFITPIGTYCYTTMPFGLKNAGPTFQRTTRISLGSQLGRNIEAYVDDLVVKTRNQETLLIDLAETFESLRSARIKLNPDKCVFGVPAGKLLGFLVSARGIEANPEKIRAIERMRPPSKLRDVQYVTGCMAALSRFISRLGEKALPLFKLLKRSGPFTWTKEAENALTQLKAYLSSPPVLVAPEPDEPLLLYLAATPQVVSAALVVERDEDNSHFALPHPVPTWPGREQGGEAPEPNGGPRPPTTGVGPLPACQTVLGAPDPQEGPEATVGRPHLSPFDPEANPVLTRPGKEQGEEAPEPNGGLRPLTTGVGPLPACPTTPGAPDPQDGPKATVGRPPLLSSDPEVISTEDKCAPRGCLDEECPRDAAPSEEDRPHRKVQRPVYFVSEALRDAKTRYPQAQKMLYAILMASRKLRHYFQAHRVTVVTSYPLGQILHNRDGTGRVVKWAIELSEFDLHFEPRHAIKSQALADFVAEWTPAPEPVSIPEASTDPSQLPHTAHWVMQFDGSLSLQGAGAGVTLTSPSGDVLRYLVRLDFRATNNMAEYEGLLAGLRVAAGLGIRRLLVLGDSQLVVNQVCKEYRCSDPQMDAYVRQVRRMERHFDGIELRHVPRRDNMIADELSRLASTRAQTPPGAFEERLAQPSARPDPLGETDAPDRPPRPVEVQASGPEGSAPSSLRLIAWIAEIQAYLTDKTLPEDREGSERVHRISKRYVLVEGTLYRRAANGILLKCIPREQGVVLLADIHEGECGAHSASRTLVGKAFRQGFYWPTALNDAVDLVRRCRACQFHAKQIHQPAQALQTIPLSWPFAVWGLDILGPFRRAPGGFEYLYVAIDKFTKWPEAYPVVKIDKHSALKFIKGITARFGVPNRIITDNGTQFTSELFGDYCEDMGIKLCFASPAHPRSNGQVERANSEILKGLKTKTFNILKKHGDSWIEELPAVLWANRTTPSRATGETPFFLVYGAEAVLPSELTLRSPRATMYCEADQDQLRRDDLDYLEERRRRAALRAARYQQSLRRYHQRHVRARSLCVDDLVLRRVQTRAGLSKLSPMWEGPYRVVGVPRPGSIRLATGDGIELPNPWNIEHLRRFYP

SEQ ID NO: 170657 - protein, 450 aa, Oryza sativa
  Clone ID: PAT_MRT4530_68962C.1.pep
MTLMSAMTWLPRKIDARKHGNGSYQRTTQPRGGRSSPRSCDPEGGDGERRRRWTATNGAAEDGTNRLHGDDGAPMACVFAEVAAGLLLTAAMPTVDTARSGDHGVDDGWLLEAWQRPKASALTLAKPREATAQGGHGGQWAVLRRTMEAASGEEEDGGGSGYERRIVLAIARQKVNLQRLANYTIRRAMFKKRQKSLMKKASELSTLYGVDACVVMYAEGEAQPMMVWPSVPEARRVIERFRALPQKDQYENTTNLEGFLKQRIANLQEKVDKAKHENDELETKLLLLNSLDCCLPSLVGLTVKQITSLNSMVEERLKKLRGNGLLATPVPTSSKKKIIWDVRYNLKARYVTDDSAKNGPPSRQSTAIPSFAAPQASSATTLLLHSIPLAALSTMNPSRHQLYRLRPLLGATPDHPSLRHATNSFVVSHRTLAIAPPDPITTETLPSPST

SEQ ID NO: 170658 - protein, 1841 aa, Oryza sativa
  Clone ID: PAT_MRT4530_68963C.1.pep
MAEPAKAHDLSPSMSGDDGEPNPRRRARTPLPPPRQSPRWEKALERAEGSATSTPTGGGEGRRDGEHRLLVYGDGSTPQGALLRHPPVAHDPESPAQRWLDDVAKLVMTARQRLDAGGRSSATKASGAATIGSASAFVASLRNVRWPPRFRPTIAEKYDGSVNPAEFLQVYTTGIEAAGGDDRVMANFFPMALKGQARGWLMNLPPASVHSWEDLCQQFTMNFQGTYPRPGEEADLHAVQRRDDESLRSGGVRHNRMLEKIASKEPQTTAELFQLADRVARKEEAWTWNPSGSGVAASAAPGSAAQIGRRDRRRKKRSAHTDDEGHVLAVEGASRATRKGRPAGGKKNEAGAPNRERPTGKWCTVHNTSLHDLADCRAVKSLAERTRKWEEKRRQERREGKSPAVPSGNRRSEAKQKAPAEDIDDGDDDLGFQEPGATIATVDGGACAHVSRRSFKAMKRELLAAAPTHEATCRARWSEVALTFDQTDHPPCVARGGQIAMVVSPTVCNVKLGRVLIDGGAALNILSPAAFDAIKAPGMVLRPSQPIIGVTPGHTWPLGHIDLPVTFGGSANFRTERVNFDVADLSLPYNAVLGRPALVKFMAAVHYAYLQMKMPGPGGPISVHGDLKVALACLEQRADHLVAASKPEGGDERLGASAPATPRQRMITGDEVPEDALVSFLRANADVFAWRPADMPGVPREVIEHRLAVRPGARPVRQKVRRQAPKRQAFIREEVARLLEAGFIREVIHPEWLANPVVVPKANGKLRMCIDYTDLNKACPKDPYPLPRIDQIVDSTAGCDLLCFLDAYSGYHQIRMAREDEEKTTFITPIGTYCYTTMPFGLKNADLAETFESLRSARIKLNPDKCVFGVPAGKLLGFLVSARGIEANPEKIRAIERMRPPSKLRDVQCVTGCMAALSRFISRLGEKALPLFKLLKRSGLFTWTEEAENALTQLKAYLSSPPVLVAPEPDEPLLLYLAATPQVVSAALVVERDENNSHFTLPHPVPTWPGREQGGEAPEPNGGPRPPTTGVGPLPACQTVLGAPDPQEGPEATVGRPHLSPFDPEANPVLTRPGKEQGEEAPEPNGGLRPLTTGVGPLPAFSTTPGAPDPQDGPEATVGRPPLLSSDPEVISTEDKCAPRGCLDEECPRDAAPSEEDRPHRKVQRPVYFVSEALRDAKTRYPQAQKMLYAILMASRKLRHYFQAHRVTVVTSYPLGQILHNREEWTPAPEPVSIPEASTDPSQLPHTAHWVMQFDGSLSLQGAGAGVTLTSPSGDVLRYLVRLDFRATNNMAEYEGLLAGLRVAAGLGIRRLLVLGDSQLVVNQVCKEYRCSDPQMDAYVRQVRRMERHFDGIELRHVPRRDNMIADELSRLASSRAQTPPGAFEERLAQPSARPDPLGETDAPDRPPRPVGVQASGPEGSAPNSLRLIAWIAEIQAYLTDKTLPEDREGSERVHRISKRYVLVEGTLYQRAANGILLKCIPREQGVVLLADIHEGECGAHSASRILVGKAFRQGFYWPTALNDAVDLVRRCRACQFHAKQIHQPAQALQTIPLSWPFAVWGLDILGPFRRAPGGFEYLYVAIDRFTKWPEAYPVVKIDKHSALKFIKGITARFGVPNRIITDNGTQFTSELFDDYCEDMGIKLCFASPAHPRSNGQVERANAEILKGLKTKTFNILKKHGDSWIEELPAVLWANRTTPSRATGETPFFLVYGAEAVLPSELTLRSPRATMYCEADQNQLRRDDLDYLEERRRRAALRAARYQQSLRRYHQRHVRARSLCVDDLVLRRVQTRAGLSKLSPMWEGPYRVVGVPRPGSIRLATGDGTELPNPWNIEHLRRFYP

SEQ ID NO: 170659 - protein, 2084 aa, Oryza sativa
  unsure (1)..(2084): unsure at all Xaa locations
  Clone ID: PAT_MRT4530_68964C.1.pep
MEEGCSACEKLDLGEHSSADIFDGTTHQSCDACSGGGHARTAASLSGPYQSDSAGIGFLKSVMSRGYHAVFGLPRCRTENVVITRRWSVRRCIHATDTLEYLPGLRSVLFLFSQCRAGKAQASPREERGEGEPNPPVELXNPPPPSRQSLRREKALERAEESATSTPPGGGEXGRRDGERRLFVYGDGSTPQGALQAAGALLRHPPVAHDPESPAQRWLDDVAKLVMTARQRLDAGGRSSATKASGAATTGSASSRRRARRAAAAVRHSAATPSSTPPTREDLRGEPDARISIERRRNGRRAPHATEGASSSGVSPHHGRGDQPSVPPVGGVGCRAFVTSLRNVRWPPRFRPTIAEKYDGSVNPAEFLQVYTTGIEAAGGDDRVMANFFPMALKGQARGWLMNLPPASVHSWEDLCQQFTMNFQGTYPRPGEEADLHAVQRRDDESLRSYIQRFCQVRNTIPCIPAHVVIYAFRGGVRHNRMLEKIASKEPQTTAELFQLADRVARKEEAWTWNPSGSGVAASAAPGSAAQIGRRDRRRKKRSAHTDDEGHVLAVEGASRATRKGRPAGGKKNEAGAPNRERPTGKWCTVHNTSLHDLADCRAVKSLAERTRKWEEERRQERREGKSPAVPSGNRRSEAKQKAPAEDIDDGDDDLGFQEPGATIATVDGGACAHVSRRSFKAMKRELLAAAPTHEATCRARWSEVALTLEACPQLGRVLIDGGAALNILSPAAFDAIKAPGMVLRPSQPIIGVTPGHTWPLGHIDLPVTFGGSANFRTERVNFDVADLSLPYNAVLGRPALVKFMAAVHYAYLQMKMPGHGGPISVHGDLKVALACLEQRADHLAAASKPEGGDERLGASALATPRQRMITGDEVPEDALVSFLRANADVFAWRPADMPGVPREVIEHRLAVRPGARPVWQKVRRQAPERQAFIREEVARLLEAGFIREVIHPEWLANPVVVPKANGKLRMCIDYTDLNKACPKDPYPLPRIDQIVDSTAGCDLLCFLDAYSGYHQIRMAREDEEKTAFITPIGTYCYTTMPFGLKNAGPTFQRTTRISLGNQLGRNVEAYVDDLVVKTRNQEMLLSDLAETFESLRSARIKLNPDKCVFGVPAGKLLGFLVSARGIEANPEKIRAIERMRPPXKLRDVQCVTGXENALTQLKAYLSSPPVLVAPEPDEPLLLYLAATPQVVSAALVVERDENNSHFTLPHPVPTWPGREQGGEAPEPNGGPRPPTTGVGPLPACQTVLGAPDPQEGPEATVGRPHLSPFDPEANPVLTRPGKEQGEEVPEPNGGLRPLTTGVGPLPAFPTTPGAPDPQDGPEATVGRPPLLSSDPEVISTEDKCASRGCLDEECPRDAAPSEEDRPHRKVQRPVYFVSEALRDAKTRYPQAQKMLYAILMASRKLRYYFQAHRVTVVTSYPLGQILHNREGTGRVVKWAIELSEFDLHFEPRHAIKSQALADFVAEWTPAPEPVSIPEASTDPSQLPHTAHWVMQFDGSLSLQGADAGVTLTSPSGDVLRYLVRLDFRATNNMAEYEGLLAGLRVAAGLGIRRLLVLGDSQLVVNQVCKEYRCSDPQMDAYVRQVRRMERHFDGIELRHVPRRDNMIADELSRLASSRAQTPPGAFEERLAQPSARPDPLGETDAPDRPPRPVGVQASGPEGSAPNSLRLIAWIAEIQAYLTDKTLPEDREGSERVHRISKRYVLVEGTLYRRAANGILLKCIPREQGVVLLADIHEGECGAHSASRTLVGKAFRQGFYWPTALNDAVDLVRRCRACQFHAKQIHQPAQALQTILLSWPFAVWGLDILGPFRRAPGGFEYLYVAIDRFTKWPEAYPVVKIDKHSALKFIKGITARFGVPNRIITDNGTQFTSELFGDYCEDMGIKLCFASPAHPRSNGQVERANAEILKGLKTKTFNILKKHGDSWIEELPAVLWANRTTPSRATRETPFFLVYGAEAVLPSELTLRSPRATMYCEADQNQLRRDDLDYLEERRRRAALRAARYQQSLRRYHQRHVRARSLCVDDLVLRRVQMRAGLSKLSPMWEGPYRVVGVPRPGSIRLATGDGTELPNPWNIEHLRRFYP

SEQ ID NO: 170660 - protein, 230 aa, Oryza sativa
  Clone ID: PAT_MRT4530_68965C.1.pep
MAGRNNHELKLLGTWPSPFVVRVRLALGLKGLSYEYVEQDIRDKSELLVVSNPVHKKVPVLIHGGKPVCESQIIVQYIDEAFPGAGASLLPSDPHERAVARFWATYIDDEFATKFRAMGEAKEEEEKDEAAAQVFAALETLEEAMKGKVFFGGDSAGYVDVALGGFLGWIKAAEALAGVAFLDGARTPLLAAWAARFSALEAAKEAIPSVERLREFHGAMHAAAATVAGN

SEQ ID NO: 170661 - protein, 1923 aa, Oryza sativa
  Clone ID: PAT_MRT4530_68966C.1.pep
MAEPAKAHDLSPSMSGDDGEPNPRRRARTPPPPPRQSPRREKALERAEGSATSTPTGGGEGRRDGERRLLVYGDGSTPQGALQAAGALLRHPPVAHDPESPAQRWLDDVAKLVMTARQRLDAGGRSSATKASGAATTGSASSRRRARRAAAAVRHSAATPSSTPPTREDLRGEPDARISIERRRNGRRAPHATEGASSSGVSPHHGRGDQPSVPPVGGVGCRAFVASLRNVRWPPRFRPTIAEKYDGSVNPAEFLQVYTTGIEAAGGDDRVMANFFPMALKGQARGWLMNLPPASVHSWEDLCQQFTMNFQGTYPRPGEEADLHAVQRRDDESLRSYIQRFCQVRNTIPCIPAHAVIYAFRGGVRHNRMLEKIASKEPQTTAELFQLADRVARKEEAWTWNPSGSGVAASAAPGSAAQIGRRDRRRKKRSAHTDDEGHVLAVEGASRATRKGRPAGGKKNEAGAPNRERPTGKWCTVHNTSLHDLADCRAVKSLAEQTRKWEEERRQERREGKSPAFPSGNRRSEAKQKALAEDIDDGDDDLGFQEPGATIATVDGGACAHVSRRSFKAMKRELLAAAPTHEATCRARWSEVALTFDQTDHPPCVARGGQIAMGRVLIDGGAALNILSPAAFDAIKAPGMVLRPSQPIIGVTPGHTWPLGHIDLPVTFGGSANFRTERVNFDVADLSLPYNAVLGRPALVKFMAAVHYAYLQMKMPGRGGPISVHGDLKVALACLEQRADHLAAAYKPEGGDERLGASAPATPRQRMITGDEVPEDALVSFLRANADVFAWRPVDMPGVPREVIEHRLAVRPGARPVRQKVRRQAPERQAFIREEVARLLEAGFIREVFHPEWLANPVVVPKANGKLRMCIDYTDLNKACPKDPYPLPRIDQIVDSTAGCDLLCFLDAYSGYHQIRMAREDEEKTTFITPIGTYCYTTMPFGLKNAGPTFQRTTRISLGSQLGRNVEAYVDDLVVKTRNQETLLSDLAETFESLRSARIKLNPDKCVFGVPAGKLLGFLVSARGIEANPEKIRAIERMRPPANLGMCNASPPDEPLLLYLAATPQVVSAALVVERDEDNSHFTPPHPVPTWPGREQGGEAPEPNGGPGPPTTGVGPLPACQTVLGAPDPQEGPEATVGRPHLSPFDPEANPVLTRPGKEQGEEAPEPNGGLRPLTTGVGPLPACPTTPGAPDPQDGPEATVGRRPLLSSDSEVISTEDKCAPRGCLDEECPRDAAPSEEDRPHRKVQRPVYFVSEALRDAKTRYPQAQKMLYAILMASRKLRHYFQAHRVTVVTSYPLGQILHNREGTGRVVKWAIELSEFDLHFEPRHAIKSQALADFVAEWTPAPEPVSIPEASTDPSQLPHTTHWVMQFDGSLSLQGAGAGVTLTSPSGDVLRYLVRLDFRATNNMAEYEGLLAGLRVAAGLGIRRLLVLGDSQLVVNQVCKEYRCSDPQMDAYVRQVRRMERHFDGIELRHVPRRDNMIADELSRLASSRAQTPPGAFEERLAQPSARPDPLGETDAPDRPPRPVGVQASGPEGSAPNSLRLIAWIAEIQAYLTDKTLPEDREGSERVHRISKRYVLVEGTLYRRAANGILLKCIPREQGVVLLADIHEGECGAHSASRTLVGKAFRQGFYWPTALNDAVDLVRRCRARAPGGFEYLYVAIDRFTKWLEAYPVVKIDKHSALKFIKGITARFGVPNRIITDNGTQFTSELFGDYCEDMGIKLCFASPAHPRSNGQVERANAEILKGLKTKTFNILKKHGDSWIEELPAVLWANRTTPSRATGETPFFLVYGAEAVLPSELTLRSPRATMYCEADQDQLRRDDLDYLEERRRRAALRAARYQQSLRRYHQRHVRARSLCVDDLVLGRVQTRAGLSKLSPMWEGPYRVVGVPRPGSIRLATGDGTELPNPWNIEHPRRFYP

SEQ ID NO: 170662 - protein, 1988 aa, Oryza sativa
  Clone ID: PAT_MRT4530_68967C.1.pep
MAEPAKAHDLSPSMSGDDGEPNPRRRARTPPPPPRQSPRREKALERAEGSATSTPTGGGEGRRDGERRLLVYGDGSTPQGALQAAGALLRHPPVAHDPESPAQRWLDDVAKLVMTARQRLDAGGRSSATKASGAATTGSASSRRRARRAAAAVRHSAATPSSTPPTREDLRGEPDARISIERRRNGRRAPHATEGASSSGVSPHHGRGDQPSVPPVGGVGCRAFVASLRNVRWPPSFRPTIAEKYDGSVNPAEFLQVYTTGIEAVGGDDRVMANFFPMALKGQARGWLMNLPPASVHSWEDLCQQFTMNFQGTYPRPGEEADLHAVQRRDDESLRSYIQRFCQVRNTIPCIPAHAVIYAFRGGVRHNRMLEKIASKEPQTTAELFQLADRVARKEEAWTWNPSGSGVAASAAPGSAAQIGRRDRRRKKRSAHTDDEGHVLAVEGASRATRKGRPAGGKKNEAGAPNRERPTGKWCTVHNTSLHDLADCRAVKSLAERTRKWEEERRQERREGKSPAVPSGFQELGATIATVDGGACAHVSRRSFKAMKRELLAAAPTHEATCRARWSEVALTFDQTDHPPCVARGGQIAMVVSPTVCNVKLGRVLIDGGAALNILSPAAFDAIKAPGMVLRPSQPIIGVTPGHTWPLGHIDLPVTFGGSANFRTERVNFDVADLSLPYNAVLGRPALVKFMAAVHYAYLQMKMPGPGGPISVHGDLKVALACLEQRADHLAAASKPEGGDERLGASAPATPRQRMITGDEVPEDALVSFLRANADVFAWRPADMPGVPREVIEHRLAVRPGARPVRQKVRRQAPERQAFIREEVARLLEAGFIREVIHPEWLANPVVVPKANGKLRMCIDYTDLNKACPKDPYPLPRIDQIVDSTAGCDLLCFLDAYSGYHQIRMAREDEEKTAFITPIGTYCYTTMPFGLKNAGRNVEAYVDDLVVKTRNQEMLLSDLAETFESLRSARIKLNPDKCVFGIPAGKLLGFLVSARGIEANPEKIWAIERMRPPSKLRDVQCVTGCMAALSRFISRLGEKALPLFKLLKRSGPFTWTEEAENALTQLKAYLSSPPVLVAPEPDEPLLLYLAATPQVVSAALVVERDENNSHFTLPHPVPTWPGREQGGEAPEPNGGPRPPTTGVGPLPACQTVLGAPDPQEGPEATVGRPHLSPFDPEANPVLTRPGKEQGEEAPEPNGGLRPLTTGVGPLPAFSTTPGAPDPQDGPEATVGRPPLLSSDPEVISTEDKCAPRGCLDEECPRDAAPSEEDRPHRKAHRVTVVTSYPLGQILHNREGTGRVVKWAIELSEFDLHFEPRHAIKSQALADFVAEWTPAPEPVSIPEASSGPSQPPHTAHWVMQFDGSLSLQGAGAGVTLTSPSGDVLRYLVRLDFRATNNMAEYEGLLAGLRVAAGLGIRRLLVLGDSQLVVNQVCKEYRCSDPQMDAYVRQVRCMERHFDGIELRHVPRRDNMIADELSRLASSRAQTPPGAFEERLAQPSARPDPLGETDAPDRPPRPVGVQASGPEGSAPNSLRLIAWIAEIQAYLTDKTLPEDREGSERVHRISKRYVLVEGTLYRRAANGILLKCIPREQGVVLLADIHEGECGAHSASRTLVGKAFRQGFYWPTALNDAVDLVRRCRACQFHAKQIHQPAQALQTIPLSWPFAVWGLDILGPFRRAPGGFEYLYVAIDRFTKWPEAYPVVKIDKHSALKFIKGITARFGVPNRIITDNGTQFTSELFGDYCEDMGIKLCFASPAHPRSNGQVERANAEILKGLKTKTFNILKKHGDSWIEELPAVLWANRTTPSRATGETPFFLVYGAEAVLPSELTLRSPRATMYCEVDQNQLRRYDLDYLEERRRRAALRAARYQQSLRRYHQRHVRARSLCVDDLVLRRVQTRAGLSKLSPMWEGPYRVVGVPRPGSIRLATGDGTELLNPWNIEHLRRFYPWGGGRVSGFGLGPTPHPPRACRVGRGLQHMHILISLISEFL

SEQ ID NO: 170663 - protein, 64 aa, Oryza sativa
  Clone ID: PAT_MRT4530_68968C.1.pep
KPSGTSRSMRKPPSSLLLVTPRRMSMLGLLDAKMRSWSLNGDLGRRIQMGHCLTSYWTPTHNLM

SEQ ID NO: 170664 - protein, 373 aa, Oryza sativa
  unsure (1)..(373): unsure at all Xaa locations
  Clone ID: PAT_MRT4530_68969C.1.pep
MNFQGTYPRQAPAANGSAARSGRRDWSRKKRSAYFDGEGHVLAVEGASWASQKGRPASDRNKEAGAPSRERPTGKWCSVHNSSFHDLADCRAEPQATVATVDGGACAHASRRSLKAVKRELLAAAPTHEATRRARWSEVALTFDQTDHPPCVARGGQIAMVVSPTICNVKLRRVLIDGSAALNILSPAAFDAIKAPGMVLRPSQPIIGVTPGHTWPLGHIDLPVTFGGSANFRTERVNFDVADLSLPYNAVLGRPALVKFMPAVHYAYLQMKMSGPGGPISVHGDLKVALACLEQRTDHLAAASEPEGGDERLGASAPATPRQRMITGNEVPVKEVALGDGPSXDHALVSFLRANADVFAWRPADMPGVPRKV

SEQ ID NO: 170665 - protein, 99 aa, Oryza sativa
  Clone ID: PAT_MRT4530_6896C.1.pep
MDGGNLGGGADGASINGGLADISKNHQVRKQYTIQELELVNDEANVYKLIGPVLVKQDLAEAKANVKKRIEYISAELKRMDRALKDLEEKQNSKKESVS

SEQ ID NO: 170666 - protein, 670 aa, Oryza sativa
  unsure (1)..(670): unsure at all Xaa locations
  Clone ID: PAT_MRT4530_68970C.1.pep
MTDVTGLIPIMSSADSHDSTSRLLPAEVEVDTESLESLPESPAEPAKGGLRGLPVRSPTLRHLARQLFLFSPMAEPAKAHDLSPSMSGDDGEPNPRRRARTPPPPPRQSPRREKALERAEGSATSTSTGGGEGRRDGERRLLVYGDGSTPQGALQAAGALLRHPPVAHDPESPAQRWLDDVAKLVMTARQRLDAGGRSSATKASGAATTGSASSRRRARRAAAAVRHSAATPSSTPPTREDLRGEPDARISIERRRNGRRAPHATEGASSSGVSPHHGRGDQPSVPPVGGVGCRAFVASLRNVRXPPRFRPTIAEKYDGSVNPAEFLQVYTTGIEAAGGDDRVMANFFPMALKGQARGWLMNLPPASVHSWEDLCQXFTMNFQGTYPRPVHNTIPCIPAHAVIYAFRGGVRHNRMLEKIASKEPQTTAELFQLADRVARKEEAWTWNPSGSGGGRRGQPIPTTRVISSPSRALRGPPERGGLRATKRRKPTLPDLGYLKERRWRAALRAARNQQSLRRYHQRHVRARSLCVDDLVLRRVQTRAGLSKLSPMWEGPYRVIGVPRPGSVRLATGDGTELPNPWNIEHLRRFYPYLAVAVVRTIVTTFLIRVEGKREPSGRSLLSVGFPLPMRVICDRWDSARRESREERPPSRTVAQSPRRPELALRLLVRW

SEQ ID NO: 170667 - protein, 59 aa, Oryza sativa
  Clone ID: PAT_MRT4530_68971C.1.pep
MSRPNVDYLYTKLTAAIAKEDAALRAAIPVRQHVAVCVRCLAMGEPLSNRTRPSYAWGA

SEQ ID NO: 170668 - protein, 68 aa, Oryza sativa
  Clone ID: PAT_MRT4530_68972C.1.pep
FHRATRCLIATTKINPKQRIRTCTGEGHNAHPPLSPRQCRCRPRARARERELCRWRVPVNHINLARAS

SEQ ID NO: 170669 - protein, 436 aa, Oryza sativa
  Clone ID: PAT_MRT4530_68973C.1.pep
MSSSTAAILALVIILLPPITLAGDLHGFRATLTRIHELSPGKYSEAVRRDSHRIAFLSDATAAGKATTTNSSVSFQALLENGVGGYNMNISVGTPLLTFSVVADTGSDLIWTQCAPCTKCFQQPAPPFQPASSSTFSKLPCTSSFCQFLPNSIRTCNATGCVYNYKYGSGYTAGYLATETLKVGDASFPSVAFGCSTENGVGNSTSGIAGLGRGALSLIPQLGVGRFSYCLRSGSAAGASPILFGSLANLTDGNVQSTPFVNNPAVHPSYYYVNLTGITVGETDLPVTTSTFGFTQNGLGGGTIVDSGTTLTYLAKDGYEMVKQAFLSQTADVTTVNGTRGLDLCFKSTGGGGGGITVPSLVLRFDGGAEYAVPTYFAGVETDSQGSVTVACLMMLPAKGDQPMSVIGNVMQMDMHLLYDLDGGIFSFAPADCAKV

SEQ ID NO: 170670 - protein, 76 aa, Oryza sativa
  Clone ID: PAT_MRT4530_68974C.1.pep
MPSSLGRRRSSSLSRSASPSNSLPIPIQNPSIKAAIDSGRLRLDVVLIAATTPSPPLPPPPHPSGASTGSSPQISA

SEQ ID NO: 170671 - protein, 216 aa, Oryza sativa
  unsure (1)..(216): unsure at all Xaa locations
  Clone ID: PAT_MRT4530_68975C.1.pep
RVPEAEAAAGAGQDAGDHPYPPLPRLARPPPHLAPPPTARRLRPPPPPRSRRYLACTAAHRPPPRAXPHLAPSPTARPRPLPPPRSLVLPPTTHPRLPPPPHSRRRPPXPPLPAASASLAPPPTARPRTPPPPHLAPPLTARPRALPRPRSRHCLACAAAAAAASLAPPPRLASPPPHLAPPPTARLRAPPPHLAPPPTARPRAASASLTPCLARR

SEQ ID NO: 170672 - protein, 80 aa, Oryza sativa
  unsure (1)..(80): unsure at all Xaa locations
  Clone ID: PAT_MRT4530_68976C.1.pep
FFFPLYIIFINFFFFYIILFFIINLFFNKFFIFIFLFFXFLFVVCFLFPYFFLLFLLSFSLFNFFFILSYLFFYLIFFIF

SEQ ID NO: 170673 - protein, 55 aa, Oryza sativa
  Clone ID: PAT_MRT4530_68977C.1.pep
LRQQGHEQPKIDPHGCAKIFFQLLWSHHTSEISIIQNESLHSCGHLVPNSCSPGI

SEQ ID NO: 170674 - protein, 77 aa, Oryza sativa
  Clone ID: PAT_MRT4530_68978C.1.pep
KKVRWVNFEGDGYFNVCFVNVLVCLKIFGFVVVEKDLFKSLGKNIFVCLMVIMDIDMCLPYCYPPSFVFYLKKKKKE

SEQ ID NO: 170675 - protein, 90 aa, Oryza sativa
  Clone ID: PAT_MRT4530_68979C.1.pep
SGFVSDVGNDAESVRKWIKFIGCYKYRIIRIHRILEILYHHLYLHHTIHIHIHICRISKNPYHILVSNGFGADRIGYYPIRFHPTSILCA

SEQ ID NO: 170676 - protein, 2066 aa, Oryza sativa
  unsure (1)..(2066): unsure at all Xaa locations
  Clone ID: PAT_MRT4530_6897C.1.pep
MSPSPTWRPVDLRYKRDPXGGPXGIESHSQHIHHSLRNPRTSIPXYPLYPVYGYSPSIVARQVGGLGAQGSTTMSSSFVDNSVNTNLNQGVPASTMLVWNQVGEIVFPVYATMPISAGPSMIESENAVATTQDDSMSKDPPAKAENXTSTTSEPEKDPSAAKPCLSDKNHEPTRITSEVTRSWCPIHKTRKHTLQACWVFLNVHAEIRACKERGIQHTSPTRDVYCPIHXTKNHDLSSCKVFLSAVKTSPPKVXQSRIPISDEDKEQGATLTSDRFVGVIDIDPHEPSVLHLLEDYGSSSTSTPREVLAIDEIGTSAHANAEVENQVTTLAQHIRAVNTILTETPYDPVLNDDLARWTERLRESVTNLSNAFEEAAAAAHPEQPPTGGANGENPEQRESPHRAIPPPRGTSDLRDHLNGRREARRARDNENHSRHRVSSRRHDNGDNRHHHHDHDDRERRALGDTGRGRRHNDDDDGDRRRDNNGRRRQDSXEPGRRPRNHTPQPSDPSPSSSSSSSSSSDRHPRRTYDRRQPTTPSAGCRAFGCSLRDVRWPKRFRPGAIEKYDGSTDPEEFLQVYSTVLYAAGADDNVLVNYLPTALKGSARSWLMHLPPYSISSWADLWQQFVANFQGTYKRHTIEDDLYALTQNPGESLKDYVQRFNECRNTIPEITDASVICAFKSGVRDRYTTQELATRCVTTTRRLFEIVDRCAHADDALRRKNDKPKTGGEKKPAKDAPESSKKKNRKSGKRKAQAEVLATEYADPPKRPDPQSSDTKKTWCPIHKSDRHSLEDCLIFKKSLAKHMALEKGKRVRVAEKDAKAATQESDSAYPDSDLHVSHIFXVPQRRYPIVVEPTIRNIKVARVLIDGGSSINLLFASTLDAMGIPRSELTPTDQPFHGITPQSSSKPLGKITLPMTFGQANNFRTEQITFDVAEFDTAYNAIIGRIALAKFMAASHYAYQVLKMPGPKGTITIQGNAKLAVQCDKRSLDMVEHTPSPPTTAEPPKKVSKTNKTAKPDGAIKIVPLSSANPDKTELAIITFLRDNADVFAWQPSDMLGVSREVIEHKLMVRPDAKPVKQKLRXRFAPDRKQAIREELDKLLKAGFIREVLHPEWLANPVMVRKVNGKWRMCVYFTDLNKACPKNHFPLPRIDQLVDXTAGCELLSFLDAYSGYHQISMAKEDEEKTALITPFGVFCYVKMPFGLITAGNTFQCTVQGALSDQLGNNVEANVDDIVVKTRTSDSLIDDLQETFDNLGRYRLMLNPEKCTFGVPSGKLLGFLVSGRGIEANPEKIKAIENMKSPTRLKEVQKLTGCMAAPSRFVARMGERGQPFFALLKKQDKFVWTQEAEEAFIALKRYLSNPPVLVAPQPNEELFLYIAATPYSVSTVIVVEREKVQRSVYYVSEALHDANTRYPXIQKLLYAVIMTSRKLRHYFQAHRVTVVSSFPLGEVVRNKDVVGRIAKWVVELSQFDVHFVPRTAIKSQVLADFVADWTMPDNRSDNQIDNETWIMAFDGALNSQGAGAXFILTSPSEDQFKHAIHLNFRATNNTAEYEGLLAGIRAAAALGVKRLVVKGDSELVANKVHKDYKCSSPELSKYLAEVRKLEKRFDGIEVRHLYRKDNIEPDDLARRASRREPLEPGTFLDVLTSPSVKEASGEDSPVALNISSGATEVERAIADIETTDDRRTPLIKFIGSEELPEDDAEAKKITHKAKINCMIGNDLYKKAPNGVLLKCVSSDDSRHLLLDIHEGICGSHAAGRTLVGKAFRQGFFWPTALKDACDMETHKATSASTPDYPSYLAVLVLGARHTQAIPTRIGLQVPIXVAIDKFTKWIEATPTGEIKADNAIKFIKGIFCIFGLPHRIITDNGSQFISADFQDYYIRLGVKICFASVSHPQSNGXVERANGIVLQGIKTLLWAVRTTPTTSNKETPFFLVYGSEAMLPTKLRHQSKRVQKYSDEDQEEQRNDDVNLLEEHRERVAVGAASYQQALRRYHEKRIRARTLSIGDYVLRLVQIQAGRNKLSPKWEGPYTITQVLRPGAFKIADGDGRELAYSWNIDQLCKFYV

SEQ ID NO: 170677 - protein, 173 aa, Oryza sativa
  Clone ID: PAT_MRT4530_68980C.1.pep
MTPLSMADRRPAYNNTTKARLQKRCPHGGHDIKDAAIAHLRKMWFPPKENSPRKGERYPRQRPQEGYDTRRCSRCRPGDHRNPAASSLHPTAPPLRAGPGHLRPATRRPPRQVRPKENPDWTVSLRPPELPLLTSSRLNPTETPHKEGEEFKKGEGADWQQGRRRTAASSHEH

SEQ ID NO: 170678 - protein, 45 aa, Oryza sativa
  Clone ID: PAT_MRT4530_68981C.1.pep
SYDKHECGGNVELVYMYRSIDRVIYSRVLIWYCPWIVQLRLMEYI

SEQ ID NO: 170679 - protein, 114 aa, Oryza sativa
  unsure (1)..(114): unsure at all Xaa locations
  Clone ID: PAT_MRT4530_68982C.1.pep
SPPGPRQRPQEGYDTRRCSRCRPGDHRVRLSPGTPHQRLSAGXLLNLPQNPAASSLHPTAPPLRAGPGHLRPATRRPPRQVRPKENPDWTVSLRPPELPWQQGRRRTAASSHEH

SEQ ID NO: 170680 - protein, 368 aa, Oryza sativa
  Clone ID: PAT_MRT4530_68983C.1.pep
MAEAAGDGGWPEPVVRVQALSESGAATIPDRYVRPETERPSSSSEANAVANINIPVVDMSSSPGTAAAAVAEACREWGFFQAVNHGVPAALLRRARGVWRGFFQQPMEVKQRYGNSPATYEGYGSRLGVDKGAILDWGDYYFLHVRPPHLLSPHKWPHLPPDLRETTTEYSEEVRRLCERLMAVMAVGLGVEEGRLQEAFGGREGAGVCVRVNYYPRCPQPDLTLGLSSHSDPGGMTVLLVDDRVKGLQVRHAGAWVTVDPVPDAFIINVGDQIQVVTNALYRSVEHRVVVNAAEERLSIATFYNPRSDLPVAPLPELVSPERPPLYSPMTFDDYRLYIRRNGPRGKSQVDRLAAAAATIPNSTTTTQ

SEQ ID NO: 170681 - protein, 500 aa, Oryza sativa
  Clone ID: PAT_MRT4530_68984C.1.pep
MRNLRAAAPASFLAPPAPPLLLPPSTPTPRGAFSAKASPAAAAAQAHGWCPSPRRVGRLRRRAGAASSSVASVEDAKKDVLVALSQIIDPDFGTDIVSCGFVKDLEISEALEEVSFRLELTTPACPIKDMFEEKANEVVAALPWVKKGGVGKSTVAVNLAYTLAGMGARVGIFDADVFGPSLPTMVSPENRLLVMNPESRSILPTEYLGVKMVSFGFAGQGRAIMRGPMVSGVINQLLTTTDWGELDYLVIDMPPGTGDIHLTLCQVVAPLTAAVIVTTPQKLAFIDVAKGVRMFSKLKVPCVAVVENMCYFDADGKRFYPFGQGSGAQARKVVQQFGIPHLFDLPIRPTLSASGDTGIPEVVADPQGDVAKTFQNLGVCVVQQCAKIRQQVSTAVSYDRSIRAIRVKVPDSDEEFLLHPATVRRNDRSAQSVDEWTGEQKVQYGDIPEDIEPEEIRPMGNYAVSITWPDGFSQIAPYDQLEMLERLVDVPRATTAAVSS

SEQ ID NO: 170682 - protein, 673 aa, Oryza sativa
  Clone ID: PAT_MRT4530_68985C.1.pep
MAGASVMTSLPNPLPTPPAHPSPAFNPQRQRERSVPSPTTTASSLRALFLRAVDPSRPASWSAAVADLLSSGDAVAALATFAAAVRANPAALRPALPPALRAAAAARSLAAGRQLHLLALRSGLFPSDPYSASALLHMYHHCSRPMDARRAFDEIPDPNPVIVTAMASGYVRNNLVYHSLELFRAMIASDSASVVDEAAALVAFSASARVPDRGVTASLHALIAKIGFERNAGVVNTMLDSYAKGGSRDLEVARKVFDTMERDVVSWNSMIALYAQNGMSAEAIGLYSKMLNVGGGIKCNAVALSAVLLACAHAGAIQTGKRIHNQVVRMGLEENVYVGTSIVDMYSKCGRVEMASRAFRKIKEKNILSWSAMITGYGMHGRGQEALEIFTEMKRSGLRPNYITFISVLAACSHAGLLDEGRYWYNAMKQEFGIEAGVEHYGCMVDLLGRAGCLDEAYSLIKEMKVKPDAAIWGALLSACRIHKNVELAEMSVKRLFELDASNSGYYVLLSNIYAEARMWKDVERIRLLVKTRRIEKPPGYSSFELKGKIYLFYVGDKSHPQHIEIYSYLEKLLERMQEAGYVPNTGSVLHDLDEEEKESALRIHSEKLAVAFALMNSVPRSVIHIIKNLRVCSDCHTAMKFITKITEREIIIRDLQRFHHFKDGLCSCRDYW

SEQ ID NO: 170683 - protein, 71 aa, Oryza sativa
  Clone ID: PAT_MRT4530_68986C.1.pep
MGGLLSFGPRSTRKLGGQIIISGSGLVKNSFSALHLTRTLLDLNDGDAGARADILRTYGAVLQVRSLDGSC

SEQ ID NO: 170684 - protein, 103 aa, Oryza sativa
  unsure (1)..(103): unsure at all Xaa locations
  Clone ID: PAT_MRT4530_68987C.1.pep
PAGAGAASPPPTPPPPPPPAAATSXPPRSSPPPPPYSSSSSSPSPPATXPAPAAAAAASPSPPAPATPSPTGEGSSAGTPSWCCSPRTGSSSSASPPPPPHHW

SEQ ID NO: 170685 - protein, 649 aa, Oryza sativa
  Clone ID: PAT_MRT4530_68988C.1.pep
IISSAEVGGGRRHHRRHDCPPFTCGHLSDVSFPFRRRGDPPECGVQSYELTCADDKATIQIDKETYSVSDINYGDSTLWVVDASFLDSRSSCLLPRWNPLLRDPRLQAKSHHIIELAPPVGVTWASFVNCSQEIRNSSWMYMPVACLSTSRSFVYVFTGQQSAYIQNLEPSCGYLATTPLGGSKLNSTSALQNVSYQDVVKLMMTGFAVRFPFTVSGWNFKECLALSIRQTGTGSKERIANIAIIDFYFWSCFLLGDRSHNNLIYTYMVVDTALLILKWTAVLCRFVLAPLAVFIFLAHKYWRNKITIDAVEKFLQMQLTLGPTRYAYTDLTAITGHFGEKLGQGGYGSVYKGVLPGYVNVAVKVLENANCNGEEFISEVSTIGRIHHVNVVRLVGFCSEELRRALVYEYMPRGSLDKYIFSSKRSFSWDKLNEIALGIARGINYLHQGCDMQILHFDIKPHNILLDDNFVPKVADFGLAKLYPRDNSFVPLNALRGTIGYIAPEMISRSFGVISSKSDVYSFGMLLLEMAGGRRNSDMHAGNSSQAYYPSWVYDRLIEQQVGVGEISAATVANMHELERKLCIIGLHCIQMKSHDRPTMSEVIEMLEGGVVGLQMPPRPFFCDDESMSPMMDSYQFSSGLTEILEEDE

SEQ ID NO: 170686 - protein, 64 aa, Oryza sativa
  Clone ID: PAT_MRT4530_68989C.1.pep
ARLGEREREEEEEESGGSHGQEGKNRNWGVLPSLGRLEEAFKGPNQLVYVTPVLAIGIDSFWIY

SEQ ID NO: 170687 - protein, 112 aa, Oryza sativa
  unsure (1)..(112): unsure at all Xaa locations
  Clone ID: PAT_MRT4530_6898C.1.pep
KTSSPAVARHLVLAGEXRRGGANGPHLRVEGDTANSPRARTTTDGNRRRRQRGRSGEDIRVDGDGDAPAIFGGNGERDEDSDDLVNTTATFPSDDDDQSSSSARLDLRRRTG

SEQ ID NO: 170688 - protein, 47 aa, Oryza sativa
  Clone ID: PAT_MRT4530_68990C.1.pep
GIQALVLLRWVSLVDGISIPHGQGAAGSTMGPLVESKMDSQQGQPMQ

SEQ ID NO: 170689 - protein, 72 aa, Oryza sativa
  Clone ID: PAT_MRT4530_68991C.1.pep
PFNLNYFLLPLFYTLLHPFQNYATDRSIHAAMAGAAAAAALRGSPAARRRRSRHEELIAELAAPHLRVVLPL

SEQ ID NO: 170690 - protein, 282 aa, Oryza sativa
  Clone ID: PAT_MRT4530_68992C.1.pep
MQEFQSIPGLAGRLFGGAAAADIRRAQAQQGPASRCGGIPSPEAVKCPRCESTNTKFCYYNNYNLSQPRHFCKSCRRYWTKGGVLRNVPVGGGCRKTKRSGSSSAASSAPSTPTAATDNAKNQRRASASSPRSSSGGSGNTSPTAAAATTPTTPATPSSNTIAVINHATTTTTTTNPFPTDVPPPAPIFADQAAALASLFAPPPPPPLPVFSFAAQAKTEDGIASVLLAGQTTAPTAATVADMTPFTSLDAGIFELGDVPPAAYWNAGSCWTDVPDPNVYLP

SEQ ID NO: 170691 - protein, 85 aa, Oryza sativa
  Clone ID: PAT_MRT4530_68993C.1.pep
MGATQQNGGQTYEALLFTGTTKKASRAGSSTRDCPRTLSLRISPISNTVPNDILNGTRIRTTSPTRVEAGHIERHPNPNNLTNKG

SEQ ID NO: 170692 - protein, 316 aa, Oryza sativa
  unsure (1)..(316): unsure at all Xaa locations
  Clone ID: PAT_MRT4530_68994C.1.pep
SRSVSHAKSSVSSKKSISHSKYSVYSTPTMGLSKKTVSASITLLFSPKKPEESKIPIPKEVIDHFIKCAQPXPPKKPISDFRRTITKTRICRLSLRSCXLAEKADETAAFCKSTSLNSLDDLDNLEEAELVLXSSNMENSWHCSFECQSKNLKIAFLYPVVVNFDRQLSKEAEIENYHLDALIKLNSCDHIILPYLAHHYXTLIVINIDDSKIFIYDSIRKERAHHQCLINLLNRTYMRYRWSGRSYRRSXVDAIXFGRVFKHQWIHRQPPATNLCGFYVMGIRLAIGAASYIATASGHHLMMESTQPHLWAGATR

SEQ ID NO: 170693 - protein, 113 aa, Oryza sativa
  unsure (1)..(113): unsure at all Xaa locations
  Clone ID: PAT_MRT4530_68995C.1.pep
MVLVVEPSLPTQPASPPGLPPXSTSPPLRPPPDXTRSSAPPRHLSTCARRWPPTQPPGLPPAWRSPSTPPSVISTPSTPPARCPAPTPSTPVHGVLVPPVSPPPLPGARLHAA

SEQ ID NO: 170694 - protein, 150 aa, Oryza sativa
  Clone ID: PAT_MRT4530_68996C.1.pep
MASKGPRSKLDHETRARRQKALEAPRGEPRRTKTHWDHLLGEMAWLAKEFDAERKWKLSMAKRIAQRANKGVVDQATKDERKQKYAFTDNVEIDDDYNSSLGEEPKDDEHTIDEDEAQITEAERNEELAALQAEADLPLDDILKLYTKNK

SEQ ID NO: 170695 - protein, 791 aa, Oryza sativa
  Clone ID: PAT_MRT4530_68997C.1.pep
MGGNSVTMAEELKGAAVPMSLDGRQGGGSISAGVCVDGMGACLSACGIQVLKFWCIRLVIFYSFIGSKCCSEVQFAFCYILFLQALEAPRGEPRRTKTHWDHLLGEMAWLAKEFDAERKWKLSMAKRIAQRANKGVVDQATKDERKQKVFYKNQLELEERKKKALDKQLDFLLGQTERYSTMLAENLVDVRLQNQENDSLQTNQRSQQELAQENINASSPTDVDNVEIDDDYNSSLGEEPKDDEHTIDEDEAQITEAERNEELAALQAEADLPLDDILKLYTKNKVQAFSVSRESSPDGRDVFSDSDSKDLIKDPLNQANGCNDESDHTSSDEGISSEEADDYQSYSEFVKKNTVKCNGNISSVDAKLTELSVRSLVSTEMTEGTWTLGELGPSGGAEVGWMQAVGGGATISRDLGGAEFGCWPWCNEQQGPRRGCARAAVQRAAERRADDEDYVANDEGKDDEATLSEEEELAKKEDCDPLDEVKLLQKESEIPLEELLARYQKDGYADDDTTELENSPALSVEDVNANMPVDDESADTVEVNRDLSADTMKLTRDQSAETVKVNNDQSAEIVEGNNDTFEDHESAGMLGPEHVSGSVLQLETSEPIVQENTAKEGDVTDTKAMANGDNSDVIADAAAAARSAQPTGNTFSTTNVRTKFPFLLKHSLREYQHIGLDWLVAMYEKRLNGILADEMGLGKTIMTISLLAHLACEKGIWGPHLIVVPTSVMLNWETEFLKWCPAFKILTYFGSAKERKQKRQGWMKPNYFHSHQEFKDWFCNPISGMVEGQDK

SEQ ID NO: 170696 - protein, 1607 aa, Oryza sativa
  unsure (1)..(1607): unsure at all Xaa locations
  Clone ID: PAT_MRT4530_68998C.1.pep
MANFFPMALKGHARGWLMNLPPASVHSWEDLCQQFTMNFQGTYPRPGEEADLHAVQRRDDESLRSYIQRFCQVRNTIPCIPAHAVIYAFRGGVRHNRMLEKIASKEPQTTAELFQLADRVARKEEAWTWNPSGSGVAASAAPGSAAQTGRRDRRRKKRSAHTDDEGHVLAVEGAPRATRKGRPGXDKKKEAGAPSRERPTGKXKSLAERTRKWEEERRQERREGKSPAVPSGNRRSEAKQKAPAEDIDDSDDDLGFQEPGAIVATVDGGACAHVSRRNLKAMKRELLAAAPTHEATRRARWSEVALTFDQTDHPPCVARGGQIAMVVSPTVCNVKLGRVLIDGGAALNILSPAAFDAIKAPGMMLRPSQPIIGVTPGHTWPLGHIDLPVTFGGPANFRTERVNFDVTDLSLPYNAVLGRPALVKFMAAVHYAYLQMKMPGPDGPISVHGDLKVALACMEQRADRLAVVSKPEGGDERLGTSAPAAPRQRIVTCDEVPEDALVSFLRANADVFAWRPADMPGVPREVIEHRLAVRPGARPVRQKVRRQAPERQAFIREEVARLLEAGFIREVIHPEWLANPVVVPKANGKLRMCIDYTDLNKACPKDPYPLPRIDQIVDSTAGCDLLCFLDAYSGYHQIRMAREDEEKTAFITPIGTYCYTTMPFGLKNAGPTFQRTTRISLGSQIGRNVEAYVDDLVVKTRNQETLLSDLAETFESLRSARIKLNPDKCVFVIPAGKLLGYLVSARGIEANPENIRAIERMRPPXKLRDVQCVTGXERALTQLKAYLSSPPVLVAPEPNEPLLLYLAATPQVVSAALVVERDEDNPHSAHPHPVLAWPGREQGGEAPEPDGGPRPPTTGAGPLPACQTVPGAPDPQDGPEATAGRPHLSPSDPEANPVPIRPGREQGEEAPEPNGGLRPLTTGVGPLPACPTTPGAPDPQDGPEATVGRPPLSSSDPEVVGTEDECAPRGRLGEERPRDAAPSEEDRPHRKVQRPVYFVSEALRDAKTRYPQAQKMLYAILMASRKLRHYFQAHRVTVVTSYPLGQILHNREGTGRVVKWAIELSEFDLHFEPRNAIKSQALADFVAEWTPAPELVSVPEANSGPSQLPHTAHWVMQFDGSLSLQGVGAGVTLTSPSGDVLRYLVRLDFRVTNNMAEYEGLLAGLRVAAGLGIRRLLVLGDSQLVVNQVCKEYRCSDPQMDAYVRQVRRMEHHFDGIELRHVPRRDNMMADELSRLASSRAQTPPGAFEERLAQPSARPDPLGETDAPDRPPRPVGVQASGPEGSAPSSLRLIAWIAEIQAYLTDKTLPEDREGSERVHRISKRYVLVEGTLYRRAANGILLKCIPREGIVLLANIHEGECGAHSASRTLVGKAFRQGFYWSTALNDAVDLFTKWPEAYLVVKIDKHSALKFIKGITARFGVPNRIITDNGTQFTSELFGDYCEDMGIKLCFASPAHPRSNGQVERANAEILKGLKTKTFNILKKHGDSWIEELPAVLWANRTTPSQATGETPFFLVYGAEAVLPSELTLRSPRATMYCEADQDQLRRDDLDYLEERRRRAALRAARYQQSLRRYHQRHVRARSLCVDDLVLRRVQTRAGLSKLSPM

SEQ ID NO: 170697 - protein, 2015 aa, Oryza sativa
  unsure (1)..(2015): unsure at all Xaa locations
  Clone ID: PAT_MRT4530_68999C.1.pep
MAEQAKAHDLSPRVSGDDGEPNPRRRARTPPPPPRQSPKRGEALKRVERSATSPIAGDGEERRDGERRLLVYGDGSTPQGALQAAGALLHHPPVVPDPESPAQRWLDDVAKLVMTARQRLDAGGRSSATKASGAATTGSASSRRRARRAAAAVRHSAATPSSTPSTREDLRGGPDARPSIERRRNDRRAAHATEGASSSRVSPQHGRGNQPSVPPVGGVGCRAFVASLRNVRWPPRFRPTIAEKYDGSVNPAEFLQVYTTGIEAAGGDDRVMANFFPMALKGQARGWLMNLPPASVHSWEDLCQQFTMNFQGTYPRPGEEADLHAVQRRDDESLRSYIQRFCQVRNTIPCIPAHAVIYAFRGGVRHNRMLEKIASKEPQTTAELFQLADRVARKEEAWTWNPSGSGVAASAAPGSAAQTGRRDRRRKKRSVHSDDEGHVLAVEGASRATQKGRSASDKKKKAGAPSRERPAGKWCTVHNTSLHDLVDCRAVKSLAERTRKWEEERRQERREGRSPAVPSGNRRSEAKQKAPAEDIDDGNDDLGFQEPGATIATVDGGACAHVSRRSFKAMKRELLAAAPTHEATRRARWSEVALTFDQTDHPPCVARGGQIAMVVSPTVCNVKLGRVLIDGGAALNILSPAAFDAIKAPGMVLRPSQPIVGVTPGHTWPLGHIDLPVTFGGSANFCTERVNFDVADLSLPYNAVLGRPALVKFMAAVHYAYLQMKMPGPGGPISVHGDLKVALACLEQRADHLAAASKPEGNDERLGASAPVTPRQRMITCDEVPEDALVSFLRANADVFAWRPADMPGVPREVIEHRLAVRPGARPVRQKVRRQAPERQAFIREEVARLLEAGFIREVIHPEWLANPVVVPKANGKLRMCIDYTDLNKACPKDPYPLPRIDQIVDSTAGCDLLCFLDAYSGYHQIRMAREDEEKTAFITPIGTYCYTTMPFGLKNAGPTFQRTTRISLGSQLGRNVEAYVDDLVVKTRNQETLLSDLAETFESLRSARIKLNPDKCVFGVPAGKLLGFLVSARGIEANPEKIRAIERMRPPXKLRDVQCVTGCMAALSRFISRLGEKALPLFKLLKRFGPFTWTEEAESALTQLKAYLSSPPVLVAPEPDEPLLLYLAVTPQVVSAALVVERDEGNSHFALPHPVPTWPGREQGGEAPEPNGGLRPPTTGVGPLPACQTVLGAPDPQEGPEATVGRPHLSPFDPEANPVLTQPGKEQGEEAPEPNGGLRPLTTGVGPLPACPTTPGAPDPXDGPEATVGRPPLSSSDPEVISTEDKCAPRGCLDEECPRDAAPSEEDRPHRKVQRPVYFVSEALRDAITRYPQAQKMLYAILMASRKLRHYFQAYRVTVVTSYPLGQILHNREGTGRVVKWAIELSEFDLHFEPRHAIKSQALADFVAEWTPAPEPVSIPEASTDPSQLPHTAHWVMQFDGSLSLQGAGAGVTLTSPSGDVLRYLVRLDFRATNNMAEYXGIRRLLVLGDSQLVVNQVCKEYRCSDPQMDAYVRQVRRMERHFDGIELRHVPRRDNMFADELSRLASSRAQTPLGAFEERLAQPSARPDPLGETDAPDRPPRPVGVQASGPEGSAPSSLRLIAWIAEIQAYLTDKTLPEDREGSERVHRISKRYVLVEWTLYRRAANGILLKCIPREQGVVLLADIHEGECGAHSASRTLVGKAFRQGFYWPTALNDAVDLVRRCRACQFHAKQIHQPAQALQTIPLSWPFVVWGLDILGPFRRAPGGFEYLYVAIDKFTKWPEAYPVVKIDKHSALKFIKGITARFGVPNRIITDNGTQFTSELFGDYCEDMGIKLCFASPAHPRSNGQVERANAEILKGLKTKTFNILKKHGDSWIEELPVVLWANRTIPSRATGETPFFLVYGAEAVLPSELTLRSPRATMYCEADQDQLRRDDLDYLEERRRRAALRAARYQQSLRRYHQRHVRARSLCVDDLVLRRVQTRTGLSKLSPMWEGPYRVVGVPRPGSIRLATGDGTELPNPWNIEHLRRFYP

SEQ ID NO: 170698 - protein, 54 aa, Oryza sativa
  unsure (1)..(54): unsure at all Xaa locations
  Clone ID: PAT_MRT4530_6899C.1.pep
MLXKGXGXRAPCSLRVAAXXXCPPXCXXXSPWVVXXXGXXCGFVLRARGFLLXR

SEQ ID NO: 170699 - protein, 261 aa, Oryza sativa
  Clone ID: PAT_MRT4530_689C.1.pep
MAAMLPGVECARRRRLRQGGGAGADAAAAGGGTRRSSFCVHAAGHGGGQTCGGAAANHSGKQRSSVMELIHGWSLDSNAREAKERLDQKLRSQRESVIKRHHSTGSIKLNRGATGGGGGGGRSTATAAMGVQREVYSRKGVMRRLMRWSRLRWDAAEQAECAMLDIISVDRCQICVTSSTESTDMKKSSTDTVHEEVDGVTRWLPNGPMFTCNFISLLLLMAHSDIATPPDFMAHQFSEHVAAKRAFLSHLHNEGLASFEN

SEQ ID NO: 170700 - protein, 785 aa, Oryza sativa
  Clone ID: PAT_MRT4530_68C.1.pep
MAIAEGEAAHGVFAYAAAADSASADDPMTVKMLRDAAADVVSSSTATRIHLFREILPPLLSRGSDSALFVAQLIRFIFRTLPVYDDQASNNAVDDLVQLALRKPTFLGHFAFMLVETMEQNMKFSRPPLLSDVHKMYVEKVRNSMFHVRESPQFFKLILDFAMTSSSLSSEYKHSDEQMRADALVIVGTLIIKSTDPETLTTMLDAITTSLGGSKEELSNTYKRIGMIKALAELSTSPAVHQINTVAASISGFLMTCYKDDGKVKVFLSMLDALIQMDLSIVLPAIDRYKAGLKDEVCLRKGYLELLRAVCKNSAALRKITSLLDQLVQLLIISFTSTTQRLDGIYTLFAVSRIVAVDTDASLPTICSAIYDACGQVDLFTLICQNELSSNSALSLSELSDEDCLVTVDLVQSLIVENLSWVKEKISIQSLLQLLIHPACHPHREVRKLAYVATEKILASTAVLGQDLLLLFNNWLSLIGNRTLTLEQSPRSYSQLILCSHHPCISNSRPAAVWKRLQRVLKHHQIVFIDLIATNMSAIFMELLRQDDSLTCDEYALEARLHSLRTVAAILPNNGLPEFEAFISLLKAISTSAASATATIAIFVVSYPIKWPDKVSVNYQMILEALLFVFFPLALLATGLSHAAEKDERWLGLASALVLFEFFYALALGGGISIAIQVRPRIAVCATVFSSMVVITFAWSLMFSHPENQVVTIAGYYSKQQFLKKMHFWARHPDMPTGDMPQSPRSSLSKLFKWFKKESSAPSQESVTEQVMPQPSFRSKFIEWL

SEQ ID NO: 170701 - protein, 1970 aa, Oryza sativa
  Clone ID: PAT_MRT4530_69000C.1.pep
MAEPAKAHDLSPSMSGDDGEPNPRRRARTPPPPPRQSPRREKALERAEGSATSTPTGGGEGRRDGERRLLVYGDGSTPQGALQAAGALLRHPPVAHDPESPAQRWLDDVAKLVMTARQRLDAGGRSSATKASGAATTGSASSRRRARRAAAAVRHSAATPSSTPPTREDLRGEPDARISIERRRNGRRAPHATEGASSSGVSPHHGRGDQPSVPPVGGVGCRAFVASLRNVRWPPRFRPTIAEKYDGSVNPAEFLQVYTTGIEAAGGNDRVMANFFPMALKGQARGWLMNLPPASVHSWEDLCQQFTMNFQGTYPRPGEEADLHAVQRRDDESLRSYIQRFCQVRNTIPCIPAHAVIYAFRGGVRHNRMLEKIASKEPQTTAELFQLADRVARKEEAWTWNPSGSGVAASAAPGSAAQIGRRDRRRKKRSAHTDDEGHVLAVEGASRATRKGRPAGGKKNEAGAPNREHPTGKWCTVHNTSLHDLADCRAVKSLAERTRKWEEERRQERREGKSPAVPSGNRRSEAKQKAPAEDIDDGDDDLGFQEPGATIATVDGGACAHVSRRSFKAMKRELLAAAPTHEATCRARWSEVALTFDQTDHPPCVARGGQIAMVVSPTVCNVKLGRVLIDGGAALNILSPAAFDAIKAPGMVLRPSQPIIGVTPGHTWPLDHIDLPVTFGGSANFRTERVNFDVADLSLPYNAVLGRPALVKFMAVVHYAYLQMKMPGPGGPISVHGDLKVALACLEQRADHLAAASKPEGGDERLGASAPATPRQRMITGDEVPEDALVSFLRANADVFAWRPADMPGVPREVIEHRLAVRPGARPVRQKVRRQAPERQAFIREEVARLLEAGFIREVIHPEWLANPVVVPKANGKLRMCIDYTDLNKACPKDPYPLPRIDQIVDSTAIRMAREDEEKTAFITPIGTYCYTTMPFGLKNAGPTFQRTTRISLGNQLGRNVEAYVDDLVVKTRNQEMLLSDLAETFESLRSARIKLNPDKCVFGVPAGKLLGFLVSARGIKANPEKIRAIERMRPPSKLRDVQCVTGCMAALSRFISRLGEKALPLFKLLKRSGPFTWTEEAENALTQLKAYLSSPPVLVAPEPDEPLLLYLAATPQVVSAALVVERDENSSHFTLPHPVPTWPGREQGGEAPEPNGDPRPPTTGVGPLPTCQTVLGAPDPQEGPEATVGRPHLSPFDPEANPVLTRPGKEQGEEAPEPNGGLRPLTTGVGPLPAFPTTPGAPDPQDGPEATVGRPPLLSSDPEVISTEDKCAPRGCLDEECPRDAAPSEEDRPHRKAHRVTVVTSYPLGQILHNREGTGRVVKWAIELSEFDLHFEPRHAIKSQALADFVAEWTPAPEPVSIPEASTDPSQLPHTAHWVMQFDGSLSLQGAGAGVTLTSPSGDVLRYLVRLDFRATNNMAEYEGLLAGLRVAAGLGIRRLLVLGDSQLVVNQVCKEYRCSDPQMDAYVRQVRRMEHHFDGIELRHVPRRDNMIADELSRLASSRAQTPPGAFEERLAQPSARPDPLGETDAPDRPPRPVGVQASGPEGSAPNSLRLIAWIAEIQAYLTDKTLPEDREGSERVHRISKRYVLVEGTLYRRAANGILLKCIPREQGVVLLADIHEGECGAHSASRTLVGKAFRQGFYWPTALNDAVDLVRRCRACQFHAKQIHQPAQALQTIPLSWPFAVWGLDILGPFRRAPGGFEYLYVAIDRFTKWPEAYPVVKIDKHSALKFIKGITARFGVPDRIITDNGTQFTSELFGDYCEDMGIKLCFASPAHPRSNGQVERANAEILKGLKTKTFNILKKHGDSWIEELPAVLWANRTTPSRATGETPFFLVYGAEAVLPSELTLRSPRATMYCEADQNQLRRDDLDYLEERRRRAALRAARYQQSLWRYHQRHVRARSLCVDDLVLRRVQTRAGLSKLSPMWEGPYRVVGVPRPGSIRLATGDGTELPNPWNIEHLRRFYP

SEQ ID NO: 170702 - protein, 2051 aa, Oryza sativa
  Clone ID: PAT_MRT4530_69001C.1.pep
MTDVTGLIPVMSSADSHDSTSRLLPAEVEVGMGRPIRRSFGRQPYKSPSVYEKVGPIAEPAKAHDLSPSMSGDDGEPNPRRRARTPPPPPRQSPRREKALERAEGSATSTSTGGGEGRRDGERRLLVYGDGSTPQGALQAAGALLRHPPVAHDPESPAQRWLDDVAKLVMTARQRLDAGGRSSATKASGAATTGSASSRRRARRAAAAVRHSAATPSSTPPTREDLRGEPDARISIERRRNGRRAPHATEGASSSGVSHHHGRGDQPSVPPVGGVGCRAFVASLRNVRWPPRFRPTIAEKYDGSVNPAEFLQVYTTGIEAAGGDDRVMANFFPMALKGQARGEEADLHAVQRRDDESLRSYIQRFCQVRNTIPCIPAHAVIYALRGGVRHNRMLEKIASKEPQTTAELFQLADRVARKEEAWTWNPSGSGVAASAAPGSAAQIGRRDRRRKKRSAHTDDEGHVLAVEGASRATRKGRPAGGKKNEAGAPNRERPTGKWCTVHNTSLHDLADCRAVKSLAERTRKWEEERRQERREGKSPVVPSGNRRSEAKQKAPAKDIDDGNDDLGFQEPGATIATVDGGACAHVSRRSFKAMKRELLAAAPTHEATRRARWSEVALTFDQTDQPPCVARGGQIAMVVSPTVCNVKLGRVLIDGGAALNILSPAAFDAIKAPGMVLRPSQPIIGVTPGHTWPLGHIDLPVTFGGSANFRTERVNFDVADLSLPYNAVLGRPALVKFMAAVHYAYLQMKMPGPGGPISVHGDLKVALACLEQRADHLAAASEPEGGDERLGASAPATPRQRMITGDEVPEDALVSFLRANADVFAWRPADMPGVPREVIEHRLAVRPGARPVRQKVRRQAPERQAFIREEVARLLEAGFIREVIHPEWLANPVVVPKANGKLRMCIDYTDLNKACPKDPYPLPRIDQIVDSTAGCDLLCFLDAYSGYHQIRMAREDEEKTAFITPIGTYCYTTMPFGLKNAGPTFQRTTRISLGNQLGRNVEAYVDDLVVKTRNQEMLLSDLAETFESLRSARIKLNPDKCVFGVPAGKLLGFLVSARGIEANPEKIRAIERMRPPSKLRDVQCVTGCMAALSRFISRLGEKALPLFKLLKRSGPFTWTEEAENALTQLKAYLSSPPVLVAPEPDEPLLLYLAATPQVVSAALVVERDENNSHFTLPHPVPTWPGREQGGEAPEPNGGPRPPTTGVGPLPACQTVLGAPDPQEGPEATVGRPHLSPFDPEANPVLTRPGKEQGEEAPEPNGGLRPLTTGVGPLPACPTTPGAPDPQDGPEATVGRPPLLSSDPEVISTEDKCAPRGCLDEECPRDAAPSEEDRPHRKVQRPVYFVSEALRDAKTRYPQAQKMLYAILMASRKLRHYFQAHRVTVVTSYPLGQILRNREGTGRVVKWAIELSEFDLHFEPRHAIKSQALADFVAEWTPAPEPVSIPEASTDPSQLPHTAHWVMQFDGSLSLQGAGAGVTLTSPSGDVLRYLVRLDFRATNNMAEYEGLLAGLRVAAGLGIRRLLVLGDSQLVVNQVCKEYRCSDPQMDAYVRQVRRMERHFDGIELRHVPRRDNMIADELSRLASSRAQTPPGAFEERLAQPSARPDPLGETDAPDRPPRPVGVQASGPEGSAPNSLRLIAWIAEIQAYLTDKTLPEDREGSERVHRISKRYVLVEGTFYRRAANGILLKCIPREQGVVLLADIHEGECGAHSASRTLVGKAFRQGFYWPTALNDAVDLVRRCRACQFHAKQIHQPAQALQTIPVSWPFAVWGLDILGPFRRAPGGFEYLYVAIDKFTKWPEAYPVVKIDKHSALKFIKGITARFGVPNRIITDNGTQFTSELFGDYCEDMGIKLCFASPAHPRSNGQVERANAEILKGLKTKTFNILKKHGDSWIEELPAVLWANRTTPSRATGETPFFLVYGAEAVLPSELTLRSPRATMYCEADQNQLCRDDLDYLEERRRRAALRAARYQQSLRRYHQRHVRARSLCVDDLVLRRVQTRAGLSKLSPMWEGPYRVVGVPRPGSIRLATGDGTELPNPWNIEHLRRFYP

SEQ ID NO: 170703 - protein, 454 aa, Oryza sativa
  Clone ID: PAT_MRT4530_69002C.1.pep
VKLVFGEDIRWAQVPASCSMAQLREAVRSKFPGLKAVLVKYKDKEGDLVTITNQDELKWAEDLAEPGSSLRLYVTEANPEHEPYLDDTNSGPLERNVNSDNGSTRSNRQDEDRSTVTCIDDWIVQFARLFKNHVGVSSDEYLDLHEVSMKLYTEAIEDTITTEEAQEVFQLAESNFQEMAALAFFHWGNVHMSRARKRLLLPGDSPQESVLEQVKEAYEWAKEEYNKAGRRYEEAVKAKPNFFEGFLALAHQHFEQAKLSWYYAIGSSVDLDTWPSSEVLELFNKAEDNMERGTEMWEEMEEQRLKNRSKPSQENVVLEKMGLDEYIKEGSPEDAAEQASNMRSQINILWGMLLYERSVVEFKLGLPMWEDCLMAAIEKFKLGGASATDIAVLVKNHCANETAQDGLGFKIDEIVQAWNEMYDIKRWLRGVPSFRLEPLFRRRVPQLHTALEHI

SEQ ID NO: 170704 - protein, 1995 aa, Oryza sativa
  Clone ID: PAT_MRT4530_69003C.1.pep
MAEPAKAHDLSPSMSGDDGEPNPRRRARTPPPPPRQSPRREKALERAEGSATSTSTGGGEGRRDGERRLLVYGDGSTPQGALQAAGALLRHPPVAHDPESPAQRWLDDVAKLVMTARQRLDAGGRSSATKASGAATTGSASSRQRARRAAAAVRHSAATPSSTPPTRDDLRGEPDARVSIERRRNGRRAPHATEGTSSSGVSPHHGRGDQPSVPPVGGVGCRAFVASLRNVRWPPRFRPTIAEKYDGSVNPAEFLQVYTTGIEAAGGDDRVMANFFPMALKGQARGWLMNLPPASVHSWEDLCQQFTMNFQGTYPRPGEEADLHAVQRRDDESLRSYIQRFCQVRNTIPCIPAHAVIYAFRGGVRHNRMLEKIASKEPQTTAELFQLADRVARKEEAWTWNPSGSGVAASAAPGSAAQIGRRDRRRKKRSAHTDDEGHVLAVEGASRATRKGRPAGDKKKEAGAPGRERPTGKWCTVHNTSLHDLADCRAVKSLAERTRKWEEERRQERREGKSPAVPSGNRRSEAKQKAPAEDIDDGDDDLGFQEPGATIATVDRGACAHVSRRSFKAMKRELLAAAPTHEATCRARWSELGRVLIDGGAALNILSPAAFDAIKAPGMMLRPSQPIIGVTPGHTWPLGHIDLPVTFGGPANFRTERVNFDVADLSLPYNAVLGRPALVKFMAAVHYAYLQMKMPGPDGPISVHGDLKVALACMEQRADRLAVVSKPEGGDERLGTSAPAAPRQRIVTCDEVPEDALVSFLRANADVFAWRPADMPGVPREVIEHRLAVRPGARPVRQKVRRQAPERQAFIREEVARLLEAGFIREVIHPEWLANPVVVPKANGKLRMCIDYTDVNKACPKDPYPLPRIDQIVDSTAGCDLLCFLDAYSGYHQIRMAREDEEKTAFITPIGTYCYTTMPFGLKNAGPTFQGTTRISLGSQLGRNVEAYVDDLVVKTRNQETLLSDLAETFESLRSARIKLNPDKCVFGVPAGKLLGFLVSARGIEANPEKIRAIERIRPPSKLRDVQCVTGCMAALSRFISRLGEKALPLFKLLKHSGPFTWTEEAENALTQLKAYLSSPPVLVAPEPDEPLLLYLAATPQVVSAALVVERDEDNSHFTLPHPVPTWPGREQGGEAPVPNGGPTPPTTGVGPLPACQTVLGAPDPQEGPEATVGRPHLSPFDPEANPVLTRPGKEQGEEAPEPNGGLRPLTTGVGPLPACPTTPGAPDPQDGPEATVGRPPLLSSDPEVISTEDKCAPRGCLDEECPRDAAPSEEDRPHRKVQRPVYFVSEALRDAKTRYPQAQKMLYAILMASRKLRHYFQAHRVTVVTSYPLGQILHNREGTGRVVKWAIELSEFDLHFEPRHAIKSQALADFVAEWTPAPEPVSIPEASTDPSQLPHTAHWVMQFDGSLSLQGAGAGVTLTSPSGDILRYLVRLDFRATNNMAEYEGLLAGLRVAAGLGIRRLLVLGDSQLVVNQVCKEYRCSDPQMDAYVRQVRRMERHFDGIELRHVPRRDNMIADELSRLASSRAQTPPGAFEERLAQPSARPDPLGETDAPDRPPRPVGVQASGPEGSAPSSLRLIAWIAEIQAYLTDKTLPEDRERSERVHRISKRYVLVEGTLYRRAANGILLKCIPREQGVVLLADIHEGECGAHSASRTLVGKAFRQGFYWPTALNDAVDLVRRCRACQFHAKQIHQPAQALQTIPLSWPFAVWGLDILGPFRRAPGGFEYLYVAIDKFTKWPEAYPVVKIDKHSALKFIKGITARFGVPNRIITDNGTQFTSELFGDYCEDMGIKLCFASPAHPRSNGQLEHANAEILKGLKTKTFNILKKHGDSWIEELPAVLWANRTTPSRATGETPFFLVYGAEAVLPSELTLRSPRATMYCEADQDQLRRDDLDYLEERRRCAALRAARYQQSLRRYHQRHVRARSLCVDDLVLRRVQTRAGLSKLSPMWEGPYRVVGVPRPGSIRLATGDGTELPNPWNIEHLRRFYP

SEQ ID NO: 170705 - protein, 1975 aa, Oryza sativa
  Clone ID: PAT_MRT4530_69004C.1.pep
MTEQAKAHNLSPSVSGDDGEPNPRRRARTPPPPPRQSPRREEALERVEGSATSTSTGDGEGRRDGEHRLLVYGDGSTPQGALQAAGALLRHPPVVPDPESPAQRWLDDVANLVMTARQRLDAGGRSSATKASGAATTGSASSRRRARRAAAAVRHSAATPSSAPPTREDLRGGPDARISIERRRNGRRVAHATEGASSSGVSPQHGRGDQPSVPPVGGVGYKAFVASLRNVRWPPRFRPTIAEKYDGSVNPAEFLQVYTTGIEAAGGDDRVMENFFPMALKGQARGWLMNLPPASVHSWEDLCQQFTMNFQGTYPRPGEEADLHAVQRRDDESLRSYIQRFCQVRNTIPCIPAHAVIYAFRGGVRHNRMLEKIASKEPQTTAELFQLADRVARKEEAWTWNPSGSGVAVSAAPGSAAQTGRRDRRRKKRSTHSDDEGHVLAVEGASWATRKGRPASDRKKEASAPSRERPTGKWCTVHNTSLHDLADCRAVKSLAERTRKWEEERRQERREGKSPAVPSGNRRSEAKQKAPAEDIDDGDNDLGFQEPGATIATVDGGACAHVSRRSLKTMKRELLAAAPTHEATRRARWSELGRVLIDGGAALNILSPVAFDAIKAPGMMLRPSQPIIGVTPGHTCPLGHIDLPVTFGGSANFRMERVNFDVADLSLPYNAVLGRPALVKFMAAVHYAYLQMKMPGPGGPISVHGDLKVALACMEQRADHLAAASKPEGGDERLGASVPAAPRQRMITCDEVPEDALVSFLRANADVFAWRPADMPGVPREVIEHRLAVRPGAMPVRQKVRRQAPERQAFIREEVARLLEAGFIREVIHPEWLANPVVVPKANGKLRMCIDYTDLNKACPKDPYPLPRIDQIVDSTAGCDLLCFLDAYSGYHQIRMAREDEEKTAFITPIGTYCYTTMPFGLKNAGPTFQRTTRISLGSQIGRNVEAYVDDLVVKTHNQETLLSDLAETFESLRSARIKLNPDKCVFGVPAGKLLGFLVSARGIEANPEKIRAIERMRPPSKLRDVQCVTGCMAALSRFISRLGEKALPLFKLLKRSGPFTWTEEAERALTQLKAYLSSPPVLVAPEPDEPLLLYLAATPQVVSAALVVERDEDNPHSAHPHPVLAWPGREPGGEAPEPNGGPRPPTTGAGPLPACQTVPGAPDPQDGPAATAGRPHLSPSDPEANPVPTRPGREQGEEAPEPNEAPDPQDGPEATVGRPPLSSSDPEVVGTEDECAPRGRLDEERPKDATPSEEDRPHRKVQRPVYFVSEALRDAKTRYPQAQKMLYAILMASRKLRHYFQAHRVTVVTSYPLGQILHNREGTGRVVKWAIELSEFDLHFEPRHAIKSQALADFVAEWTPAPEPVSIPEANSGPSQLPHAAYWVMQFDGSLSLQGACAGVTLTSPSGDVLRYLVRLDFRATNNMAEYEGLLAGLRVAAGLGIRRLLVLGDSQLVVNQVCKEYRCSDPQMDAYVRQVRRMERHFDGIELRHVPRWDNTIADELSRLASSRAQTPPGAFEERLAQPSARPDPLGETDAPDRPPRPVGVQASGPEGSAPSSLRLIAWIAEIQAYLTDKTLPEDREGSERVQRISKRYVLVEGTLYRRAANGILLKCIPREQGIELLADIHEGECGAHSASRTLVGKAFRQGFYWPTALNDAVDLVRRCRACQFHAKQIHQPAQALQIIPLSWPFAVWGLDILGPFRRAPGGFEYLYVAIDKFTKWPEAYPVVKIDKHSALKFIKGITARFGVPNRIITDNGTQFTSELFGDYCEDMGIKLCFASPAHPRSNGQVERANAEILRGLKTKTFNILKKHGDSWIEELPAVLWANRTTPSRATKETPFFLVYGAEAVLPSELTLRSPRATMYCEADQDQLRRDDLDYLEERRRRAALRAARYQQSLRRYHQRHVRARSLCVDDLVLRRVQTRAGLSKLSPMWEGPYRVIGVPRPGSVRLATGDGTELPNPWNIEHLRRFYP

SEQ ID NO: 170706 - protein, 103 aa, Oryza sativa
  unsure (1)..(103): unsure at all Xaa locations
  Clone ID: PAT_MRT4530_69005C.1.pep
MQHGLSDAIGGGCLTKLGGDLHLGGLFYHLYNQIATNTLERVASLTQAVRKELKRVFVIGFSIIVFGNKISTQTGIGTSXIDLAGSAMDLHIKANIAEVKRKK

SEQ ID NO: 170707 - protein, 1975 aa, Oryza sativa
  Clone ID: PAT_MRT4530_69006C.1.pep
MAEQAKAHNLSPSVSGDDGEPNPRHRARAPPPPPRQSSRREEVLERVEGSATSTSTGDGEGRRDGERRLLVYGDGSTPQGALQAAGALLRHPPVVPDPESPAQRWLDDVANLVMTARQRLGAGGRSSATKTSGAATTGSVSSRRRARRAAAVARHSAATLSSAPPTQEDLRGGPDARISIERRRNGRRAAHAKEGASSSGVSHQHGRGDQPSVPPVGGVGCRAFVASLRNVRWPPRFRPTIAEKYDGSVNPAEFLQVYTTGIEAAGGDDRVMANFFPMALKGQARGWLMNLPPASVHSWEDLCQQFTMNFQGTYPRPGEEADLHAVQRRDDESLRSYIQRFCQVRNTIPCIPAHAVIYAFRGGVRHNRMLEKIASKEPQTTAELFQLADRVARKEEAWTWNPSGSGVAVSAAPGSAVQIGRRDRRRKKRSAHTDDEGHVLAVEGASRATRKGRPAGGKKNEAGAPNRERPTGKWCTIHNTSLHDLADCRAVKSLAERTRKWEEERRQERREGKSPAVPSGNRRSEAKQKAPAEDIDDGDDDLGFQEPGATIATVDGGACAHVSRRSFKAMKRELLAAAPTHEATRRARWSEVALTFDQTDHPPCVARGGQIAMVVSPTVCNVKLGRVLIDGGAALNILSPAAFDAIKAPEMVLRPSQPIIGVTPGHTWPLGHIDLPVTFGGSANFRTERVNFDMADLSLPYNAVLGRPALVKFMAAVHYAYLQMKMPGPGGPISVHGDLKVALACLEQRADHLAAASKPEGGDERLGAYAPATPRQRMITGDEVPEDALVSFLRANADVFAWRPADMPGVPRGLIEHRLAVRPGARPVRQKVRRQAPERQAFIREEVARLLEAGFIREVIHPEWLANPVVVPKANGKLRMCIDYTDLNKACPKDPYPLPRIDQIVDSTAGCDLLCFLDAYSGYHQIRMAREDEEKTAFITPIGTYCYTTMPFGLKNTCPTFQRTTRISLGSQLGRNVEAYVDDLVVKTRNQEMLLSDLAETFESLRSARIKLNPDKCVFGVPAGKLLGFLVSARGIEANPEKIRAIERMRPPSKLRDVQCVTGCMAALSRFISRLGEKALPLFKLLKRSGPFTWTEEAENALTQLKAYLSSPPVLVAPEPDEPLLLYLAATPQVVSTALVVERDENNSHFTLPHPVPTWPGREQGGEAPEPNSGPRPPTTGVGPLSACQTVLGAPDPQEGPEATVGRPHLSPFDPEANPVLTRPGKEQGEEAPEPNGGLRPLTTGVGPLPVCPTTPGAPDPQDGPEATVGRPPLLSSDPEVISIEDKCAPRGCLDEECPRDAAPSKEDRPHRKVQRPVYFVSEALRDAKTRYPQAQKMLYAILMASRKLRHYFQAHRVTVVTSYPLGQILHNREGTGRVVKWAIELSEFDLHFEPRHAIKSQVLADFVAEWTPAPEPVSIPEASTDPSQLPHTAHWVMQFDGSLSLQGAGDSQLVVNQVCKEYRCSDPQMDAYVRQVRRMERHFDGIELRHVPKRDNMIADELSQLASSRAQTPPGAFEERLAQPSARPDPLGQTDAPDRPPRPVGVQASGPEGSAPNSLRLIAWIAEIQAYLTDKTLPEDREGSERVHRISKRYVLVEGTLYRRAANGILLKCIPREQGVVLLADIHEGECGAHSASRTLVGKAFRQGFYWPTALNDAVDLVRRCRACQFHAKQIHQPAQALQTIPLSWPFAVWGLDILGPFRRAPGGFEYLYVAIDRFTKWPEAYPVVKIDKHSALKFIKGITARFGVPNRIITDNGTQFTSELFGDYCEDMGIKLCFASPAHPRSNGQVERANAEILKGLKTKTFNILKKHGDSWIEELPTVLWANRTTPSRATGETPFFLVYGAEAVLPSELTLRSPRATMYCEADQDQLRRDDLDYLEERRRRAALRAARYQQSLRRYHQRHVRARSLYVDDLVLRRVQTRAGLSKLSPMWEGPYRVVGVPRPGSIRLATSDGTELPNPWNIEHLRRFYP

SEQ ID NO: 170708 - protein, 86 aa, Oryza sativa
  Clone ID: PAT_MRT4530_69007C.1.pep
NPHPLNVAIHLLQTWVWPSTRYTHFPHMCMLKLGSKKQRRVDTLPTKFKHLQRLTALCHGTGLPTPPLNFPSFFFIVISTSSHNKL

SEQ ID NO: 170709 - protein, 1932 aa, Oryza sativa
  Clone ID: PAT_MRT4530_69008C.1.pep
MAEPAKAHDLSPSMSGDDGEPNPRRRARTLPPPPRQSPRREKALERAEGSATSTPTGGGEGRRDGERRLLVYGDGSTPQGALQAAGALLRHPPVAHDPESPAQRWLDDVAKLVMTARQRLDAGGRSSATKASGAATTGSASSRRRARRAAAAVRHSAATPSSTPPTREDLRGEPDARISIERRRNGRRAPHATEGASSSGVSPHHGRGDQPSVPPVGGVGCRAFVASLRNVHWPPRFRPTLAKKYDGSVNPAEFLQVYTTGIEAAGGDDRVMANFFPMALKGQARGWLMNLPPASVHSWEDLCQQFTMNFQGTYPRPGEEADLHAVQRRDDESLRSYIQRFCQVRNTIPCIPAHAVIYAFRGGVRHNRMLEKIASKEPQTTAELFQLADRVARKEEAWTWNPSGSGVAASAAPGSAAQIGRRDRRRKKRSAHTDDEGHVLAVEGASRATRKGRPAGGKKNEAGAPNRERPTGKWCTVHNTSLHDLADCRAVKSLAERTRKWEEERRQERREGKSPAIPSGFQEPGATIATVDGGACAHVSRRSFKAMKRELLAAAPTHEATCRARWSEVALTFDQTDHPPCVAQGGQIAMVVSPTVCNVKLGRVLIDGGAALNILSPAAFDAIKAPGMVLRPSQPIIGVTPGHTWPLGHIDLPVTFGGSANFRTERVNFDVADLSLPYNAVLGRPALVKFIAAVHYAYLQMKMPGPGGPISVHGDLKVALACLEQRADHLAAASKPEGGGERLGASAPATPRQRMITGDEVPEDALVSFLRANADVFAWRPADMPGVPREVIEHRLAVRPGARPVRQKVQRQAPERQAFIREEVARLLEAGFIREVIHPEWLANPVVVPKANGKLRMCIDYTDLNKACPKDPYPLPRIDQIVDSTAGCDLLCFLDAYSGYHQIRMAREDEEKTAFITPIGTYCYTTMPFGLKNAGPTFQRIEANPEKIRAIERMRPPSKLRDVQCVTGCMAALSRFISRLGEKALPLFKLLKRSGPFTWTEEAENALTQLKAYLSSPPVLVAPEPDEPLLFYLAATPQVVSAALVVERDENNSHFTLPHPVPTWPGREQGGEAPEPNGGPRPPTTGVGPLPACQTVLGAPDPQEGPEATVGRPHLSPFDPEANPVLTRPGKEQGEEAPEPNGGLRPLTTGVGPLPACPTTPGAPDPQDGPEATVGRPPLLSSDPEVISTEDKCAPRGCLDEECPRDAAPSEEDRPHRKVQRPVYFVSEALRDANTRYPQAQKMLYAILMASRKLRHYFQAHRVTIVTSYPLGQILHNREGTGRVVKWAIELSEFDLHFEPRHAIKSQALADFVAEWTPAPEPVSIPEASTDPSQLPHTAHWVMQFDGSLSLQGAGAGVTLTSPSGDVLRYLVRLDFRATNNMAEYEGLLAELRVAAGLGIRRLLVLGDSQLVVNQVCKEYRCSDPQMDAYVRQVRHMERHFDGIELRHVPRRDNMIADELSRLASSRAQTPPGAFEERLAQPSARPDPLGETDAPDRPPRPVGVQASGPEGSAPNSLRLIPWIAEIQAYLTDKTLPEDREGSERVHRISKRYVLVEGTLYRRAANGILLKCIPREQGVKLLADIHEGECGSHSASRTLVGKAFRLGFYWPTALNDAVDLVRRCRACQFHAKQIHQPAQALQIIPLSWPFAVWGLDILGPFRRAPGGFEYLYVAIDKFTKWPEAYPVVKIDKHSALKFIKGITARFGVPNRIITDNGTQFTSELFGDYCEDMGIKLCFASPAHPRSNGQVERANAEILKGLKTKTFNILKKHGDSWIEELPAVLWANRTTPSRATGKTPFFLVYGAEAVLPSELTLRSPRATMYCEADQNQIRRDDLDYLEERRRRAALRAARYQQSLRHYHQRHVRARSFCVDDLVLRRVQTRAGLSKLSPMWEGPYRVIGVPRPGSVRLATGDGTELPNPWNIEHLRRFYP

SEQ ID NO: 170710 - protein, 1900 aa, Oryza sativa
  Clone ID: PAT_MRT4530_69009C.1.pep
MAEQAKAHDLSPSVSGDDGEPNPRRRARTPPPPPRQSPKRGEALERVERSATSPIAGDGKERRDGERRLLVYGDGSTPQGALQAAGTLLRHPPVVPDPESPAQRWLDDVAKLVMTARQRLDAGGRSSATKASGAATTGSASSRRRALRAAAAVRRSTATPSSTPSTREDLRGGPDARTSIERRRNDRSAPHATEGASSSRVSSQHGRGNQPSVPPVGGVGCRAFVASLRNVRWPPRFRPTIAEKYDGSINPAEFLQVYTTGIEAAGGDDRVMANFFPMALKGQARGWLMNLPPASVHSWEDLCQQFTMNFQGTYPRPASAAPGSAAQTGRRDRRRKKRSVHSDDEGHVLTVEGASRATRKGRPASDKKKEASAPSRERPTGKWCTVHNTSLHDLADCRAVKSLAERTRKWEEERRQERREGKSPAVPSGNRRSEAKQKAPAEDIDDGDDDLGFQEPGATIATVDGGACAHVSRRSFKAMKRELLAAAPTHEATRRARWSEVALTFDQTDHPPCVARGGQIAMVVSPTVCNVKLGRVLIDGGAALNILSPAAYDAIKAPGMELRPSQPIIGVTPGHTWPLGHIDLPVTFGGSANFRTERVNFDVADLSLPYNAVLGRPALVKFMAAVHYAYLQMKMPGPGGPISVHGDLKVALACMEQRADHLAAASKPEGGDERLGASAPATPRQRMITCDEVPEDALVSFLRANADVFAWRPADMPGVPREVIEHRLAVRPGARPVRQKVQRQAPKRQAFIREEVARLLEAGFIREVIHPEWLANPVVVPKANGKLRMCIDYTGLNKACPKDPYPLPRIDQIVDSTAGCDLLCFLDAYSGYHQIRMAREDEEKTAFITPIGTYCYTTIPFGLKNAGPTFQRTTRISLGSQLGRNVEAYVDDLVVKTRNQGTLLTDLAETFESLRSARIKLNPDKCVFGVPAGKLLGFLVSARGIEANPEKIRAIERMRPPSKLRDVQCVTGCMAALSRFISRLGEKALPLFKLLKRSGPFTWTEEAENALTRLKEYLSSPPVLVAPEPDEPLLLYLAATPQVVSAALVVERDENNSHFAHPRPGREQGGEAPEPNGGPRPPTTGVGSLLACQTVLGAPDPQEGPEATVGRPHLSPFDPGPSSVLTRPRKERGEEAPEPNGGLRPLTTGVGPLPACPTTTGAPDPQDGPEATEVRPPLLSSDPEVISTEDKYAPRGCLDKECPRDAAPSEEDRPHRKVQRPVYFVSEALRDAKTRYPQAQKMLYAILMASRKLRHYFQAHRVTVVTSYPLGQILHNREGTGRVVKWAIELSEFDLHFEPRHAIKSQALADFVAEWTPPPELVSVPEASADPSQLPHTAHWVMQFDGSLSLQGAGAGVTLTSPSGDVLRYLVRLDFRATNNMAEYEGLLAGLRVAAGLGIRRLLVLGDSQLVVNQVCKEYRCSDPQMDAYVRQVRRMERYFDGIELRHVPRRDNMIADELSRLASSRAQTPPGAFEERLAQPSARPDPLGETDAPDRPPRPVGAQASRPEGSAPSSLRLIAWIAEIQAYLTDKTLPEDREGSERVHRISKRYVLVEGTLYRRAANGVLLKCIPREQGVVLLADIHEGECGAHSASRTLVGKAFRQGFYWPTALSDAVDLVRRCRACQFHAKQIHQPAQALQTIPLSWPFAVWGLDILGPFRRAPGGFEYLYVAIDKFTKWPEAYPVIKIDKHSALKFIKGITARFGVPNRIITDNGTQFTSELFGDYCEDMGIKLCFASPAHPRSNGQVERANLEILKGLKTKTYNILKKHGDSWVEELPALTLRSPRATMYCEADQDQLRRDDLDYLEERRRRAALRAARYQQSLRRYHQRQVRARSLCVDDLVLRRVQTHAGLSKLSPMWEGPYRVIGVPRPGSVRLATGDGTELPNPWNIEHLRRFYP

SEQ ID NO: 170711 - protein, 362 aa, Oryza sativa
  unsure (1)..(362): unsure at all Xaa locations
  Clone ID: PAT_MRT4530_6900C.1.pep
GEQAEGRGRADRVHGSGAHAAASRSTVDRVHPGSHRPAPWAPSVSRTRGRGRLTAGPHAAAARRARRRPRRRXGGRRRARAPMVVGGGHRHGGAAAERGKGKGETRWRSTAHPRSTATTKKAAGEEEGGGAARVDGDGGASAVGELDEGVDGDGDGAAKPEEATPGRETVPASGESRPKVVSDGGERGRRRELDSGEETVRQGAETGEGGAGRVXIGLEGGEGGRERKETGREVRPPSMAPARFAGXIRPFECEREREKWGERERGSRGVFPLTLLHAGTAGCGGFGGCGGARXRARRRERQEEGDDGWAPPISEGGGRARPSAARARGGAEWAAGEEERGGGEWAEPAQEREGGFLGFFFL

SEQ ID NO: 170712 - protein, 1995 aa, Oryza sativa
  Clone ID: PAT_MRT4530_69010C.1.pep
MAEPAKAHDLSPSMSGDDGEPNPRRRARTPPPPPRQSPRREKALERAEGSATSTPTGGGEGRRDGERCLLVYGDGSTPQGALQAAGALLRHPPVAHDPESPAQRWLDDVAKLVMTARQRLDAGGRSSATKASGAATTGSASSRRRARRAAAAVRHSAATPSSTPPTREDLRGDPDARISIERRRNGRRAPHATEGASSSGVSPHHGRGDQPSVPPVGGVGCRAFVASLRNVRWPPRFWPTIAEKYDGSVNPAKFLQVYTTGIEAAGGDDRVMANFFPMALKGQARGWLMNLPPASVHSWEDLCQQFTMNFQGTYPRPGEEADLHAVQRRDDESLRSYIQRFCQVRNTIPCIPVHAVIYAFRGGVRHNRMLEKIASKEPQTTAELFQLADRVARKEEAWTWNPSGSGVAASAAPGSAAQTGRRDRRRKKRSVHSDDEGHVLAVEGASRATQKGRPASDKKKKAGAPSRERPAGKWCTVHSTSLHDLADCRAVKSLAERTRKWEEERRQERREGKSPAVPSGNRRSEAKQKAPAEDIDDGDDDLGFQEPRATIATVDGGACAHVSRRSLKAMKRELLAAAPTHEATRRARWSEVALTFDQTDHPPCVARGGQIAMVVSPTVCNVKLGRVLIDGGAALNILSPAAFDAIKAPGMMLRPSQPIIGVTPGHTWPLGHIDLPVTFGGPANFRTERVNFDVADLSLPYNVVLGRPALVKFMAAVHYAYLQMKMPGPDGPISVHGDLKVALACMEQRADRLAVVSKPEGGDERLGTSAPAAPRQRIVTCDEVPEDALVSFLRANADVFAWRPADMPGVPREVIEHRLAVRPGARPVRQKVRRQAPERQAFIREEVARLLEAGFIREVIHPEWLANPVVVPKANGKLRMCIDYTDLNKACPKDPYPLPRIDQIVDSTAGCDLLCFLDAYSGYHQIRMAREDEEKTAFITPIGTYCYTTMPFGLKNAGPTFQRTTRISLGSQLGRNVEAYVDDLVVKTRNQETLLSDLAETFESLRSARIKLNPDKCVFGVPAGKLLGFLVSARGIEANPEKIRAIERMRPPSKLRDVQCVTGCMAALSRFISRLGEKALPLFKLLKRSGPFTWTEEAERALTQLKAYLSSPPVLVAPEPNEPLLLYLAATPQVVSAALVVERDEDNPHSAHPHIVQTWPGREQGGEAPEPNGGPRPPTTGVGPLPACQIVLGAPDPQEGPEATAGRPHLSPSDPEANPVPIRPGREQGEEAPEPNGGLRPLTTGVGPLPACPTTPGAPDPQDGPEATVGRPPLSSSDPEVVGTEDECAPRGRLGEERPRDAAPSEEDRPHRKVQRPVYFVSEALRDAKTRYPQAQKMLYTILMASRKLRHYFQAHRVTVVTSYPLGQILHNREGTGRVVKWAIELSEFDLHFEPHHAIKSQALADFVAEWTPAPEPVSIPEANTDPSQLPHTTHWVMQFDGSLSLQGAGAGVTLTSPSGDVLRYLIRLDFRATNNMAEYEGLLAGLRVAAGLGIRRLLVLGDSQLVVNQVCKEYRCSDPQMDAYVRQVRRMERHFDGIELRHVPRRDNMMADELSRLASSRAQTPPGAFEERLAQPSARPDPLGETDAPDRPPRPVGVQASGPKGSAPSSLRLIAWIAEIQAYLTDKTLPEDREGSERVHRISKRYVLVEGTLYRRAANGILLKCIPREQGVVLLADIHEGECGAHSASRTLVGKAFRQGFYWPTALNDAVDLVRRCRACQFHAKQIHQPAQALQTIPLSWPFAVWGLDILGPFRRAPGGFEYLYVAIDKFTKWPEAYPVVKIDKHSALKFIKGITARFGVPNRIITDNGTQFTSELFGDYCEDMGIKLCFASPAHPRSNGQVERANAEILKGLKTKTFNILKKHGDSWIEELPAVLWANRTTPSRATGETPFFLVYGAEAEERRRRAALRAARYQQSLRRYHQRHVRARSLCVDDLVLRRVQTRAGLSKLSPMWEGPYRVVGVPRPGSIRLATGDGTELPNPWNIEHLRRFYP

SEQ ID NO: 170713 - protein, 359 aa, Oryza sativa
  Clone ID: PAT_MRT4530_69011C.1.pep
MAPCPTNFKLSNITKYRGDIDPNEYLRVYETIVEETGGDDTVKAKILPTMLEGVALSWYTTIPPMTIYSWEHMMDTFRAGFVGAYEEPKETDDLYAMKQLPGETLRSFIVKFSRVRCQIRQVDDEMLIAAAKRALLPGPLRFDLARNIPKTAKDLFERMESFTKGEEDKLRVQEEEVALLGGHSIEECWHMAHLVEKHINQYENKYKGAREQRAQNAIEAPQVLKIEAIDEVPKRVINAITEGSSLGIESKRQRKAYVRQINHVGTSNQSNPPTYSKTVISFGPEDAEGILFPHQDPLVVSVEITQCEVQRVLIDGGSSADVLFFTVNLIGEASPISLNQRHPCASTLGVLVAINPLSK

SEQ ID NO: 170714 - protein, 122 aa, Oryza sativa
  unsure (1)..(122): unsure at all Xaa locations
  Clone ID: PAT_MRT4530_69012C.1.pep
FFFFFFFSRKNSCIPFHVLLYTXVYLHMQRGSWSAHCQCIARVPPQAAEQHTAHWFAMFFHAAHIATHNHYQTHLGFAALVPPPSSALLLCAVHCLCVSAPGNSVRHVYTLDXADTKAIYPI

SEQ ID NO: 170715 - protein, 92 aa, Oryza sativa
  unsure (1)..(92): unsure at all Xaa locations
  Clone ID: PAT_MRT4530_69013C.1.pep
MKKRGGKKSRAKTRQKQKRGEKSNPRKNPKKKKAGSKKGKAGGAKRGSQTKKMRGPKRPESQTENRAPQRNXEKDKAGEEGIEKKGPRGVDF

SEQ ID NO: 170716 - protein, 322 aa, Oryza sativa
  Clone ID: PAT_MRT4530_69014C.1.pep
MEFWPEFLASSWGKEFVAGGVGGMAGVLAGHPLDTLRIRLQQPPPPASPGITAAPGRPASAASLLRGILRAEGPSALYRGMGAPLASVAFQNAMVFQVFAILSRSIDQPSSMSEPPSYTSVALAGVGTGALQTLILSPVELVKIRLQLEAAGQKHRRPGDHHGPVDMARDILRKEGVRGIYRGLAVTALRDAPAHGVYFWTYEYARERLHPGCRGHGGEQESLATMLVSGGLAGVASWVCCYPLDVVKSRLQAQGYPPRYRGIADCFRRSVREEGLPVLWRGLGTAVARAFVVNGAIFSAYELALRFLASSSNDQRLVMEEN

SEQ ID NO: 170717 - protein, 181 aa, Oryza sativa
  unsure (1)..(181): unsure at all Xaa locations
  Clone ID: PAT_MRT4530_69015C.1.pep
TYLGLPLTTSHIKRIHLQLVMDKLQSRLAEWKGKLIQXARRKTLVSYVLSSIPIYSLTALKPPKQFLTEMNKIIRKFLWDGDQEMSDGKCKVNWKRVCSPINLGGLDILDLDKFVRALRLQWLWFEWDCPDKPCVGTQPWTSLKNKIVISLRTKGDYEHIISQRLVVHVSSQPPSPTHVLK

SEQ ID NO: 170718 - protein, 1452 aa, Oryza sativa
  Clone ID: PAT_MRT4530_69016C.1.pep
MADVSLISCAVGIIFFSAVCYLPTAPVAALSFNYTNFNSNNPSIEYEGNASFSVGYIDISLNEANGMGNSAGRVSYKQPVQLWEWDAATGEVASFTTTFSFNITPSDRNNRGDGMALFLGSYPSKLPDRAGGHNLGLTNQTIGNVSTGDKRKTRGSPAQTIHARSAAHEQVEAMEKQNLDFGKLLGDIQESLVALNNKQAEMQVAVAKLDEGVSGWRPQVEAAIKDLRAEVDELQQQHDAANKGKQAPSAALSPRVPLTGEERKVPLLPTPPPSYQLGAAEGGGKLAGGHGVPQHHWRRASGVVTTLIPTPGKGTFNVSPVPLHSCENFDSGFGEFDGEVEERQYSHRVPKLDFPKFDGTDSQDWRMKCEHYFDVNNTYPGLWVRVAIIYFSGRAASWLRSTRAHVRFPNWEDFCAALSDKFDRDQHELLIRQMDGIKQSGTVWEYYEQFDELMNKLLVYDPEEVLETADEVPGKEVRKSEGNSLGRSVANLKGAYPLPTPPMRSGGINMGIKSEERKESEVKRSSGMNERLSSLKAQRRAQGLCYICAEKWSPTHKCSNTVQLHAVQELFTVLHESAEDGLSTTDHVVEQTLMAVSLQAVQGSETGGCMRMLGQIQSKEILILVDSGSSASFISKRVASSFIGVLEQPVHVQVKVAGGAMLHCCSEILNCEWTTQGHVFFTNLKVLELNNYDMILGMDWLMQHSLMTVDWTTKSLIIACAGTQIQLHVFALEHQEQIPNVVQTVLTEFSSVFDEPKGLPPIRQFDHTIPLLPGAGPVNVRPYRYTHVQKNEIESQVQEMLSKGIIQPCSSPFSSPVLLVKKKDGSWRFCVDYRHLNAITVKNKYPLPVIDELLDELAGAQWFSKLDLRSEYHQIRMHPDDVHKTAFQTHHGDFEFRVLPFGLTSAPATFQGVMNSVLATLLRRCVLVFVDDILIYSKSLEEHVQHLKTVFQILLKHQLKVKRTKCSFAQQELAYLGHIIQPNGVSTDPEKIQVIQHWPAPTSVKELRSFLGLSGYYRKFVRNYGILSKPLTNLLRNGQLYIWIAETEDAFQALKQALITAPVLAMPDFQTPFVVETDASDKGIGAVLMQNNHPLAFLSRALGLRHQGLSTYEKESLAIMLAVDHWRPYLQHDEFFIRTDHRSLAFLTEQRLTTPWQHKALTKLLGLRYKIIFKKGVDNNAADALSHYPGSDQVELSALSVAVPEWINEIVAGYSSDPDACSKLEAIREYKSLISALNSCLLGLAFVPLLFTSAACRSDDLVEWLHEREKMQALIRDHLLRAQTRMKQQADQHRSERSFAVGDWVYLKLQPFVQQSVVTRANRKLSFRFYGPFQVLDKVGAVAYRLDLPTSSLIHPIVHVSQLKKALAPTEQVHSPLPVLDPTNVTHVCPAQILDHRFIRKGSKMVEQVQIRWTGDAPAATTWENPRELRRRFPAAPAWGQAGTQGGGNVMP

SEQ ID NO: 170719 - protein, 1629 aa, Oryza sativa
  Clone ID: PAT_MRT4530_69017C.1.pep
MEKQNLDFGKLLGDIQESLVALNNKQAEMQVAVAKLDEGVSGWRPQVEAAIKDLRAEVDELRQQHDAASKEKQAPSAALSPRVPLTGEERKVPLLPTPPPSSHFGAAEGGSKLADGHGVPLHHRRRASRVVTTLIPTPGKGTFNVSPVPLHSCENFGSGFGEMDGEVEERHYSHRVPKLDFPKFDGTDPQDWRMKCEHYFDVNNTYPGLWVRVAIIYFSGRAASWLRSTKAHVRFPNWEDFCAALSDKFDRDQHELLIRQMDGIRQSGTVWEYYEQFDELMNKLLVYDPVVNMHYLTHRFTEGLYRKIRNVVLLQRPRDLESALAVALLQEEVLETADEVTGKEVKKSEGNSLGRSVANLRGAYPLPTPPMRSGGINMGIKSEEKKESEVRRSSGTNERLSSLKAQRRAQGLCYICAEKWSPTHKCSNTVQLHAVQELFTVLHESVEDGLSTTDHVVEQTLMAVSLQAVQGTETGGCMRMLGQIQGKEILILVDSGSSASFISKRVASSLMGVLEQPVHVQVMVAGGAKLHCCSEILNCEWTIQGHVFFTNLKVLELNNYDMILGMDWLMQHSPMTVDWTTKSLIIAYAGTQIQLYGVRSDTEQCAHISSKQLRELNDRTAVSNLVQFCSVFALEYQEQIPEVVQTVLTEFSSVFDEPKGLPPIRQFDHTIPLLPGAGPVNVRPYRYTPIQKNEIESQVQEMLSKGIIQPSSSPFSSPVLLVKKKDGSWRFCVDYRHLNAITVKNKYPLPVIDELLDELAGAQWFSKLDLRSGYHQIRMHPDDEHKTAFQTHHGHFEFRVLPFGLTSAPATFQGVMNSVLATLLRRCVLVFVDDILIYSKSLEEHVQHLKTVFQILLKHQLKVKRTKCSFAQQELAYLGHIIQPNGVSTDPEKIQVIQHWPAPTSVKELRSFLGLSGYYRKFVRNYGILSKPLTNLLRKGQLYIWTAETEDAFQALKQALITALVLAMPDFQTPFVVETDASDKGIGAVLMQNNHPLAFLSRALGLRHPGLSTYEKESLAIMLAVDHWRPYLQHDEFFIRTDHRSLAFLTEQRLTTPWQHKALTKLLGLRYKIIFKKGIDNSAADALSRYPGSDRVELSALSVAVPEWINDIVAGYSSDPDACSKVQTLCINSGAVPNFSLRNGVLYFQNRLWVGHNVDVQQRILANLHTAAVGGHSGIQVTYQRVKQLFAWPRLRATVVQYVQACSVCQQAKSEHVKYPGMLQPLPVPDHAWQIVSLDFVEGLPKSASFNCILVVVDKFSKYSHFVPLTHPFSALDVAEAYMQHIHRLHGLPQSLISDRDRIFTSTLWTTLFRLAGTQLRMSSSYHPQTDGQTERVNQCLETFLRCFVHACPSQWSRWLALAEYWYNTSFHSALGTTPFEVLYGHKPRYFGLSASAACRSDDLVEWLHEREKMQALIRDHLLRAQTRMKQQADQHRSERSFAVGDWVYLKLQPFVQQSVVTRANRKLSFRFYGPFQVLDKVGTVAYRLDLPSSSLIHPVVHVSQLKKALAPTEQVHSPLPVLDPTNATHVCPAQILDRRFIRKGSKLVEQIQVRWTGDAPAATTWENPQELRRRFPTAPAWGQAGTQGGGNVMPAPIASATIHDEAQPRRSMRDRRPTSKYVSNEWTR

SEQ ID NO: 170720 - protein, 97 aa, Oryza sativa
  unsure (1)..(97): unsure at all Xaa locations
  Clone ID: PAT_MRT4530_69018C.1.pep
GNSSDQQLIQAVVIFVPLTAIGLLSLLXISPCAIPVFYPLGSYFIFLTFSLMGAGLFILGAVLHLLVPPKEKNIRKRGKEKEIFSSTSSYRLVESSV

SEQ ID NO: 170721 - protein, 96 aa, Oryza sativa
  Clone ID: PAT_MRT4530_69019C.1.pep
MEKRGDERGGGEAAGAAFPLFMGVLVEGWGPHVPDRWGRIGSGPTPAATAGCAWPCHARADEKEREREREKEGAANALCAARLVKGKRKDEGERCV

SEQ ID NO: 170722 - protein, 69 aa, Oryza sativa
  Clone ID: PAT_MRT4530_6901C.1.pep
VPVKLLVAASRTTSPKTRKSNLVTHFLGGTDPALSVQLGDLGHLAYSHPMPTKPSTAERPKILESCFHS

SEQ ID NO: 170723 - protein, 43 aa, Oryza sativa
  Clone ID: PAT_MRT4530_69020C.1.pep
LSFTYSGSIPVFYNLSIYRVSEAFRNNTWHIMLLILNNRLHPK

SEQ ID NO: 170724 - protein, 89 aa, Oryza sativa
  Clone ID: PAT_MRT4530_69021C.1.pep
SRFLFSVVASFLCPVFLALLSFVSGDRLCVNARPSLRLVLVVCVFCRRVPSGLPSGGLLCRWCLAGVGDFVAGGACPPPLGFASSLLNE

SEQ ID NO: 170725 - protein, 71 aa, Oryza sativa
  Clone ID: PAT_MRT4530_69022C.1.pep
MATPSSPANALVAATVAASAINPRRGVLAKLPRGRVLLRRQVCFAAAQAPTTCSTERPFRVARSSCSESDQ

SEQ ID NO: 170726 - protein, 47 aa, Oryza sativa
  Clone ID: PAT_MRT4530_69023C.1.pep
HPASLCFRSIFGCDDNITQEHLYRFDYTTPIGIWPPSPKFQIIIYTT

SEQ ID NO: 170727 - protein, 124 aa, Oryza sativa
  Clone ID: PAT_MRT4530_69024C.1.pep
LAFRWDELGREIMGIAVPGALALMADPVASLVDTAFIGHIVVDLRLQKSLFAAWKDIFSSSARPPLRQIQLKGRRWATSGNGALSFAGSGRRGAGRYHDLHSHNFEGVYKLIIADLRPFKALLL

SEQ ID NO: 170728 - protein, 678 aa, Oryza sativa
  unsure (1)..(678): unsure at all Xaa locations
  Clone ID: PAT_MRT4530_69025C.1.pep
MASLSNLPRSIKVTDSLHEQVTTMPTEPAASAGTFVLHHPGTSFHGNLEGELETDPSKIEATPQADPSKGKAPIIGMKFNSEQEAYDFYNAYARDMGFSIRRSSYHYVKDSTIIKNRTFCCSRAGTRGHDKREDQISNYGQCFSRPETRCMCRACMKISLRDDGLYCIYEFLHEHNHILATGSQALYLRSQRKITEAQMASAENAKSVGISNKATIDLMAKEAGGYENLGFTREDMKNILYSKRSLKRKLNDGRPFGLLVGVDNHKKSVVFGAALLYDETADSFVWLFKTFLKAMSGKKPQTILTDEDAAMAKAIKLVMPESHHRICVWHMNQNACKHLAGVVKEYKKFNADFQNCIYDKEEEDEFINAWNRMLKKYDLQENKWLERLFQKKEQWALVYGRNTFSADMSGTQRSESMNNELKGYISVKYDILTFLEHFDRLLSDKRYEEVKNDFKTTQSTPWPKVDLTILRQATRIYTPAIFKVFQEQVLQTLNCDLYYCGDIDAEMYKLKVHESDETYLMAANNAQKLAEDVEKYLSIRPDPDLDKSGTEENVGPSKARGIKVKEKAIRGSRRPIGGFDKATQWSKKKKSDSSTSKCPVQAEVVTPSLPYTMMQIQGRSEIPTNYNHMQMPDYYHVEGASLLQSSGYFXTSKQSQGMQHEETAQTFDTYPYSMFAHL

SEQ ID NO: 170729 - protein, 78 aa, Oryza sativa
  unsure (1)..(78): unsure at all Xaa locations
  Clone ID: PAT_MRT4530_69026C.1.pep
QLSTIGSCCLLAVICAGNLYIANLPKGRARSRRRGGLIPLVXTIQTIAEHTASLKECLAKXKAAHTYDPHIVPIKHTF

SEQ ID NO: 170730 - protein, 297 aa, Oryza sativa
  unsure (1)..(297): unsure at all Xaa locations
  Clone ID: PAT_MRT4530_69027C.1.pep
DQIINGDANLKSHITAYYKGLFGPPDDSVLQLDDSVEXGHNKAPSPNGFLAEFYQVFWNVIKFDLLELFKXIHCGTLPLFSLNFGIIILLPKCVEAMKIQQYRLICLLNVSFKIFNKLATNRIIGAAQKVISLSQSAFIPRRKTMEGMVTLHETIHELHCKNKRGVMFKIDFEKTYDKIKWSFVQQTLRMKGFSPKWCQWIASFIQGGHVGIKVNYQVGPNFKTYKGLRQGDRLSPILFNIVADMLALLIKSAKDVSSITRVIPHLVDNGLSISXYADDTNIFFEHDLQEAKNLKLI

SEQ ID NO: 170731 - protein, 808 aa, Oryza sativa
  Clone ID: PAT_MRT4530_69028C.1.pep
MRNPSQMLRLLLLRVAILAAVLATPSLGRVIGGSKCKCLMCVCDVDPHPLPPSRHHPPPPEEPEPEPTPVNHHYPPPTTPAYSLPPPAQPYGQYPYPYPSQGQAGAAYWPPSTPAEMYPQVRGYIRSIKVTDSLHEQVTTMPTEPAASAGMFVLHHPGTSFHGNLEGELETIKNGYINQDPSKIEATPQADPSKGKAPIIGMKFNSEQEAYDFYNAYARDMGFSIRRSSYHYVKDSTIIKNRTFCCSRAGTRGHDKREDQISNYGQCFSRPETRCMCRACMKISLRDDGLYCIYEFLHEHNHILATGSQALYLRSQRKITEAQMASAENAKSVGISNKATIDLMAKEAGGYENLGFTREDMKNRLYSKRSLKVNEGDTGGVLEYMEKKSSEDVNFFYSILVDEDDLITNIFWTDSKMIADYEVFGDVLCFDTTYRKLNDGRPFGLLVGVDNHKKSVVFGAALLYDETADSFVWLFKTFLKAMSGKKPQTILTDEDAAMAKAIKLVMPESHHRICVWHMNQNACKHLAGVVKEYKKFNEDFQNCIYDKEEEDEFINAWNRMLEKYDLQENKWLERLFQKKEQWALVYGRNTFSADMSGTQRSESMNNELKGYISVKYDILTFLEHFDRRDLCRMFVKIASRAAESDETYLMAANNAQKLAEDVEKYLSIRPDPDLDKSGTEENVDPSKARGIKVKEKAIRGSRRPIGGFDKATQRSKKKKSDSNTSKCPVQAEVVTPSLPYTMMQIQGRSEIPTNYNHMQMPDYYHVEGASLLQSSGYFRTSEKSQGMQHEETAQTFDTYPYSMFAHLN

SEQ ID NO: 170732 - protein, 191 aa, Oryza sativa
  unsure (1)..(191): unsure at all Xaa locations
  Clone ID: PAT_MRT4530_69029C.1.pep
FLNGPKFPLFYFVQMRAVKVNFFXNAPLSPFWDIPAQRVGVFTQGCARVQVVPPHGKPVFYGELPCGPLFFFPPPPVVFXKAPRGGWSFFAFKTPPASLVCPLAGKNSFFRALPGDVVANAFCFSKKKAWGVQPPRGDEFGVFPPSPAPQRFPDIFLGPLPKNVHLRLGLLRRVFPLFFTHKKGPVFAALL

SEQ ID NO: 170733 - protein, 530 aa, Oryza sativa
  Clone ID: PAT_MRT4530_6902C.1.pep
MADNEKGNKVRSQDVGTSSSRVNEAPDTSCVTLVQHLINQNRLLIEILQQHQTPILNLSQIQPQVQLEAVQAPTPQVSMPPASRRTHGDVPHVDSKEASIICFMCDEQGHYARECPQQKRETPMRTEDEVRKMIITSTEWPPPGMTKRQRRNTFRGAPQLTEHLLANGGRVSDSEDSDQVSSDDEDEKSPQGFNQDKMERKACSRCGEIGHVASSCATTCIHCEEDHPPDRCPTSRITCFFCEGTDHVPKDCQFSFLLTKKMANQPASSNGEKHQGHTNPRQDYSFSLTPVPGQRNQNEKRKCRVWEDICCFNCQGMGHFADKCPKPRNIAASTSVHATPCNQKLAPQRIVIHASRSSPIARGATAPTPASALPQGVNAQFQPQPPVDKTEASIGIVPLDVPAQQPRNQVQDEEPEPPTILCTDSLSKELSSMEEVVSLPDLLQAEQRAINLRRAIPSRRPSSASTHNQKEASPVNDSNMQSYHIITELIKDAVTRTMPAISLQNQNEQPYLWFSVRYLSLCNRKFAAIM

SEQ ID NO: 170734 - protein, 315 aa, Oryza sativa
  Clone ID: PAT_MRT4530_69030C.1.pep
MPEYCVTGGTGFIASHLIRALLAASHTVRATVRDPEDEAKVGFLWELDGASERLQLVKADLMVEGSFDDAVRGVDGVFHAASPVVVVGNSSSNNGKPNDDDDEEEGVAAPAPRGVTSSCSCVRYRAGAAAALNESHWSDAAYCAAHGLWYAYAKTLAEREAWRLAKERGLDMVAVNPSFVVGPILLQAPTSTALIVLALLRGELPRYPNTTVGFVHVDDAVLAHVVAMEDARASGRLICSCHVAHWSEIVGSLRERYPGYPIPAECGSHKGDDRAHKMDTAKIRALGFPPFLSVQQMFDDCIKSFQDKGLLPPHA

SEQ ID NO: 170735 - protein, 2028 aa, Oryza sativa
  unsure (1)..(2028): unsure at all Xaa locations
  Clone ID: PAT_MRT4530_69031C.1.pep
MAEQAKVPDLSPSVSGDDGEPNPRRRARTPPPPPRQSPGREKAPKRAEGSATSASTGAGKGRRDGERRLLVYGDGSTPQGALQAAGALLRHPPVAHDPESPAQRWLDDVAKLVMTARQRLDAGGRSSATKTSGAATTGSASSRRRARRAAAAVRRSAATPSSTPSTREDLRGEQDARASIERRRNDRSAAHATEGASSSRVSPRHGRGNQPSVPPVGGVGCRAFVASLRNVRWPPRFRPTIAEKYDGSVNPAEFLQVYTTGIEAAGGDDRVMANFFPMALKGQARGWLMNLPPASVHSWEDLCQQFTMNFQGTYPRPGEEADLHAVQRRDDESLRSYIQRFCQVRNTIPCIPAHAVIYAFRGGVRHNRMLEKIASKEPQTTAELFQLADRVARKEEAWTWNPSGSGVAASAAPGSAAQTGRRDRRRKKRTVRSDDEGHVLAVEGASRATRKGRPVSDKKKEASAPSRERPTGKWCTVHNTSLHDLADCRAVKNLAERTRKWEEERRQERREGKSPAVPSGHRRSEAKQKAPAEDIDDGDDDLGFQEPGATIATVNGGACAHVSRRSLKAMKRELLAAAPTHKATRRARWSEVALTFDQTDHPPCVARGGQIAMVVSPTVCNVKLGRVLIDGGAALNILSPAAFDAIKAPGMMLRPSQPIIGVTPGHTWPLGHIDLPVTFGGPANFRTERVNFDVADLSLPYNVVLGRPALVKFMAAVHYAYLQMKMPGPDGPISVHGDLKVALACMEQRADRLAVVSKPEGGDERLGSSAPAAPRQRIVTCDEVPEDALVSFLRANADVFAYRPADMLGVPREVIEHRLAVRPGARPVRQKVRRQAPERQAFIREEVARLLEAGFIREVIHPEWLANPVVVPKANGKLRMCIDYTDLNKACPKDPYPLPRIDQIVDSTAGCDLLCFLDAYSGYHQIRMAREDEEKTAFITPVGTYCYTTMPFGLKNAGPTFQRTTRISLGSQLGRNVEAYVDDLVVKTRNQETLLSDLAETFESLRSARIKLNPDKCVFGVPAGKLLGFLVSARGIEANPKKIRAIERMRPPSKLRDVQCVTGCMAALSRFISRLGEKALPLFKLLKRSGPFTWTEEAERALTQLKVYLSSPPVLVAPEPNEPLLLYLAATPQVVSASLVVERDEDNPHSAHSHPVLTRPGSEQGGEAPEPNSGLRPLTTGVGALPARQTVLGAPDPQEGPEATAGRPHLSPFDPEANPVLTRPGKEQGEEAPEPNGGLRPLTTGVGPSPACPTTPGAPDPQDGPEATVGRPPLSSSDPEVIGTEDECAPRGHLDEERPGDTAPSKEDRPHRKVQRPVYFVSEALRDAKTRYPQAQKMLYAVLMASRKLRHYFQAHRVTVVTSYPLGQILHNREGTGRVVKWAIELSEFDLHFEPRHAIKSQALADFVAEWTPAPEPVSIPEVNSDPSQPPHTGHWVMQFDGSLSLQGAGAGVTLTSPTGDVLKYLVRLDFRATNNMAEYEGLLAGLRVAAGLGIRRLLVLGDSQLVVNQVCKEYRCSDPQMDAYVRQVRRMERHFDGIELRHVPRRDNMIADELSRLASSRAQTPPGAFEERLTQPSARPDPLGETGVPDRPPRPVGVQASGPEGSAPSSLRLIAWIAEIQAYLTDKTLPEDREGSERVHRISKRYVLVEGTLYRRAANGILLKCIPREQGVELLADIHEGECGAXHSASRTLVGKAFRQGFYWPTALNDAVDLVRRCRACQFHAKQIHQPAQALQIIPLSWPFAVWGLDILGPFRRAPGGFEYLYVAIDKFTKWPEAYPVIKIDKHSALKFIKGITARFGVPNRIITDNGTQFTSELFGDYCEDMGIKLCFASPAHPRSNGQVERANAEILKGLKTKTFNILKKHGDSWIEELPAVLWANRTTPSRATGETPFFLVYGAEAVLPSELTLRSPRATMYCEADQDQLRRDDLGYLEERRRRAALRAARYQQSLRRYHQRHVRARSLCVDDLVLRRVQRRAGLSKLSPMWEGPYRVIGVPRPGSIRLATGDGTELPNPWNIEHLRRFYP

SEQ ID NO: 170736 - protein, 189 aa, Oryza sativa
  Clone ID: PAT_MRT4530_69032C.1.pep
MASTKLVALGFVVLLSMGLANAARVSRYSSSDGNGSGGGGGTAYDNGGAAGSGSGYGVSQGGSNGAHATAGGSGGGGGSSQYGGSAYGSGNGSGSSSSQTSNGEGGYGGESDAGGGGGGGGQGQAGGYGSTGSGSGSGSGSGYSNANNNWYGSSAGAGASGNGGGNGNGENGGNGSGAGGGSGYGNASP

SEQ ID NO: 170737 - protein, 337 aa, Oryza sativa
  Clone ID: PAT_MRT4530_69033C.1.pep
MPEYCVTGGTGFIASHLIRALLAASHTVRATVRDPEDEAKVGFLWELDGASERLQLVKADLMVEGSFDDAVRGVDGVFHAASPVVVVGNSSSNNGKPNDDDDEEEVQQRLVEPIVRGASNVLRSCARASPRPRRVVFTSSCSCVRYGAGAAAALNESHWSDAAYCAAHGLWYAYAKTLAEREAWRLAKERGLDMVAVNPSFVVGPILSQAPTSTALIVLALLRGELPRYPNTTVGFVHVDDAVLAHVVAMEDARASGRLICSCHVAHWSEIVGSLRERYPGYPIPAECGSHKGDDRAHKMDTAKIRALGFPPFLSVQQMFDDCIKSFQDKGLLPPHA

SEQ ID NO: 170738 - protein, 826 aa, Oryza sativa
  Clone ID: PAT_MRT4530_69034C.1.pep
RRGSRAERWPKAPDDRSWPSARLSDGARSPRPQEGPEATVGRPHLSPFDPEANPVLTRPGKEQGEEAPEPNGGLRPLTTGVGPLPAFPTTPGAPDPQDGPEATVGRPSLLSSDPEVISTEDKCAPRGCLDEECPRDAAPSKEDRPHRKVQRPVYFVNEALRDAKTRYPQAQKMLYAILMASRKLRHYFQAHRVTVVTSYPLGQILHNREGTGRVVKWAIELSEFDLHFEPRHAIKSQALADFVAEWTPAPEPVSIPEASTDPSQLPHTAHWVMQFDGSLSLQGAGAGVTLTSPSGDVLRYLVRLDFRATNNMAEYEGLLAGLRVAAGLGIRRLLVLGDSQLVVNQVCKEYRCSDPQMDAYVRQIPPGAFEERLAQPSARPDPLGETDAPDRPPRPVGVQASGPEGSAPNSLRLIAWIAEIQAYLTDKTLPEDREGSERVHRISKRYVLVEGTLYRRAANGILLKCIPREQGVVLLADIHEGECGAHSASRTLVGKAFRQGFYWPTALNDAVDLVRRCRACQFHAKQIHQPAQALQTIPLSWPFAVWGLDILGPFRRAPGGFEYLYVAIDRFTKWPEAYPVVKIDKHSALKFIKGITARFGVPNRIITDNGTQFTSELFGDYCEDMGIKLCFASPAHRRSNGQVERANAEILKGLKTKTFNILKKHGDSWIEELPAVLWANRTTPSRATGETPFFLIYGAEAVLPSELTLRSPRATMYCEADQNQLRRDDLDYLEERRRRAALRAARYQQSLRRYHQRHVRARSLCIDDLVLRRVQTRAGLSKLSPMWEGPYRVVGVPRPGSIRLATGDGTELPNPWNIEHLRRFYP

SEQ ID NO: 170739 - protein, 1536 aa, Oryza sativa
  Clone ID: PAT_MRT4530_69035C.1.pep
MAEQAKAHDLSPSVSGDDGEPNLRRRARTPPPPPRQSPKRGEALERVERSATSPIAGDGEERRDGERRLLVYGDGSTPQGALQAAGALLRHPPVVPDPESPAQRWLDDVAKLVMTARQRLDAGGRSSATKASGAATTGSASSRRRARRAAAAVRHSAATPSSTPTTREDLRGGPDARTSIERRRNDRSAAHATEGASSSRVSPQHGRGNQPSVPPVGGVGCRAFVASLRNVRWPPRFRPTIAEKYDGSVNPTEFLQVYTTGIEAAGGDDRVMANFFPMALKGQARGWLMNLPPASVHSWEDLCQQFTMNFQGTYPRPGEEADLHAVQRRDDESLRSYIQRFCQIRNTIPCIPAHAVIYAFRGGVRHNRMLEKIASKEPQTTAELFQLADRVAHKEEAWTWNSSGSGVAASAAPGSAAQTGRRDRRRKKRSVHSDDEGHVLAVEGASRATQKGRPTSDKKKKAGAPSRERPAGKWCTVHNTSLHDLVDCRAVKSLAERTRKWEGERRQERREGRSPAVPSGNRRSEAKQKAPAEDIDDGDDDLGFQEPGATIATIDGGACAHVSRRSFKAMKQELLAAAPTHEATRQARWSEVALTFDQTDHPPCVARGGQIAMVVSPTVCNVKLGRVLIDGGAALNILSPAAFDAIKAPGMVLRPSQPIIGMTPGHTWPLGHIDLPVTFGASANFRTERVNFDVADLSLPYNAVLGRPALVKFMAAVHYAYLQMKMPGPGGPISVHGDLKVALACLEQRADHLATASKPEDGNERLGTSAPATPRQRMITCDEVPEDALVSFLRANADVFAWRPADMPGVPREVIEHRLAVRPGARPVRQKVRRQAPERQAFIREEVARLLEAGFIREVIHPEWLANPVVVPKANGKLRMCIDYTDLNKACPKDPYPLPRIDQIVDSTAGCDLLCFLDTYSGYHQIRMAREDEEKTAFITPIGTYCYTTMPFGLKNAGPTFQRTTRISLGSQLGRNVEAYVDDLVVKTRNQETLLTDLAETFASLRSARIKLNPDKCVFGVPAGKLLGFLVSARGIEANPEKIRAIERMRPPSKLRDVQCVTGCMAALSRFISRLGEKALPLFKLLKRSGPFTWTEEAENALTQLKAYLSSPPVLVAPEPDEPLLLYLAATPQVVSAALVVERDEDNSHFALPHPVPTWPGREQGGEALEPNGGLRPPTTRVGPPPASQTVLGAPDPQEGPEATVGRPHLSPFDPEANPVLTRPGREQGEEAPEPNGGLRPLTTGVGPLPVCPTTPGAPDPRDGPEATVGRPPLSSSDPEVISTEDECAPRGRLDEERPGDAAPSEEDRPHRKAHRVTVVTSYPLGQILHNREGTGRVVKWAIELSEFDLHFEPRHAIKSQALADFVAEWTPAPEPVSIPEANSGPSQLPHTAHWVMQFDGSLSLQGAGAGVTLTSPSGDVLKYLVRLDFRATNNMAEYEGLLAGLRVAAGLGIRRLLVLGDSQLVVNQVCKEYRCSDPQMDAYVRQVRRMERHFDGIELRHVPRRDNMIADELSRLASSRAQTPPGAFEERLAQS

SEQ ID NO: 170740 - protein, 84 aa, Oryza sativa
  unsure (1)..(84): unsure at all Xaa locations
  Clone ID: PAT_MRT4530_69036C.1.pep
MFSMSGFFVQAIVTGKGPLEILPNPRADPVATTXGCTRPRSHRAGEWSSRIXTNSLCTSMGVPMLAQIVRCCDEFDTIHPEFRN

SEQ ID NO: 170741 - protein, 1994 aa, Oryza sativa
  unsure (1)..(1994): unsure at all Xaa locations
  Clone ID: PAT_MRT4530_69037C.1.pep
MAERAKAHNLSPSVSGDDGEPNPRRRARTPPPPPRQSPRREEALERVEGSATSTSTGDGEGRRDGERRLLVYGDGSTPQGTLQAAGALLRHPPVVPDPESPAQRWLDDVANLVMTARQRLGAGGRSSATKTSGAATTGSVSSRRRARRAAAVARHSAATPSSAPPTQEDQRGGPDARIDIERRRNGRRAPHATEGASSSGVSPQRGHGDQPSVPPVGGVGCRAFVASLRNVRWPPRFRPTIAEKYDGSINPTEFLQVYTTGIEAAGGDDRVMANFFPMALKGQARGWLMNLPPASVHSWEDLCQQFTMNFQGTYPRPGEEADLHAVQRRDDESLRSYIQRFCQVRNTMPCIPAHAVIYAFRGGVRHNSMLEKIASKEPQTTAELFQLADRVARKEKAWTWNPSGSGVAASAAPGSAAQTGRRDRRRKKRSAHTDDEGHVLAVEGASRATRKGRPAGNKKKEAGAPSRERPTGKWCIVHNTSLHDLADCRAVKSLAERTRKWEEERRQERREGKSPAVPSGNRRSEAKQKAPAEDIDDGDDDLGFQEPGATIATVDGGACAHVSRRSLKAMKRELLAAAPTHEATRRARWSEVTLTFDQTDHPPCVARGGQIAMVVSPTVCNVKLGRVLIDGGAALNILSPAAFDAIKAPGMVLRPSQPIIGVTPGHTWPLGHIDLPVTFGGSANFRTERVNFDVADLSLPYNAVLGRPALVKFMAAVHYAYLQMKMPGPGGPISVHGDLKVALACMEQRADHLAAASKPEGGDERLGTSAPAAPRQRIVTCDEVPEDALVSFLRANADVFAWRPADMPGVPREVIEHRLAVRPGARPVRQKVRRQAPERQAFIREEVARLLEAGFIREVIHPEWLANPVVVPKANGKLRMCIDYTDLNKACPKDPYPLPRIDQIVDSTAGCDLLCFLDAYSGYHQIRMAREDEEKTAFITPIGIYCYTTMPFGLKNAGPTFQRTTRISLGSQIGRNVEAYVDDLVVKTRNQETLLSDLAETFESLRSARIKLNPDKCVFGVPAGKLLGFLVSARGIEANPEKIRAIERMRPXSKLRDVQCVTGXERALTQLKAYLSSPPVLVAPEPNEPLLLYLAATPQVVSAALVVERDEDNPHSAHPHPVLAWPGREQGGEAPEPNGGPRPPTTGAGPLPACQTVPGAPDPQEGPXRATAGRPHLSPSDPEANPVPTRPGRQQGEEAPEPNGGLRPLTAGVGPLPACPTTPGAPDPQDGPEATVGRPPLSSSDPEVVGTEDECTPRGRLDKERPRDVAPSEEDRPHRKVQQPVYFVSEALRDAKTRYPQAQKMLYAILMASRKLRHYFQAHRVTVVTSYPLGQILHNREGTGRVVKWAIELSEFDLHFEPRHAIKSQALADFVAEWTPAPEPVLVPEASSGPSQLPHTAHWVMQFDGSLSLQGAGAGVTLTSPSGDVLRYLVRLDFRATNNMAEYEGLLAGLRVAAGLGIRRLLVLGDSQLVVNQVCKEYRCSDPQMDAYVRQVRRMERHFDGIELRHVPRRDNTVADELSRLASSRAQTPPGAFEERLAQPSARPDPLGETDAPDRPPRPVGVQASGPEGSAPSSLRLIAWIAEIQAYLTDKTLPEDREGSERVQRISKRYVLVEGTLYRRAANGILLKCIPREQGVELLADVHEGECGAHSASRTLVGKAFRQGFYWPTALNDAVDLVRRCRACQFHAKQIHQPAQGLQIIPLSWPFAVWGLDILGPFRRAPGGFEYLYVVIDKFTKWPEAYPVVKIDKHSALKFIKGITAWFGVPNRIITDNDTQFTSELFGDYCEDMGIKLCFASPAYPRSNGQVERANAEILRGLKTKTFNILKKHGDSWIEELPAVLWANRTTPSRATGETPFFLVYGAEAVLPSELTLKSPRATMYCEADQDQLRRDDLDYLEERRRRAALRAARYQQSLRRYHQRHVRARSLCVDDLVLRRVQTRAGLSKLSPMWEGPYRVIGVPRPGSVRLATGDGTELPNPWNIEHLRRFYP

SEQ ID NO: 170742 - protein, 94 aa, Oryza sativa
  unsure (1)..(94): unsure at all Xaa locations
  Clone ID: PAT_MRT4530_69038C.1.pep
YCHNDPAAPPPRRSAXRSGPPPARACRQPHPPSRARSRRAPRRFGDSRGDPAARADEHGGNGGGARPRLPGAGXGVAAAASASAAGAFSEVPPA

SEQ ID NO: 170743 - protein, 1991 aa, Oryza sativa
  unsure (1)..(1991): unsure at all Xaa locations
  Clone ID: PAT_MRT4530_69039C.1.pep
MAEPAKAHDLSPSMSGDDGEPNPRRRARTPPPPPRQSPRREKALERAEGSATSTSTGGGEGRRDEERRLLVYGNGSTPQGALQAAGALLRHPPVAHDPESPAQRWLDDVAKLGMTARQRLDAGGQSSATKASGAAATGSASSRRRARRAAAAVRHSAATPSSMAPTREDLRGEPDARISIERRRNGRRAPHAKEGASSSGVSPHHGRGDQPSVPPVGGVGCRAFVASLRNVRWPPRFRPTIAEKYDGSVNPAEFLQVYTTGIEAAGGDDRVMANFFLMALKGQARGWLMNLPPASVHSWEDLCQQFTMNFQGTYPRPGEEADLHAVQRRDDESLRSYIQRFCQVRNTIPCIPAHAVIYAFRGGVRHNRMLEKIASKEPQTTAELFQLADRVARKEEAWTWNPSGSGVAASAAPGSAAQIGRRDRRRKKRSAHTDDEGHVLAVEGASRATRKGRPAGGKKDEAGAPNRERPTGKWCTVHNTSLHDLADCRAVKSLAERTRKWEEERRQERREGKSPAVPSGNRRSEAKQKAPAEDIDDGNDDLGFQEPGATIATVDGGACAHVSRRSFKAMKRELLATAPTHEATRRARWSEVALTFDQTDHPPCVARGGQIAMVVSPTVCNVKLGRVLIDGGAALNILSPAAFEAIKAPGMVLRPSQPIIGVTPGHTWPLGHIDLPVTFGGSANFRTERVNFDVADLSLPYNAVLGRPALVKFMAAVHYAYLQMKMSGPGGPISVHGDLKVALACLEQRTDHLAAASEPEGGDERLGASAPATPRQRMITGNEVPVKEVALGDGPSXDHALVSFLRANADVFAWRPADMPGVPREXPVRQKVRRQAPERQAFIREEVARLLEAGFIREVIHPEWLANPVVVPKANGKLRMCIDYTDLNKACPKDPYPLPRIDQIVDSTAGCDLLCFLYAYSGYHQIRMAREDEEKTAFITPIGTYCYTTMPFGLKNAGPTFQRTTRISLGNQLGRNVEAYVDDLVVKTRNQEMLLSDLAETFESLRSARIKLNPDKCVFGVPAGKLLGFLVSARGIEANPEKIRAIERMRPPSKLRDVQCVTGCMAALSRFISRLGDKALPLFKLLKRSGPFTWTEEAENALTQLKAYLSSPPVLVAPEPDEPLLLYLAATPQVVSAALVVERDENNSHFTLPHPVPTWPGREQGGEAPEPNGGPRPPTTGVGPLPACQTVLGAPDPQEGPEATVGRPHLSPFDPEANPVLTRPGKEQGEEAPEPNGGLRPLTTGVGPLPACPTTPGAPDPQDGPEATVGRPPLLSSDPEVISTEDKCAPRGCLDEECPRDAAPSEEDRPHRKVQRPVYFVSEALRDAKTRYPQAQKMLYAILMASRKLRHYFQAHRVTVVTSYPLGQILHNREGTGRVVKWAIELSEFDLHFEPRHAIKSQALADFVAEWTPAPEPVSIPEASTDPSQLPHXHWVMQFDGSLSLQGAGAGVTLTSPSGDVLRYXGDSQLVVNQVCKEYRCSDPQMDAYVHQVRRMERHFDGIELRHVPRRDNMIADELSRLASSRAQTPPGAFEERLAQPSARPDPLGETDAPDRPPRPVGVQASGPEGSAPNSLRLIAWIAEIQAYLTDKTLPEDREGSERVHRISKRYVLVDGTLYRRAANGILLKCIPREQGVVLLADIHEGECGAHSASRTLVGKAFRQGFYWPTALNDAVDLVRRCRACQFHAKQIYQPAQALQTIPLSWPFAVWGLDILGPFRRAPGGFEYLYVAIDRFTKWPEAYPVVKIDKHSALKFFKGITARFGVPNRIITDNGTQFTSELFGDYCEDMGIKLCFASPAHPRSNGQVERANAEILKGLKTKTFNIVKKYGDSWIEELPAVLWANRTTPSRATGEMPFFLVYGAEAVLPSELTLRSPRATMYCEADQNQLRRDDLDYLEERRRRAALRAARYQQSLRRYHQRHVRARSLCVDDLVLRRVQTRAGLSKLSPMWEGPYRVVGVPRPGSIRLATGDGTELPNPWNIEHLRRFYP

SEQ ID NO: 170744 - protein, 2022 aa, Oryza sativa
  unsure (1)..(2022): unsure at all Xaa locations
  Clone ID: PAT_MRT4530_6903C.1.pep
QCYRHLSQWTRRDLLGQELGYLRIVPGLVCSGPTRTAPNLRYKKDPPGRVXIIKSQSQHNPHSLRNPYTSVPQYPLYPIYGYPPSTVARXVGTLGIQDSTTMPSSFVDNNANTSSGQVLPTSTMLVWTQVGEIVYPVYTTMPISTGPPMTGNENAVATNQDTSTSKNPPVETENGLPTTSKFVKDSDAARPCPSNTNCGPAKMTSETIRSWCPIHKTKKHTLQDCWVFINARAEIRACKERGIQRTSPTRNVYCPIHKTKNHDLSSCKVLLGAMKTPSPKSYVPVRDNGKEQGATPAPDRFVGVIDLNPHEPSVLHLLEDYGSSTSDAAREVLAIDDVGTSAQANAETANQSTTPAQHIRAVQAILRETPYDPVLNNDLERWTERLRASVTNLSNAFEEAATAAQQNRSPVGDANGEIPERRESPRQATPPPRGTGDLRDQINGRREARRARDDANRSRRHVSSRCHDRRSHPNEDRDYDNRDRRGPDNTGHGRRCNDEDEEDRRRDNSERRRQYSQDPGRHPRNRTSEPSDPSSSSSSASSSSSDRHPRRSRDHRQPTAPSAGCRAFGRSLRDVRWPERFRPGAIEKYDGSTDPEEFLQVYSTVLYAVRADDNALANYLPTALKGSARSWLMHXPYSISSWSDLWQQFVANFQGTYKRHAIEDDLHALTQNTGESLREYVRHFNECRNTIPEITDASVIRAFKSGVRDRYTTQELATRRITTTRRLFEIVERCAHVDDALRRKNDKPKTGGEKKSAADTSKSNKKKNXKNGKRKAQAEVLAAEYANPPKCPDPQGIDTKKSWCPIHKTDRHSLEDCLVFKKSLEKHMAFEKGKRVRVVEKNEESPPHESDSAYPDSDLHVSHIXAAPRRRYPIVVEATIRNIKVARVLIDGGSSINLLFASTLDAMGIPQSELTPTDQPFHGITPQSSSRPLGKITLPVTFGQANNFRTEQITFDVAEFDTAYNAIIGRTAHAKFMAASHYAYQVLKMPGPKETITIQGNAKLVVQCDKRSLDMVEQTPTPPATSEPPKKVSKPNKTPKPDGAIKIVPLSSANPDKSELAFITFLRDNADVFAWQPSNMPGVPREVIEHKLMVRPDAKPVKQRLRRFAPDRKQAIREELDKLLKAGFIREVLHPEWLANPVMVRKANGKWRMCVDFTDLNKACPKDHFPLPRIDQLVDSTXFLDAYSGYHQISMAKEDEEKTAFITPFGVFCYVKMPFGLITAGNTFQCTVQGALSNQLGNNVEAYVDDIVVKTRTSDSLIDDXRETFDNLRRYHLMLNPEKCMFGVPSGKLLGFLVSGRGIEANPEKIKAIENMKSPTRLKEVQKLTGCMAALSRFVARMGERGQPFFALLKKQDKFVWTQEAEEAFIALKRYLSNPPVLVAPQPNEELFLYIAATPHSVSTVIVIEREKVQRPVYYVNETLHDAKTRYPQIQKLLYAVIMTSRKLRHYFQAHRVTIVSSFPLGEVVRNKDVVGRIAKWVVELSQFDVHFVPRTAIKSQVLADFVADWTMPDNKSDNQGDNETWTMAFDGALNSQGAGAGFILTSPSGDQFKHAIHLNFRATNNTAEYEGLLAGIRAAAALGAKRLIVKGDSELVANQVHKDYKCSNPELSKYLAKVRKLEKRFDGIEVRHVYRKDNVEPDDLARRASRQEPLEPGTFLDILTKPSVKEVSGEVGPSTPDISSEVIEAERAVANIETTDDWRTPLIKFISSEELPEDDTEAEKITRKAKIYCMIGNDLYKKEPNGILLKCVSTDDGRQLLLDIHEGICGSHAAGRTLVGKAFRQEFFWPTALKDACDMQTHKATCTGASNNPSDLAVLVLGARHTWPIPTRTRWLQIPIXVAIDKFTKWIEATPTREIKADNAIKFIRGIFCRYGLPHRIISDNGSQFISADFQDYCIGLRVKICFASVSHPQSNGQVKRANGIVLQGIKTLLWAVRTTPTTSNKETPFFLVYGSEAMLPGELXHQSTRVQKHSDENQDEQRDIDVNLLEKHRERVVVQVASYQQALRRYHEKRLRPRLP

SEQ ID NO: 170745 - protein, 1946 aa, Oryza sativa
  Clone ID: PAT_MRT4530_69040C.1.pep
MAEPAKAHDLSPSMSGDDGEPNPRRRARTPPPPPRQSPRREKALERAEGSATSTPTGGGERRRDGERRLLVYGDGSTPQGALQAAGALLRHPPVAHDPESLAQRWLDDVAKLVMTARQRLDAGGRSSATKASGAATTGSASAFVASLRNVRWPPRFRPTIAEKYDGSVNPAEFLQVYTTGIEAAGGDDRVMANFFPMALKGQARGWLMNLPPASVHSWEDLCQQFTMNFQGTYPRPGEEAELHAVQRRDDESLRSYIQRFCQVRNTIPCIPAHAVIYAFRGGVRHNRMLEKIASKEPQTTAELFQLADRVARKEEAWTWNPSGSGVVASAAPGSAAQIGRRDRRKKKRSAHADDEGHVLAVEGASRATRKGRPAGDKKNEAGAPNRERPTGKWCTVHNTSLHDLADCRAVKSLAERTRKWEEERRQERREGKSPAVPSDNRRSEAKQKAPAEDIDDGDDDLGFQEPGATIATVDGGACAHVSRRSFKAMKRELLAATPTHEATCRARWSEVALTFDQTDHPPCVARGGQIAMVVSPTVCNVKLGRVLIDGGAALNILSPAAFDAIKAPGMVLRPSQPIIGVTPGHTWPLGHIDLPVTFGGSANFRTERVNFDVADLSLPYNAVLGRPALVKFMAAVHYAYLQMKMPGPGGPISVHGDLKVALACLEQRADHLAAASKTEGGDERLGASAPATPRQRMITGDEVPEDALVSFLRANADVFAWRPADMPGVPRGLIEHRLAVRPGARPVRQKVRRQAPERQAFIREEVARLLEAGFIREVIHLEWLANPVVVPKANGKLRMCIDYTDLNKACPKDPYPLPRIDQIVDSTAGCDLLCFLDAYSGYHQIRMAREDEEKTAFITPIGTYCYTTMPFGLKNAGPTFQRTTRISLGSQLGRNVEAYVDDLVVKMRNQETLLSDLAETFESLRSARIKLNPDKCVFGVPAGKLLGFLVSTRGIEANPEKIRAIERMRPPSKLRDVQCVTGCMAALSRFISRLGEKALPLFKLLKRSGPFTWTEEAENALTQLKAYLSSPPVLVAPEPDEPLLLYLAATPQVVSAALVVERDEDNSHFTLPHPVPTWPGREQGGEAPEPNGGPRPPTTGVGPLPACQTVLGAPDPQEGPEATVGRPHLSPFDPEANPVLTRPGKEQGEEAPEPNGGLRPLTTGVGPLPACPTTPGAPDPQDGPEATVGRPPLLSSDPEVISTEDKCAPRGCLDEECPRDAAPSEEDRPHRKVQRPVYFVSEALRDAKTRYPQAQKMLYAILMASRKLRHYFQAHRVTVVTSYPLGQILHNREGTGRVVKWAIELSEFDLHFEPRHAIKSQALADFVAEWTPAPEPVSIPEASTDPSQLPHTAHWVMQFDGSLSLQGAGAGVTLTSPNGDVLRYLVRLDFRATNNMAEYEGLLAGLRVAAGLGIRRLLVLGDSQLVVNQVCKEYRCSDPQMDAYVRQVRRMERHFDGIELRHVPRWDNMIADELSRLASSRAQTPPGAFEERLAQPSARPDPLGETDAPDRPPRPVGVQASGPEGSAPNSLRLIAWIAEIQAYLIDKTLPEDREGSERVHRISKRYVLVEGTLYRRTANGILLKCIPREQGVVLLADIHEGECGAHSASRTLVGKAFRQGFYWPTALNDAVDLVRRCRACQFHAKQIHQPAQALQTIPLSWPFAVWGLDILGPFRRAPGGFEYLYVAIDRFTKWPEAYPVVKIDKHSALKFIKGITARFGVPNRIITDNGTQFTSELFGDYCEDMGIKLCFASPAHPRSNGQVERANAEILKGLKTKTFNILKKHGDSWIEELPAVLWANRTTPSRATGETPFFLVYGAEAVLPSELTLRSPRATMYCEADQDQLRRDDLDYLEERRRRAALRAARYQQSLRRYHQRHVRARSLCVDDLVLRRVQTRAGLSKLSPMWEGPYRVVGVPRPGSIRLATGDGTELPNPWNIEHLRRFYP

SEQ ID NO: 170746 - protein, 52 aa, Oryza sativa
  Clone ID: PAT_MRT4530_69041C.1.pep
QNLGTFQPVIFQMENKGHCTEFNRSDGIQTQIPNFPKMARGRFLGLFAIPQP

SEQ ID NO: 170747 - protein, 1888 aa, Oryza sativa
  Clone ID: PAT_MRT4530_69042C.1.pep
MAEPAKAHDLSPSMSGDDGEPNPRRRARTPPPPPRQSPRREKALERAEGSATSTPTGGGEGRRDGERRLLVYGDGSTPQGALQAAGALLRHPPVAHDPESPAQRWLDDVAKLVMTARQRLDAGGRSSATKASGAATTGSASAFVASLRNVRWPPRFRPTIAEKYDGSVNPAEFLQVYTTGIEAAGGDDRVMANFFPMALKGQARGWLMNLPPASVHSWEDLCQQFTMNFQGTYPRPGEEADLHAVQRRDDESLHSYIQRFCQVRNTIPCIPTHAVIYAFRGGVRHNRMLEKIASKEPQTTAELFQLADRVARKEEAWTWNPSGSGVAASAAPGSTARIGRRDRRRKKRSAHTDDEGHVLAVEGASRATRKGRPAGDKKNEAGAPNRERPTGKWCTVHNTSLHDLADCRAVKSLAERTRKWEEERRQERREGKSPAVPSGNRRSEAKQKAPAEDIDDGDDDLGFQEPGATIATVDGGACAHVSRRSFKAMKRELLAAAPTHEATCRARWSEVALTFDQTDHPPCVARGGQIAMVVSPTVCNVKLGRVLIDGGAALNILSPAAFDAIKAPGMVLRPSQPIIGVTPGHTWPLGHIDLPVTFGGSANFRTERVNFDVADLSLPYNAVLGRPALMKMPGPGGPISVHGDLKIALACLEQRADHLAAASKPEGGDERLGASASATPRQRMITGDEVPEDALVSFLRANADVFAWRPADMPGVPREVIEHRLAVRPGARPVRQKVRRQAPERQAFIREEVARLLEAGFIREVIHPEWLANPVVVPKANGKLRMCIDHTDLNKACPKDPYPLSRIDQIVDSTAGCDLLCFLDAYSGYHQIRMAREDEEKTAFITPIGTYCNMTKPFGLKNAGPTFQRTTRISLGSQLGRNVEAYVDDLIVKTRNQETLLSDLAETFESLRSARIKLNPDKCVFGVPAGKLLGFLVSARGIEANPEKIRAIERMRPPSKLRDVQCVTGCMAALSRFISRLGEKALPLFKLLKRSGPFTWTEEAENALTQLKACLSSPPVLVAPEPDEPLLLYLAATPQVVSAALVVERDEDNSHFTPPHPVPTWPGREQGGEAPELNGGPGPPTTGVDPLRACQTVLGAPDPQEGPEATVGRPHLSPFDPEANPVLTRPGKEQGEEAPEPNGGLRPLTTGVGPLPACPTTPGAPDPQDGPEATMGRPPLLSSDPEVISTEDKCAPRGCLDEECPRDAAPSEEDRPHRKVQRPVYFVSEALRDAKTRYPQAQKMLCAILIASRKLRHYFQAHRALADFVAEWTPAPEPISIPEASTDPSQLPHTVHWVMQFDGSLFLQGAGAGVTLTSPSGDVLRYLVRLDFRATNNMAEYEGLLAGLRVAAGLGIRRLLVLGDSQLVVNQVCKEYRCSDPQMDAYVRQVRRMERHFDGIELRHVPRRDNMIADELSRLASSRAQTPPGAFEERLTQPSARPDPLGETDAPDRPPRPVGVQASGPEGSAPNSLRLIAWIAEIQAYLTDKTLPEDREGSERVHRISKRYVLVEGTLYRRAANGILLKCIPREQGVVLLADIHEGECGAHSASRTLVGKAFRQDIYWPTALNDAVDLVRRCRACQFHAKQIHQLAQALQTIPLSWPFAVWGLDILGPFRRAPGGFEYLYVAIDRFTKWPEAYPVVKIDKHSALKFIKGITARFGVPNRIITDNGTQFTSELFGDYCEDMGIKLCFASPAHPRSNGQVERANAEILKGLKTKTFNILKKHGDSWIEELPAVLWANRTTPSRATGETPFFLVYGAEAVLPSELTLRSPRATMYCEADQDQLRRDDLDYLEERRRRAALRAARYQQSLRRYHQRHVRARSLCVDDLVLRRVQTRAGLSKLSPMWEGPYRVVGVPRPGSIRLATGDGTELPNPWNIEHLRRFYP

SEQ ID NO: 170748 - protein, 43 aa, Oryza sativa
  Clone ID: PAT_MRT4530_69043C.1.pep
LFFFFFFFFFFFFFFFFFFFFFFFFQTGGALEKNKQDLAGGGT

SEQ ID NO: 170749 - protein, 1965 aa, Oryza sativa
  unsure (1)..(1965): unsure at all Xaa locations
  Clone ID: PAT_MRT4530_69044C.1.pep
MAEPAKAHDLSPSMSGDDGEPNPRRRPRTPPPLPRQSPRREKALERAQGSATSTSTGGGEGRRDGERRLLIYGDGSTPQGALQAAGALLHHPPVAHDPESPAQRWLDDLAKLVMTARQRLDAGGRSSATKASGAATTGSASSRRRARRAAAVARHLAATPSSAPPTQEDLRGGPDARISIERRRNGRRAAHATEGASSSGVSHQHGRGDQPSVPPVGGVGCRAFVASLRNVRWPPRFRPTIAEKYDGSVNPAEFLQVYTTGIEAAGGDDRVMANFFPMALKGQARGWLMNLPPASVHSWEDLCQQFTMNFQGTYPRPGEKADLHAVQRRDDESLRSYIQRFCQVRNTIPCIPAHAVIYAFRGGVRHNRMLEKIASKEPQTTAELFQLADRVARKEEAWTWNPSGSGVAASAAPGSAAQTGRRDRRRKKXKSLAERTRKWEEERRQERREGKSPAVPSGNRRSEAKQKAPAEDIDDGDDDLGFQEPGATIATVDGGACAHVSRRSLKAMKRELLAAAPTHEATRRARWSEVALTFDQTDHPPCVARGGQIAMVVSPTVCNVKLGRVLIDGGAALNILSPAAFDAIKAPGMMLRPSQPIIGVTPGHTWPLGHIDLPVTFGGPANFRTERVNFDVADLSLPYNAVLGRPALVKFMAAVHYAYLQMKMPGPDGPISVHGDLKVALACMEQRADRLAVVSKPEGGDERLGTSAPATPRQRIVTCDEVPEDALVSFLRANADVFAWRPADMPGVPREVIEHRLAVRPGARPVRQKVRRQAPERQAFIREEVARLLEAGFIREVIHPEWLANPVVVPKANGKLRMCIDYTDLNKACPKDPYPLPRIDQIVDSTAGSDLLCFLDAYSGYHQIRMAREDEEKTAFITPIGTYCYTTMPFGLKNAGPTFQRTTRISLGSQLGRNVEAYVDDLVVKTRNQETLLSDLAETFESLRSARIKLNPDKCVFGVPAGKLLGFLVSARGIEANPEKIRAIERMRPPSKLRDVQCVTGCMAALSRFISRLGEKALPLFKLLKRSGPFTWTEEAERALTQLKAYLSSPPVLVAPEPNEPLLLYLAATPQVVSAALVVERDEDNPHSAHPHLVQTWPGREQGGEAPEPNGGPRPPTTGVGPLPACQTVLGAPDPQEGPEATAGRLHLSPSDPEANPVPIRPGREQGEEAPEPNGGLRPLTTGVGPLPACPTTPGAPDPQDGPEATVGRPPLSSSDPEVVGTGDECAPRGRSGEERPRDAAPSEEDRPHRKVQRPVYFVSEALRDAKTRYPQAQKMLYAVLMASRKLRHYFQAHRVTVVTSYPLGQILHNREGTGRVVKWAIELSEFDLHFEPRHAIKSQALADFVAEWTPAPELVSVPEAGSGPSQLPHTAHWVMQFDGSLSLQGAGAGVTLTSPSGDVLKYLVRLDFRATNNMAEYEGLLAGLRVAAGLGIRRLLVLGDSQLVVNQVCKEYRCSDPQMDAYVRQVRRMERHFDGIELRHVPRRDNMMADELSRLASSRAQTPPGAFEERLAQPSARPDPLGETDAPDRPPRPVGVQASGPEGSAPSSLRLIAWIAEIQAYLTDKTLPEYREGSERVRRISKRYVLVEGTLYRRAANGILLKCIPREQGVVLLADIHEGECGAHSASRTLVGKAFRQGFYWPTALNDAVDLVRRCRACQFHAKQIHQPAQALQTIPLSWPFAVWGLDILGPFRRAPGGFEYLYVAIDKFTKWPEAYPVVKIDKHSALKFIKGITARFGVPNRIITDNGTQFTSELFGDYCEDMGIKLCFASPAHPESNGQVERANAEILKGLKTKTFNILKKHGDSWIEELPAVLWANRTTPSRATGETPFFLVYGAEAVLPSELTLKSPRATMYCEADQDQLRRDDLDYLEERRRRAALRAARYQQSLRRYHQRHVRARSLCVDDLVLRRVQTRAGLSKLSPMWEGPYRVVGVPRPGSIQLATGDGTELPNPWNIEHLRRFYP

SEQ ID NO: 170750 - protein, 1994 aa, Oryza sativa
  unsure (1)..(1994): unsure at all Xaa locations
  Clone ID: PAT_MRT4530_69045C.1.pep
MAEPAKAHDLSPSMSGDDGEPNPRRRARTPPPPPRQSPRREKALERAEGSATSTPTGGGEGRRDGERRLLVYGDGSTPQGALQAAGALLRHPPIAHDPESPAQRWLDDVAKLVMTARQRLDAGGRSSATKASGAATTGSASSRRRARRAAAAVRHSTATPSSTPPTREDLRGEPDARISIERRRNGRRAPHATEGASSSGVSPHHGRGDQPSVPPVGGVFGMSVTTDAGISPPCPRCRPTIAEKYDGSVNPTEFLQVYTTGIEAAGGDDRVMANFFRMALKGQARGWLMNLPPASVHSWEDLCQQFTMNFQGTYPRPGEEADLHAVQRRDDESLRSYIQRFCQVRNTIPCIPAHAVIYAFRGGVRHNRMLEKIASKEPQTTAELFQLADRVARKEEAWTWNPFGSGVAASATPGSAAQIGRRDRRRKKRSAHTDDEGHVLAVEGASRATRKGRPAGGKKNEAGAPNRERPTGKWCTVHNTSLHDLADCRAVKSLAERTRKWEEERRQERREGKSPAVPSGNRRSEAKQKAPAEDIDDGDDDLGFQEPGATIATVDGGGCAHVSRRSFKAMKRELLAAAPTHEATCRARWSEVALTFDQTDHPPCVARGGQIAMVVSPTVCNVKLGRVLIDGGAALNILSPAAFDAIKAPGMVLRPSQPIIGVTPGHTWPLGHIDLPVTFGGSANFRTERVNFDVADLSLPYNAVLGRPALVKFMAAVHYAYLQMKMPGPGGPISVHGDLKVALACLEQRADHLAATSKPEGGEERLGASAPATPRQRMITGDEVPEDALVSFLRANADVFAWRPTDMPGVPREVIEHRLAVRPGARPVRQKVRRQAPERQAFIREEVARLLEAGFIREVIHPEWLANPVVVPKANGKLRMCIDYTDLNKACPKDPYPLPRIDQIVDSTAGCDLLCFLDAYSGYHQIRMAREDEEKTAFITPIGTYCYTTMPFGLKNAGPTFQRTTRISLGNQLGRNVEAYVDDLVVKTRNQEMLLSDLAETFESLRSARIKLNPDKCVFGVPTGKLLGFLVSARGIEANPEKIRAIERMRPPXKLRDVQCVTGXENALTQLKAYLSSPPVLVAPEPDEPLLLYLAATPQVVSATLVVERDENNSHFTLPHPVPTWPGREQGGEAPEPNGGPRPPTTGVGPLPACQTVLGAPDPQEGPEATVGRPHLSPFDPEANPVLTRPGKEQGEEAPEPNGGLRPLTTGVGPLPAFPTTPGTPDPQDGPEATVGRPPLLSSDPEVISTEDKCAPRGCLDEECPRDAAPSEEDRPHRKVQRPVYFVSEALRDAKTRYPQAQKMLYAILMASRKLHHYFQAHRVTVVTSYPLGQILHNREGTGRVVKWAIELSEFDLHFEPRHAIKSQALADFVAEWTPAPEPVSIPEASTDPSQLPHTAHWVMQFDGSLSLQGAGAGVTLTSPSGDVLRYLVRLDFRATNNMAEYEGLLAGLRVAAGLGIRRLLVLGDSQLVVNQVCKEYRCSDPQMDAYVRQVRRMERHFDGIELRHVPRRDNMIADELSRLASSRAQTPPGAFEERLAQPSARPDPLGETDAPDRPPRPVGVQASGPEGSAPNSLRLIAWIAEIQAYLTDKTLPEDREGSERVHRISKRYVLVEGTLYWRAANGILLKCIPREQGVVLLADIHEGECGAHSASRTLVGKAFRQGFYWPTALNDAVDLVRRCRACQFHAKQIHQPAQALQTIPLSWPFAVWGLDILGPFRRAPGGFEYLYVAIDRFTKWPEAYPVVKIDKHSALKFIKGITARFGVPNRIITDNGTQFTSELFGDYCEDMGIKLCFASPAHPRSNGQVERANAEILKGLKTKTFNILKKHGDSWIEELPXAVLWANRTTPSRATGETPFFLVYGAEAVLPSELTLRSPRATMYCEADQNQLRRDDLDYLEERRRRAALRAACYQQSLRRXNQRHVRARSLCVDDLVLRRVQTRAGLSKLSPMWEGPYRVVGVPRPGSIRLATGDGTELPNPWNIEHLRRFYP

SEQ ID NO: 170751 - protein, 134 aa, Oryza sativa
  unsure (1)..(134): unsure at all Xaa locations
  Clone ID: PAT_MRT4530_69046C.1.pep
HGSALWTNVREDALEMKIVTQLRQSLRKMVPKSXCSRTVKDEMSRXVCQTWGQLGTNERAGVANTIRARQGTTMNHTPMSEETSRVGLRDGRGTRTTGEKSTGDEAMLRRTPLEGGSAEPGAGSIQPNFGWRPS

SEQ ID NO: 170752 - protein, 1997 aa, Oryza sativa
  Clone ID: PAT_MRT4530_69047C.1.pep
MAEPAKAHDLSPSMSGDDGEPNPRRRARTPPPPPRQSPRREKALERAEGSATSTSTGGGEGRRDGERRLLVYGDGSTPQGVLQAAGALLRHPPVAHDPESPAQRWLDDVAKLVMTARQRLDAGGRSSATKASGAATTGSASSRRRARRAAAAVRHSAATPSSTPPTREDLRGEPDARTSIERRRNGRRAPHATEGASSSGVSPHHGRGDQPSVPLVGGVGCRAFVASLRNVRWPPRFRPTISEKYDGSVNPAEFLQVYTTGIEAAGGDDRVMANFFPMALKGQARGWLMNLPPASVYSWEDLCQQFTMNFQGTYPRPGEEADLHAVQRRDDESLRLYIQRFCQVRNTIPCIPAHAVIYAFRGGVRHNRMLEKIASKEPQTTAELFQLADRVARKEAWTWNPSGSGVAASAAPGSAAQIGRRDRRRKKRSAHTDDEGHVLAVEGASRATRKGRPAGGKKNEAGAPNRERLTGKWCTVHNTSLHDLADCRAVKSLAERTRKWEEERRQERREGKSPAVPSGNRRSEAKQKAPAEDIDDGNDDLGFQEPGATIATVDGGACAHVSRRSFKAMKRELLAAAPTHEATCRARWSEVALTFDQTDHPPCVARGGQIAMVVSPTVCNVKLGRVLIDGGAALNILSPAAFDAIKAPGMVLRPSQPIIGVTPGHTWPLGHIDLPVTFGGSANFRTERVNFDVADLSLPYNAVLGRPALVKFMAAVHYAYLQMKMPGPGGPISVHGDLKVALACLEQRADHLAAVSKPEGGDERLGASAPATPRQRMITGDEVPVKEEDALVSFLWANADVFAWRPADMPGVPREVIEHRLAVRPGARPVRQKVRRQAPERQAFIREEVARLLEAGFIREVIHPEWLANPVVVPKANGKLRMCIDYTDLNKACPKDPYPLPRIDQIVDSTAGCDLLCFLDAYSGYHQIRMAREDEEKTAFITPIGTYCYTTMPFGLKNAGPTFQRTTRISLGNQLGRNVEAYVDDLVVKTRNQEMLLSDLAETFESLRSARIKLNPDKCVFGVPAGKLLGFLVSARGIEANPEKIRAIERMRPPSKLRDVQCVTGCMAALSRFISRLGEKALPLFKLLKRSGPFTWTEEAENALTQLKVYLSSPPVLVAPEPDEPLLLYLAATPQVVSAALVVERDENNSHFTLPHPVPTWPGREQGGEAPEPNGGPRPPTTGVGPLPACQTVLGAPDPQEGPEATVGRPHLSPFDPEANPVLTRPGKEQGEEAPEPNGGLRPLTTGVGPLPACPTTPGAPDPQDGPEATVGRPPLLSSDPEVISTEDKCAPEALRDAKTRYPQAQKMLYAILMASRKLRHYFQAHRVTVVTSYPLGQILHNREGTGRVVKWAIELSEFDLHFEPRHAIKSQALADFVAEWTPAPEPVSIPEASTDPSQLPHTAHWVMQFDGSLSLQGAGAGVTLTSPSGDVLRYLVRLDFRATNNMAEYEGLLAGLRVAAGLGIRRLLVLGNSQLVVNQVCKEYRCSDPQMDAYVRQIRRMERHFDGIELRHVPRRDNMIADELSRLASSRAQTPPGAFEERLAQPSARPDPLGETDAPDRPPRPVGVQASGPEGSAPNSLRLIAWIAEIQAYLTDKTLPEDREGSERVHCISKRYVLVEGTLYRRAANGILLKCIPREQGVVLLADIHEGECGAHSASRTLVGKAFRQGFYWPTALNDAVDLVRRCRACQFHAKQIHQPAQALQTIPLSWPFAVWGLDILGPFRRAPGGFEYLYVAIDRFTKWPEAYPVVKIDKHSALKFIKGITARFGVPNRIITDNGTQFTSELFGDYCEDMGIKLCFASPAHPRSKGQVERANAEILKGLKTKTFNILKKHGDSWIEELPAVLWANRTTPSRATGETPFFLVYGAEAVLPSELTLRSPRATMYCEADQNQLRRDDLDYLEERRRRAALRAARYQQSLRRYHQRHVRARSLCVDDLVLRRVQTRAGLSKLSPMWEGPYRVVGVPRPGSIRLATGDGTELPNPWNIEHLRRFYP

SEQ ID NO: 170753 - protein, 97 aa, Oryza sativa
  unsure (1)..(97): unsure at all Xaa locations
  Clone ID: PAT_MRT4530_69048C.1.pep
RARARARDRGXGCGKCGARAGVADVARRRRRRVPVGGCGRGSAGWWKETGPTGLGGELQGVTREEEEEEGGGRPAPKSGRRREGEAGGGSGGDNGMG

SEQ ID NO: 170754 - protein, 135 aa, Oryza sativa
  Clone ID: PAT_MRT4530_69049C.1.pep
FSPSSKATHSGNGDSGDGGGPAARVIEAVRCASLANAASSSRAPLPSLPRETLFASSGPLVPLRPPPVSAAIAGSMLICDRRRRRSSCDLRLPAAHRDHCCSMQAATRASPLTRHHHLAHWPTYLCCASPVCDVN

SEQ ID NO: 170755 - protein, 173 aa, Oryza sativa
  unsure (1)..(173): unsure at all Xaa locations
  Clone ID: PAT_MRT4530_6904C.1.pep
MWKYGSALQQRPEDRRGEGRSDRVHGSGAPAAASRSTVDRAHPGSHLPAPWVPRISRTPGRGRPTAGPHAAAARXAETATGAEKGGGAARVDGGDGAPAVSDRNGEXDEVGEDAPKPKEAAPRWEVVRGDDGGGPELGGDGGERERRRELDSGEEXGAARAETGEGGAGRVYI

SEQ ID NO: 170756 - protein, 150 aa, Oryza sativa
  Clone ID: PAT_MRT4530_69050C.1.pep
MIPKQPNPEEAASPPAAAVGTGVAHGTRPAQERRQWRCHRREGGEVGLPLRSSAAEPFWPKLRVIAADLDFGIRRHRRSLSKIEVFLIFSMPNSPLPLSSPSRPAIGAHQQGTRVLRCRLPVWPPLCQHGAPPLGVPAQAENTSGSKSTP

SEQ ID NO: 170757 - protein, 252 aa, Oryza sativa
  Clone ID: PAT_MRT4530_69051C.1.pep
GQRAVVIREVKEHKRAVTCFALSDTGENLLSGSADKSIRVWKMAQRKLECVEVIQIREAVEQFEIYNDKIIVLTPNNVLKFSYSSRSTQTFYKSKHVKSLAVAHGKAYLGCTDLSIQELDVAVGSKIEIRAPTRSWRIRKQPISSIVVYKDWMYCAGTQVEGSTIKDWKKRCKPTMTMAISKGTNVEAMAVVEDFIYLNCDKSPSIIQIWLRENQQKVGRLSAGNKITSMFTANDIIFCGTETGLIKAWIPF

SEQ ID NO: 170758 - protein, 207 aa, Oryza sativa
  Clone ID: PAT_MRT4530_69052C.1.pep
YPSYLAPKKGVCDAELVAQDTGLGCLYHSSKYQHCHYHTFFRRWLFAFLGDYNVRTSNTKTNQTPGSAETVRFLQRVRDAFGSCGGGGGGGATRRRNQRDDAVDAVVWQFVRALRASAGRGTAALFPGDDSRGGGDASSADGDKDDEEEEDDRGGEAMAVAADGARRRTRRSWWRYSKVVIGVELVLFLVLFVVWMIVCKGFNCVQR

SEQ ID NO: 170759 - protein, 1242 aa, Oryza sativa
  Clone ID: PAT_MRT4530_69053C.1.pep
MPPHEDTLDAGGGDVLTFRLHPLAVLKLSDRIREFQYQAAAAARVSYSSSSSSSSGTAAPEDPPPPPTRMSGCVIGVRRGGTVDVSDILDILILHGPDPATFDRALLEKDQEIYKKAFPDLSVLGWYSIGTNVHATDMGIHHGDYTDMQIHQTAEVIDMLRKHSYLKELVVELATTWRRRQQGELVAGAPVAVATAVRGPRRWRRQPSAGAPGGGAVGGGGCRRRPRYPERPQRLTAGLGVAECWSASNVCWRQRRRCGRGSWRRRLLAAWWWRATAQRRFAEAVARVGGSGDGGHDCGGSGDVGGGDGDGEVAERSAAAAAVVVTVSAVIRGMAASDGLPRAWETAATGRRGIVWWRGRRPAWRREAQPMAAEAGSAREARAAEMEAGLAREARPMEGGRIGARDASGRGGWPGADRYGRRWRRRPRCEEELPVGVEQSLAHEGWPPGGAGAGVPHVGRASVVVEHWCVSRGFAGGERTSHRLVRVVQKKNKCAFTSISHHLFDKMVIPKQPDPEEATSPPATAVGTGVAHGTRPAQERRQWRCRRREGGEVGLPLRLPSAEPFWPKLRVIAAGFDFGIRRHRRSLSEIEVSLIFSMPNSLLPLSSPCRPAVGAHRQGCIQSLTFEDTMFTPVRMKTEIFDELMDANGTAFYLLLNPAINFSQKDIPVTIYERVTNTTYKHYKHVLLKIVGVERISLDHADFVYPSPCVVFDVLAPPLGKEFSVLGCVAQPHHLARVGIALCSPFLNANKRCCRYYLILRKYHMIRDRNRLIPYRYQVILARYQMISIRYHAILTTYQVITSEVSDDTYQVSCDSTTYQVSDDSYHVSGDTRKVSCDTYQILGAGHRGVVAGGRVLPCPRSTPNPNLVAGSRILPRPRSTSELIAGDRILRRELVTGGRVRRPRLSRRPRPPRRSSSPVPLPSPHRILHRPRPTSELVAGAIFITNRILCRPCDHAPRRSSPAAASAPPVSASSALLPRRPALSRLREVERERSRWDSIPTGFRKNAFRTMLFETPSGFVMFRVSDVLFRYPEDIWSSFTDPRTAHQAVRTIGFIENIGCWFNGRIVPELIWGLNYALDEFVPQEKGNLSNECHFPLSKQLHEQLKAYGFSISPQLINREFITSFGYLNYLERTSNCISGDLHQKFDRFFCGLEMSEGEFVRGVAHRLHSMEEVASTPGRREALSNAEFLLAVPKKKYNTLSRLKRMEAEVRGSGPWVFVAVFAVAFGVMEGLRIAMKRAN

SEQ ID NO: 170760 - protein, 234 aa, Oryza sativa
  Clone ID: PAT_MRT4530_69054C.1.pep
MAANVGESTSGSSSGGADSGGSFECNICFELPQEPIVTLCGHLFCWPCLYKWLHIHSHSPECPVCKAVVEEDKLVPLYGRGKDRVDPRSKNVPGADIPNRPAGQRPATAPQANPNTHFPNANPNPWFMGGGIPLANARWGNYTFSAAFGGLFPLLSFQVHGFPDATAYGQPAGFPYGYGHGHGHGHGHAFHGGHAHAAAAPRHGPPGQQQQADVYLKALLILVGFLVIASLITF

SEQ ID NO: 170761 - protein, 586 aa, Oryza sativa
  Clone ID: PAT_MRT4530_69055C.1.pep
MPDARSAAENASRHHHHHHRAHAIADRSERGLPEEHSRGSVDERFVFPWMGILVNVPTEWKNGRQVGESGNRLKEGFARFCPHKVIPLWNHRGHTGNAIVEFAKDWTGFENALAFEVHFEQQGYGRRAWMGNKYRGSQMFGWVARADDHNSPGPIGVYLRKNGDLKTVADLENEGTRKTDKLVANLASQVEVKKRHVEELESQYNETTASLERVMEQREQQLQAYNEEIRKMQDLALRHSQRIMDENKKLRSDLESKMQLLDSRSKELDKLAVQSNSDRMNLEKEKEKNVNLAIGILGNADVIYVSFYFVRRFANDIKTKHLKMATLEQQKADESVLKLVEEHKREKQAALDKILKLEQQLNAKQKLELEIQQLQGKLEVMKHMPGKEDSEAKSKIHELSEELKDKYAEMESIESLNQALVIKERQSNDELQHARKVLIEGFQDIIVGRTNIGIKRMGVIDFKAFTNAYKQRSLEEDADVSAAELCSLWENEIKNSDWHPFRVVMVDGKEMEILSEDDGKLCELKEEHGEEICAMVTKALLELNEYNPSGRYPVPELWNFKENRKATLKEVVQYVLNQWKKNKRKR

SEQ ID NO: 170762 - protein, 52 aa, Oryza sativa
  Clone ID: PAT_MRT4530_69056C.1.pep
MLYALQGFQDIIVGRTNIGIKRMGVIDSKAFTNAYKQKSLEEDADVSAAELC

SEQ ID NO: 170763 - protein, 120 aa, Oryza sativa
  unsure (1)..(120): unsure at all Xaa locations
  Clone ID: PAT_MRT4530_69057C.1.pep
RLRDGAGATMLTDLTFWGLVEPCFYRDKCGLSLVTAGMHCINADLALIDTLVNNIPFQWYRLAFFGFWSCAYVTXFNGXLHACGALSWWPYPFLDLSTSGAPLWYLVMAIGHNPCFCLNW

SEQ ID NO: 170764 - protein, 100 aa, Oryza sativa
  unsure (1)..(100): unsure at all Xaa locations
  Clone ID: PAT_MRT4530_69058C.1.pep
RDVAIARIKAMLTRIVTTGNNPTGVPDVRALILVPGGKAQHTQRQTRSNGRLGRPPQALDGRHELDTKAFIFKGILFWVXEKLSKTEYNHRTQQDTPTSA

SEQ ID NO: 170765 - protein, 119 aa, Oryza sativa
  Clone ID: PAT_MRT4530_69059C.1.pep
MKGSGAAMPSSMFYVHEADVAQIHHFLEECSLCGKSLSGDIFMYRGDTPFCSEECRQQQIEVDRAKHRRKKRAAAHAVSVRKEHRNHHHHHRHHHQQPQPRPAIDANPWGTARGPALRV

SEQ ID NO: 170766 - protein, 149 aa, Oryza sativa
  unsure (1)..(149): unsure at all Xaa locations
  Clone ID: PAT_MRT4530_6905C.1.pep
MLHEEGQTCTLLSXHVVDKDDXSVTSLTLVASSTDSHNPTSHLFPAEVEIHQNTGVGYYASQRPEPVYIARVSRFFLAGDLSTYRESLRFHPKPPAEPAKGGLCGLPHFHLYSSPVRLHSNPSLAAAAAGRLRLRRRRATAGRRHRRRA

SEQ ID NO: 170767 - protein, 78 aa, Oryza sativa
  unsure (1)..(78): unsure at all Xaa locations
  Clone ID: PAT_MRT4530_69060C.1.pep
RQSVKFRGGRFGFFLVPVPCGGAVGVWVVVYFSIFRGSPLXGCDLVVFSGPLHSSWARLLRVVQKKMFQETPLYFSSN

SEQ ID NO: 170768 - protein, 51 aa, Oryza sativa
  unsure (1)..(51): unsure at all Xaa locations
  Clone ID: PAT_MRT4530_69061C.1.pep
RIYTXEMMSAMVLSFLVLKCFFLFKFVEDYVSYLFLLWQEIFCLCWIFWTS

SEQ ID NO: 170769 - protein, 81 aa, Oryza sativa
  Clone ID: PAT_MRT4530_69062C.1.pep
VIVDAGGVPVAIGFRRMIRGGLVPALGVLWRRRRSRSRRGSCPWLGSVAVEMEIEREEVGGGGEVGGYNAESIKHGGGRKR

SEQ ID NO: 170770 - protein, 51 aa, Oryza sativa
  Clone ID: PAT_MRT4530_69063C.1.pep
GIKSRYMRDQILSMNMHQGNYQTMVQNTKKNNSTLIHECHLTRCKQSLIHI

SEQ ID NO: 170771 - protein, 2027 aa, Oryza sativa
  Clone ID: PAT_MRT4530_69064C.1.pep
MAEPAKAHDLSPSMSGDDGEPNPRRRARTPPPPPRQSPRREKALERAEGSVTSTPTGGGEGRRDGERRLLVYGDGSTPQGALQAAGALLRHPPVAHDPESPAQRWLDDVAKLVMTARQRLDAGGRSSATKASGAATTGSASSRRRARRAAAAVRHSAATPSSTPPTREDLRGEPDARISIERRRNGRRAPHATEGASSSGVSPHHGRGDQPSVPPVGGVGCRAFVASLRNVRWPPRFRPTIAEKYDGSVNPAEFLQVYTTGIEAAGGDDRVMANFFPMALKGQARGWLMNLPPASVHSWEDLCQQFTMNFQGTYPRPGEEADLHAVQRRDDESLRSYIQRFCQVRNTIPCIPAHAVIYAFRGGVRHNRMLEKIASKEPQTTAELFQLADRVARKEEAWTWNPSGSGVAASAAPGSAAQIGRRDRRRKKRSAHTDDEGHVLAVEGASRATRKGRPAGGKKNEAGAPNRERPTGKWCTVHNTSLHDLADCRAVKSLAERTRKWEEERRQERREGKSPAVPSGNRRSEAKQKAPAEDIDDGDDDLGFQEPGATIATVDGGACAHVSRRSFKAMKRELLAAAPTHEATCRARWSEVALTFDQTDHPPCVARGGQIAMVVSPTVCNVKLGRVLIDGGAALNILSPAAFDAIKAPGMVLRPSQPIIGVTPGHTWPLGHIDLPVTFGGSANFRTERVNFDVADLSLPYNAVLGRPALVKFMAAVHYAYLQMKMPGPGGPISVHGDLKVALACLEQRADHLAAASKPEGGDERLGASAPATPRQRMITGDEVPEDALVSFLRANADVFAWRPADMPGVPREVIEHRLAVRPGARPVRQKVRRQAPERQAFIREEVARLLEAGFIREVIHPEWLANAVVVPKANGKLRMCIDYTDLNKACPKDPYPLPRIDQIVDSTAGCDLLCFLDAYSGYHQIRMAREDEEKTAFITPIGTYCYTTMPFGLKNAGPTFQRTTRISLGNQLGRNVEAYVDDLVVKTRNQEMLLSDLAETFESLRSARIKLNPDKCVFGVPAGKLLGFLVSARGIEANPEKIRAIERMRPPSKLRDVQCVTGCMAALSRFISRLGEKALPLFKLLKRSGPFTWTEEAENALTQLKAYLSSPPVLVAPEPDEPLLLYLAATPQVVSAALVVERDENNSHFTLPHPVPTWPGREQGGEAPEPNGGPRPPTTGVGPLPACQTVLGAPDPQEGPEATVGRPHLSPFDPEANPVLTRPGKEQGEEAPEPNGGLRPLTTGVGPLPACPTTPGAPDPQDGPEATVGRPPLLSSDPEVISTEDKCAPRGCLDEECPRDAAPSEEDRPHRKVQRPVYFVSEALRDAKTRYPQAQKMLYAILMASRKLRHYFQAHRVTVVTSYPLGQILHNREGTGRVVKWAIELSEFDLHFEPRHAIKSQALADFVAEWTPAPEPVSIPEASTDPSQLPHTAHWVMQFDGSLSLQGAGAGVTLTSPSGDVLRYLVRLDFRATNNMAEYEGLLAGLRVAAGLGIRRLLVLGDSQLVVNQVCKEYRCSDPQMDAYVRQVRRMERHFDGIELRHVPRRDNMIADELSRLASSRAQTPPGAFEERLAQPSARPDPLGETDAPDRPPRPVGVQASGPEGSAPNSLRLIAWIAEIQAYLTDKTLPEDREGSERVHRISKRYVLVEGTLYRRAANGILLKCIPREQGVVLLADIHEGECGAHSASRTLVGKAFRQGFYWPTALNDAVDLVRRCRACQFHTKQIHQPAQALQTIPLSWPFAVWGLDILGPFRRAPGGFEYLYVAIDRFTKWPEAYPVVKIDKHSALKFIKGITARFGVPNRIITDNGTQFTSELFGDYCEDMGIKLCFASPAHPRSNGQVERANAEILKGLKTKTFNILKKHGDSWIEELPAVLWANRTTPSRATGETPFFLVYGAEAVLPSELTLRSPRATMYCEADQNQLRRDDLDYLEERRRRAALRAARYQQSLRCYHQRHVRARSLCVDDLVLRRVQTRAGLSKLSPMWEGPYRVVGVPRPGSIRLATGDGTELPNPWNIEHLRRFYP

SEQ ID NO: 170772 - protein, 62 aa, Oryza sativa
  Clone ID: PAT_MRT4530_69065C.1.pep
VFVKSFPFFLTPECPSYPRRVQINWARTFSHASCCMQQSGPPLSLFSTHAFVRRCDWARPRS

SEQ ID NO: 170773 - protein, 227 aa, Oryza sativa
  Clone ID: PAT_MRT4530_69066C.1.pep
MKSFPVAGGRSVSLGLFSDVSNSWELLELMQSGKLEPEVAFLNASLVPDVFPVLAAAHKAVVSQGRESLTTRTLHSELVYNYSGSKHITESLKRCGISDDTSYILAARFDASNEEIKAVEKLICGTEIDLAELETRANQPQILKICVQATCEHLTLLTHSKTYLSVTSRIKIEIWEAWWFFAHDDVVPYYWTTGALGSRAAGTALQLSFLSKRKTWTEKLRCHANMM

SEQ ID NO: 170774 - protein, 172 aa, Oryza sativa
  Clone ID: PAT_MRT4530_69067C.1.pep
MKSFPVAGGSSVSLGLFSDVSNSWELLELMQSGKLEPEVAFLNASLVPDVFPVLAAAHKAVVSQGRESLTTRTLHSELVYNYSGSKHITESLKRCGISDDTSYILAARFDASNEEIKAVEKLICGTEIDLAELETRANQPQILKHYKITPQELSISTLPDAIVCRIAARDAL

SEQ ID NO: 170775 - protein, 219 aa, Oryza sativa
  unsure (1)..(219): unsure at all Xaa locations
  Clone ID: PAT_MRT4530_69068C.1.pep
PLRTSPPRWLHCCPRFAAGRSSAPPLSLSLSLSISLSLSLPPSQSQSRXAPPNVVPVVVHEXTRPRPNDIFGRSSSTAEPRRRPFVVHDRTCVHVGVSIYMCKFETMADSTKGNEEKGLWEEEPFLPILVAPEPTVPPEDISDNDVADDDDENSSLSDPCPSPKRXKTGEGEKGDKDYIPSKEGETAPWRSKQQPKKKDKSKDDEPLESTCRHASLSIL

SEQ ID NO: 170776 - protein, 271 aa, Oryza sativa
  unsure (1)..(271): unsure at all Xaa locations
  Clone ID: PAT_MRT4530_69069C.1.pep
KEKEIERERKQKEEEKRKGEEGEERRREGERERREEKKKKQGGVTEEEKERRGERKRRKRQTEKRRREXEESEEERRRKQKEGKEERRRRERRERKTKERKARKMREEKERERGTDRGERNKEGKREEEGRNRLDQGRYGKRRKDAHESMGKEGQRKQAISDSKRPEGGRKVGTEDXREAKSKKQQVVSHREARRSTCGGEESQDDHRQFRREQTTRGCEGWKERDRQPREGGQTLGLSVAVSLCALSLSRSLSLSLSLSLSLSLSLSLPR

SEQ ID NO: 170777 - protein, 240 aa, Oryza sativa
  unsure (1)..(240): unsure at all Xaa locations
  Clone ID: PAT_MRT4530_6906C.1.pep
RLLTNAEERRRCSMAGSTGVGPTRQPHGPRWTSFTRLAPAGAVGPTRQPHPRARAADGRAPHGSRGTSPKAATPAQPTGGGALVPRLSPPATTGAAERRPREGREGGNESAVHGSPRVDGDDGNGDRSGGRRRRGSGRRGRWRSGDRRPKRRGGRGRRGRGEAEGDGAEAGDGPGRRRRRTGARRXRRRERATARARFRRRERAARVGNGGGRHGECLYRVGRGREWPDVGETGAEDPAA

SEQ ID NO: 170778 - protein, 50 aa, Oryza sativa
  Clone ID: PAT_MRT4530_69070C.1.pep
NNLALLIEVIYLSDSDRLENYLCASFAWFDNFLIDNSYLKKKKNKIIYNG

SEQ ID NO: 170779 - protein, 92 aa, Oryza sativa
  unsure (1)..(92): unsure at all Xaa locations
  Clone ID: PAT_MRT4530_69071C.1.pep
SSLRSWKRERGREEGGNCRGFRRRKGTAPAPAPCCSCXSLTTLSSHQTLSYPPPRSQPPSFTSLFGLRRTMLWIFQAQLQHSPTLDGSSSTD

SEQ ID NO: 170780 - protein, 62 aa, Oryza sativa
  Clone ID: PAT_MRT4530_69072C.1.pep
LRTNHKYRKMKAEFDGTEETDPVPRHEGRSTAPLPLTATPPAPPPRRRPLHRCRPLHSRRRH

SEQ ID NO: 170781 - protein, 68 aa, Oryza sativa
  Clone ID: PAT_MRT4530_69073C.1.pep
FRSPPSSPFFWRGEIRRLRGFLVVLFRDIHEEGGSLRGILMITSVSRSATRCIGRSKHRLLYESTLMY

SEQ ID NO: 170782 - protein, 240 aa, Oryza sativa
  Clone ID: PAT_MRT4530_69074C.1.pep
MALLRQWRRGLALAALLALHLALAAAQSPAAAPAQPTPTPVPTAPAKSPPAPATPAPTATPTPPVAPAKAPPVAPAVAPVTPPPPTPKKAPPPPVTPPPVTPPPVTPPPVSPPPATPPPALPPSTPPPVAAPAEAPAALPPATTPPPVAEAPAELPPAEAPTKSKNKHRKKNKRGKKASAPAPEPLSPPAPAALSPADNQADVSGPAPSAFDLNGSNRQYGQWGFVLQTVMAALLLSLAW

SEQ ID NO: 170783 - protein, 123 aa, Oryza sativa
  Clone ID: PAT_MRT4530_69075C.1.pep
VIDCPHKPTHVFFAHFVLMAGSINRRGLDLTSFVLELRGMCVVLGYPHGVDYQGKQLPEQDGDDAEPHAAWEVTAVFLTGSPERTSLAVTVGGDSFPSHKPNTVLLAVSTLSTKVAPILFFSL

SEQ ID NO: 170784 - protein, 154 aa, Oryza sativa
  unsure (1)..(154): unsure at all Xaa locations
  Clone ID: PAT_MRT4530_69076C.1.pep
MALIRQWGRGLALAALLALHLALAAAQSPAAAPAQPTPTPVPTAPAKSPPAPATPAPTVTPTPPVAPAKAPPVAPAVAPVTPPPPSPKKAPPPPXTPPAGSPSPETPPPLSSRSKTPAPVMPASTPSTVAAPAESSAGLPPATTPPAVVEAPAE

SEQ ID NO: 170785 - protein, 165 aa, Oryza sativa
  unsure (1)..(165): unsure at all Xaa locations
  Clone ID: PAT_MRT4530_69077C.1.pep
TSPPSTRYGTTTLTPNQPSSSPSRRALSTSRSALPSVPTTTTATAASSLYSSSISGASTSXPADXGTRPPSHTSGAAASTSAGSRAPASSRTGSGCCSSAPACSKRGRHGRRSLARTMSGRSSSSLPSSGTGCSRRTSTRSGPSRSASPSALAMAAARRSSSSPT

SEQ ID NO: 170786 - protein, 1061 aa, Oryza sativa
  Clone ID: PAT_MRT4530_69078C.1.pep
MDSTNLPETTTPPPPADDMISGLTEDLLLIILGFLPAARDVVRTSALSTRWRNLWTLAPALRFDIGQRNLRLTDDAEAAAAGRLVAAVDSVLARRDVDAGAPDVKDLEINFVFRSVVGDDQTTAAGRYYRSSSRFGLSRHRRRLPMDVAPASVAAWLRFAECRVAGAFSLELPALSSSRKVVADLPCSERLRTMRLTLGGATVGVPVAGAGADAYRSLADLLLSNVCLDDGDGVRLCNLLSSTSCPSLRRLELSVITGLTILRLDAAATLEELRLIGLRDMEQMEVDAPGLRDLTVKGITVHLMAAAAARIAAPRLQALAYEYRRSWDDCQLMVLDGERTAKLRVLSHGDPAGKHNNGAAAWFLQHCAAADRLDIELKMEFDEEKLHAGIEDVIKDIPKLPNITDLRITVAMSTDTMDTHAVAMSTDTMDTHAIGASTTKLIAKFSRIEYLSIDIDKKPAPFPPSGSFGFVFLVDIAVSGNNGKSRSGYWVALTQCRVDCGPRAALRAVQPTWDDFVPWSRGRLLEETAAPAAAAADVDIISDLTNDVLLIILGLLPAARDVVRTSALSTRWRHLWTRAPALRFDVGPRSWRLGGCGATDEAAAAARLVEAVDSVLARREGGADVKDLEINLVHHRSDGGDRPPMCHHYAAMFVSSPSPSRHREEPRCDLLAVPLDVVTPARVAAWLRFAERRVAGSFSLRLPALSRRIAAAGSPPAVLPCSERLHTMRLALGGAALAVPDAVAAAAYRSLTDLLLSKVSLDDDGDDLRLCSLLSSASCPNMRRLELSDIDGLINLRLDAAATLEVLRLIGLRHMEQMEVDAPGLRELVLKRIYAHLMAAASASSVRIAAPGLQALTYEYDYACWGGAFPMVLDGERTAKLQVLSHGVPDKDNNGAAAWFLQHCAAANRLDVVLKMEFDEEKMEEDIEDLIKDIPEVLNITDLRITVAISTGTVDTHAIGASVTKLIAKFRRIEYLSIDIDKKAGDCTNFDCKCEQHKGWSNEMIPLDHLRMVDIRDFLPFNDQIELVCALIASAPALEKMIVALHESYEETRERTNNMEA

SEQ ID NO: 170787 - protein, 129 aa, Oryza sativa
  Clone ID: PAT_MRT4530_69079C.1.pep
KIYRQKKGWYKDRHLFKHPQDFLGKKPLFLSFVLSFVFTFFSSSHPDLLPVLIWSNGDGRRSKGSNRWPGNQWLLVVSEFCAELACFCFHACINSAYAKLRRELQCCRNHLNGDELSMYQLTDFGQFAR

SEQ ID NO: 170788 - protein, 210 aa, Oryza sativa
  Clone ID: PAT_MRT4530_6907C.1.pep
YGRKYRTPLMWNQVEESQVFGTDILKEAKAKVRTIRNNLKVAQSRQKSYADNRRRDLEFAVDDFVYLRVTPLRGVHRFRTKGKLAPRYVGPFRIVARRGEVAYQLELPASLGNVHDVFHVSQLKKCLRVPSEQADSEQIEVREDLTYVERPVKILDTMERRTRNRVIRFCKDQWSNHAEEEATWEREDELKAAHPDLFASSSESRGRDSV

SEQ ID NO: 170789 - protein, 86 aa, Oryza sativa
  unsure (1)..(86): unsure at all Xaa locations
  Clone ID: PAT_MRT4530_69080C.1.pep
NSKLAYLEIPLDRHPDLDRKKKKKKKKKKKKXKIKKKPKKKTKKKKKKKKKKKKPKKKKKKKGGPFLGNQIFLPGSGTKKFFFRGP

SEQ ID NO: 170790 - protein, 107 aa, Oryza sativa
  unsure (1)..(107): unsure at all Xaa locations
  Clone ID: PAT_MRT4530_69081C.1.pep
KYRRGGLSSYQTLGVDSVAGGRGLDLRDRAVSIHRREGITIEKVRLILEXLQLEESGARSEYIIQNGFTLQXVINVRGGMLMFMXTLSGTTISLEVEASDTIDSDEG

SEQ ID NO: 170791 - protein, 229 aa, Oryza sativa
  Clone ID: PAT_MRT4530_69082C.1.pep
MEAKREFFFCSGGLGFTNVALVLFTTWFYSYEWCGGFSINEHVPKTNGDIPSVDEAFSDHQRLLHRLELYDLAELKVEGDGNCQHVSYTQFRALSDQFYRTTEHHRFVRQQIVKQLESYPEIYAGYVPMDYREYLKKMIKHFHFVATKSTRNGEWGDHVTLQAAADSYGVKIFILTSFRDTCYIEILPVVQKSERVICLSFWAEVHYNSIYPEGELPVMENKRKRWWHF

SEQ ID NO: 170792 - protein, 80 aa, Oryza sativa
  Clone ID: PAT_MRT4530_69083C.1.pep
RTTASEAIQVAPKKLREYVHDQKEYTCGKGREVETVRVQMGSGIEARIPYVKKEGVIDHRQANKGQNQGKRCSSTAKIEI

SEQ ID NO: 170793 - protein, 228 aa, Oryza sativa
  Clone ID: PAT_MRT4530_69084C.1.pep
YGTSLVITVEDLEYHENFRFHKITNLYKRKPRRSPTRGKENDEEVLAKPITTAPCSPTSVTPEPPSSLHVAPHWTHARLCSRYVFVLHPALSSSTPLQRHPHRAGRMPTRRWAACPTSRMLEDIGDNGEGLQLCGRVHEDNEYALLVHPAMDEDDKGLWKCLNNRPADKQPSEDRRKMTVLSVQQYATGVVHCLQLARGVVHLYYMPLCKHGWMHGLAAALELDTLMN

SEQ ID NO: 170794 - protein, 63 aa, Oryza sativa
  unsure (1)..(63): unsure at all Xaa locations
  Clone ID: PAT_MRT4530_69085C.1.pep
KCLKAPHSLRPIRDAFKGTNIAGGGYYKADRNKAXSTGYTDLAAYGRYVSANPDLPPRFEIDA

SEQ ID NO: 170795 - protein, 78 aa, Oryza sativa
  unsure (1)..(78): unsure at all Xaa locations
  Clone ID: PAT_MRT4530_69086C.1.pep
QESXSXXFXGQPSXKNFWXLGRXPQMEXXXYGQLVERAKEXGXEVSKXKKKGHPDPPPETEQXAXDXGVWWXKSLFGR

SEQ ID NO: 170796 - protein, 370 aa, Oryza sativa
  Clone ID: PAT_MRT4530_69087C.1.pep
MIGWGDVYKVVGAMAPLYFALGLGYGSVRWWRFFTAEQCAAINTMVVYFSMPFFTFDFVVRTDPFAMNYRVIAADAVSKAIAIAAMAAWARTRCGCAAAKAGAQSWSITGFSLAALNNTLVVGVPLLDAMYGRWAQDLVVQIAVVQSMVWFPLLLMAFELRKAWVVGGGGGVGPAVMSSSSPPEKQSDVEMNGAVVAAPGGGGGVRLPFWATARTVGLKLARNPNVYASVLGVVWACIAYRWHLSLPGIVTGSLQVMSRTGTGMSMFSMGLFMGQQERVIACGAGLTALGMALRFVAGPLATLVGAAALGLRGDVLHLAIIQAALPQSIASFVFAKEYGLHADVLSTAVIFGTLISLPILIAYYAVLGFV

SEQ ID NO: 170797 - protein, 74 aa, Oryza sativa
  Clone ID: PAT_MRT4530_69088C.1.pep
MNEPPIPLFALKFNAPPSPEESITGKLNDVEINQEIGLICTGKISNPRRGVSIAKAQCKVLYGCSRVVNVSLKS

SEQ ID NO: 170798 - protein, 71 aa, Oryza sativa
  Clone ID: PAT_MRT4530_69089C.1.pep
PILLQCDVMMDVVLHYSIDTLPGTALQLTLERHIVRPPCYCNAYRLHQFCLNEASPANPFWETYTIGWPIF

SEQ ID NO: 170799 - protein, 66 aa, Oryza sativa
  Clone ID: PAT_MRT4530_6908C.1.pep
TNRCLLQWHHCVGPSVQECSLFPTFRLFGGPIPQTVIICRVNLLLHMFIKYKENSLGAQLKSTPLP

SEQ ID NO: 170800 - protein, 66 aa, Oryza sativa
  unsure (1)..(66): unsure at all Xaa locations
  Clone ID: PAT_MRT4530_69090C.1.pep
KAVVWPDLLVSLDNYDLRETLTTRLQPYKTLHCALAIDTPLRGLLILPVQINPISANKXKKQARTR

SEQ ID NO: 170801 - protein, 91 aa, Oryza sativa
  Clone ID: PAT_MRT4530_69091C.1.pep
GFLPVFLETPNPLIVNPLNCSRNPPLGSDLPKAVNPRTCQQKLLQDSADDPPKNRKKWASQDHDQEAASAAESAQKPKQKITQPRSISLWV

SEQ ID NO: 170802 - protein, 117 aa, Oryza sativa
  Clone ID: PAT_MRT4530_69092C.1.pep
MTMRTSSLLLAAVAVVAIVAGATAATVGSWEPVDINDPHVQELGRWAVAEEDRGVAAGGLTFERVTDGEKQVVAGVNYRLTLEASSSGAKDGRYEAVVYEQDPRSNARKLVSFEPIH

SEQ ID NO: 170803 - protein, 222 aa, Oryza sativa
  Clone ID: PAT_MRT4530_69093C.1.pep
MDRRTMRLSLPKRRRMEICVMNGTDLPPPIHQSAGRCILLAAGSRAFGLVASKSDGWRKVAGSVGSDKVRSRATGGRIRWQLGSRAADPVSARGMGGGSGGDGDLGRESGEHGRERYRGPTLHHARSSVSCTRRVTPLRYRALRVRYHHLTTRPVMRQRRSHNSLGLALCERETDLVLVLWSSDTIGPTRQNYLPNCEDGAEVEHDDERPTSGLSPRRSSIA

SEQ ID NO: 170804 - protein, 103 aa, Oryza sativa
  Clone ID: PAT_MRT4530_69094C.1.pep
QSAGRCILLAAGSRAFGLVASKSDGWRKVAGSGASETRSSWREAAGQRVPPTVGSDKVRSRATGGRIRWQLGSRAADPVSARGMGGGSGGDGDLGRESGEHGR

SEQ ID NO: 170805 - protein, 148 aa, Oryza sativa
  Clone ID: PAT_MRT4530_69095C.1.pep
PPPRARHVLLTSRARSRTRRQRKWSRTRCTLVVVSSRSHRRGGKRLGWLLHWTQLFPGPPGRPLPLHGGWRPIHHAMPGEMRARQRFRHAPPWNRMPLPRRPKRHAPNHAHYSYSTPPHPRLQTAENHPRINNSSWLARLNATRKTAL

SEQ ID NO: 170806 - protein, 52 aa, Oryza sativa
  Clone ID: PAT_MRT4530_69096C.1.pep
VPWKVPIYHPPRKTPKLKRALISRIERNPLGRLIKKGKSGFNNTLKQLGYKH

SEQ ID NO: 170807 - protein, 237 aa, Oryza sativa
  unsure (1)..(237): unsure at all Xaa locations
  Clone ID: PAT_MRT4530_69097C.1.pep
MAVAHREGAGRAVHGEEERQLADANGVLGEKENKKKXTTQNKNSRLVSAPCACADLRLASRIQSKGKPPSSVLLHPADIARWVGDEGLDEGTAVEVVVARGATELSHGEHMFTPEAINLQFSRGLIGWALQIVILKGLLYSMGGGEVPLLDLVAYGGYLFAGLSLAVISRLLWAYSYFVMMPWMSLCMGVFLVRTMKRVLFTEMRSSERHSTRQHYFLLFLAISQFPLFFWLGNIGA

SEQ ID NO: 170808 - protein, 193 aa, Oryza sativa
  Clone ID: PAT_MRT4530_69098C.1.pep
ARGRPAHLFLLRLLPNLIFFFPLLSHGYGALLLLPSSSHTLGGALLTSLGGSLLLATPWRWRPPGEEAVAVLPATRSDGPARGGGGPTTTQRRTPLRQIRWVGRWWVAAAYRERPPHLAVAADSGGSSGASPPPNLAGLGDGLVEANGSESDNGGLVADAAAAAQQWMFMLVLVCSSCVHVCSSCVLNVDVCS

SEQ ID NO: 170809 - protein, 41 aa, Oryza sativa
  Clone ID: PAT_MRT4530_69099C.1.pep
MMAGGGHAAAGHRIQIPAGPASQSGPADHKAVAAAPPYPRI

SEQ ID NO: 170810 - protein, 1028 aa, Oryza sativa
  Clone ID: PAT_MRT4530_6909C.1.pep
MASLFLSYLSLSMWENAQISENEQGWSYPLQVLLHVQLGLETNGNPKHAFPSKETRDPTKTESDSDSAGKKTVEDFWSMKTIEMKSFIHGCTSREIKNLQPIPNSPLSSCCERRMAEVAAVGWGISAVGWVVSPIITKILNKGFSYLGFHGSEKLKQLQTKVLQLELVLEAVEESPHRGRLEEWLQQLRSAVYEAEDILDDIEYHRLERQISSQPDDNLESNGRPPRRRNLAPPPNMSKLELKKILKKIENIINDGHKILQLLNLPGHSNINKRQTVSDDSRIAVTTASPPFVVIGRDEDRDKILVLLHETENDGQHEPSRALSHSIIGIHGIPGSGKSTLAQYVCAHEKRGRQEKEAGHFDLIMWVHVSRNFNVDKIFSKMLEEATGNSCPQFNSLNTLEQKLEQALSRKRFLLVLDDVWYNKDDSQEELQKILFPLKVGALGSKILLTSRTRDALLALGAAKCIPISELDDTVFLELFMHYALDSAGIDERDRMIFRAIGSDIAKKLKRSPLAARTVGGQLHMRPTIDFWQDARNQNLLNETMGALWWSYQHLDQQVRRCFAYCSIFPRRHRLERHELINLWVAEGFITTTEVGLEMEAVGRKYFEELVSASFLQLGEKQAERFGASEYFTVHDLLHDLAEKVARNDCFKVENGWTGDLPGDVRHLYIESYNKTMITEKVLKMGNLRTLIIYSGNTEIPTEEKIFERMFMRLRKLRVLSVKIITGSHVFSFPESIGQLRHLRHLCFRTTLIRQVLPNTIAKLRYMHVLDFGVCGDLVFPSGEDMSNLINLQHIIATADLNCPNIGMLTSLQTLPLFPVKKEPGYELQQLRHLNKLRGKLHIHGLGNVGSKEEALEAKLDGKERLKELVLVWDDESCSPEVEAEVLEGLCPPLELERLEITDYHGSSYPDWMIGGHKGPKYLRELELSGCSRLGPAPELFEFFIHLRSLWLWKSSWNFLPDNLEQLMSLHELKMYFCLNIQSLPKLPRSLEEFGLGACDDEFMRSCKTIGHPNWHKIQHIPRVTIAL

SEQ ID NO: 170811 - protein, 213 aa, Oryza sativa
  unsure (1)..(213): unsure at all Xaa locations
  Clone ID: PAT_MRT4530_690C.1.pep
XFGTRXXLHLXXARXGGSXVGKTXIXPCHXWIYGXGPHXPXLEXXWRGRPXHXVGNRLXLQRXPHPASPSASPTXXXSXASXXXDPAGLASTTXXXSXXXXXIAVXXTSRXASLSPXSTXXAXXIPPGXLHLXRXXRXRVXXXGHAAAPCFMGGFSSPRXNDXSTXXXXNRSGSWXNIKSXSSDTLKXPXNSXVXGXLXPXKVXGXXXFXPXX

SEQ ID NO: 170812 - protein, 75 aa, Oryza sativa
  unsure (1)..(75): unsure at all Xaa locations
  Clone ID: PAT_MRT4530_69100C.1.pep
MVCCEHMVLMVVLMTIKDRFTSFGCETLTVPTTSQNGQQLDTLYNKAHCGAPDXEVAEISPRGSLGSPCLWFLRG

SEQ ID NO: 170813 - protein, 88 aa, Oryza sativa
  Clone ID: PAT_MRT4530_69101C.1.pep
PPSPKVKRLQPSGLYVPQLGGGGLPVQANDSARDGHPRHLGLGGPVSPPLSKGFCGPHLQMGAVRTWSIVRGALEWNKGGCVFRKSRA

SEQ ID NO: 170814 - protein, 67 aa, Oryza sativa
  Clone ID: PAT_MRT4530_69102C.1.pep
ICLEKYFRKSIHISLFNKYFYRNNKLKLCVGDHISVQNDFLYEYGGSIYLVFYWLMSYYCLVTNKKL

SEQ ID NO: 170815 - protein, 73 aa, Oryza sativa
  Clone ID: PAT_MRT4530_69103C.1.pep
TRTTGMTMFFNSVAQCQRTGKGAAHQNGRRLPLPARASSGSATPGEGPLLPGFVIQLYAGIKPISLKAKGRRD

SEQ ID NO: 170816 - protein, 91 aa, Oryza sativa
  unsure (1)..(91): unsure at all Xaa locations
  Clone ID: PAT_MRT4530_69104C.1.pep
KVARAKRCRPMNLYGXTLSWNXTRCVWVLEEAGTXYQIMPFDFWKGERKVRNHLTMFPFXKLPSLQSGXLILWKSPAIVKXACRKNRPELG

SEQ ID NO: 170817 - protein, 125 aa, Oryza sativa
  Clone ID: PAT_MRT4530_69105C.1.pep
KKKPFFFFPQAARKIFYSSQRFFIFYKIPGDHLLNWPLILQKPLCFSPEPKWGVFFFRGVGEKGNFFLTPSPNLKAGIAHLGIALKKKAFMPFCFWTGTFFSFKFMSPGLLKMLEIGARNPLTGP

SEQ ID NO: 170818 - protein, 74 aa, Oryza sativa
  Clone ID: PAT_MRT4530_69106C.1.pep
MPADQPDRKSPSKQNISKKSAAPIESRKQQQQQEPAASINSSIKFDNIGISLVPNAPCSILIIFSRCSALRNLA

SEQ ID NO: 170819 - protein, 308 aa, Oryza sativa
  Clone ID: PAT_MRT4530_69107C.1.pep
MNDLFSSSSFKKYADASPASGVGGSDMEAGGEGVVNLDRFFEDVEGVKEDMKGLEALYKRLQSTNEETKTAHDARAVKALRSRMDGDVEQVLRRAKAVKGKLEALDRDNATSRKVPGCGPGSSTDRTRTSVVAGLGKKLKDIMDDFQGLRTRMAAEYKETVARRYYTVTGEKAEDSTIDSLIESGESESFLQKAIQEQGRGQVMDTISEIQERHDAVKDIERSLLDLHQVFLDMAALVEAQGHQLNDIESHVAHASSFVRRGTVELEVAREHQKSSRKWACVAVLAGIILIAVLILPVLINLRILTLR

SEQ ID NO: 170820 - protein, 158 aa, Oryza sativa
  Clone ID: PAT_MRT4530_69108C.1.pep
MGKLDEAKHVLARMKAAEVASDVVFFNTLLAGFVADGRFEDAFELAWKMEQRGCPPTTATSPSLHAASGSPRCAPPRCPWPPGERGPASLFHTTTVATTATSPRLRIAFGSPCLAPAPPPGERVGWAQEKKGRRVEGLERGDDIWAPHISGSHNIFFV

SEQ ID NO: 170821 - protein, 101 aa, Oryza sativa
  Clone ID: PAT_MRT4530_69109C.1.pep
MARFFSTIFLLLALAFVAEVSGSTNGGFYRPVGAEGSVSIEECPQKCDYRCSATKRQEPCLKYCNICCQKCLCVPSGTSGNKEECPCYNNLKSSQGNSKCP

SEQ ID NO: 170822 - protein, 808 aa, Oryza sativa
  Clone ID: PAT_MRT4530_6910C.1.pep
MAEQAKAHDLSPSVSGDDGEPNPRRRARTPPPPPRQSPKQGEALERVDKSAASPVVGDAGERRDGERRLLVYGDGSTPQGALQAASALLRHPPVVHDPESPAQRWLDDVANLVVTAQQRLGAGGRSATTKTSGAATTGSVSSRRRARRAAAAARHSAATPSSTPSTREDQHEEPDARLNIERRRNSRRTPRATEGASSSRVSPRHGREDQPSVPPAGGVGCRAFVASLRNVRWPPRFRPTITEKYDGSVNPTEFLQVYTTGIEAAGGDDRVMANFFPMALKGQARGWLMNLPPASVHSWEDLCQQFTMNFQGTYPRPGEEADLHAVQRGDDESLRSYIQRFCQVRNTIPCIPAHAVIYAFRGGVRHNRMLEKIASKEPQTTAELFQLADRVARKEEAWTWNPSGSGVAASAAPGSAAQTGRRDRRRKKRSVHSGDEGHVLAVEGAPRATRKGRPACDKKKEAGTPSRERPAGRWCSVHNTSLHDLADCRAVKNLAERTRKWEEDRRQERREDKSAAVPSGKRRSEARQKAPAVDPDDGDDDLGFQEPGATIATVDGGACAHVSRRSFKAMKRELLAAAPTHEATRRARWSEVALTFDQTDHPPCVARGGQIAMVVSPTICNVKLGRVLIDGGAALNILSPAAFDAIKALGMVLRPSQPIIGVTPGHTWPLGHIDLPVTFGGPANFRTERVSFDVADLSLPYNAVLGRPALVKFMAAVHYAYLQMKMPGPGGPISVRGDLKVALACMEQRADHLAAATKPEGGDERLGTSAPTAPRQRIATCDEVPVKEVALGDGPSKTTRIGGLLDGK

SEQ ID NO: 170823 - protein, 47 aa, Oryza sativa
  Clone ID: PAT_MRT4530_69110C.1.pep
CSSLKCISVRTEKVHGDLIAVDYGVSHMEGGYANRGIPHLEDYICEN

SEQ ID NO: 170824 - protein, 57 aa, Oryza sativa
  Clone ID: PAT_MRT4530_69111C.1.pep
NTELPKGKLVLPIKTQNAQPSNPGKLDGFYDHFGGSESGKKISIMGQGPINLNQYNP

SEQ ID NO: 170825 - protein, 192 aa, Oryza sativa
  unsure (1)..(192): unsure at all Xaa locations
  Clone ID: PAT_MRT4530_69112C.1.pep
SNKSACEIELISQVSSSSTSSSSSSSSSSSSSSSTSSSMEECLAMDSSLQWLAASSHPTSEPLSAXSTSTTGTRSGNRAAPRRTARRSPRSRPRPAPRRSPRRQAPSGTRPPPRPPPRVAPASATSXPRLMSSDRLSPSPSPPAARHSWRFLATSPLAAAAAVVSMTSTLLELATAAGRAVNTPATRRRLGW

SEQ ID NO: 170826 - protein, 277 aa, Oryza sativa
  Clone ID: PAT_MRT4530_69113C.1.pep
MEGVQHMEATSKCQTRHTHTEQQQQQQQHQTARHNERSLAFQAIKRFDMVKTAASNGAAAARRVGGGGDGKRAAYKGVRMRSWGSWVSEIRAPSQKTRIWLGSYSTAEAAARAYDAALLCLKGSAAADLNFPVRLPFDLPAAAMSPKSIQRVAAAAAANANANASSSCSAAVFAGVDDSGGASASEASTPACSSSDGAASPSPVSSPETVISDVDVDYSLLADIEAFFQSPKCMEYAMMDPCSAFFAPPPPPAMAMEEECGWEEEGDIALWSFSSLD

SEQ ID NO: 170827 - protein, 107 aa, Oryza sativa
  unsure (1)..(107): unsure at all Xaa locations
  Clone ID: PAT_MRT4530_69114C.1.pep
MLAPIARAIETCYLFXRTRXKRRKYNCLNRALSLIGNDGYPNLGPYQAQVILYQLYRPSIFSTYSVFSLCFQPXAQSDPESNSIQHQIRFNLPSSFPNLMTNSVANT

SEQ ID NO: 170828 - protein, 55 aa, Oryza sativa
  unsure (1)..(55): unsure at all Xaa locations
  Clone ID: PAT_MRT4530_69115C.1.pep
WVFWFFLIFYSNAHLISSSKRSDISKHCGRLGXXNHTXXXPQPPHWGASLSGGGG

SEQ ID NO: 170829 - protein, 84 aa, Oryza sativa
  Clone ID: PAT_MRT4530_69116C.1.pep
TFLPPSFSRCRVHPCSIVSVCCSRLFAFSPWSRPLSGRCIVFAAVLFGRRGLVLIARPWQARLLRCRFSFRVAPSRPCLFLHGR

SEQ ID NO: 170830 - protein, 95 aa, Oryza sativa
  Clone ID: PAT_MRT4530_69117C.1.pep
QAVSAVILSVSVASVVVGVVSWGYCASSVWPAMSPFRPVMSRISCCIRSSSSVSSLSGIKSFPEVQKPEHTGHGAVFLSSLVRLQSDVRSPVVPR

SEQ ID NO: 170831 - protein, 25 aa, Oryza sativa
  Clone ID: PAT_MRT4530_69118C.1.pep
SFLSAPAAAATDAASGSGCPVMGGN

SEQ ID NO: 170832 - protein, 295 aa, Oryza sativa
  Clone ID: PAT_MRT4530_69119C.1.pep
HDGVNVLPPKAEWYCPTCVARSKGKPLPPKYGKVTRTVVAPKVNLISGVPSQGVSENRTTKDNNQELAADGTVIDKNSSEANRIVHNSDKLALESSKEQSQSGSASAAVDKGRGKPQGVGTMENNAISERGNVHELTSNGDLSTKNEIVIGDAKDKTIVCSTDHSIVGWVGDPLRVVENKTYYYSCNIDGIAYNLDDHILVASKDKESAPSKLQSLWEEHDSRSKMALVSPYFFASDIPELISKPCTAEENEVFASCNQRTVTVSAICGQCEVLHVDKFREETKGSQVCLFDALS

SEQ ID NO: 170833 - protein, 764 aa, Oryza sativa
  Clone ID: PAT_MRT4530_6911C.1.pep
MVPPIAGNGRAKSGRLPLPPAAIPVAVPAPPVAGSLPHPIKWDPHPSFYRFSPFPSLPVVVSPLPAFSFSLSDAGRPPATSPSSPEHRPAVPSPPSALQHRPLHRPYRLLAGNSPERCPRRQPVALVPLYSLQPAAVHRRCADRRRRLLLRHRGIAFFPGITSSSPEFRRNAVARAGLTFLLVDISSGCPGRRARASADVAVSSLGDAASPSTPACPRFRRNVAANLSVRLAGVVRPPVPPRRVPVGHLHHHLRHRSRDVVLGLASPSTEPRRGVVLVVLVPVQPLPAVLVASSPVPVVVVVVVLSSFPVVVAPVLVFVLGSASSSLVPAAARLRPRIAAEAVPSPFVSVVPLSSFRRFPKRGSWSSPKNWNNPAGATNVQVPTVQQQCKLSEFLKTEPPTFAIAVDPMEASEWLRTIEKKLGLIQCTDQERVGFATHQLVGPASEWWDNYEASQPEGHTTTWNEFSSVFRRSHVPSGMITLRKREFRYLKQGDLTVAEYLHGFYRLAHYAPEDVETGEDKQEKFLQGLKDELAVQLLLEDYEDFEKLVDKAMQLESEHNRMTNCKRRMVNNPVFPGGNQRQRTEPLQITGSSVVYPEFLPQEDERNADNNNSNTNADDTTNNHGSCPIHDHLDQAYNVNIIHQDIDDSINEGTQNDNLSNFDTEKDSNGDSNNGTTDADVSKDFQPPIPTPNQNDRSQTDNSAKKTLICYNCKEPGHFSRDCPQPKRNLRHHSGHYARRRQVTRLVVTGANAVPVRPHINSNP

SEQ ID NO: 170834 - protein, 49 aa, Oryza sativa
  unsure (1)..(49): unsure at all Xaa locations
  Clone ID: PAT_MRT4530_69120C.1.pep
SPEEPVICPLFHRQVLIFALPIEEXVVRPPRSRVRIFPGSNPRGPGARG

SEQ ID NO: 170835 - protein, 95 aa, Oryza sativa
  Clone ID: PAT_MRT4530_69121C.1.pep
MSRIRLINELAKNAKMTRSIGPKFTSLRMGAIEVVTCRNWARPAQPMIRPNNWVWPNPPRLRSMQGSDGRLGLIPNDGWRVLPTFPTVITVILKL

SEQ ID NO: 170836 - protein, 252 aa, Oryza sativa
  Clone ID: PAT_MRT4530_69122C.1.pep
MATTTVTTPILCNLSAKPRDTLRLPTTRSPNDGTRRTTLHLSSSRARGDLIRAAAAVYTVKLIGPEGQESVIKVPEDTYILDAAEEAGVDLPYSCRAGACSTCAGKVVEGGVDQSDQSFLDDAQVGAGYVLTCVAYPTANSVIQTHKEADLIHVPPTRNGVTTRPHRAASIATAPSPRTDASAPPRPAWRPPRHGGNQSEFGNLAAGPARAVFSSPPGARVTVRNRHPERASQGRGCTELLLRAELVVATYT

SEQ ID NO: 170837 - protein, 51 aa, Oryza sativa
  Clone ID: PAT_MRT4530_69123C.1.pep
YCLLASTSSPSTPWTRSGAGPLGDCSDERRWSRERRGSVVVCFAAASVALD

SEQ ID NO: 170838 - protein, 678 aa, Oryza sativa
  Clone ID: PAT_MRT4530_69124C.1.pep
MAAAGDVQMAEKETFAFQAEINQLLSLIINTFYSNKEIFLRELISNSSDALDKIRFESLTDKSKLDAQPELFIRLVPYKPSKTLSIIDSGVGMTKSDLVNNLGTIARSGTKEFMEALQAGADVSMIGQFGVGFYSAYLVAEKVVVTTKHNDDEQYVWESQAGGSFTVTLDTAGERLGRGTKITLFLKDDQLEYLEERRLKDLVKKHSEFISYPIYLWSEKTTEKEISDDEDDDIDDSKGKEKEGDIEEVKDKKKKKKVNEVSHEWVQINKQKPIWLRKPEEISREEYASFYKSLTNDWEDHLAVKHFSVEGQLEFKAILFVPHRAPFDLFDTRKKMNNIKLYVRRVFIMDNCEELIPEWLGFVKGVVDSDDLPLNISREMLQQNKILKVIRKNLVKKCIEMFFEIADNKEDYAKFYEAFSKNLKLGIHEDSQNRGKLADLLRYHSTKSGNELTSLKDYVTRMKEGQKEVYYITGESRKAVENSPFLEKLKKKGYEVLFMVDAIDEYAVGQLKEYDGKKLVSATKEGLKLDDDDDAKERKRSFEPLCKVIKDILGDRVEKVVVSDRIVDSPCCLVTGEYGWTANMERIMKAQALRDSSMGAYMSSKKTMEINPENGIMEELRKRAEALKTQKTFAARIHRMLKLGLNIDDDDAAAADDDADMPALDDAAAEESKMEEVD

SEQ ID NO: 170839 - protein, 87 aa, Oryza sativa
  Clone ID: PAT_MRT4530_69126C.1.pep
PRVREAIAAHTIPGDLICMEKVSMRLGLVALVLLGIMLAASQQAVDASSPTSAISYEGLYRKPEDRPKKGDPVMKARGCTEAMKCNG

SEQ ID NO: 170840 - protein, 319 aa, Oryza sativa
  unsure (1)..(319): unsure at all Xaa locations
  Clone ID: PAT_MRT4530_69127C.1.pep
MAFMSMERSTWAFTFGILGNLISLMVFLSPLPTFYRVYRKKSTEGFQSTPYVVTLFSCMLWMYYAFVKSGAELLVTINGVGCVIETVYLAMYLAYAPKSARMLTAKMLLGLNIGLFGVIALVTLLLSRGELRVHVLGWICVAVSLSVFAAPLSIIRXVIRTKSVEFMPFSLSFFLVLSAVIWFLYGLLKKDVFVALPNVLGFVFGVAQMALYMAYRSKKPLVASSSSAVVAAGLEIKLPEHVKEVQAVAKGAVAAAPEGRISCGAEVHPIDDVMPSEVVEVKVDDEETNRTDEMAGDGDHAMVRTEQIIKPDMAIVVEV

SEQ ID NO: 170841 - protein, 149 aa, Oryza sativa
  unsure (1)..(149): unsure at all Xaa locations
  Clone ID: PAT_MRT4530_69128C.1.pep
GESCCSRNRIVDSPCCLVTGEYGWTAXNMERIMKAQALRDSSMGAYMSSKKTMEINPENGIMEELRKXRADADANDKSVRDLVLLLFETALLTSGFSLDDPNTFAARIHRMLKLGLNIDDDDXAAADDDADMPALDDAAAEESKMEEVD

SEQ ID NO: 170842 - protein, 380 aa, Oryza sativa
  Clone ID: PAT_MRT4530_69129C.1.pep
MVAGAEVMHQVVPLLEASFHRRCSVKGVDEVSPPVEEMSPEAASEAAIEVPELMVKAPVESLQFSPNIRSGSFADIGPRRYMEDEHIRIDDLSGHLGSLLMCPAPNAFYGVFDGHGGPDAAAYMKRHAIRLFFEDSEFPQALEEDESFYESVEKSIHNAFLSADLALADDLAISRSSGTTALAALIFGRQLLVANAGDCRAVLCRKGVAVEMSRDHRPTYDAEHERITECGGYIEDGYLNGVLSVTRALGDWDMKMPQGSRSPLIAEPEFQQTTLTEDDEFLIIGCDGIWDVMSSQHAVTIVRKGLRRHDDPERCARELAMEAKRLQTFDNLTVIVICFGSELGGGSPSSEQAPIRRVRCCKSLSSEALCNLKKWLEPNE

SEQ ID NO: 170843 - protein, 127 aa, Oryza sativa
  unsure (1)..(127): unsure at all Xaa locations
  Clone ID: PAT_MRT4530_6912C.1.pep
PSRDXPIPAQISLCCSSCVSSLFTVSSTQPFLTRNVSVTPVVLLLTTVCLAMSPSCPFPALYVVSCSPGPRATHIQLQYLMLYMQYIALSHFSXSHLVSATSCIITTIKLRAIHTTSCLVSSCPSNH

SEQ ID NO: 170844 - protein, 197 aa, Oryza sativa
  unsure (1)..(197): unsure at all Xaa locations
  Clone ID: PAT_MRT4530_69130C.1.pep
MAAAGDVQMAEKETFAFQAEINQLLSLIINTFYSNKEIFLRELISNSSDALDKIRFESLTDKSKLDAQPELFIRLVPYKPSKTLSIIDSGXGMTKSDLVNNLXGTIARSGTKEFMEALQAGADVSMIGQFGVGFYSAYLVAEKVVVTTKHNDDEQYVWESQAGGSFTVTLDTAGERSAAGTKIXLFLKDDQLEVGRN

SEQ ID NO: 170845 - protein, 101 aa, Oryza sativa
  Clone ID: PAT_MRT4530_69131C.1.pep
MTPRQHSAETSTPGMEIKASAFSLVARKRWTTRMQRVVDRAAEIESREREEQRGAIKGKDGELVAGVSGSAPERKETRALVGHDAACEGIGMTDSNGGERS

SEQ ID NO: 170846 - protein, 1383 aa, Oryza sativa
  unsure (1)..(1383): unsure at all Xaa locations
  Clone ID: PAT_MRT4530_69132C.1.pep
MEPNKLVTWGRNCRGLGSAATVGELRWLVKSLRPSLVFLSETKMRDKQARNLMWSLGFSGSFAVSCEGLSGGLALFWTTAYTVSLRGFNSXHFIDVLVSTEELPPWRISFVYGEPKRELRHFFWNLLRRLHDQWRGPWLCCGDFNEVLCLDEHLGMRERSEPHMQHFRSCLDDCGLIDLGFVGPKFTWSNKQDANSNSKVRLDRAVANGEFSRYFEDCLVENVITTSSDHYAISIDLSRRNHGQRRIPIQQGFRFEAAWLRAEDYREVVENSWRISSAGCVGLRGVWSVLQQVAVSLKDWSKASFGSVRRKILKMERKLKSLRQSPVNDVVIQEEKLIEQQLCELFEKEEIMARQRSRVDWLREGDRNTAFFHARASARRRTNRIKELVRDDGSRCISQEGIKRMAEVFYENLFSSEPCDSMEEVLDAIPNKVGDFINGELGKQYTNEEIKTALFQMGSTKAPGPDGFPALFYQTHWGILEEHICNAVRGFLLGEEIPEGLCDSVVVLIPKVNNASHLSKFRPISLCNVLYKIASKVLANRLKPFLPDIVSEFQSAFVPGRLITDSALVAYECLHTIRKQHNKNPFFALKIDMMKAYDRVEWAYLSGCLSKLGFSQDWINTVMRCVSSVRYAVKINGELTKPVVPSRGIRQGDPISPYLFLLCTEGLSCLLHKKEVAGELQGIKNGRHGPPISHLLFADDSIFFAKADSRNVQALKNTLRSYCSASGQKINLHKSSIFFGKRCPDAVKISVKSCLQVDNEVLQDSYLGMPTEIGLATTNFFKFLPERIWKRVNGWTDRPLSRAGMETMLKAVAQAIPNYVMSCFRIPVSICEKMKTCIADHWWGFEDGKKKMHWKSWSWLSTPKFLGGMGFREFTTFNQAMLGRQCWRLLTDPDSLCSRVLKGRYFPNSSFWEAAQPKSPSFTWRSLLFGRELLAKGVRWGVGDGKTIKIFSDNWIPGFRPQLVTTLSPFPTDATVSCLMNEDARCWDGDLIRSLFPVDIAKEILQIPISRHGDADFASWPHDKLGLYSVRSAYNLARSEAFFADQSNSGRGMASRLLESQKDWKGLWKINAPGKMKITLWRAAHECLATGFQLRRRHIPSTDGCVFCNRDDTVEHVFLFCPFAAQIWEEIKGKCAVKLGRNGFSTMRQWIFDFLKRGSSHANTLLAVTFWHIWEARNNTKNNNGTVHPQRVVIKILSYVDMILKHNTKTVDGQRGGNTQAIPRWQPPPASVWMINSDAAIFSSSRTMGVGALIRDNTGKCLVACSEMISDVVLPELAEALAIRRALGLAKEEGLEHIVMASDCLTVIRRIQTSGRDRSGVGCVIEDIKKLASTFVLCSFMHVNRLSNLAAHSLARNAELSTCTVYRSVIPDYIRDILCDDVA

SEQ ID NO: 170847 - protein, 165 aa, Oryza sativa
  unsure (1)..(165): unsure at all Xaa locations
  Clone ID: PAT_MRT4530_69133C.1.pep
MQLNPKARTRRNKTKAKRTLSMCGNHLEAPQFNPMSYIKLHCRNRLHRLAXPDSDPADPNRSRSGLQXFLLCFRXDLRLRLCFDLIFFPDADITKFARSPLFFSSLIPSPGSPLSPAAKPTTAPQTASASAAASAAPHGGVVGSRIPRRASQWSGSDIGSLRDNG

SEQ ID NO: 170848 - protein, 76 aa, Oryza sativa
  unsure (1)..(76): unsure at all Xaa locations
  Clone ID: PAT_MRT4530_69134C.1.pep
GIARSCTKTSNNSRKAELCQQMKVTPTTAIYVSFHSHNXFQLYLSAFPANPTKCPCLAIRKSLSSSPYSVVPQNLG

SEQ ID NO: 170849 - protein, 95 aa, Oryza sativa
  Clone ID: PAT_MRT4530_69135C.1.pep
SLMVSEHHLYIYPCASQRPQRVIVAPRLQIVWHSPFKFRQLCSRQHTEPQFCHEFMWHHSAQLTYSCSTVRKAAIALTARPAAAVVSSIRTSPPT

SEQ ID NO: 170850 - protein, 93 aa, Oryza sativa
  Clone ID: PAT_MRT4530_69136C.1.pep
LSGNWNEYNLNPYEDPLEAKSGAHSPVIPSSNSVYVKLLPVKKLVVGPWPAGRPPHGEHRPARPSAADALLLNCRSSSGPLLEEIRVLKQPSL

SEQ ID NO: 170851 - protein, 157 aa, Oryza sativa
  unsure (1)..(157): unsure at all Xaa locations
  Clone ID: PAT_MRT4530_69137C.1.pep
GLRHEISGAIXXXVYSPXGFXXYQNIXFXXXTEXXXXAXIXPTQAYXPXSGNPXHRLXKXPLPFWSTTIGXXDXXXXGCALHPAAYRRIFXNPRXTGATGWSLQLLLHFTXXPRCAGKLIGSYRCXHSLPSPVTXPSHPXRXPTNTPQRXPXGHLWN

SEQ ID NO: 170852 - protein, 355 aa, Oryza sativa
  Clone ID: PAT_MRT4530_69138C.1.pep
MPAVAGSLYMASQHKGVPPPLPPPPRPLPVINLGRLTMDSASRALAVRDIVLACRERGCFEVVNHGISRSCMNGALEAASEFFQLSTERKEEFASDDIRQPIRYDTSSRDGISMSRSFLKHYANPLDDWIKFWPTQPPTYREKMGEYAVETQRVSMQLMEAILQGLGLGPSYLQEKLEGGVQFVALNNYPQSSAKKADKIGLAPHSDYGFLTILLQSSPGLEVMHHEDDAWTSVPAIPGALHVHVGDHLEVLSNGQLKSLVHRAVLNPNESRISIASIHGLSMDEEVHCAEELVDEHHPKMYRGSSFQDFLDFLPANMNRCHHSDNDSGMRRQQPAGNAKRRRRLQQLKGKAGQG

SEQ ID NO: 170853 - protein, 55 aa, Oryza sativa
  Clone ID: PAT_MRT4530_69139C.1.pep
MALQACNSHWREGVGKLQETHAVPATRCSPPADHAIPASYHMKFCEGLVCTRGIT

SEQ ID NO: 170854 - protein, 115 aa, Oryza sativa
  unsure (1)..(115): unsure at all Xaa locations
  Clone ID: PAT_MRT4530_6913C.1.pep
PVGPSIHPTRSPANGKPLIPTPMDCCPTFNPSLPSVSIRHLPVLAPIDPLPTQTLANGKPPIPTPTDRCPTPNPSPXVRPMPPRSRXPSIHPTKTPANGKPPIPTPTDHCPTPNP

SEQ ID NO: 170855 - protein, 713 aa, Oryza sativa
  Clone ID: PAT_MRT4530_69140C.1.pep
MASASVPAAGYGADGVYRSLRPPAPVASDPGLSLTDLLLRRADACPSAVALADAAAGGRALTFAELRSAVLSTAVALSSRAGVRPGDAVLLLAPNCVLYPVCFFAVTALGAVGTTVNPDYTPREIAKQVSDARAKLVITISALVPKIAGLRLPVILLDDDANAAAASLPPDATVTLYTNLVAGVKEADYRRPPIKQSDTAALLYSSGTTGDSKGVILTHRNFIAAARMVTSDQDERREGPNVFLCFLPMFHIFGLSVITYAQLHRGNAIIAMSRFDINSLMEAVQRHRVTHLFCVPPVIIALAKHGKAGKYDLSSLKFIGSGAAPLGKDVMEVVAKKFPDSEIVQWALNWFIRKLVLSDLFGSIWYIPTVLDSRGVQAFLGYGMTETCGIISLEYPEKGQAREFGSTGTLVSGVEAKIVDIKTLKHLPPNQVGEICVRGPNVMQGYFNNVQAPEFTIKQGWLHTGDLGYFDGGGQLFVVDRLKELIKYKGFQIAPAELEGLLLSHPEILDAVVIPFPDAKAGEVPIAYVVRSPDSSLTEVDVQKFIEKQVAYYKRLKRVTFVGSVPKSASGKILRRQLIAQLGIGHYLSNECLIPARSIVQQAAKGSGSDVCYAGSLAARVIVEDVRVGRRLDGRAPRLFYGSGACDLGEIREGKPAGEKREEAACEQQGCMPLAGHERKCRARGADRIVDGPNTGTRGPWFSGPLMDRSLAF

SEQ ID NO: 170856 - protein, 73 aa, Oryza sativa
  Clone ID: PAT_MRT4530_69141C.1.pep
SNLGLGSLKAKQSAKGGGVSQSFGEIQHDHARALAGDLDGLDVGLFGVFLGMGGLKDRFFFGHMDFVWRNRGS

SEQ ID NO: 170857 - protein, 118 aa, Oryza sativa
  Clone ID: PAT_MRT4530_69142C.1.pep
PTRPPTRPPTRPPTRPRTWTSSAGSALRRCCELVTTICHCFKTSKNDQVLVFLFSQFVLPTVHSMTATLAYPGKLMKNDELYCFHSLLFTIYSAKCESMTATFIISYQSNELGHLDMV

SEQ ID NO: 170858 - protein, 58 aa, Oryza sativa
  Clone ID: PAT_MRT4530_69143C.1.pep
TKIQNRGVRKLPSMRYAAEIRNPTKKTPIWLGTLYSAEVAARTYYDSYRSLRGPTERT

SEQ ID NO: 170859 - protein, 66 aa, Oryza sativa
  Clone ID: PAT_MRT4530_69144C.1.pep
LFPVLTNRGCQGACSVYIWVAPCPHVELHGGVGAEVQKSPVGGGVEPVLLPVADAVNIMYVEVGLH

SEQ ID NO: 170860 - protein, 274 aa, Oryza sativa
  Clone ID: PAT_MRT4530_69145C.1.pep
MDSNSIQRLAGKVAIITGGASGIGKVTAKEFIKNGAKVIIADVQDELGHSAAAKLGPDASYTHCDVTDEAQVEAGQKKTVDLAVRLHGHLDILYNNAGIIGAMPQDDMASVDLANFDRMMAINARAALVGIKHAARVMAPRRSGVILCTASDAGVMPIPNIAMYSVSKATTIAIVRAAAEPLSRHGLRVNAISPTGTRTPMMMHIISQMTPGVGEDDLERMADAAISAGVAIEPEYVARAAVYLASDEAKYVNGHNLVVDGGFTTHKGDDNRMN

SEQ ID NO: 170861 - protein, 88 aa, Oryza sativa
  unsure (1)..(88): unsure at all Xaa locations
  Clone ID: PAT_MRT4530_69146C.1.pep
MGKQMPNCSRGLLLLLLALLGCFSIPGHVYGKNLDYTRSASMNEGRNNVNINGLVPVPCNIFSPSKVXCRNVCYPSLQACEANCKPIV

SEQ ID NO: 170862 - protein, 388 aa, Oryza sativa
  Clone ID: PAT_MRT4530_69147C.1.pep
MMQIFSVRIAALSAAAAPVQIYGYMAARDLYELLRNYVFRRSRDDPFVLPGHYSDPDSLVSLWGPKRDTSRCRIPPCMIEYDLKMKRGEEEQDDLQLINGVAAFSDLSPFHGVYSQRIHGVHGAVDISLALLREGMECTIEIRVPKEQPIKNAVHIVEIPVTGDGACPDGGNAEVAAFLDKAAEAESSGSHPLGEIAGSAGHLLLLKLWQREESRLGRRACALEALMDAARRDAFYLCAAFLAFHGLSLALLFAASVSASAVSPPAEQRAACCSRWWVPSSLSLVASLALAAAVQLRVCAYWRASRRLRRERGDARALARCVQELRMKGAAFDLSKEPQYGVTRAKCASVEGAGAWGPLRWCYQNIVAACLLAVAAATMCSGKFILCS

SEQ ID NO: 170863 - protein, 38 aa, Oryza sativa
  Clone ID: PAT_MRT4530_69148C.1.pep
PYACGAPGLDPVARGSILACLSRDTGRRQGWVGTFVHG

SEQ ID NO: 170864 - protein, 248 aa, Oryza sativa
  Clone ID: PAT_MRT4530_69149C.1.pep
EQPIKNAVHIGETPVTGDWACPDGGNTEVAAFLDKAGAEAEAEAEAEAESSGSHPLGEIAGSAGHLLLLKLWQREESRLGRRACALEALMDAARRDAFYLCAAFLAFHGLSLALLFAASVSASASAAVVSPPAEQRAACCSLAGGGGCRRPCRWSRPSRSRRPCSSGSAPGVRTATRALARCVQELRMKGAAFGLSKEPQYGGDEGQVRQRRGRRCVGPALVVLPEHRRRRHHVLRQVHLVLVGRRLR

SEQ ID NO: 170865 - protein, 37 aa, Oryza sativa
  unsure (1)..(37): unsure at all Xaa locations
  Clone ID: PAT_MRT4530_6914C.1.pep
MGQGTPGGMGKQGGLPGDXKPGRXXRXDKKDXKFEPP

SEQ ID NO: 170866 - protein, 112 aa, Oryza sativa
  unsure (1)..(112): unsure at all Xaa locations
  Clone ID: PAT_MRT4530_69150C.1.pep
CHKSAGARVSYAGDYCFTALMTXYDDSQPTTRAGIYRGHQCFAXYADVSELLTDSGELYKGGLGDLLELHDWGPVEFSIMVXHSDSDGQPLYAYTAQYMVHLLFHGLLDGCG

SEQ ID NO: 170867 - protein, 609 aa, Oryza sativa
  Clone ID: PAT_MRT4530_69151C.1.pep
MAPLGFRAQPWDFIPAHEPLFCIGRACLHGKVPHGPGTSSMLGRAKESLYRNPAARNFSVLSTCSQNAFHGQLAWKQLMTIGSHVPKASPILSRVACAISLAATRSNLVPYLFAFVAGEIMLAQKTSADGEYLPIRDSLYTRAQDGRIYVTSLIFSAVELVIIIFRSIYLALLFTPSILMAPFADTLGSKYRKTWLRLVHRTLEKAGPAFIKWGQWAATRPDLFESDLCAELSKLHTKAPAHSFAYTKKTVEKAFGRKLSDLFENFEEEPVASGSVAQVHRAGLRFRYPGQHIKRVTVAVKVRHPGVGESIRRDFTIINAVAKISRYIPTLNWLRLDESVQQFAVFMMSQVDLAREAAHLSRFIYNFRRWKDVSFPKPLYPLVHPAVLVETYEQGESVAHYVDDLDGHDRIKSALAHIGTHALLKMLLVDNFVHADMHPGNILVRVIQPRNSNNTLLKSRPHVVFLDVGMTAELSSNDRVNLLEFFKAVARRDGRTAAERTLRLSKQQNCPNPKAFIEEVERSFSFWGTSEGDAVHPAECMHQLLEQVRRHKVNIDGNVCTVMVTTLVLEGWQRKLDPDYNVMKTLQTLLFKEDWAKSLQYTIEGLMAP

SEQ ID NO: 170868 - protein, 741 aa, Oryza sativa
  Clone ID: PAT_MRT4530_69152C.1.pep
MGPPCEAQSLLSLFARFLLLPLERIPFPFRSTPTPALLHSRRRELRGVGGMEGHRRGEADDEEEELGLRLGLASAGASAAAAAAGEPPSVGMEFPTSEAAREFYCAYADRAGFAVRTDKSRRSRRDDSVIMRRFVCTREGFHPTRHDDLTESEAAAGKRRRKRLIIREGCMAMCEVTKKEPPLRWVVTKFVAHHVHPVSLPLCPRPPPAGESDGLAGEHAAALDEPTQAATEPSDEPTGAPAAVGNGAPNGGPSFCNRLVRANPAGVRAEVQDLLDYLRKMQAESPGFFYAMQVDSGNCVTNVFWADAKARMAYKSFGDAVTFDTTYRKTKYMMPFAVFRGINHHLQGIIFGCCLLMDETKSSYTWLFDTWLAAMGGRQPDLLVTDQCKAMEAGIARVLPNTRHRFCQRNILSLCKQKLSAVYIQHINLKADLRECVFEAETIEEFQARWDYVIHKYNLEENTWLQSLYDTRQQWAWVYQKGSFFPELLKSQRSERLNKFFKTHFNMKTPLLVLISRFDQVMALSFEKEAQANFVTAYSKPTLKTPSVIERQAAAIYTRAVFDIFQEEFIESLGYHADKIEDGVILKYNVASEEENGRGYIVSFNQLDRKAECTCCKFEYAGILCRHALRIFFMVGVRNLPEEYIMKRWTMDAVSSVVPDERSLETGVSFPERLVAWYNDLSLDGLTYGMRGAMSPEVYKVAKAALQKAFDDVLAAKYQQMSEHQDMPLPKSQAKRTHTRA

SEQ ID NO: 170869 - protein, 107 aa, Oryza sativa
  Clone ID: PAT_MRT4530_69153C.1.pep
MAPQLPAGADRREPEATLGAVGIATVSAATAALAAALEPPPGSLVADTFYRLTLTGAFLGGVALVGASIWVADNPAARRAAGKKLLYTAVPPLLAAVGISVAALLWL

SEQ ID NO: 170870 - protein, 231 aa, Oryza sativa
  Clone ID: PAT_MRT4530_69154C.1.pep
MQRHQCSIFHISQKGGGNWGTGRYMNLEQFPAQQHHISGGGGGGGPSEKNILGWESAGNITNEEVVEAQGGTESSTPFLPYMPPVKQPCCRAKDKDGAAMLRGMLTLGTGMRHTAARCMHSGSWRHRPSAQQKLAALLRAGSSRRCNPSSSFPLSMRQQPTQPPFLTAAADATAAPRTDATASSERQRRCSLPPRGRRYHSHGTWPPPPPPPPPLPLAWPAATLSVTGDKN

SEQ ID NO: 170871 - protein, 143 aa, Oryza sativa
  Clone ID: PAT_MRT4530_69155C.1.pep
SSVTTIYFVAQAFVVFMTHVTCKPHRRHFYAGAVEDLLSITDHVINLISHFLFSCIINVYRTCSNAKNAKQSIIKKTETLLHMNTDEAGDTGAQQTPGRPADRLRSLRPRLRLRLRDGLLQLLQGRLEPPPAHEPEVEAVERD

SEQ ID NO: 170872 - protein, 87 aa, Oryza sativa
  unsure (1)..(87): unsure at all Xaa locations
  Clone ID: PAT_MRT4530_69156C.1.pep
MATPNVEYHCFIXGLAWATDDRSLEAGLSTFGETLETNIMNDRETGRSXRGFGLLTXFSSEQAMHDAIKGMNGKELYGRNMTENEAQ

SEQ ID NO: 170873 - protein, 46 aa, Oryza sativa
  Clone ID: PAT_MRT4530_69158C.1.pep
PLLSYGSPLHLPGTKLVAYAQPLLYTVSAMWSTVPLQPPPSSSHVP

SEQ ID NO: 170874 - protein, 91 aa, Oryza sativa
  Clone ID: PAT_MRT4530_69159C.1.pep
FVPHPYVVVKKAQKKGCVSFAFKTTPNFLVSPIAGKSSFFGALPIDVLANAYRFSKKKAQGLKHNRGDELGAFPPLQYKSSQEVYNVGESF

SEQ ID NO: 170875 - protein, 127 aa, Oryza sativa
  unsure (1)..(127): unsure at all Xaa locations
  Clone ID: PAT_MRT4530_6915C.1.pep
RLPXGGNMWAVTGRGRETSRGTPXWTWVHIVTDVGXXXVPQRTTRGNAQIIRXNLAQXGFTXDFQXWGNNNXHSSHARTTQQQHRGGXGSRXPGRGVGAPPLILRRHSPQRTXFGAXHTKRVIWXRG

SEQ ID NO: 170876 - protein, 108 aa, Oryza sativa
  Clone ID: PAT_MRT4530_69160C.1.pep
TAIQGTRRLCLRPYSVNPHKRGIGQDLFYIYYGVELFSLNPFQFSSIPSKPKPSGKRRGRARGTNTSPTTIAHLVMYFYCRVCREQTGCVRVKVCPPYLCPIAEGIEV

SEQ ID NO: 170877 - protein, 90 aa, Oryza sativa
  Clone ID: PAT_MRT4530_69161C.1.pep
VPHPFVVVKKAQKKGCVFFAFKTNPYFLVSPIAGKGSFFRVFPIVVLANAFRFSKKEAQGLKHNKGDGLGAFPPPQNKSSQEVFNGGESF

SEQ ID NO: 170878 - protein, 71 aa, Oryza sativa
  Clone ID: PAT_MRT4530_69162C.1.pep
MTYAAGGVPHARRVAGAREIGRTARTLHRLAAVFAIKRRDKSARVDACCAEIVSRALLLAAEKREIPWKMW

SEQ ID NO: 170879 - protein, 770 aa, Oryza sativa
  Clone ID: PAT_MRT4530_69163C.1.pep
MGISSAIQWWDEWQLRILALSSLLVQYILLVMAPRRKFPMKFYLRYIIWLAYLSSDALAIYALATLFNRHKKQDYGHAHNTSILEVLWAPIFLIHLAGQDSITAYNIEDNELWTRHALTSLSQITIAIYVFCKSWPGGDRRLLQAAILLFVPGVLKCLEKPWALSSASINSLVSSPKNVRRTTNREVKKDPIQDFIDKVNESRLEDGRWEESSSPADFKPSELFVDLASPSSDDRLSKLLSFLQREGDESYILLQKSLYETFDLLYTKEKMFPIILSALKRQQNYVNTNVDTDEGKKEQETLKGFCGSMLRGLLPYLSFVAIGLFHQSHRKAYNHTDVKVTYTLLCCTAVLELYGPTLQKILTSGQARVQKTSFNMNSPKSVGKVNHAKHDVQAKSKAKGKLPVYDIMDDMVSQYSLLGYFVRNRKHSVIMGVAEFLSCKDYLDQRWRMKSCSSSRNITNLVLGHVKRWWNDEITNVSCYRKFNDNRGQWTLESEVFLQQLGWSLEGAFDESVLLWHLATDFCYYHICGSHDCEHATKTCFQGTSDLKSESPTFCEESIHQGRAVHCREMSNYMMYLLVVNPEMLMAGSRRNLFTDAYNQLKGMFNKKSTPLNEGELAGTIISEVQVHVQQPIKEKTIEDKTPAPSNKTGLIDDAWSIAEVLLNLHDEEKMWRVIEGVWVEMLCFSAARCRGYLHAKSLGTGVEFLSYVWLLMHYMGMETLAEKLARAELPNGACSGDSRTTHAEHSSGKEQVAGASSNDGITVVVDKNG

SEQ ID NO: 170880 - protein, 878 aa, Oryza sativa
  unsure (1)..(878): unsure at all Xaa locations
  Clone ID: PAT_MRT4530_69164C.1.pep
MARPPRLLLRGRPWHVLPSSPSQPPSSPPPRASADRSSAAADLDLGTGRSGEHSVHRVFLDPGGKHCVATVVHPGGAETYYHHARWPRPKLLPRLRNVLVNAVAWNRQTITEASTKEVILGTEDGQIFEIAVDEADKKEKYVKSLFTLSELQEGFTGLLMKTAQVGKSTMISVNTLTLSLFNSIACVVAXYLFYEAILFISCSSCINGGLRXLQKQKQIMLKMMKNLERSCGLRLQSMSLSKRKESHSSTSGDENFVENKGFFDYSKLGESGIKPRSFALSEFHFLLLIRDKIKVVNRISQQIVEELIVDRAPKITKGIGALAQRYTVMLREEECGVCKRKILTAGGLAQGRKKLHIYRTHSPLLCVEEISLKFISVGEQDALRTFLLRRLDNLTKDDRMQITMISTWATELYLDKINRLLLEDGTGATSNAVADSKDSEYRSIVNEFRAFLSDSKDVLDEATTMRLLESYGRVDELVYFAGLKEQHEIVVHHYIQYKFAPDLIMLDAYETVESWMMARNKLNPGKLIPAMMRYVSEPHAKNETHEVIKYLEFCVKDLNNEDPGVHNLLLSLYAKKDDESQLLQFLDTKFGKGQTNGPEFFYDPKYALRLCLQEKRMRACVRIYSMMSMHEEAVALALTVDLELAKAEADKVEDDEELRKKLWLKVAKHVIEQEKGVKRENIKKAIEFLSETNNLLKIEDILPFFPDFVLIDDFKEEICKSLKDYDSQIDQLKQEMDDATRGADNIRSDIGALAQRYTVIDREEECGVCKRKILTAGGLHQAEKILDLQKRLSLMDRKAAKENGGNMNGESIISATPIDKLRSQLDDAVASECPFCGDLMIKEISLPFILPEESDEKASWEIKPQPTGQKILPMTMSI

SEQ ID NO: 170881 - protein, 53 aa, Oryza sativa
  Clone ID: PAT_MRT4530_69165C.1.pep
MLLALRLGASAPTGLTLTSCHRGGRADPPADVSGISTSTASALRCPTSTLSWR

SEQ ID NO: 170882 - protein, 261 aa, Oryza sativa
  Clone ID: PAT_MRT4530_69166C.1.pep
DSKDVLDEATTMRLLESYGRVDELVYFAGLKEQHEIVVHHYIQQGEARKALEVLQRHNVLVDLVYKFAPDLIMLDAYETVESWMMARNKLNPGKLIPAMMRYVSEPHAKNETHEVIKYLEFCVKDLNNEDPGVHNLLLSLYAKKDDESQLLQFLDTKFGKGQTNGPEFFYDPKYALRLCLQEKRMRACVRIYSMMSMHEEAVALALTVDLELAKAEADKVEDDEELRKKLWLKVAKHVIEQEKGVKREDIKKAIEFLSETN

SEQ ID NO: 170883 - protein, 65 aa, Oryza sativa
  unsure (1)..(65): unsure at all Xaa locations
  Clone ID: PAT_MRT4530_69167C.1.pep
MVPVKVPVYKEXIVKKPVXIPVPVYIKKKXVYHPPSYEAWKAAAXQKHEQKVAXNTPIKPEQSKN

SEQ ID NO: 170884 - protein, 106 aa, Oryza sativa
  Clone ID: PAT_MRT4530_69168C.1.pep
MAMARQRRHGAQGDAMGGSGDATAAARRGARGDDGTRAATGRPTATRQRRGARGEGTAARRRDGNDGDGGAGLGVARRVRVLQPSAEFLRQSGFDFHIYFGILHEG

SEQ ID NO: 170885 - protein, 189 aa, Oryza sativa
  unsure (1)..(189): unsure at all Xaa locations
  Clone ID: PAT_MRT4530_69169C.1.pep
MAGDGKVEVHDGWSAPPVATIASSQMRCVPWFLAAAATESGGGGRARAGRNAAXARVRPPRRPTTPLPPSPPAKAPPPFEAIAGGGEGKGERRHRRDLARPLSPSSDASSTPSSYSSISATACRSVAAVREGRGERQRSESPHPHAAVATPPPPAAAADEALAPRVRPKRKRKGGEKRERRKREGKEKE

SEQ ID NO: 170886 - protein, 50 aa, Oryza sativa
  Clone ID: PAT_MRT4530_6916C.1.pep
FSAESHCSRRYEYQWNPSRRRVRSPTIYATSQLLEITDAPGTTGSSRRHP

SEQ ID NO: 170887 - protein, 103 aa, Oryza sativa
  Clone ID: PAT_MRT4530_69170C.1.pep
FFFFFFFFFFFVFLELFTVFYSNTFRKREKGNQKPNLTPKPLKTWTTGRKFPLCHKTLLKNGLTGEDGHVPQDPCLKANNSATGGALPCPHSKPLKHDPTPFA

SEQ ID NO: 170888 - protein, 31 aa, Oryza sativa
  unsure (1)..(31): unsure at all Xaa locations
  Clone ID: PAT_MRT4530_69171C.1.pep
XXKITSXXMYXKKKHSRSIWKIHGISSCYFW

SEQ ID NO: 170889 - protein, 113 aa, Oryza sativa
  Clone ID: PAT_MRT4530_69172C.1.pep
MSSENRARGTIILKVTESTPPNRGELAVGVHTNAGTCPYQEALSKKKKKKKKKKKKKKKHMKNASPCISMDTRIKKLAMRPIIGNVSFRQQNSLAVNQELNGINELEVEKNST

SEQ ID NO: 170890 - protein, 207 aa, Oryza sativa
  Clone ID: PAT_MRT4530_69173C.1.pep
MARNNDGKLDPTTLINYDHATTKAPTPRKKQEHDKTYTDQARTQAITNNGTDENACSTSREPTAAAGEVREEAVARQPQPPPPSPPAQSVFASASAGLCLSRPPPGRAPLPCDQGIPDAPHHHRRRRESLGGASSVVPLLAPAAKSLRSCSALTAGGRGLTLISAQDAAGRRSPPLADASAGTRLSAMACRHARRCPLLTTKREKER

SEQ ID NO: 170891 - protein, 83 aa, Oryza sativa
  Clone ID: PAT_MRT4530_69174C.1.pep
WSVMCVGVVGQFAVTAVIQVGATRVNNTGVVPAVVLHRGEAAPVVVDSITLVSVHAMDGCSCGFLRVMWAPTRPPTRPPTRQR

SEQ ID NO: 170892 - protein, 128 aa, Oryza sativa
  Clone ID: PAT_MRT4530_69175C.1.pep
MPMRRNQRKRKVEKSFSLGTELVNSQKNKLHRKIERWEVNVMYKMAEQKREREREREISSQVLLNYEQKRHYQPSTAEDRFGSGITWSEAADQHYHKTTSPDYDDCPCNFFPFASHHANKGCLSSILE

SEQ ID NO: 170893 - protein, 126 aa, Oryza sativa
  Clone ID: PAT_MRT4530_69176C.1.pep
MAGPQMSLPYDFITDIDILHHNPLDIVPTRQEKKNGKHFFTRKEKKHHGDNCRNHAAGVGFWRKSSFAESMEWAMQEFQLAGSYLLPCFVMRFATSDGTEQPFGCTRVTIANMRHCILTPYCCFIG

SEQ ID NO: 170894 - protein, 49 aa, Oryza sativa
  Clone ID: PAT_MRT4530_69177C.1.pep
LDARRHGSGLTGRIYPRVFLTACSKCGWGGYLTVQWLRKGSTEPKKFEG

SEQ ID NO: 170895 - protein, 389 aa, Oryza sativa
  unsure (1)..(389): unsure at all Xaa locations
  Clone ID: PAT_MRT4530_69178C.1.pep
MPLPLLSRQSFRLPHLLPVLLLSTAPDDAAADAVLGHLADRRYXRDLHLVAELRIERANSAVTFSTPCAAAGGGKKKRRCLLPPSSAGHRSTIAFLAFDVDSVDEQAASFTAAGAVGHGDVRVGERERHEEHGLQPQPGLVRRRAEHHGRLGDDVAHRTERWSWESVPSPSPPXRDPMFVTAYAVHPDGHDSDFLDFLLELMAVGKMKERVNVLISLPTMEVATNTATRSPVKLMLVLTLSPASKVIAKGGGGVKRVHLDGGAFQCRTCGRRFSTFQALGGHRTSHKRPRVRADGLDLLLGARPGKLGAGGASTPVVHRCDMCGKVFATGQALGGHMRRHRPLVSRNGTMSTTWTAAAAAAATMSGSSSEERDDDDDDDVHNYNFIHFF

SEQ ID NO: 170896 - protein, 48 aa, Oryza sativa
  unsure (1)..(48): unsure at all Xaa locations
  Clone ID: PAT_MRT4530_69179C.1.pep
LIFLSXXXCYNSIPRYSLTVGYAYRDASVVAWVDTCILTACLGXTXLG

SEQ ID NO: 170897 - protein, 96 aa, Oryza sativa
  unsure (1)..(96): unsure at all Xaa locations
  Clone ID: PAT_MRT4530_6917C.1.pep
MAKLQNCRKDPLTYMTMTMSLAKHAPRWYATLFPAPYALACTNQSNQQASAHCAXRHRSGPPGHARMLRVNGIPPAYTLVRFCIYICTLSFYAFSN

SEQ ID NO: 170898 - protein, 57 aa, Oryza sativa
  Clone ID: PAT_MRT4530_69180C.1.pep
EFSPPVSSSPPLGAPTQHEGRLNRRGGVGGDLHLATREHSKGGDPDLDEALLLTSAP

SEQ ID NO: 170899 - protein, 374 aa, Oryza sativa
  unsure (1)..(374): unsure at all Xaa locations
  Clone ID: PAT_MRT4530_69181C.1.pep
MRLARQQQQVVVAATMEHDVHHHRQMMQQQQQQEMDLPPGFRFHPTDEELITHYLLRKAADPAGFAARAVGEADLNKCEPWDLPSRATMGEKEWYFFCVKDRKYPTGLRTNRATESGYWKATGKDREIFRGKALVGMKKTLVFYTGRAPXGGKTGWVMHEYRIHGKHAAANSKQDQEWVLCRVFKKSLELAPAAAAAVGRRGAGAGTDVGPSSMPMADDVVGLAPCALPPLMDVSGGGGGAGTTSLSATAGAAAAPPPAHVTCFSNALEGQFLDTPYLLPAADPADHLAMSSASPFLEALQMQYVQDAAAAGGAGMVHELLMGGGWYCNKGERERLSGASQDTGLTSSEVNPGEISSSSRQQRMDHHDASLWAY

SEQ ID NO: 170900 - protein, 45 aa, Oryza sativa
  Clone ID: PAT_MRT4530_69182C.1.pep
PVDKWLGKGLYLQCATVCLFSSEEGYAFRSAYYWLVLTFTVVCSG

SEQ ID NO: 170901 - protein, 42 aa, Oryza sativa
  Clone ID: PAT_MRT4530_69183C.1.pep
CAWAPSPSASAPPPRPPPPTPTPPSPPRTRTPLPPPPPPPTP

SEQ ID NO: 170902 - protein, 167 aa, Oryza sativa
  unsure (1)..(167): unsure at all Xaa locations
  Clone ID: PAT_MRT4530_69184C.1.pep
LRXXDRXAXLIKCXRXXXXWSXXRTVIAXFIPTSSSCXXXWXTXDXVVXTVGRXXXXXXHDXQVRQHXQXHLGLXXHDLXXPLXYXQXXSXXXHXRGXLRXFLXXKXSSIWAGXFNXPKDSXPSEXWGXLLGIPXXXXXRFRWXIFQTXKEVXPWPXPRXXNFXETL

SEQ ID NO: 170903 - protein, 337 aa, Oryza sativa
  Clone ID: PAT_MRT4530_69185C.1.pep
MARAAHGGGGMGLLARAALVAFVALVGVGGGARAQLRQNYYGSTCPNAESTVRSVISQHLQQSFAVGPGTLRLFFHDCFVRGCDASVMLMAPNGDDESHSGADATLSPDAVEAINKAKAAVEALPGCAGKVSCADILAMAARDVVSLTGGPSYSVELGRLDGKTFNRAIVKHVLPGPGFNLDQLNSLFASNGLTQTDMIALSGAHTIGVTHCDKFVRRIYTFKQRLGYNPPMNLDFLRSMRRVCPINYSPTAFAMLDVSTPRAFDNAYFNNLRYNKGLLASDQILFTDRRSRPTVNLFAANSTAFFDAFVAAMAKLGRIGVKTGSDGEIRRVCTAVN

SEQ ID NO: 170904 - protein, 193 aa, Oryza sativa
  unsure (1)..(193): unsure at all Xaa locations
  Clone ID: PAT_MRT4530_69186C.1.pep
GRFRSCSTLTWSNLLSYQWGPHASFLSPLLHFPHTAELSGRASDGSRRRHDGDEECDSSRQATLDGSDETNPNKTAPTRKIFSSGVGEKRARLSTTHCTQQVIPEEEVLGSPLVRRGESGSWTTGYPVQPNSITPTLTTGAXERVELYFRSSSYPLPLVVSTVSLPGFPANRSLIAMGATSKNATFNRNAGYL

SEQ ID NO: 170905 - protein, 99 aa, Oryza sativa
  Clone ID: PAT_MRT4530_69187C.1.pep
MSDDPVSEAIPVHARWCHRQQRQGGGYEHHRRQRRGGGSSYSLPVVAVAADEAARRDDRIRAVVAIKELGTSATRNSVQYLNKPNPEFGAALSSSPFGY

SEQ ID NO: 170906 - protein, 51 aa, Oryza sativa
  Clone ID: PAT_MRT4530_69188C.1.pep
MDVTTPILAVREARPCGLAVAGAKPPTSCFTPARDSDAKTNNPMEAWISDF

SEQ ID NO: 170907 - protein, 87 aa, Oryza sativa
  unsure (1)..(87): unsure at all Xaa locations
  Clone ID: PAT_MRT4530_69189C.1.pep
MTVLPLGVKESGRKWVVVNSGQLPSPAGSRSPPLPFLPSPDPAEGRALAAVRQEGSAEVGGRANXRPAAQRPPPPMMRAGAASSAAA

SEQ ID NO: 170908 - protein, 1183 aa, Oryza sativa
  Clone ID: PAT_MRT4530_6918C.1.pep
MEMVLPVANATAAALARVSAVFNAPLARAVVFGIHIDGHLVVEGLLIAAILFQLSRKSYKPPKKPLTEREVDELCDDWQPEPLCPPIKEGARIDTPTLESAAGPHTTVDGKEVVNFASANYLGLIGNEKIIDSCVGSVEKYGVGSCGPRSFYGTIDVHLDCESKIANFLGTQDSILYSYGISTIFSVIPAFCKKGDIIVADEGVHWAVQNGLQLSRSTVVYFKHNDMASLASILEKLTHGNKHTEKIRRYIVVEAIYQNSGQIAPLDEIVRLKEKYRFRVILEESHSFGVLGKSGRGLAEHYGVPRLSSSGYVFSASLPPYLASAAMSAVNHLEENPSVLANLRSNIALLHKELSDIPGLEIASNILSPIVFLKLKTPTGSAVADLELLEIIAEKVLMEDSVFIAATKRSSLDKCRLPVGIRLFVSAGHTESDIFKVSASLKRVAASVVYSGGRVVTMKVIKSTGTLAYPKASFGPALELSRSPRPRVLRQHAFGTPGGTDQKSESQQQLFPMAEKPPASPSSAGEPGSVKAKIHKLGLSEVDEGNIVPVTMDKLTPDQQKDLEAMMQQARNQFLSSFTETHKGTLVQKYKVKMVLEEIKMMALKEFRVLVLKELKVMVFRDFKVKEQFGLKPKDAGNLYRQPYPEWFERVPLPNRFKGMIAPIREKFSSQDFDSLSHLAQKVNSAKIINKYQKKYDKQQERHYEEGDDGFDPHWGCEFFRFCWNKGMRLPSIKDCPGCGNVAESSSRSYNRSNRLKQTRVPVHQRLGPVNQDCNQEDNEDRKTQWCPSGIFTKNQKRRVQRLRNRERFQEVEQEINHRLKKTKPRQEWRVKNQAPVADEPTADEAKRLPKGKSVVTVSVNMVFMLPAEFGVKQANVDKVEEESAKLILLPEQAVFENLEGTENRHLKPLYINGYVNGKPMSKMIVDGGAAVNLMPYATFRKLGRNAEDLIKTNMVLKDFGGNPSETKGVLNVELTVGSKTIPTTFFVIDGKGSYSLLLGRDWIHANCCIPSTMHQCLIQWQGDKIEIVPADRVTYQRAMNYIYHDLIGWLVEVYIDDVVVKSKEIEDHIADLRKVFERTRKYGLKMNPTKCAFGVSAGQFLGFLVHERGIEITQRSVNAIKKIQPPENKTELQEMIGKINFVRRVFLADNAERLFQILQGMSRLSEIWGDPESTGVGYESYH

SEQ ID NO: 170909 - protein, 143 aa, Oryza sativa
  unsure (1)..(143): unsure at all Xaa locations
  Clone ID: PAT_MRT4530_69190C.1.pep
GGFGEGGGETETALEPGFXPXFXPXGGXPRGCXFXQQLXEXDXGVLKXFPSXGXCXRXEESXXMPTGSKAXCRRXRSIMPGEGXCRXXLIRRXXXEEGXXGEXXXQXGMTRVRLTRXXQYAAQLPXMCRVEPQQCSXFAAGQY

SEQ ID NO: 170910 - protein, 292 aa, Oryza sativa
  Clone ID: PAT_MRT4530_69191C.1.pep
MIGSHQNPATTLQTGIHLPQRDQESYSVSRAQPHYPKAKEGLEAYRCRSPHLPRRDGSWSLLLLLLLNRVNKNHLSFNAASLDTLQEQLPAKLVRKKEKEKKETKNQQSRKGEEPAQIAHHTTQEQSRARKNGSATSKNQVLPSPLASSRPLGREKRRRGAGGLSSRSRVRVGSSNSSKRGAEEEEREAGSGGHGPNHATVCSTTRPGRGRSGAAAALLPLSHLTRALAPSRARARDAVAAATAARPTGSEQRRSGAEASQARRRRSRERFIVAVQTVQGSWLKGEQMVMLS

SEQ ID NO: 170911 - protein, 445 aa, Oryza sativa
  Clone ID: PAT_MRT4530_69192C.1.pep
MAPPPTPRKPLPLLLLSLSLPFLLLLLSLVFLLSHTTFSLLLCPLLPRPTSRPNATTMATTTVAAAPPTLDVSMDKSLRAFHASSPPPPTPTTTTTPTPTPPLPPPAPPASPAKSNKKASAKRNKSLLKLLLRETPRTRRFAARAGELFASPRPCTRRFFMTWLSPLARFGRRELLVVESLFRSHRDACLLIASDTMDSDGGGDRLGPFLDRGLRVAAASPDMAYLLNGTPAEAWLGAVQRGDVSPGSIPLGQNLSNLLRLALLYKYGGVYLDADVVVLRPFSDLRNAIGAQAVDASTGDWMRLNNAVMVFDRGHPLLREFIAEFAAKFDGSKWGHNGPYLVSRVAARWRRRRRPEAEADLTVLPPAAFYPVDWNKIGGLFVAPKDRKGERWVKAKVESIKGESFGIHLWNRESRSLEMEEGSVIGRLLSDSCLFCNSSMFAKYE

SEQ ID NO: 170912 - protein, 162 aa, Oryza sativa
  Clone ID: PAT_MRT4530_69193C.1.pep
MPPTKRAKKAAAAGGGDLIGALPDAMLHRILSLLPAQEAVRTCVLARRWRHLWRSAPGLRVVRAAGRPPATVEELQGFVDHLLLLRGGSSLDTCELSFDQIRRQDIPRVNLWIRHIVMCKVRVLVLHLNPYCHELDELPLVSQHLTRVELSGLILNDSFLNF

SEQ ID NO: 170913 - protein, 56 aa, Oryza sativa
  unsure (1)..(56): unsure at all Xaa locations
  Clone ID: PAT_MRT4530_69194C.1.pep
TVEAEDDEPKEGEEATEGEKKKKQKHSLRSTEIXELGNETKPIWMRDPQEVEKTEY

SEQ ID NO: 170914 - protein, 60 aa, Oryza sativa
  Clone ID: PAT_MRT4530_69195C.1.pep
KLFFFRFVMFTPPPKTQKPNKSSFLRTSLRAVHCSITQSAPSQLPLLTITCRAFTLIQPL

SEQ ID NO: 170915 - protein, 284 aa, Oryza sativa
  Clone ID: PAT_MRT4530_69196C.1.pep
TRPGVCKSLATFHALELLKVFFLSSSSGSEVQATLTATFQLYSEREILTAVSFLREKNFLVTGNGMKPATLSGKFFIDASRSPFPFGSGKKASEFLKWLIGQQKNTTDSTVYLYPDLQCGEIVHLFSLVFSGELLISPSLPSEGVGETDEPSSFRPFIKDSSELDDCTHKRKAVELISSKSKKRKPLPKIDTDFCYRREKGFPGIQVALNQERIQTSNLMQVLHHKECLMFTLAREMGSKDVDSQECNISNWLLIPLKDFSWPLRSMHMMVCRLLIHYISQNII

SEQ ID NO: 170916 - protein, 96 aa, Oryza sativa
  unsure (1)..(96): unsure at all Xaa locations
  Clone ID: PAT_MRT4530_69197C.1.pep
MDSVTKRACVGCPGTKARLDDVDWCXGSLRGCRETLDDTDQLMMDPMMLLQLPYSDGYEAIDXVFXVGDPNSANTHINASVIMWSYHDYLIDGALF

SEQ ID NO: 170917 - protein, 363 aa, Oryza sativa
  Clone ID: PAT_MRT4530_69198C.1.pep
MALEAVVFSEGYYFGCGGAMAAEAAAGGAWSWSHGYGGGVDQGKGAMELVVDDGVVNAFWDGGGGGASSSPVMAAVSGFIEEPDGGNSSVADAAPPPEHGGASVVGRDGSAAAPAAAAGRRKRRRARTVKNREEVESQRMTHIAVERNRRKQMNEYLAVLRSLMPASYVQRGDQASIIGGAINYVKEMEQLLQSLEAHRHARRARTDAAAALPFAGFFTFPQYSMSAVPTTTTTTVAAAATENGNAVAGAGAGDDADADVSGSKPSSVADIEVTMVESHANLKVLSRRRPRQLLRMVAGLQHHRLAVLHLNVASAGHMALYSLSLKVEEDCQLTSVDDIAAAVHGIVETIEQEQQQQQKQSCS

SEQ ID NO: 170918 - protein, 80 aa, Oryza sativa
  Clone ID: PAT_MRT4530_69199C.1.pep
MGKYVELLDMGVRIAARFHSHCPQTARMYYHPPPSSSSSPSSSAAAGSADGGGGGCAGFAAKRMPRAAADTAEIILYAVV

SEQ ID NO: 170919 - protein, 356 aa, Oryza sativa
  Clone ID: PAT_MRT4530_6919C.1.pep
MSPADRHDSASRLLPAKVEGMIAPIREKFSSEDFDSLSHLIQKVTLHEHRSAEARKSSKKVNHVCPYMYGSDDDEDDSEIAAAEWVRSKKVAIEGGKIKFDDSKKPMRIDGNSFPVNMVHRADRTADTGCMRGYQGVQADCTMEAIGQNKQEYLFIKDWAQERFQEVEQEINHRLKKEKPRQEWRVKNQAPVAHDVAADEAKRLAKGKSVVMAPVNMAVFEKPEGTENRLHKPFCINAMKLGRNAEDLMKTNMVLKDFGGNPSETKGVLNVELTVGSKTIPTTFFIIDGKGSYSLLLGRDWIHANCCIPSTMHQCLIQWQGDNIEIVPADSQLKMENPSYYFEGVVEGSNVYAKDT

SEQ ID NO: 170920 - protein, 399 aa, Oryza sativa
  Clone ID: PAT_MRT4530_691C.1.pep
MDVGEGKGFGAVVDGVLPPEMLHESFPRFCVDLVDLSGDIVKQLIPKPQSQVGRGMVVSATSDDLVFLDAHWDYHFYVVDLWFLTDSEKGTWSKEYRINVDPSFYGIGDCVKVHPLLVTDEGNVVLWLQMPSEGIVQIYNPVTNTFWDITQTSIYTGVDGWIRDWFLYSDMIYFTLQHLVILRVLEMNEYGRKAKEIPEAQMHDLVREIALTISKKEKIATIWDCPNSDGITNGSQKCQLFYLHYLNFGYTKLKDIPRLIGKLSNLQMLYLNGSVLELPSETTMLTKLHHLLVDGRFGMSASSKISQLQHLQSLRSIEANSYMGGPQSYSRPWLNVRVFYFRVLFRQLVGVKEFDKRCSLVLSGLDVCDDFVNLSSSPRANVGGAIDVVVWRTLDGWTG

SEQ ID NO: 170921 - protein, 66 aa, Oryza sativa
  Clone ID: PAT_MRT4530_69200C.1.pep
PLARFPNSANQEKASCLFAESVPKNSSNPTLGFYNQAKEICGADSSLTIFNFVRVLLPIFSQWNIA

SEQ ID NO: 170922 - protein, 113 aa, Oryza sativa
  Clone ID: PAT_MRT4530_69201C.1.pep
MRAGEAESYRQREATAASTPIPVACGSAGGVPCVPAAGDADAVSSASLRAAAVNGECRRSIEDPSAGFSRANRRWKADGTILRPSVKGDDGGTSMRIWADSFGIGDHVSQRLV

SEQ ID NO: 170923 - protein, 124 aa, Oryza sativa
  unsure (1)..(124): unsure at all Xaa locations
  Clone ID: PAT_MRT4530_69202C.1.pep
LVRGRGEVRTRCGRRPHVVGVHRSTHPAPRRGVNDRRLRHLHPRVEQPDQAQRQQQDGHHRRSTQPASPPSSPRLDREIPCARSAASALPTSKFRHRRVPLLWIRRRXPPYLQASPPLEPAAST

SEQ ID NO: 170924 - protein, 65 aa, Oryza sativa
  Clone ID: PAT_MRT4530_69203C.1.pep
PLISMMHTGESITNIHNTSTLHNNHNARTPYTGHGLTATRRIYRLEQFEGELTTHACRTFDLGYS

SEQ ID NO: 170925 - protein, 89 aa, Oryza sativa
  unsure (1)..(89): unsure at all Xaa locations
  Clone ID: PAT_MRT4530_69204C.1.pep
MKTRHKPLVSCDTNGCTLAPPLASALAHLVRDIDTLLRGRRKIILKPPHRSQNSVSHVLANKARTEYLTKFXADDSCNLILQLVCSDSE

SEQ ID NO: 170926 - protein, 267 aa, Oryza sativa
  Clone ID: PAT_MRT4530_69205C.1.pep
MGRQPCCDKVGLKKGPWTAEEDQKLVAFLLTHGHCCWRVVPKLAGLLRCGKSCRLRWTNYLRPDLKRGLLSDDEERLVIDLHAQLGNRWSKIAARLPGRTDNEIKNHWNTHIKKKLRKMGIDPVTHQPLEPPRPPPREQDATPPPPPPPPQEIEESEEEEQEPSPLIEPHEITAPPPAAAAEAATSNCSVSPASVLSPSCSSSASAASAVDVAEWPEPMYMFGMDGIMDVGWNGLISGAGVDVDVDVDPFDHYYHDASFDDQDVWII

SEQ ID NO: 170927 - protein, 59 aa, Oryza sativa
  unsure (1)..(59): unsure at all Xaa locations
  Clone ID: PAT_MRT4530_69206C.1.pep
WRPRRLGXRAEHAGVLARGEWHSADGXTASSTRASSSPRPPRWRALGLAPLKMFVLRRI

SEQ ID NO: 170928 - protein, 51 aa, Oryza sativa
  unsure (1)..(51): unsure at all Xaa locations
  Clone ID: PAT_MRT4530_69207C.1.pep
TLIYLDXLKYQQGYXPXNXKWXPXXRRXXEPRLNXSPYKXAXXRDKPVWKG

SEQ ID NO: 170929 - protein, 148 aa, Oryza sativa
  Clone ID: PAT_MRT4530_69208C.1.pep
MSMFPFMGAYNLEDPLHCPLQKLPPAPPHTVVDVAAADDGNYVERRRVPPHHLPHRPMTPACKNFVTVLFVVSTVVVLGVIARMVVVDSTSWGEALLMLPVMLLVMAIIVVIQATVYLSIIRDFSAAAAEGHDGGGDSQMLLDQMEQV

SEQ ID NO: 170930 - protein, 81 aa, Oryza sativa
  unsure (1)..(81): unsure at all Xaa locations
  Clone ID: PAT_MRT4530_69209C.1.pep
RAEPLVGQSMSFKSIAGSMVSRLAGXYTIFRAKSVDVVADASCISRQLAQNGDHHRGEAIGAFNLMYQHQSYPGLSDQSKI

SEQ ID NO: 170931 - protein, 1037 aa, Oryza sativa
  unsure (1)..(1037): unsure at all Xaa locations
  Clone ID: PAT_MRT4530_6920C.1.pep
MAEKPPLSPSSASPSTVKEKIQKLGLTDVNEGNVVPIDPEKFTPEQKKDFEAMLQQAWDQFLNSFMQTRKGTLVQKYKVKVVADDPGTSSSKGEDGKQAPDGSAQLSDKGATDGSLGSQGDNSQGVHGVQGDRVHGVQGDGAQGLQGGNLNQNSDAAQDFFNNFQDRVNYAVHHALINQSGVFPRHTISSADGAGIDSLTYFVSIGTRPAATSCATSPTNATKATASAADSTNAVKTANRSADSASRLNERIGRVCGTCLLLRKPNISQGDWLNVSLRLSTDKMVSTYEHISRFLAQCGEASAVDALRVRLFRGVHEMKLSDLTAIKHRHDEPVHEYIQRFREMRNKCFSLSLTDAQLADLAFQGMVAPIREKFSSEDFDSLSHLIQKVTLHEHRSADARKSSKKVNHVCPYMYGSDDDEDDSEIAAAEWVRSKKVAIEGGKIKFDDSKKPMRVDXKYDKQQERHREEDNGGFDPHWGCEFFRFCWNEGXEQEINHRLKKAKLRQEWHAKNQDPVADDVAADEARRLAKGKSVVMAPVNMVMFEKPEGIENRHLKPLYINGYINVKPMSKMMVDGGAAVSLMPYATLKKLGINAEDLIKTNMVLKDFGGNPSETKGVLNVELTVGSDKIEIVPADSQLKMENPSYYFEGVVEGSSVYTKDMVDDLDNKQGQGFMSADDLEEIDIGPGDRPRPTFISKNLSPGFRTKLIELLKEFRDCFAWEYYEMPGLSRSIVEHRLPIKPGVRPHQQPPRRCKADMLEPVKVEIKRLYDAGFIHPCQYAEWVSSIVLVIKKNGKLREVEADAIEIMGDSLMHVSREQNIEANDLAQGASGYKPMIKDVKVEIAAITADDWSITYFGCSLINIVLNIFFIQSLFNGWIQSRQVVGVRRGPLALDPPLPRARPCPEPRAAAVAPSLSPSRRCRVAARRRHHRCRAASFRAPFVSRPVPPRTVAVAVPSSLRAARRRCHAVPIAIPLPRRVSRRLLKPRPVVASVAPHAVHPLCFCLTRSATAAPVARCIAVACAPSPRAEPGRALCRA

SEQ ID NO: 170932 - protein, 677 aa, Oryza sativa
  Clone ID: PAT_MRT4530_69210C.1.pep
MEKLHRDGLLHSFDFESFETCESCLLGKITKAPFTGQSERASELLRLVHTDVCGPMSSTARGGFGYFIIFTDDFSRYGYVYLMRHKSESFEKFKEFHNEVQNHLDKTIKYLRSDRGGEYWSLEFGNHLKECGIVPQLTPPGTPQLNGVSKRRNRTLLDMVRSMMSQTDLPLSFWGYALETAVFTVNRVPSKSMDKTPYEIWTGKRPSLSFLKIWGCEVYVKRLQSDKLTPKSKSDKCFFVGYPKETKGYYFYNREEGKETPENASTSTQPQQAEQDVVQQVEQVVVEPVVEAPASRRSERIRRTPARYALLTTGQCDILLLGNDEPTTYEEAMVGPGSEKWLGAMKSKIESMHVNQVWNLVDPLDSVKAIECKWVFKKKTDVDGNVHIYKARLVAKGFRQIQGVNYDETFSPVAMLKSIRIVLAIAAYFDYEIWQMDVKTAFLSGNLDEDVYMTQPKGFVDPQSAKKICKLQKSIYGLKQASRSWNIRFDEVIKALGFVKNEEEPCVYKKINGSALMFLILYVDDILLIGNDIPMLESVKTSLKNSFSMKDLGEAAYILGIRIYRDRSKRLIGLSQSTYINKSTATTRLYALSHLINYLNQDITKLKFSTTDLAMGLFGTAPAPAPPLLELELSQTVLGPVWHSSSSSSSPLGAGAQPNNFSSTKTGSGAGWSSLTK

SEQ ID NO: 170933 - protein, 44 aa, Oryza sativa
  Clone ID: PAT_MRT4530_69211C.1.pep
GQIQTKVAMKDEIQPTGRRMVQTGQALHDQVILTAFLYKFEFTH

SEQ ID NO: 170934 - protein, 333 aa, Oryza sativa
  Clone ID: PAT_MRT4530_69212C.1.pep
MRRLLGIVVDTDVGALGEGDVGNAWADEDVALVDERRVKEHVKAAVPKAVGQRRERKGRLHAALLTGLFGTNELLALVHTDVCGPMSSTARGGFRYFITFTDDFSRYGYVYLMRHKSEYFEKFKEFHNEVQNHLDKTIKYLRSDRGGEYLTLEFGNHLKEGGIVPQLTPPGMPQWNGVSERRNRTLLDMQMDVKTTFLNENLDEDVYMTQSKGFVDPQSAKKICKLHKSIYGLKQASRRWNIHFDEVVKALGFVKNEEEPCVYKKISRSALVFLILHVDDKLLIENDIPMLESVKTSLKNSFSMKDLGEAAYILGIRIYGDRSKRLIGLSHST

SEQ ID NO: 170935 - protein, 392 aa, Oryza sativa
  Clone ID: PAT_MRT4530_69213C.1.pep
MDCGPTSTVEGGARRGTPGVGLGFVGGRGRRGGSGGRGRRGASAFDGGEEAAAVQGGGGGGRAGRRRSRAAMRGRGGAAAGDLFLGAAMHTRYAKSHLPFSAVSMTHGIMDLRARAAKEILNLTPYSASTHVVLSNIYATVGKWEEAAQIRKLLRNRGIRKKPGCSWIDLGRIVHIFVANDISHPRIKDVYKFLEVMSEKMKLAGYVPDKIWALAKDHAAGGETRLRHNSKKLALAFDRLLLEMHIGSIVSAMEAVPVEIIEGNPVSPHVIKMIGYTESLDKLGFPLSRELTTDLILQSLPPSFEPFIMNFNMNNLNRTLAELHGMLKTAEESIKKNSNHVMVMHKCKPNNKKSGQKRKLNSDEITSTSNSKTKLKQKQQDGKSSTSGAEKK

SEQ ID NO: 170936 - protein, 827 aa, Oryza sativa
  Clone ID: PAT_MRT4530_69214C.1.pep
MAAPVPSSFNLRSILEKEKLTGTNFMDWYGNLRIVLRQEHKEFVLTQPFPADLPNNAPAAQRREHKKQCNDYLDISCLMLATMSPELQRQYEALDAHTIITGLRNMFEDQARAERFNTSKSLFACRLAEVNPSLPPSFEPFIMNFNMKNLNRTLIELHGMLKTAEESIKKNSNHVMVMHKRKPNNKKSGQKRKLNSDEITSTRNSKTKVQKTGPAKETGHWKRNCKKYLEQLKQKQQNGKSSTSEGYGFRSVDNGCSVYYNDIFYFNAPMMNGLYIVNLDGCSVYNINAKRQRPNDLNPTFIWHCRFGHINEKCMEKLNRDGLLHSFGFESFETCESCLLGKMTKAPFTGQSERASELLGLVHTDICGPMSSTAKGGFGYFITFTDDFSRYGYVYLMRHKSESFEKFKKFQNEVQNHLGKTTKYLRSDCGGEYLSLEFGNHLKKCGIAPQFTPPGTPQWNGVSERRNRTLLDMETKGYYFYQEEGKVFVVRHGVFLEKEFISRKDSGSMVRLEEIQETPENASMSTQPQQAEQDVVQEQVVVEPVVEAPSSRRSERTRRTPARYALLTIRQRDILLLDNDEPTTYEETMVGPDSEKWLGAMKSEIESMHVNQVWNLVDPPDGVKAIECKWVFKKKIDIDGNVHMYKAQLVAKGFRQIQGVDYDETFSPIAMLKSIRIVLAIAAYFDYEIWQMDVKIAFLNGNLDEDVYMTQPKGFVDPQSAKKICKLQKSIYGLKQASRSWNIRFDEIVKALGFVKNEEDPCVYKKISGSALVFLILYVNDLLLIGNDIPMLESVTTGNNPMGVPYVRALILVPGGKVHQKLIQFRV

SEQ ID NO: 170937 - protein, 493 aa, Oryza sativa
  Clone ID: PAT_MRT4530_69215C.1.pep
MVRERKVRESPLGARGSGGSVRKLNGGSYKPGRPPGAVILHRRPTSSPSFLPPSGRRYLRCAGRWLGGAVERRLSARSSDRVGSSVQKVNGDGDKPAVLHSWQSITIGQPHPRLLSCRLVVAIRDVSPGKEIQEGSTLWGDLSLILKWEDSWHQRGGAWEYGEENARGGQGRAGAIDYFLYIDARYFARVLSTSQHLLPLHSASSALAPSNFNLRSILEKEKLTGTNFMDWYRNLRIVLRQEHKEFVLTQPFPADLPNNAPVAKRREHERRCNEYLDISCLMLATMSPEFQRQYEALDAHTIITRLRNMFEDQARAKRFNTSKSLFACRLAEGNPVSPHVIKMIGYTESLDKLGFPLSRELATDLILQSLPPSFEPFIMNFNMNNLNRTLAELHGMLKTTEESIKKNSNHVMVMHKHKPNNKKSGQKRKLNSDEITSTSNSKTKVQKTGLAKDAECFFCKETGHWKRNCKKYLEQLKQKQQDGKSSTSGAEKK

SEQ ID NO: 170938 - protein, 71 aa, Oryza sativa
  Clone ID: PAT_MRT4530_69216C.1.pep
RPGALGLLNFRPGPWSINHGFLWFGASSYSSHSRPRAPPPTYFFFFFSGRTEDHRSFCARPDSSSLLRDAE

SEQ ID NO: 170939 - protein, 880 aa, Oryza sativa
  Clone ID: PAT_MRT4530_69217C.1.pep
MATVTSGDGIGQSSVGSRQRASAMGAGGGHRLWKCMAMPKVIEESITSYIIYQQKLTETNFMDWYRNLRIVLSQEHKEFVLREPFPANLPNNASAAQQREHEKRCNDYLDISCLMLATMSPELQRQYEALDAHTIITGLRNMFEDQARAERFNTSKSLFACRLAEDKCGQKSAAKTYSILEFVRDNGRVRIKSTGTLIHPKARTLAELHGMLKTAEESIKKNSNHVMVMHKRKPNNKKSGQKRKLNSDEITSTSNFKTKVQKTGPAKDAECFFCKETGHWKRNCKKYLEQLKQKQQDGKSSTSGINVIEINLATSSTDSWVFDTGSVAHICKSLQGLKRSRSLARDEVDIRVGNGPRVAAVTIWYVYLMRHKSESFEKFKEFQNEVQNHLGKTIKYLRSDRGGEYLSLEFGNHLKEYGIVPQLTPPGTPQWNGVSERRNRTLLDMVRSMMSQTDLPLSFWGYALETAAFTLNRVPSKSVDKTPYEIWTGKRPSLSFLKIWGCELWKHRLHEGPIGYGIHLRAIAAYFDYEIWQMDVKTAFLNGNLDEDVYMTQPKGFVDPQSAKKICKLQKSIYGLKQASRSWNIRFDKVVKALGFVKNEEESCVYKKISGSALVLKRFNMQDSKKGFLPMSHGINLGKNQCPQTTDERNKMSVIPYASAIGSIMYAMLCTRLDVSYALSATSRYQSDPGESHWIAVKNILKYLRRTKDMFLVYAGQEELVVNGYTDASFQTDKDDFRSQSGFVFCLNGGAVSWKSSKQDTVADSTTEAEYIAASEAAKEAVWIKKFVSQLGVMTSASSPMDLYCNNSGAIAQAKEPRSHQKSKHILRRYHLIREIVGRGDVKICKIHTDLNVADPLTKPLPQPKHEAHTRAMGIRYIHD

SEQ ID NO: 170940 - protein, 144 aa, Oryza sativa
  Clone ID: PAT_MRT4530_69218C.1.pep
MVGPDSEKWLGAMKSEIESMHVNQVWNLVDPPDGVKAIECKWVFKKKIDVDGNVHIYKARLVAKDFSYALSATSRYQSDLGESHWIAIKNILKYLRRTKDMFLVYGEQEELVVNGYTDPSFQTDKDDFRSQFGFVVCLNGGVVS

SEQ ID NO: 170941 - protein, 545 aa, Oryza sativa
  unsure (1)..(545): unsure at all Xaa locations
  Clone ID: PAT_MRT4530_69219C.1.pep
MNNLNRTLAELHGMLKTAEESIKKNSNHVMVMHKRKPNNKKSGQKRKLNSDEITSTSNSKTKVQKTGPAKDAECFFYKETGHWKRNCKKYLEQLKQKQQDGKSSTSVYNINAKRQLPNDLNPTFIWHCRLGHINEKRMKKLHRDGLLHSFDFESFETCESCLLGKMTKAPFTGQSERASELLGLVHTDVCGPMSSTARGGFGYFITFTDDFSRYGYVYLMRHKSESFEKFKKFQNEETKGYYFYNREEGKVFVARHGVFLEKEFISRKDSGSMXVEAPVSRRSERIRRTPARXDEPTTYVEAMVGPDSEKWLGAMKSEIESMHVNQVWNLVDPPDGVKAIECKWVFKKKTDVDGNVHIYKARLVAKGFRQIQGVDYDETFSPFAMLKSIRIVLAIAAYFNYEIWQMDVKTTFLNGNLDEDVYMTQPKGFVDPQSAKKICKLQKSIYGLKQASRSWNIRFDEVVKALRFVKNEEEPCVYKKISGSALVFLILYVDDILLIGNDILMLESVKTSLKNRFSMKDLGEAAYILGIRIYRDRSKRLIGLS

SEQ ID NO: 170942 - protein, 134 aa, Oryza sativa
  Clone ID: PAT_MRT4530_6921C.1.pep
MAVLPPPVRVAAAAAATTFGLSTSPAAATPAGCRRCGPRGRAAVHVAISASGRASFSRGAAGDGGGGRPAITVAGDPPTFVTAPGRRIVAVGDLHGDLNQTRAALVMAGLLSSESDGHVWTGGQTVLVQVGDIL

SEQ ID NO: 170943 - protein, 56 aa, Oryza sativa
  Clone ID: PAT_MRT4530_69220C.1.pep
EDISSKGKKPPPMSNIRYTNKPKMILYYIYPLSKNKLPTIYRPSTQLASMIKPMGI

SEQ ID NO: 170944 - protein, 704 aa, Oryza sativa
  Clone ID: PAT_MRT4530_69221C.1.pep
MAAPAPSSFNLRSILEKEKLIVTNFMDWYHNLRIVLRQEHKEFVLTEPFPADLPNNALVAQHREHEKLAEGNPVSLHVIKMIGYTESLDKLGFPLSRELATDLILQSLPPSFEPFIMNFNMNNMNKTLAELHGMLKTAEESIKKNSNHVMVMHKRNPNNKKSGQKRKLYSDEITSTSNSKTKVQKTGPAKDAECFFCKETVYWKRNCKKYLEQLKQKQQYRNSSTSVDKTPYEIWTGKHPSLSFLKIWGCEVYVKRLQSDKLTTKSDKCFFVGYPKETKGYYFYNRKEGKVFVARHSVFLEKEFISRKDSGSMLWKHRLHEGPKGYGVHLQVWNLVDSPDDVKAIECKWVFKKKIDVDGNVHIYKARLVAKGFRQIQGVDYDETFSPVAILKSIRIVLAIAAYFDYEIWQMDVKTAFLNGNLDEDVYTTQPKGFVDPQSAKKICKLQKSIYGFKQASRSWNIRFDEDLGKAAYILGIRIYRDRSKRLIGLSQSTYIDKMFHMHLVQQADTNQIQVSHWIAVKNILKYLRRTKDMFLVYGGQEELVVNGYTDASFQTDKDDFRSQSGFVFCLNGGAVSWKSSKQNTVADSTTEAEYIAASEAAKEVVWIKKFVSQLGVMTSTSRPMDLYCDNSGAIAQAKEPRSHQKSKHILRRYHLIREIVGRGDVKICKIHTDLNVADPLTKPLPQPKHEAHTRAMGIRYVHD

SEQ ID NO: 170945 - protein, 522 aa, Oryza sativa
  unsure (1)..(522): unsure at all Xaa locations
  Clone ID: PAT_MRT4530_69222C.1.pep
CMRPWGGXWMKRFFSQVTHVVMNDFALMNDHTVLLQGHDKSRISPAGYLTRSGPTQGGGIRNNIGYCDGRSINESCGKRSTYPPTYKKDVTVPKSTKPSIFDADEYVSVSNVSDVPSSEGNTMQDEHRNKGKDLLYCDWSELLNLDDLEADLRSFESTFEIGSNHFEDPLWSSVCLPDAQLVPSSCLLDNTNLSTVSNESTTKSILSSVSVSDTTSAEPLFLDQNNMANPINIQQPPSKGRSSATLNHEALACSSGEIERFSQHSDVDVFYPFDNVTSSERISGCEGLEAIFCTNQEMLAPTTSSIMCDDEIVSSSTFSAPDLVATYVPRSMKRSHDPLNGTPDMILDEMAGNPLEMYFPPSLTAYEHPEHLNNVTLTQTHQFPEGFAGDDVLKSADLQFLSKGKTSADLCVNPCSPLILEAVPVKDLGFHKLQEGMNQLDVASKARIRDALYRLANCVEHRHRIASTTETVNQLGVMESSASKRWREIQMMNPMDRSVAQLLLQKPLHHKSPPDSALGIGP

SEQ ID NO: 170946 - protein, 138 aa, Oryza sativa
  Clone ID: PAT_MRT4530_69223C.1.pep
MGSAAAADPAASASRPQQEAAAGEQGRRWGAREQEVISVEELVELESIIGREKKEERQHCACPALARMRNPHPQPSGEQPNSERCFAHRTSSRGPPEGWGGRKVGERRGGGVSGRRKVCERLESLELVEAFQVSKLQL

SEQ ID NO: 170947 - protein, 201 aa, Oryza sativa
  Clone ID: PAT_MRT4530_69224C.1.pep
MTLEDRELLDCIMENTSFVCCETVLEIEDTHEEPPMAKSENTTSTSHDSTVESSPEPREPKVEIQPSEFPFQFEGDLFEDYGSPSNYSCQKSAPVLRSSPMPLKEILFKEMQQELTTIMRDEWLREVELSSEVIRINTPSLTITCLMREAMVQTLYNPTIGANIMSTIFALNCLGDEPLAPIEKTLSDPIWSYHRRLWDSL

SEQ ID NO: 170948 - protein, 107 aa, Oryza sativa
  Clone ID: PAT_MRT4530_69225C.1.pep
MAIAFTSPMFHRLPAEDNDAPASVSGSSADTDEHRGLKVALRHRGRRSGRQGGWGKASAAVMEAVRLEEPERRRAKEEVGRRLEGWPAALSARLGGDDGDKGRRGRR

SEQ ID NO: 170949 - protein, 63 aa, Oryza sativa
  Clone ID: PAT_MRT4530_69226C.1.pep
SATRSATRSATRSATRSATRSGGRKSVGVATFLLFQRHPATGWIIHAFTTNSEKITRQSDIGI

SEQ ID NO: 170950 - protein, 667 aa, Oryza sativa
  unsure (1)..(667): unsure at all Xaa locations
  Clone ID: PAT_MRT4530_69227C.1.pep
MAVSWPGMVQWWEEWQLRVLALSSLFLQCFLFVSATFRRYRIPALFRTCIWLAYLGSDALAIYGLATLFNRHRKPAPGAVAAAGGTSNGHGRSSMLEVLWAPVFLIHLGGQDTITAYNIEDNELWARHAVAMSSQAAVSVYVFCRSWSRREGAASITWHATVSSDRRSRRKTTAXEEEGDMSLENYIRQAREQAATRNIDDAVNINDDGEARRAARRRSREQRAQLLAPNILEELMELFIDFPAPYARRIGYLTSFMALENYDAYYNLCNLLDLAFQFFYTKKNTNYTIVGIFLWVLFFLLGITAVAGFDGLDSNKDGLDRDDVKVTYILLCSAIVMEFSSLVWLNDWNWVPLWMLAPEMHRTIVQFNLIGFAARSRWPTMVMWIATLLGCKNYVNQHWYLEHRSSTAKIIGFIRKDLTSGWVSLRSVADHRRFNDRRGHWTLRREQCYGELGWSVTELPFDEAVLVWHIATAICLHCTDVPTAAEDADGASAAARSMEISNYMMYLLLFQPDMLMPGTQQSLFTVACREIRRALRNQRQQEKLSERELARWLLFSVDEPTTAAAEQGGGGGGGEGRHLANARRLAGAMMELDADRRLRVIGGVWVEMICYSASRCRGFLHSKSMGVGGEFLTVVWLLLHRMGMEGLADKLQRPELTTGDVQDAVVV

SEQ ID NO: 170951 - protein, 96 aa, Oryza sativa
  unsure (1)..(96): unsure at all Xaa locations
  Clone ID: PAT_MRT4530_69228C.1.pep
PLWSPSPHNVGXRGFRAADLESGRPKTGIAVRRTXVAMTRPHRQVPLLAVRRKXSPRAASPPPSPSAARNTAPVVAVAVRRTRALSQSPSAACQSP

SEQ ID NO: 170952 - protein, 165 aa, Oryza sativa
  Clone ID: PAT_MRT4530_69229C.1.pep
MNSSGTVRRSTQNDVQTCVVSSSDTHSIHTGVHGSIDRHECCAQIRRNRVAFNVTTYVVVVVVIIVSTPWRQLHACMLAGWTRTSDDEQFLFVDRPTRVARPHACSHHVYMHAYCVCMRTLYTLYMHARAKEPRGLERPGGTACMNQAAKSSKGDLKAAFNLHQN

SEQ ID NO: 170953 - protein, 1863 aa, Oryza sativa
  unsure (1)..(1863): unsure at all Xaa locations
  Clone ID: PAT_MRT4530_6922C.1.pep
LQDQINWHANTSEGELWTCTGVKQISHATCFLSTHFWHARWDLXEVSRQFFLMAEKQAPPPSSPGSVKGKVSKPGLTDIIDDNVMPIDPEKFTPEQKQEFEAMMQQARDQYLXFMQTSKTICKEKAATARVDGDEGAPVVGGEGGWAAEVPHLRAHLTAATASGGDDGGGGATMPKTAGGGGELGTHGDGARRHGRSHHALINQFGVFVNTLSNVMKTIADGSIAEHQATGPVYLQGGVFPNYRSLVTDVQPVVQAAPSVAPTTQPTVPASTPLPATSAMAPGQPMNPRLLMREHPQPTGQTANQPTQDQVAAMFLPPPPIVDPVQXSRFSRHHRSSRLYSRVRGTWGATCAAIREPNRPRAFGSPCTAGWHDVMREQFGLKPKETGSLYRQPYPEWFERVPIPNRFKVPDFCKFSGQEGVSTYEHISRFLAQCGEASAVDALRVRLFXWVRSKKVIPCQWVKSPGKKEKYDFDITKADKIFDLLLREKHIQLPAGHTIPSAEELGKRRYCKWHNSGSHXTNDCKVFRQQIQVAIEGGKIKFDDSKKLIKVDGNPFPVNMMHIASQAADGARAKGFQVYSAKIINKYQRKYDKXQERRYEEYDDGMRLPSIENCPGCGDVVESSSQPHNRDDRLRRTKLPIHQRLGPMNQDHSREDEVIRKNQWCPSGIFTKNXKRRKPKPRQEWRVKSQVPTADDAAADEVKRLAKGKSVTAAPINMVFTLPAEFGIDQADVDEVEEASAKLVLSPEQAVFAKPEGTENRHLKPLYINGYVNGKPMSKMMADGGATVNLMPYATFKKMGRNAEDLIKTNVVLKDFGGNPSETKGVLNVELTVGSKTIPTTFFVIDGKGSYSLLLGRDWIHANCCIPSTMHQCLIQWQGDKIXIVPADSQSKMENPSYYFEGVVEGSNVYAKDTVDDLDDKKGQGFMSADDLEEMDIGPEFRTKLIELLKEFRDCFAWEYYEMPVLSRSIVEHRLPIKPGVRPRQQPPRRCKADMLEPVKAEIKRLYVAFFIHPCRYVEWVSSIVXVIKKNDLNKATPKDEYPMPVADXLVDAALGNKILSFMDGNAGYNQIFMAEEDIHKTAFRCPGAIGLFEWVVMTFGLKCAGATYQRAINYIYHDLIGWLVEVYIDDVVVKSKEVEDHIADLRKVFERTRKYGLKINPTKCAFGVSAGQFLGFLVHERGIEVTQRSVNAIKKIQPPENKTELQEMIGKINFVRRFISNLSRRLEPFTPLLRLKADQQFTWGAEQQKALDNIKEYLSSSPVLIPPQKGISFRLYLSAGEKSIGSVLIQELEGKERVVFYLNRRLFDAETRYSPVEKLCLCLYFSCTRLRHYLLSNECTVICKADVVRYMLSAPILKGRVGKWIFSLTEFNLRNESPKAIKGQAIADFIVEHRDDSIGSVEIMPWTLFFDGSVCXHGCGIGLVIISPRGACFEFAYTIKPYATNNQAKYEAVLKGLQLLKEVEANSVQIMGDSLLVISQLAGEYECKNDTLMVYNEKCLELMKGFRRVTLKHVSREQNLETNDLAQXASGYKPMIKDVKVEIAVISADDWRYDVHQYLSNPSQSASRKLRYKTLKYTLLDDELYYRTIDGVLLKCLSTDQAKVAIGEVHEGFCGTHQSAHKMKWLLQRAGYFWPTMLDDCFRYYKGCQVCQKFGAIQRAPASAMNPIIKPWPLRGWGIDMIGMINPPSSKGHKFILVATDYFTKWVEAIPLKKVDSGDAIQFVQEHIIYRFGLPQTITMDQGSIFVSDEFVQFADSVGIKLLNSSPYYAQANGQAEASNKSLIKLIKRKISDYPRQWHTRLAEALWSYRMACHGSIQVPPYKLVYGHEAVLPXELRIGSRXTELLNGKYLKKYYPSVWVHA

SEQ ID NO: 170954 - protein, 132 aa, Oryza sativa
  Clone ID: PAT_MRT4530_69230C.1.pep
SSSFRDRIHKTRREVTYLVKDTLDKLKQASEADHRVEDSATKKIADAKLAKDFQAVLKEFQKAQRLAVEREAAYAPFITQAGLPQSYNSNEANNGADKLAEQRTQLLESRRQELVFLDNEIVLNEAIIVERD

SEQ ID NO: 170955 - protein, 426 aa, Oryza sativa
  Clone ID: PAT_MRT4530_69231C.1.pep
MASGGGTTPATEERTTCRRRHHRGSISTSTAAATLLRSVAAAVLLVLFTGSLVFYALCAAAAPPGASPGGVVTSWKAGSSAWLLLCLVVDVVVVSGLVVERFGVGKEASSMVEEDQLGGDVQGGDNHVLPFDLNIDAPGPQVLPFDLNIDAPGHQGEMNPDNGDAMDQVLQLYGGHIHNAFPFDINSDAFEEHLQMQAGVPKSTLHRMLKEGILRRHSNTLKPLLKEENKRSRLRWCLSMLDWHTLPNEPKFVDMRNIVHIDENWFNTTKKTRNFYMVHWEDDPYRPVQNKNSIDKVMFLAAVARPRYNEEGICTFDGKIGLWPFTKKEPAQRASQNRPRGTLVTKTIKKDIEQEFQAYDDNKLNRVFLTLQSCLLEVMEVDGGNGYRIPHMGKERLELLDILPNTLSCGRQLYDKVRTALSNQVQ

SEQ ID NO: 170956 - protein, 565 aa, Oryza sativa
  Clone ID: PAT_MRT4530_69232C.1.pep
MALDLNELADEGDEQAVPDLNEPVADEGDEHDVPDLNEPVATEVEMHVGQEEDQLGGDVQGGANHNHPDGADAMDEILQIYGGHNQHGFPFDVNSDAYEEHLQMQADMQEYGVYAGDVEIVFEQEELDDSDEEDEHPNKNLTNIQRQEIYDALVKKTINGRLRKKATTEVAEMFNIKRGRVQDIWRRAKQCRAQGIPVNVSSRKKTNSGRKKNEIDLSDVANAPLQLRGTLRSFASAAGIPKSTLHRMLKEGLIRRHSNTLKPLLKEENKRSRLQWCISMLDWHTLPNEPKFVDMRNIVHIDEKWFNTTKKTRTFYLVHWEDDPYRPVQNKNSIDKVMFLAAVARPRYNEEGICTFDGKIGLWPFTKKEPAQRTSQNRPRGTLVTKTIKVDRDTVRSFLIAKVLPAIISSWPRDDAHSTIWIQQDNAPAHVPVDDYQFAYAVSQTGFDIRLMHQPPNSPDMNALDLGFFASLQSLTYRRISRNMDELIHNVEQEFQAYDDNKLNRVFLTLQSCLLEVMEADGGNGYRIPHMGKERLERLDILPNTLSCGRELYEKVISALANQVQ

SEQ ID NO: 170957 - protein, 82 aa, Oryza sativa
  unsure (1)..(82): unsure at all Xaa locations
  Clone ID: PAT_MRT4530_69233C.1.pep
KYTMLGNPSYNMVMVKNVGGTGXVVKLXVKGTKRVKCTMMQGTKVQRCKAXANLSGEXRSLRVMSGDRRKPSSWRVAHREWP

SEQ ID NO: 170958 - protein, 56 aa, Oryza sativa
  Clone ID: PAT_MRT4530_69234C.1.pep
ERPKGSVPYLACPHLILPGAHAVWVFFILLRVGSYGKLWNCPQCLLPKVSPLFSCP

SEQ ID NO: 170959 - protein, 252 aa, Oryza sativa
  unsure (1)..(252): unsure at all Xaa locations
  Clone ID: PAT_MRT4530_69235C.1.pep
MAELDSKIPEIGLRFRNPDECWLFWVAYGGRTGFDVRKRCTNLDCEEHITNIFWADSKMVLDYAHFGDVVTFDTTFGTNKEYRPFECWQAFLSPMKGKEEDEGEEKDKGEEEDEGEEESHILSDFSACMFGHEDETSFEEEFQIMRSKVHKQTWLDSIYKHFERLVQEKRDKELESEFEARKKLPRRLMCTPMLVQANQVYTPVIFEAFQSEYEKSMVVCVRXLDGEHKYADVVGNLLARGETQFNICWWYK

SEQ ID NO: 170960 - protein, 71 aa, Oryza sativa
  Clone ID: PAT_MRT4530_69236C.1.pep
QCQSLPVAARPPHSSGSGSGSGGSHRGASGGGSGGGGGGGGDSNNLKDAHIYSEHVLYVLLSLEGIVGQVF

SEQ ID NO: 170961 - protein, 603 aa, Oryza sativa
  Clone ID: PAT_MRT4530_69237C.1.pep
MSQPTPPTTTATTTALREWNRLIQHAAASGSYSRCLRHYASLLAAGLGGGGASTFPSLAKSCAALRLPRLGAAVHAHALLAGAASAVFVRTSLLDMYAKCGRLPDARRLFDEMPRPTLVSWNCMVAAYGRSSQVEESVAVFNAMRRAGVRPSEGTLVGVLSGCVDSVSASNPGMCVYGFSVKSGLDAGLPVLNSVLTMLVRGSHLDAARLLFDGICNKSVVTWTALASGYLLRGDYLEVFDLFNRMRGVGKNVDSVVLVNLISAAVLFGNLSVAKGVHALIIKLGFECEEDLAASLINLYAKCGDLESAREVFDAVHMANVVVWTSMISGYVEGGHLNEALVMFDSMVCANIEPNEATLSSVLSACAKLGSANLGKKVEEQAIATGLHSEPRVATGLIDMYSKFGSINLARKIFEGVTNRDIAVWSAMINGYACNGEGSEALVLFKEMKNKGFQPDGIAFTHVLTACNYSGLVDEGLECFHSMTMEYGIEPSIEHHMCMVDLLCKAGHFGSALKFFKQMPSEVQNKVLAPIISSYSARCADSSIDFIPEELLNLETQDSDHCVLMSNMLSCLGKWKKATSYRRQLSKQGLMKEPGWSCIELSG

SEQ ID NO: 170962 - protein, 97 aa, Oryza sativa
  Clone ID: PAT_MRT4530_69238C.1.pep
NSSKSVINTTGCSSMLASWTSERISIQSSQDDQDTSWELGLNNLGMHQTHISPRLLKSGKKRLKHVSRGVTSSGHHQVGNPHEKRFSTALAYFFIGR

SEQ ID NO: 170963 - protein, 816 aa, Oryza sativa
  Clone ID: PAT_MRT4530_69239C.1.pep
MDELAAASAAARRRWVQWEEVVVSNDRGRRLVHYYLRGAAAGGGGGGEVRELAVVGRERSPRHMSYVVQGRFLRSLAAAGVGVGVGVGAAVGAVVAVPSPSRSPLPASAEGGAPRKWRSRREVVDWLSSLVSGCNYGSSSMSNRFNENPYDDIEFTDVAASKDVSHTSSVRNNSKEFTWLGPAWLCEKRWKHYRSFCRKGITISVHNFVYILSEEKKRLIAQVEDLYEDTNSTNVVMVRWFDKVDEVGVELPPDVGDREIFFSPGLQDLSVECIDGLAAVLSAQHFEKFQSSPKHSYWQPYICRRQIDEDGVKPFDVTQLQGYWSQEVLRTMFNAASSLKVRFKVTKGASSSDGAQKRKRDAFSETDPQQCVPSAAFGSDSLKNDLEHKTQKQLYPGSRAEVLSQDSGIRGCWFRCFVLKRRGDKIKVRYEDLQDADETGNLEEWVLLTRIAKPDQLGIRIPERPMVRPYHVHSKDPCSFDAGSIVDAWWNSGWWEGIVLQQGNDRRLQVYFPGEKQIADFCEDDLRHSREWAGGKWNSLGERKDITHLLPPTSVHEEGGLLSKPVSQEGNPSSKLESDKRCDDKSLGTKISHDQKHQKRVLADLTNALKFDNLKWRPRKRSRRSGSKRQSDTSSGSGSSSQGDMEESSPCGSFAVLNSAPDEEVCKSSGEPLFMRVSNLTTLLYGFARFFYRSLFSGEPEADDRSSRAAAKWTDGVHEWQGDYGELEVQRGNGVFYCMTVRMSIDCNGCYQRIRRALLQMQEDLDSHLIDRKQQRVSVCGAFVPQDVAIKLRKKTNRRVEILEIKEIDAGDGHRL

SEQ ID NO: 170964 - protein, 755 aa, Oryza sativa
  unsure (1)..(755): unsure at all Xaa locations
  Clone ID: PAT_MRT4530_6923C.1.pep
MSWHRAGVLLLGAQSCLPVPGVPAVGGVGSVLLFMARMGWKLCPVFRLYTVVVFRQQIQVVIEGGKIRFDDSKKPMKVDAGQAADRAHARGFQVNSAKIFKKYRKKYDKQQEKHHEKYDDGFDPHWGCEFFRFCWNEADEAKRLAKGKSVVTAPVNMVFTLPAKFGIDQADVDEVEEESAKLVLSPEQAVFEKPEGTENRHLKPLYINGYVNGKPMKLGRNAEDLIKTNMVLKDFGGNLSKTKGVLNVELTVGSKTIPAIFFVIDGKGSYSLLLGRDWIHANCCIPSTMHQCLIQWQGDKIEIVPADSQLKMENPSYYFEGIVEGSNLYTKNTVDDLDNKQDQGFMSADDLEEVDIGPGDRLRPTFISKNLSPVFRTKLIELLKEFRDCFAWEYYEMPGFSRSIVEHRLPIKPRVRPHQQPPRRCKADMLEPVKAEIKRLYDAGFIRPCRYAEWVSSIVPVIKKNGKVRVCIDFRNLNKATPKDEYPMPIADQLVDAASGHKILSFMYGNAGYNQIFIAEEDIHKTAFRCPGAIGLFEWVVMTYGLKSAGATYQRAMNYIYHDLIGWLVEVYINDVVVKSKEIEDHIANLRKVFERTRKYGLKMNLTKCAFGVSTGQFLGFLVHERGIEVTQRSVNAIKKIQPPENKTELQEMIGKINFVRRFISNLSRRLEPFTPLLRLKADQQFTWGAEQQKALDNIKEYLSSPPVLIPPQKGIPFRLNLSAGEKSIGSVFXIQALEGKERVVFYLSRRLLDA

SEQ ID NO: 170965 - protein, 39 aa, Oryza sativa
  Clone ID: PAT_MRT4530_69240C.1.pep
SVQCTVEGPDRVRRRISTAFQLRADSFTVHEPAADRCTP

SEQ ID NO: 170966 - protein, 55 aa, Oryza sativa
  Clone ID: PAT_MRT4530_69241C.1.pep
TFAYVNVQISPKERQTTHRCLYSCSNRGPKEWTVGLEHIITLNSFYKSKQKHEHI

SEQ ID NO: 170967 - protein, 111 aa, Oryza sativa
  Clone ID: PAT_MRT4530_69242C.1.pep
SLIRGRGISQATSEEKPCAPGGDRSFARGHVLTTKFGNPSIGDEDRIKAEFEMEIVTEIERESTKVRIGYDQDRQSSSRTRDMFGQKSAAKTYGILEFVRDKSRVRHGHIL

SEQ ID NO: 170968 - protein, 61 aa, Oryza sativa
  Clone ID: PAT_MRT4530_69243C.1.pep
TCLPPIVCNHLITRVHCTPTVLCISQTNPPGKQQFGQFAPRVPMFATIVYGASCNLPSFHP

SEQ ID NO: 170969 - protein, 122 aa, Oryza sativa
  unsure (1)..(122): unsure at all Xaa locations
  Clone ID: PAT_MRT4530_69244C.1.pep
LILHPFYWIKESLANLYSLIRTLPLLPGLLNNCSLLAGPRTLPIXLLGGXXXXXXXXXPXLXKNXXPPXFPPPPQKXPLPXXKXFPFXXKKIFXTPPPXKTPXFXXPXKPGXWXPPWXQGXL

SEQ ID NO: 170970 - protein, 81 aa, Oryza sativa
  unsure (1)..(81): unsure at all Xaa locations
  Clone ID: PAT_MRT4530_69245C.1.pep
RGTRWSPGCGSRRRLAAAGGAARRGSEEEGRRTRCRGGIVSRRACRGRQRRRAVAPLVAAVAFLAAATKKAAMLXVGRATV

SEQ ID NO: 170971 - protein, 112 aa, Oryza sativa
  Clone ID: PAT_MRT4530_69246C.1.pep
MWRRAARARRRIAGARAASTSAAAAGEKSCHAVVVPRFGGPEVLEVMQGVPAPDLKPGDVPMRARSDFINPFDLLMRSGYGRTIFEPVLPMIIGPDISREVAATGTCVAAFT

SEQ ID NO: 170972 - protein, 191 aa, Oryza sativa
  unsure (1)..(191): unsure at all Xaa locations
  Clone ID: PAT_MRT4530_69247C.1.pep
SRIGGRPTAGEAQRKWPSAAAADRATRREGERGGRRLKQRLGEVXGNSRTAVARGVAEREANGGSRLRTAAETEHARRELRECDGRXWRRRRVEDGKADGGAWTSSGARRRTRRRGGIASRRACRGRERRRAVAPLVAAVAFLAAATKKAATLXVGRATATEVEGGGGRGRTVRRRDVAGHRARRDGEEFP

SEQ ID NO: 170973 - protein, 242 aa, Oryza sativa
  unsure (1)..(242): unsure at all Xaa locations
  Clone ID: PAT_MRT4530_69248C.1.pep
LGRGGRLANGPSPRARGERGRGTTDRLTGQGRARSMPRGQPRRMGREKGXGNGIGRLTARGGIRRTAASRSERRTPVARGGQGEPIPRLGLGRRRVTTAGGGGEARRDADVDARWEGMRLARSGLVDAVWGCGAHAVTRDPTVAGLWLAAAPCGGGRGGTARERGGRSAARGRGWGGXRGARGRWQRRESRIGGRPTAGEAQRKWPSAAAADRATRREGERGGRRLKQRLGEVARELKNGGG

SEQ ID NO: 170974 - protein, 133 aa, Oryza sativa
  Clone ID: PAT_MRT4530_69249C.1.pep
MRELMRRMSFSDRVGGGGGGDGGGGGAAAAVKRGLMRRLSFSDRAGGGGGGDGVPRGCVPVMVGDNGGDGDGGGGGGERFVVRVEALRHPAFAALLEKAAQEFGYKQEGILRVPCDVSHFQQVLHAATAAAKS

SEQ ID NO: 170975 - protein, 49 aa, Oryza sativa
  Clone ID: PAT_MRT4530_6924C.1.pep
LENRDWRPLLRVCSSAEVSVLEDRNGVYCYQDPPPTPNESGVLSQYFKG

SEQ ID NO: 170976 - protein, 765 aa, Oryza sativa
  unsure (1)..(765): unsure at all Xaa locations
  Clone ID: PAT_MRT4530_69250C.1.pep
MGRDAARALRLSGRGMGLQRTRGDAGPDGRRAVARGGALRRREGRHGAGARRKVGGQGEGLGRSRGGPRKVAAPGIKERREADGRGGTAEVAERGSSESGDATRGREGRPAAETAAWGGREGTQERRWLEESPRGRPTAALDCAWRRKQSTRDASYASAGTAEKGGEELTDGRRHRVTVGVPGKGTEACGGALGRGGGDAPGLAARRRPRLREEAAEDGPCDGEMSPDMELDATARSSHGGRAPPLGGGTKQGREEAQGVGFIETEWERQGRFEVAAVFLALGWCSWAPRERATARMQRVVEAVDRVVGNRTASTGGLARGERVRSRWGRRGAAAASAALPFEQEAKEWRQGARYPGGEKAKGGGGGKGALLLPFWEERDENEPRLTVLDACGMGRRAREDDAGDDCKRTGTVVDLAKELISMFTAREMGKVFFTNSGSEANDSQVKIVWYYNNALGRPKKKNIISRTQSYHGTTFISASLSXDFDLPGRFVLHTDCPHYWRFHLPEXFFDEINDFCGRQIAAFIAEPVIGAGGVILPPKTYFEKIQAVVKKYDILFIVDEVITGFGRLGTMFGSDLYNIKPDLVSLAKALSSAYAPIGAILVSPEISDVIHSHSNKLGTFAHGFTYSGHPVSCAVALEALKIYRERDIPGHVTHVAQRFQEGIKAFAAGSPIVGETRGVGLLIATEFTDNKSPYELFPFEWGVGEIFGQECKKRGMMVKVLGNLIAMSPPLIITREEIDKLVSIYGEALKATEERVAELKSKKN

SEQ ID NO: 170977 - protein, 77 aa, Oryza sativa
  Clone ID: PAT_MRT4530_69251C.1.pep
MDNVYRGGQFFKWTIFSNLISSSTIPIARSQRTTASHPRAPQVHARATPPTPAAVSKFHRRLVSSLLLTFRPAENPS

SEQ ID NO: 170978 - protein, 59 aa, Oryza sativa
  Clone ID: PAT_MRT4530_69252C.1.pep
KVKKITNSGLTQRKPAAPAGHTEEAPNPDGAGERHNGGGGGGDGDERHWCVVSCARPRV

SEQ ID NO: 170979 - protein, 186 aa, Oryza sativa
  unsure (1)..(186): unsure at all Xaa locations
  Clone ID: PAT_MRT4530_69253C.1.pep
MAMVARGGSPPPEGGSGAGQARGGGGTAELAVTSAVATAREHGAPATVAMRGGVGSSGCGGGGRWHGGLGRLAEGVAYGCIWPARESTEVGSEIGLAQRGAADGSGGRLGARGAGGGDGGXDGGRPDWRERRVPWRRPVWRERRGRRWRRRPWCEEEMPVGVALSSAHEAXRRGAPVQGSPCRQRL

SEQ ID NO: 170980 - protein, 314 aa, Oryza sativa
  unsure (1)..(314): unsure at all Xaa locations
  Clone ID: PAT_MRT4530_69254C.1.pep
WTSSGARRRTRRRGGIASRRACRGRERRRAVAPLVAAVAFLAAATKKAATLXVGRATATEVEGGGGRGRTVRRRDVAGHRARRDGEEFPWRQGSADWGGGTKQGREEARGVGFIETEWERQGRFEVAAVFSALGWCSWAPRERATARMQRVVEAVDRVVEIEPRAREDWRGASGCGQGGGGEALQRRQRLCLLNKKPRSGGRELAXPGGEKAKGGGGGKGALLLPVWEERDESEPRLTVLDACGMGRRAREDDAGDDCKRTGTGSRWIQGRGQGRASKAGILVFLGWIYIWRHEGLFQRISKREDHYSKMEQGR

SEQ ID NO: 170981 - protein, 600 aa, Oryza sativa
  Clone ID: PAT_MRT4530_69255C.1.pep
MGHSPSRHNACGGGGGDGESPPSPLPSRFERFRRRLRLRHRDRAGRPGGDAHASESGTGRAIAVDEFAGIARIRIVKEKKVVVETNGPHIARISVFETNRFSKNTLVGYCEVDLFELLTKDPVETEQSFARRVLAIVDYNEDGELSLSEFSDLMKAFGNKLAVAKIEELFRQADKNGDGIVDMDELAALLANQQEKEPLISNCPVCGEILGKHDKINDMIHMTLCFDEGTGNQIMTGGFLTDKQASYGWMFKLSEWAHFSSYDVGLHSGSTASHILVFDRRTKRLVEEVIDGKIVLSMRALYQSKVGLTLIDTGVKDLLKNLSEKQGKKMSSPESAKDIPKFLELFKDQINLDEVKDPLESFKACDLVFIYLLIIFEIGPLPLESFMTFNEFFVRQLKPGARPIACYEQDTIATCAADSRLMTFSSVDESTRLWIKGRKFSIEGLLGKDVHSDALCNGSLVIFRLAPQDYHRFHVPVSGTLEKFVEIPGCLYTVNPIAVNSKYCNVFTENKRVVSIISTSEFGKVAFVAIGATMVGSIEFLKEEGDYVHKGDEDAIEFDADLLANSARSLETLVSVGMRLGVSTRNRDLQPQELEKCSLE

SEQ ID NO: 170982 - protein, 464 aa, Oryza sativa
  unsure (1)..(464): unsure at all Xaa locations
  Clone ID: PAT_MRT4530_69256C.1.pep
TRAREPHPFPSRIHVGIPASFAAAAGRRHASSPQSEPWNRFALTSSSHRCSSLASARRRSPXPPRAVSHFCPLMAMQTQILQGMIQNIVVMQRQHTQEHQPHMVQDNCRSRLNEFLRSRPPGFSQTTETIEANDWIKDVERKLNLVQCTPXRKPFYAVHQLRRHTTNWWYNYCATHTDASTIIWTEFAEAFRLAHIPESIIDLKKEEFANIKQGSSCINEYLSRFNGLARYAPEDVDTDKKKIKRFLKGTEAKLRVKPLAHDFPTFQHMVNKALLLEDAEKEMQDYKKHKVMSLEDQAREGLRQEIDPPVQYYQGESQYSNGSDSTSRSTKSKSSQQTIVINNKSLEGSNSXHALHLEKDVVIRHXVECFICHEMRHYSWYCPEYHRNPISLASSVSSLSPPTPAGVDGRPKPPNSGSASLTSPPIGQSRLNHVQVETKGKVLNLEQVERAGEEQIPHARSEPQ

SEQ ID NO: 170983 - protein, 518 aa, Oryza sativa
  Clone ID: PAT_MRT4530_69257C.1.pep
MQRVVEAVDRVVEIEPRAREDWRGASGCGQGGGGEALQRRQRLCLLNKKPRSGGRELATREGKKRKEEEEERELCSFRFGRKGMRASRASRFWMHAAWGAGPGRMTPATTAKGRGRFEGKRGHGGHRGRRRPRVAMAAPRVQGGSKGGVKEGLQKREFWYSWDGFIFGGTKDYFRGFQKGKIIIQKWNKGDSDMWVRILERSLNRRVRTFDKVHGWGSRRGFRIEGIELRDYIGMKWPLPPRWRAARCAHFALRSLIAFCKGCKEGVCAGRRPTDREAGGARRERRRSGCRRRPALWRLLRPRAQRRETVPFRDQARNTAALWRLLRSTTEVRVRAALSALGGTGIRVVGRAPNYDLPALAHGGTAAAAAWIQAYPTVLFRFVVVGNEVAGADTQLLVPAMENVHAALAAASLGHIKVTTSISQATIGIHIPPSASEVVHERYVIPFLERTHAPLLANLYPYFIIYNNSGGMDISFALFTASERAATGGGGVRARGGRRSGGARGAGGSRRASTRPGE

SEQ ID NO: 170984 - protein, 89 aa, Oryza sativa
  Clone ID: PAT_MRT4530_69258C.1.pep
LLHPLPRPSFWRNGDGRWRAGREPAAAAATTLPQCGTHAATRPAPAAPAHLNSIVVVARLPLRIYSYWNACLPVRSRAFDRGPLILACT

SEQ ID NO: 170985 - protein, 468 aa, Oryza sativa
  Clone ID: PAT_MRT4530_69259C.1.pep
SATNDTDKASRDRLSRIEAELSLLKEKQKDLTEQWEREKSVMTKIQSIKEEIDRVNVEIQQAEREYDLNRAAELKYGSLNALQRQLQTTEKELDEYQSSGKSMLREEVTQDDIAEIVSRWTGIPVSKLKQSDREKLLYLEEELHKRVVGQDPAVKAVSEAIQRSRAGLSDPNRPIASFMFMGPTGVGKTELAKALAAFMFNTEEAVVRIDMSEYMEKHSVSRLIGAPPGYVGYEEGGQLTEAVRRRPYSIILFDEIEKAHGDVFNVFLQILDDGRVTDSQGRKVSFTNSIIIMTSNVGSQFILNMDEEGGSTDSAYENIKKRVMDAARSVFRPEFMNRIDEYIVFKPLEREQINSIVKLQLARVQKRIADRKIKLEVSPGAVEFLGSLGYDPNYGARPVKRVIQQYVENELAKGILRGDFKDEDSILVDTQVTVPSNGQLPQQKLVFHKMSEESAPAAAEDEKFLPAV

SEQ ID NO: 170986 - protein, 1170 aa, Oryza sativa
  Clone ID: PAT_MRT4530_6925C.1.pep
MFLPPPPIFDPVQQQPIQQTPPIQPIVQSIQQQVVQPAQQTPPRQQPQQPIQQTPLRQQVVQPIQHPGSVNASAGFAVPGGQPVQQFVNQVIPEHLVHHAQPDGTVMPQMVPEHLVRNIQPNLHNYQGGNLSYQYQPPSLQAQYQLGGLAQPQFASQYGQFESMQQQPQGAAQQRPWADVIADVMREQFGLKPKETGSLYRQPYPEWFERVPLPNRFKVPDFSKFSGQEGVSTYEHISRFLAQCHEASAVDALKVRLFRLSLSGSAFTWFSSLPYGSINSWADLEKQFHSYFYSGVHEMKLSDLTAIKQRHDEPVHEYIQRFREMRNKCFSLSLTNAQLADLAFQGMIPPIREKFSSEDFDSLSHLIQKGCEFFRFCWNEGMRLPSIENCPGCSDFIESSSRSYSRGNRLRQARLPVHQRLGPMNQDCGQEDEAIFEKPEGTENRHLKPLYINGYVNGKTMSKMMVDGGAAVNLMPYATFRKLGRNTEALIKTNMVLKDFGGNPSETRGVLNVELTVGSKTIPTTFFVINGNGSYSLLLGRDWIHANCCIPSTMHQCLIQWQGDKTEIVPADSQLKMENPCYYFEGVVEGSNVYAKDTVDDLDDKQGQDFMSADELEEIDIGPGDRPRPTFIRKNLSPEFRTKLIELLKEFRDCFAWEYYEMPGLSRSIVEHRLPIKPGVRPCQQPPRRCKANMLEPVKAEIKRLYDAVPVIKKNGKVRVCIDFRDLNKATPKDEYPMPVADQLVDAASGNKILSFVDGNAGYNQIFMAEEDIHKMAFRCPSAIGLFEWVVMTFGLKSAGATYQRAMNYIYHDLIGWLVEVYIDNVVVKSKEVEDHIADLRKVFERTRKYGLKMNPTKCAFGVSAGQFLGFLVHERGIEVTQRSVNAIKKIQPPENKTELQEMIGKINFVRRFISNLSGRLEPFTPLLRLKANQQFTWGAEQQKALDNIKEYLSSPPVLIPPQKGIPFRLYLSAGEKSIGSVLIQELEGKERVVFYLSRRLLDAETQYSPVEKLCLCLYFSCTRLRHYLLSNECTVICKADVVRYMLLAPILKRRVGKWIFSLTEFDLRYESPKAIKGQAIADFIVEHRDDSIGSVEIVPWTLFFDGSVCTHGCGISLVIISPRAACFEFAYTIKPYATNNQAEYEAVLKGLQLLKEVEADTLKSWGILC

SEQ ID NO: 170987 - protein, 91 aa, Oryza sativa
  Clone ID: PAT_MRT4530_69260C.1.pep
YKESNRTSDTDEIVVERFDEISRRVDSVDSDFVNFGGCVGDEGLPYRRGRGYRAPAEVTAVFILPYHRGKPGNRGNHAVTGGKLNPDREIP

SEQ ID NO: 170988 - protein, 49 aa, Oryza sativa
  Clone ID: PAT_MRT4530_69261C.1.pep
VIKKKGDKDPILKQQGLAPGKSRASLPASTLGFGHIKKISLQQIFAQQA

SEQ ID NO: 170989 - protein, 451 aa, Oryza sativa
  Clone ID: PAT_MRT4530_69262C.1.pep
MEQARVGSAMIFLLLAFLSEVSASISQQQQQQCGGASSAGVRAGFWLPSSSHYSPLGSIDTSLYSHLYYSSLSIDETRCAVAPPSSGEESSILSNFSSSIKSSGGGFAVKTILSIGTDEFREDVSNAAFSRMASEKNLRRAFINSSIELARANGFDGLDLAWRFPATQLDMENLGDLLAEWRAEIMEDSTTRSTEPLLLTATVYFSNHLFGMADTNLNYPIDDMSSSLDWVNIITFSLHKNSNVTTADAPLYDKDSHFSASYGVISWLDAGLPPCKLVMGIPLFGRSWFLRNKDKNGLGAPTAAAGTKQRKSNQIGVIAYAEIEEYLKSQSVFVTHDNQSVADYFYSGDLWVSFDSAVVVQEKVEFVAKSQLLGYFLSTISFDDSNYTLSKQASQSWNQYHVSSYAQGSFGIMQEGAIIQDLHASTGSPSSWYSKTLSYLLLSIILVLEVL

SEQ ID NO: 170990 - protein, 95 aa, Oryza sativa
  Clone ID: PAT_MRT4530_69263C.1.pep
LGIHNVFYVSQLKKCLRVPEEQASPDHIEIQEDLTYVEKPTRILETSERRSRNKAIRFCKVQWSHHSEEEATWKREDELNAAHPHLFASSSESRG

SEQ ID NO: 170991 - protein, 129 aa, Oryza sativa
  unsure (1)..(129): unsure at all Xaa locations
  Clone ID: PAT_MRT4530_69264C.1.pep
MDAQNETPKDMYVKGGSSDEHEFYIKRDLALTSQTIKAMLSGPGQYAENETNVIHFRSISSQTLACICSYFAYKSRYSNSTIEIPDFPIPPDQALELXMAANFLDCKHSGFFSFLNRDRQWSNLKLYDK

SEQ ID NO: 170992 - protein, 91 aa, Oryza sativa
  unsure (1)..(91): unsure at all Xaa locations
  Clone ID: PAT_MRT4530_69265C.1.pep
VGMRYFPKFSNRFPCPPXNLERLWAMVPPGKATEAGGGKAPVIDVTQFGYPKVLGKGMLPPQRPIVFKAKVISKFPEKKIMPSGGAVLLSA

SEQ ID NO: 170993 - protein, 97 aa, Oryza sativa
  Clone ID: PAT_MRT4530_69266C.1.pep
PRGKPIKPEKKKAQKTDKQPLTVRGYWGAKGGPPLGSRVPHHLKRQTFFFSLLARGNQKHLRGGVDSIWVSKIIICYIPDAFKLRGVSVGGGARGPC

SEQ ID NO: 170994 - protein, 41 aa, Oryza sativa
  Clone ID: PAT_MRT4530_69267C.1.pep
MEGEAGAQMGSGFRVASAELGGGAETFGNSGSGFGSGSSRN

SEQ ID NO: 170995 - protein, 696 aa, Oryza sativa
  Clone ID: PAT_MRT4530_69268C.1.pep
RRSAADPTDLIKIPSPKNPSHPNFLMDSVPAAGVGVGGGGAGAGYPESTESSPRSRGGDSWDEPFPSSAAAAAAAAGGGRLRLMCSFGGRIVPRPTDKSLCYLGGETRIVAVERNASLADVHARLSRSLLGGQPFTLKYQLPNEDLDSLISVSTDEDLDNLVDEYDRIAATSSGGGSSRTSRIRLFLFPAKPESSSSLGSLLDDSSKSESWFVDALNSAISGSLDGIPRGISTDSASVNCLLGLEDDSSTHSRGGPPNSSPAEEQRANQQKLAAAAAVAAARHPHDVQSVPDSPMIDKNSSFGSTSSAPSLSNLPPIRVRPEDRPPDSRLAPQVPVEDHFAQMGISDQPVQPVIGGYMQPPPQVPIPNMAVPSISPSDASSRVFSDDDKSDHGGGGGRKPQPPKPEVPPVADPTNRAMYYNDRSPPAELKRDMPVGTDAASYRVPVPAQDAAAAAAAAAAAAQQPPAGYVYAQMHAPPPQQQPPPPQQQQPVPQQYVTAQNQHFIHNPATGTFIPIQSYYHHPVPQQAPQPPMPQPVPQPQQSHAFDPNTGMYYIPMRTNAPQAYSMPPGAAAVPPPTLVDTTPKPTVPIPQMAVKQPELQQPGLYRTTAAPTPVPASNAPAYAGMGYHHVIQTHHHPAPQPAATVAGNFGYDYGDPTRAQVFYSQAAAPPTLPPQYQPMGSPDAGQADLKQARAS

SEQ ID NO: 170996 - protein, 383 aa, Oryza sativa
  Clone ID: PAT_MRT4530_69269C.1.pep
MASSKNGLSPVVVFLLGAASATALIVFVFTSTASPAWPTPEATPATRQEKKAAAVACAPRAKGIDSETRRAARTNQTGGGDDDDEFARMVRRAAMEDRTVIMTSVNEAWAAPGSLMDSFLESFRVGENISHFVEHIVVVAMDEGALRRCRAIHPHCYLLLPEVAGLDLSGAKSYMTKDYLDLVWSKLKLQQRASMIVGETRGVDDEEHDARWHWQDVDLAWFRNPMVHITAAADITTSSDFYFGDPDDLGNYPNTGFIYFKATPRNARAMAYWHAARRRFPGEHDQFVFNEIKRELAAGAGEGGGVGVRIRFIDTAAVSGFCQLGRDLNRIATVHMTCCIGLENKLHDLRNVIRDWRRYVARPRWERQMGKIGWTFEGGKCIH

SEQ ID NO: 170997 - protein, 32 aa, Oryza sativa
  Clone ID: PAT_MRT4530_6926C.1.pep
CQQRTPVGLEYHVSFGNLLTGPMIANSRPYVS

SEQ ID NO: 170998 - protein, 247 aa, Oryza sativa
  Clone ID: PAT_MRT4530_69270C.1.pep
MGRGGARSKRLRLLHPCRRLPGGGQQQASERGGDAEVWEPRAGGGQIRASPARTGAQAAQQLTQHGNIGYVLRTLISMDKKPARNLTACLAAIAGAVVNNSNGGKLPGLSRKLFQKAPSEHKKNALTEVKSGGNTRALAMVLRGEWVDEIAALRLQFEQKDIEVERLKDLCLWQREEIWTLKGAVFFPATQPDHNLTGQIQYLAEKIAVALMGIPTGTNNLTGIGMGRYYPCPSRPIAIPKLDAELS

SEQ ID NO: 170999 - protein, 71 aa, Oryza sativa
  unsure (1)..(71): unsure at all Xaa locations
  Clone ID: PAT_MRT4530_69271C.1.pep
MXGGGGMFXRKXLDYEVLIENXKKVQYAVRGELYLLASELQKEGKKIIFTNVGIPHFLGLXPLTFPRQVVA

SEQ ID NO: 171000 - protein, 46 aa, Oryza sativa
  Clone ID: PAT_MRT4530_69272C.1.pep
MTTRSVTRSERARGDGAKSSGEARVLAPRMRKSELATRDNAPRLAP

SEQ ID NO: 171001 - protein, 945 aa, Oryza sativa
  Clone ID: PAT_MRT4530_69273C.1.pep
MNEFRTNLALLKKDVADLKSLKGEVKEIKGLLLELCKQKSVVEGGEEVVTETAATKGTLGSSTEAAGTSTGGIPRTAAPEGFGTTHPEPTVFTQAREGNQYAEAVIKGPRLEISLFTGEDPVDWLKQCEKFFEITGTPVDQWEPKGLPPRRSCDHVINLKVGSEPPNLRPYRVPHFQKGAMEDIITELFRTQEIRISDSPYVSPAVMVRKKDGSWRLPLHDLLKKDGFKWGDTQQEAFELLKEKMCNSPVLALPDFSQPFVIETDACGIGIGAVLMQKGRPLAYFSKALGPKAAAQSVYEKEAIAILEALKKWRHYILGGSLIIKTDQQSLKFMMSQRLVEGIQHKLLLKLMEFDYVIEYKSGKENLVADALSRSPNLKEEQCLPITVVVPEWVQDIKRSYEEDIFAHKILSLIETDGDPERHYKLESGLLKVTLEDKALILQKLKSSIGEAQRRIKFYADKGRSERTLELGDMGLDKPPTATTSLPRMSSPIVPLSSAGEFLGKRGISRPKVEGERVHGLTVPLLLSWRLGDQSMEHVQIPRVKLGTQGLEVSKLGFGCMGLTGVYNAPVAEEDGVAVVRRAFEAGVTFFDTSDAYGPHTNEVLLGKALKQLPREKVQVATKFGIAGFDANGMLVKGTPDYVRACCEASLERLAVDYIDLYYQHRIDQSVPIEETMGELKKLVEEGKVKFVGLSEASADTIRRAHAVYPITAVQMEWSLWTRDIEEEIIPLCRFMELGIGIVPYSPIGRGFFAGRAAVQSIPSESWLTRHPRYNGENLEKNKVFYTRIEELATKYGCSPAQLALSWVLHQGDDVVPIPGTTKVKNLDDNIGAVKVKLSKEDLKEISAAVPAGEEEPREQLADQFFLNGSRGIVLGLRCPCITHLEHRGMRVDRGTMAMMVSARPGMPTKNICALHRWNLWFFSWTTTTPKFCCCNAMQCLDQKP

SEQ ID NO: 171002 - protein, 161 aa, Oryza sativa
  unsure (1)..(161): unsure at all Xaa locations
  Clone ID: PAT_MRT4530_69274C.1.pep
VTPERPRREAXRRCFTTHARCSMSYAVKRLGKDTFQCQISSFATPFSAFPLFPELGVAFLGHPDVDVVNNNIMLWMXVGTPSNNLRQMPLAPDLPXALIDCPKPNCPSAFPFLSNIYLVISIQRTTLDIRNIFSDALQKTNSIYTDKQVSQQPKKMEKQIF

SEQ ID NO: 171003 - protein, 114 aa, Oryza sativa
  unsure (1)..(114): unsure at all Xaa locations
  Clone ID: PAT_MRT4530_69275C.1.pep
SRCDLVLGETHAFGPPHHLRPRDPLTGPLVGEARVLPSHGFRPWGFPLRPSPLASGLSLLPKLSVSAGPAEGPLRYTSNKPLTGKGEXGASAETVQIVWYTVRRPLSADVPAET

SEQ ID NO: 171004 - protein, 987 aa, Oryza sativa
  Clone ID: PAT_MRT4530_69276C.1.pep
MPAPCLPDQAAALLRLKHSFNMTNKSECTLASWRAGTDCCRWEGVRCGVGIGVGHVTSLDLGECGLESAALDPALFELTSLRHLNLAWNNFSGSHIPTIGFERLTELTYLNLSNSKFAGQIPNTIGRLTNLISLDLSTDFFLIDLDDEFLSVATYSPAWLLVAPNIVSIVANLHNLKELYMGTIDLSSNSMVQWCSAFSNSTTPQLQVLSLPYCYLEVPICESLSGIRSLSEINLQYNFIHGPIPESFGDLPSLSVLSLTHNSLEGSFPSRIFQNKNLTSVDVRYNFELSGSLPKNISSNDILVDLLVSSTNFSGPIPNSVGNIKSLENLGVASSDFSQELPSSIGQLRSLNSLEITGAGVVGAVPSWIANLTSLTLLDFSNCGLSGKIPSAIGAIKNLKRLALYKCNFSGQIPQDLFNLTQLRVIYLQYNNFIGTLELSSFWKLPDLFSLNLSNNKLSVVDGEKNNSSWVSINYFYTLRLAYCNISNFPSALSLMPWVGNLDLSGNQIHGTIPQWAWETSSELFILNLLHNKFDNIGYNYLPFYLEIVDLSYNLFQGPIPITGPDTWLLDCSNNRFSSMPFNFSSQLSGMSYLMASRNNLSGEIPLSICDARDILLLDLSYNNLSGLIPLCLLEDINSLSVFNLKANQLHGELPRNIKKGCALEALDFSENMFEGQLPTSLVACRDLEVLDIGNNQISGGFPCWASMLPKLQVLVLKSNKFTGEVGSSAIEKDNTCEFANLRILDLASNNFSGTLHHKWLKRLKSMMETSSSATLLMQYQHNVHSTTYQFSTSIAYKGYEVTFTKILRTLVVIDVSDNALHGSIPKSIGELVLLRGLNMSHNALTGPIPSQLGALHELESLDLSSNDLSGEIPQELAQLHFLSVLNLSYNGLVGRIPDSPQFSNNLSYLGNIGLCGFPLSKECSNMTTPPSSHPSEEKHVDVILFLFVGLGVGIGFAVIIVVTWGIRIKKRSQDSRFPFWKKVLCM

SEQ ID NO: 171005 - protein, 144 aa, Oryza sativa
  Clone ID: PAT_MRT4530_69277C.1.pep
THTNCSKIKEEIHSTQEPIQPKRPPLRPITSESHPQTPPKIHCKSASKETTAYTSIQQQKKKKEEGNELCTGKHHHPGPQPSAPPPNHTIQRLKAQKALTLGITQQQRRRRRRNLVAIFLLFLFFFFSVTARREEEDSGGWKRG

SEQ ID NO: 171006 - protein, 60 aa, Oryza sativa
  Clone ID: PAT_MRT4530_69278C.1.pep
SCTPSYSASTSPSLHSCTLPCYFCASISFFSLSNLLLKLKLNSPGPLCPCPASSSAANRP

SEQ ID NO: 171007 - protein, 278 aa, Oryza sativa
  Clone ID: PAT_MRT4530_69279C.1.pep
MAEADAQTQSRAHSSTAAPVAGETAGEPVGFPQNGAINGAPLMFPVMYPMLMTGMHPQQSLDDQAQGPGIYAIQQNQFMGSTLMPLTYRIPTESVGAVAGEEQAQDARQQHGPQRQVVVRRFHFAFQLDLALIIKLAAVVFLFSQEGSKQRLFLLILFASVIYLYQTGAITPLLRWLQRAGGAAARPPQAPARPENRAPLAAQNDGNVQPPGGNLADPANNDQAAENQEPGAAAANENQQEVDGEGNRRNWLGGVFKEVQLIVVGFVASLLPGFQHND

SEQ ID NO: 171008 - protein, 102 aa, Oryza sativa
  Clone ID: PAT_MRT4530_6927C.1.pep
MATPRALFLQRKIRDGSEKKQLPAAAGVVRVKVVLTRKQAARLVSLAGEGRRRRTAAQLVRELRRMEDGAGRVDGSPATATATAWRPVLETISEEWLGSEVR

SEQ ID NO: 171009 - protein, 147 aa, Oryza sativa
  Clone ID: PAT_MRT4530_69280C.1.pep
MKDSWRAHRRVAYDGEAKNLTVALSYGDAAAAQQIPCSGVLWFVSQWRKAGELADGDIFDEMGYDELADEEFFVESGPWRFRYSDARPHPTRAPAAATPSSSPARRSPPHLPPPPHSGRRHTFLVPSVSPPPETASAGAPGAHGGGG

SEQ ID NO: 171010 - protein, 54 aa, Oryza sativa
  Clone ID: PAT_MRT4530_69281C.1.pep
KLSCFFFFAGPKKQSYFNIGEALIYNNLTALRFQVGKTEFFPSGGLQGISKIIN

SEQ ID NO: 171011 - protein, 176 aa, Oryza sativa
  unsure (1)..(176): unsure at all Xaa locations
  Clone ID: PAT_MRT4530_69282C.1.pep
GASQQRKSQLTSCPNPPTSRLEPYGAXCLSNFXXQASXRHNVPEIEAQTSPEXLLTPXTIARNENEXVLXXPSVNSVRISIKIKQADEIEHILVHKFTRFLTQRAESFFILRRKPIKGYDISFLITNFHTEEMLKHKLVDFIIQFMEEVDKEISEMKLFLNARARFVAESFLTPFD

SEQ ID NO: 171012 - protein, 178 aa, Oryza sativa
  unsure (1)..(178): unsure at all Xaa locations
  Clone ID: PAT_MRT4530_69283C.1.pep
MVLAENYHLAGSPTLALLDGCQVLSANRICAENRRSTLRKTKKITCSHPTAILITILPLLFPLMPSSLVLASTVLXLLDLDAPSLACLCRLQFYTLTHXSLFIVGSKLYRLPIVRTGDSTISFGIDKKKKGKRKKTDVCSIALDEDQINVYQFGTLLNVDQLGGIVTCTIIPRDLIIN

SEQ ID NO: 171013 - protein, 122 aa, Oryza sativa
  unsure (1)..(122): unsure at all Xaa locations
  Clone ID: PAT_MRT4530_69284C.1.pep
GWWHTRPIPLLRGGGRGGEAVGEFTAAKSVARGRGLSRWSNQGSSARKSGRRSYRLNQTASSPSFAAAVVVSGWLSCCIPKLEIAARSLTSYLHPLATPRHARAPPPXLITARLALSISLTN

SEQ ID NO: 171014 - protein, 94 aa, Oryza sativa
  Clone ID: PAT_MRT4530_69285C.1.pep
IVYISLFFSTCAAFFVGSGCVTLSISNRIVVLMGHVRPSRRVSSLAAVHDGFGPSVDWPTYTRDPWLLCPDLYRWLGELASKDCGIFGVPYYVP

SEQ ID NO: 171015 - protein, 50 aa, Oryza sativa
  Clone ID: PAT_MRT4530_69286C.1.pep
MRILSTREFSSRCNCVEHLACARSAVLRDLVRTAGKSVAPRLCAAARSCA

SEQ ID NO: 171016 - protein, 114 aa, Oryza sativa
  unsure (1)..(114): unsure at all Xaa locations
  Clone ID: PAT_MRT4530_69287C.1.pep
RPTSPRRARLHMIAFISHRLPSQTNTSLFCTLCPHSCAPGKNFPIGHPSXIAPSQARLTLEFFGDRLPEKXLQLVDMSILLILLSPRLGCHILTPLEIYLTAGNKYSASCWLSL

SEQ ID NO: 171017 - protein, 94 aa, Oryza sativa
  Clone ID: PAT_MRT4530_69288C.1.pep
MTVVTVGMVGNTLQPSLGLHLNRPAKTWIQRRRGRFGRTMGRPNQPSFQLAASSIAPLCRLVIFGSNHRVNSEFLAHSYICLILDIVRLIYRLC

SEQ ID NO: 171018 - protein, 64 aa, Oryza sativa
  Clone ID: PAT_MRT4530_69289C.1.pep
PPRACPLARCPLSVVPAMWWFHCLHNGAVGCRARAHVWARSLGRVRMALRKSLAGGLLVPVEKE

SEQ ID NO: 171019 - protein, 1685 aa, Oryza sativa
  Clone ID: PAT_MRT4530_6928C.1.pep
MTEKLPPSPSSASPGTVKETIQRLGFNKVNEGNIVAVDPEKLTPDQKKDFEAMMQQAREQFFRSFTQTRNGTFVQKYKVKVIPDEPETSISKEGEEKRVLDGSAQENQGDGSQGVHAVQGDGAYEPQGGNLNQNGETAQDFFNKISSTISKIEWTTPYTTPLAQAVLPGALSAQPMASPLTSLPAPSASTPGAVQQRPWADVIADVMREQFGLKPRDTGKLYRQPYPEWFEKVPLPNRFKSPDFSKFSGQDVNSWADLEKQFHSYFYSGVHEMKLSDLTAIKQRHDEPVHEYIQRFREMRNKCFSLSLTDAQLADLAFQGMIPPIREKFSYEDFDSLSHLVQKVILHEQRSAEARRSSKRVNHVCPYMYGSDDDDDDSEIAAVEWVRSKKVIPCQWVRNSGKEERYDFDITKADKIFDLLLREKQIQLPAGHVIPSAEELGKRRYCKWHNSGSHSTNDCKVFRQQIQVAIEGGKIKFDDSKKPMKVDGNPFPINMVHTVGRTADVGRARGFRVNSAKIINKYQRKCDKQQERHYEEDNDGFDPHWNCEFFRFCWNEGIRLPSIEDCPGCSNITESSSRLYKRGNWLKQARVPVHQRLGPVNQNDYLEGDENAKTQWCPSGIFTKNQKRRVQRLRSRERFQEVEQEIGHRLRKAKPRKEWHVKNQVLGADDIAADEAKRLAKGKSIVTTPINMVFTLPAEFGIDQADVDELEEESAKLVLSPERAVFEKPEGTENRHLKPLYINGYVNGKPMSKMMVDGGAAVNLMPYTTFRKLGRTTEDLMKTNMVLKDFGGNPSETKGVLNVELTVGSKTIPTTFFVIDGKGSYSLLLGRDWIHANCCIPSTMHQCLIQWQGDKVEIVPADSRLKMKNPSYYFEGVVEGSSIYAKDTVDDLDDKQGQGFMSADDLDEVDIGPGDRPRPTFISKNLSSEFRTKLMELLKEFRDCFAWEYYEMPGLSRSIVEHRLPLKPGIRPHQQPPRRCKADMLEPVKAEIKRLYDAGFIHPCRYAEWVSSIVPVIKKNGKVRVCIDFRDLNKATPKDEYPMPVADQLVDAASGHKILSFMDGNAGYNQIFMTEEDIHKTVFRCPGAIGLFEWVVMTFGLKSAGATYQRAMNYIYHDLIGWLVEVYIDDVVVKSREIEDHIADLRKVFERTRKYGLKMNPTKCAFGVSAGQFLGFLVHERGIEIPQRSINAIKKIKPPGNKTELQEMIGKINFVRRFISNLSGKLEPFTPLLRLRADQQFTWGAEQQKALDNIKEYLSSPPVLIPPQKGIPFWLYLSAGDKSIGSVLIQELEGKERVVFYLSRRLLDAETRYSPVEKLCLCLYFSCTKLRHYLLSNECTVVCKADVIKYMLSAPILKVRVGKWIFSLTEFDLRHESPKAIKGQAVADFIVGHRDGSIGLVDIMPWVLFFDGSVCSHGYGIGLVIIAPWGASFEFAYAITHHVTNNQAEYEAVLKGLQLLQEVAADAIEIMGDSLLVISQLAGEYECKDDTLMVYYEKCRTLISEFRLVTLRHISREQNIEANDLSQGASGYKPMTKDIEIEIATITADDWRYDVFQYLQNPSQSALRKLRYKALKYTLLDDDLYYRTIDGVLLKCLSADQAKVAIGEIHEGICGTHQSAHKMKWLLRRAGYFWPTMLEDCFRYYKGCQDCQKFGAIQRAPASAMNPIIQPWPFRGWGIDMIGMR

SEQ ID NO: 171020 - protein, 66 aa, Oryza sativa
  Clone ID: PAT_MRT4530_69290C.1.pep
NPPHQKGQPGHLEAKPPLGTKARFFLDRTETIPQIYFPINWFKRFPSKTNIFPVVKNGSFSPYSLL

SEQ ID NO: 171021 - protein, 171 aa, Oryza sativa
  Clone ID: PAT_MRT4530_69291C.1.pep
FPSSGVGSLNSQSYTAAELRGIYVAHLGSHTQHSANKASEITGSSNRTRPPITTHILDVARGSPASGIEVHLEMWKDASTPPSFNNKDFNGWATLGSSVTNNDGRSGQLMDIVNNVAPGFYRISFNTSKYAPSGFFPYVSIIFEIKKNQTTEHFHVPLLHSPFSFTTYRGS

SEQ ID NO: 171022 - protein, 301 aa, Oryza sativa
  unsure (1)..(301): unsure at all Xaa locations
  Clone ID: PAT_MRT4530_69292C.1.pep
MATTRGQLPVEDVLRVNGSRRFAAALAAASPFACLADALLAARRIWLNEVDVNGWLEAFAAHPAIGTTSSSAPKWCKEEQSAALATATDSTAQELADWNARYREKFGFVFMICASGRTAPEVLAXLKRRXRXYENRPIVELEVAAHEELKITELRLAKLFASEPVAPPSSTVGGPTSQSDKAAAPEITGSSNRTRPPITTHVLDVARGSPASGIEVHLEMWKDASTPPSFNNKDFNGWVTLGSSVTNNDGRSGQLMDIVNNVAPGFYRISFNTSKYAPSGFFPYVSIIFEIKKNQTTEHFH

SEQ ID NO: 171023 - protein, 137 aa, Oryza sativa
  Clone ID: PAT_MRT4530_69293C.1.pep
MRNPCIWCCLVLLTLVVCDSCLHEERKHLMDICDAFLWPAGNPPDWSSRDCCRWERVTCSSITGRVTALDLDAAYPSWYGLLNCSMFLPFRELQNLSLGNAGIAGCMPGAGFEVWSNLRQLEILDLSENELNDSSIM

SEQ ID NO: 171024 - protein, 59 aa, Oryza sativa
  Clone ID: PAT_MRT4530_69294C.1.pep
YVSFVLASIATKAAASDNLKLQLVPLELFRQQCASVVPLQCTRVNLAYMHKQHQKRSPS

SEQ ID NO: 171025 - protein, 279 aa, Oryza sativa
  Clone ID: PAT_MRT4530_69295C.1.pep
MAEEQPRAAAEGGGETLMEKIADKLHIGGDGSSSDSDADERKQPKPSAPPAPAEVATESFVDSAAAAAAEAKAKVFRLFGREEPIHKVLGGGKPADVFLWRNRNISAGVLGGATAIWILFELLGYHLLTFVCHGLIFSLGLLFLWSNASSFINKSPPRIPEVIIPEDLVVNIALSTRYEINRAFANLRQIALGRDIKKFLIVIAGLWLLSVLGSCCNFLTLVYIVFVVLHTVPILYEKYEDQIDSYGEKGWVEIKKQYAVLDAKVLSKVPRGPLKDKKH

SEQ ID NO: 171026 - protein, 386 aa, Oryza sativa
  Clone ID: PAT_MRT4530_69296C.1.pep
MHAHKIGSSGRASTRAWTWPSSGGTTLRQQAWRPYTSAGKSSDRRDAAYPCALEALRCPLAPAVAHMCGAPCGSTAAPDRSGHAERLFRSCAIWPIGNGYRTAPRRSDAVRFCLVAKPRASTRMCAGHRLCRRAAGITRLGLMERIVKTCTHMLHAPDRMATCTDPWRLKCATILIKHTNHVCVVGLRDILAIVRRHCWVRRRPCVDAVAGNRCLGESPKPISPLPPELMPKRGATAVDLPSTLPSSRGGRMIGRRLSATGLTSAETIWPDAIWLPLLGSQLLSLSSPRHRHEDARVDAELRRVPPSRHRTKLPHGSDVVATVLPIGVVDGSSMTSSPCTALNPFKVDSRQPPTLPPCPRGRRTGWAGLPPPDRIKPNSKETAQTN

SEQ ID NO: 171027 - protein, 84 aa, Oryza sativa
  Clone ID: PAT_MRT4530_69297C.1.pep
RHDLLDHTFILPELIRSTGGMPYISGRRTIQDPETYSAIYHTCLFNIGLLADLIFWNIFNFEQLPLASISKRLLLCLHLLKLLF

SEQ ID NO: 171028 - protein, 38 aa, Oryza sativa
  Clone ID: PAT_MRT4530_69298C.1.pep
SRKHGQYIAAKQLLAIYLFSYSLSASRPKRILPHYNAW

SEQ ID NO: 171029 - protein, 161 aa, Oryza sativa
  unsure (1)..(161): unsure at all Xaa locations
  Clone ID: PAT_MRT4530_69299C.1.pep
MSSSGGGGVAEEVARLWGELPVRVVWAAVAAQWAAXXXAPQVSSASAPANAVSAPFVSAAGPSLAAQAPVVSAASPTLAASAPRVSAAAPPFAVSAPLVSAAAPPTTAAVVPLLPAASPAAVVCSVPVFRPAFGGAAPPRAPPPPFPPPWPPRPFAFPGGG

SEQ ID NO: 171030 - protein, 222 aa, Oryza sativa
  Clone ID: PAT_MRT4530_6929C.1.pep
IQAAIEGGKIMFDDSKRPMKVDGNPFPINMVHTTSRIADGGRARGFQANSAKIINKYQRKYDKQQVKYYEEDDDGFDPCWGCEFFRFCWNEVNMVFTLPAEFGINQADDDEVEEESAKLILSPEQAVFEKPEDTENRHLKPFYINGYVNGKPMSKMMVDGAVNLMPYTMFRKLGRNAEDLIKTNMVLKDFGGNPSETEGVLNVELTVGNKTIPTTFFIIDGK

SEQ ID NO: 171031 - protein, 164 aa, Oryza sativa
  unsure (1)..(164): unsure at all Xaa locations
  Clone ID: PAT_MRT4530_692C.1.pep
NEQEKTLRSFPDGQRNCYTLPTNSSKKYLIRATFTYGNYDGLNSSEKGSLFIFGLHIGVNFWTTVNLTKWDPSSTVWKXEVITVAPDKSVSVCLINMGSGTPFISTLDLRPLQDTMYPFVNASTSVSYFSRIRFGSVDEYITXFPTDQYDRFWEGWVFTMHTFP

SEQ ID NO: 171032 - protein, 105 aa, Oryza sativa
  Clone ID: PAT_MRT4530_69300C.1.pep
SSRCGSCSRSTEAAFGEPPVRGEVPLGIPPNGWRAPPPSGTPPAAVAVLWPDISPLLFLHAQRLACHRRLRVHGASPTSKPRSPWSPQPSRFRFGEAAGERVERD

SEQ ID NO: 171033 - protein, 181 aa, Oryza sativa
  Clone ID: PAT_MRT4530_69301C.1.pep
MEAYMLFSRREGMIRCDEQEEDIGCPSESELSLSSSSEGMELADDASSSGSSSSAAGHFEMSSLMTELPLKRGLSKFFDGKSQSFASLAAVGSLEDMAKPMRKRLKTSRSCGVGLGLQDAHRRGRLSPRPLCGNASAASFKKVSKGGQLSVLGASRRTRSPATAAISPRPEGMPGQALLFA

SEQ ID NO: 171034 - protein, 54 aa, Oryza sativa
  Clone ID: PAT_MRT4530_69302C.1.pep
AQERKSEFCICSMYTTHLPHSHSQFHKLDLASRAVTGFFLRSEPAYPPRCRNMS

SEQ ID NO: 171035 - protein, 143 aa, Oryza sativa
  unsure (1)..(143): unsure at all Xaa locations
  Clone ID: PAT_MRT4530_69303C.1.pep
PLCQGVTTVPGNVPGVDPNAGPAASAPQAALPGWSFHSGMRPCGWFLRVXAAGGGDVSRVLXEQCPCGMMPGEDVSRCLQXHGQAASEDGXLQLRRTMXPGGHNICCXRDAHDLALQPRAPLCPPRVVRDLRHSQHSQHRQNC

SEQ ID NO: 171036 - protein, 87 aa, Oryza sativa
  Clone ID: PAT_MRT4530_69304C.1.pep
GGGWSFNQPTHAEMGVPANDQQSPPISTGDRNDQRRTGSCQGNREREAHHGSQPPAWRSAVDEVAVGNSPAILRCRGRRPMWIRFQR

SEQ ID NO: 171037 - protein, 1568 aa, Oryza sativa
  Clone ID: PAT_MRT4530_69305C.1.pep
FLQTEIKSQLCDLETKLHKEELSEEGYLAKVKSLLNKDLSLENGTHTLTQKANGCPANGSRPTWRAEMADSNRSPRSRPKPRGPRRSKSDSDTLFETSPSSVATRRTTRQTTITAHFTKGPTKRKPKEESEEGNSAESAAEERDQDKKRRVVDTESGAAAAVEKLEEVTAGTQLGPEEPCEQEDDNRSLRRHTRELSLRRKSKEDPDREARPETHLDEDEDGKKDKRSSRPRSQPRDPAAKRRPKEAEPEQVAPETPEDRDEDEREEKRRKTTRKKLESHTVPVQSRSERKAALSKSVIPKINSPKCPECGQHLDDPNLKYQQHPEDAVDEPQMLTSEKLSIYDSTSTWFDTYEDSPMHRFTSFSVYCSRGHLCPVDTGLIEKNVELYFSGCAKAIHDENPSMEGGINGKNLGPINQWWLSGFDGGEKVLIGFSTAFAEYILMEPSKEYEPIFGLMQEKIYISKIVVEFLQNNPDAVYEDLINKIETTVPPSTINVNRFTEDSLLRHAQFVVSQVESYDEAKDDDETPIFLSPCMRALIHLAGVSLGQRRATRRVMGATKEKDKAPTKATTTKLVYQIFDTFFSEQIEKYDKEDKENAMKRRRCGVCEVCQQPECGKCKACKDMVKFGGTGRSKQACLKRRCPNLAVKEADDDEEADDDVSEMPSPKKLHQGKKKKQNKDRISWLGQPMKIEENRTYYQKVSIDEEMLEWATGSRSFPDDSSKPLYLARVTALWEDKNGQMMFHAHWFCAGTDTVLGATSDPLELFLVGECENMQLSYIHSKVKVIYKAPSENWAMEGGTDPETTLPGAEDGKTYFFQLWYNHDYARFESPPKTQPTEDNKHKFCLSCIRLAELRQKEMPKVLEQIEEVDGRVYCSSITKNGVVYRLGDSVYLPPEAFTFNIKVASPVKRPKKDPVNETLYPEHYRKYSDYIKGSNLDAPEPYRIGRIKEIHCGKKKGKVNEADIKLRLYKFYRPENTHRSYNGSYHTDINMLYWSDEEAVVNFSDVQGRCTVEYGEDLLESIQDYSQGGPDRFYFLEAYNSKTKNFEDPPNHARSPGNKGKGKGKGKGKGKHQVSEPKEPEAAIKLPKLRTSGVFSGCGGLSEGFHQAGISETLWAIEMWDPAAQAFRLNNPGTTVFTEDCNVLLKLVMAGEVTNSLGQRLPQKGDVEMLCGGPPCQGFSGMNRFTLPHLSPSSNNSLVVSFLSYCDYYRPRFFLLENVRNFVSYRRSMVLKLTLRCLVRMGYQCTFGVLQAGQYGVAQTRRRAIILAAAPGEKLPLFPEPLHVFAPRACQLSVVVDDKKFVSNITRLSSGPFRTITVRDTMSDLPEIQNGASNSEIPYNGEPLSWFQRQLRGSQYQPILQGYLQGHGPLVAARMPHIPLFPGSDWRDLPNIQVRLGDGVIAHKLQYTFHDVKNGYSSTGALRGVCSCAEGKACDPESRQFSTFIPWCLPHTGNRHNHWAGSYGRLEWDGFFSTTVTNPEPMGKQGRVLHPEQHRVVSVRECARSQGFPDSYRFFGNILDRHRQVGNAVPPPLAKAIGLEIKLCLLSSARESASAAVKAKEEAATKD

SEQ ID NO: 171038 - protein, 539 aa, Oryza sativa
  Clone ID: PAT_MRT4530_69306C.1.pep
MEALSLIDVAAEDDLLLDLTSPPPLHPDPPHAGCDEVMAAEASRLDPAGDSPEMRRVVDPDGATEEAPEQSESPKRRKAKAGVNLRKSLAWDSAFFTSEGVLDTEELAVVNSTFRKAQGSRLPGIAEEMRRSGESTTSTLESESWVMENLETELFDNVRASIQRSHGNPGKAPGVTAVISKPPKSKANVPRVAARKGVDLMPQSKIRAPISTSQGAAGGKQRIQATLKEPTTARVPISGSTEVKPSLKPPRALPRVATMRAPTNTAVASGIPDKRSSTGGKTNMYSLVGGVVNRQTVGKSVNNSVSAHSRPGGVTKSTSTSKSGALPSSLSSSAAATAASIGNMLGQKPKSSTLSNKSRIAQRIPVRSTSRTDVNKANPARASRNNIPTGGKSNRVSPSISPSSSVDSLSSVVSGASTASTVGKMSHTSESFSTRSSSLSPSLRNSNDHAPTRADADTQGKGSKPSGLRMPTPKIGYFDAKSIDQQIGAHMQVQPMKIQCSPQLSSAQMGDPASSILSQPESRLAASPHEQKSSVQGKA

SEQ ID NO: 171039 - protein, 346 aa, Oryza sativa
  Clone ID: PAT_MRT4530_69307C.1.pep
MTPLPANHLPHHVGTPTNFHVSPRLRQGPPAMAQPVHWLAREAADDDRMGIGETAAARASRGGVGHHYIPSFYMPISDHSRKADQTAYYRRPCILVKQPNNWAGAGHGSGRSGGERGVKDDGAAELPSLFPGGQRVQRRPARQGGKGGGPITSDGWHCGGYSGQGRKGGSTMPPLLTVKELNVAQLGAGVRQATCDVATWEKGPHDVGGLGGRGGRLGGHGAPAFSRAASSLFLPAERRRPDQARGKAVLHALPLLPHRAVFGRFSRHGARLTAGGVVAERRDGWSGGAAADRGVSGGAGGAPAAAGHGRRRWPGEEVAGERGSSTPSAAPPAMGLDITSPGRLRV

SEQ ID NO: 171040 - protein, 194 aa, Oryza sativa
  unsure (1)..(194): unsure at all Xaa locations
  Clone ID: PAT_MRT4530_69308C.1.pep
FLLPLGKGVLNVYDLSNSLARQLSTSFLRKPIEAIWHTGVLVYGNKYLYGGGIQSLPVGRTPYGRPVRVVEPGVTHIPRXVFEDFLRENFSNEXAQLLVGAGTTDYTLNLPGEVMSRPMAGGAADGVELPRSPATSSPGHLRRPWPAAAGAPPAPPLTPRSAAAPPLHPSLRSATTPPAVRRAPWREKRPKTAR

SEQ ID NO: 171041 - protein, 138 aa, Oryza sativa
  Clone ID: PAT_MRT4530_69309C.1.pep
LPRRRRRRRARELLLGERWLLPEKHCATIAVPSLPAACLLAAATAERALAAAEAEGDDPAAIDGNLVLAFLATRDGDFDDARQPRICLRAQRRGAHPRGALRRWRRRSVADAIRGRPPPPPRPVACSPAAGRLRCTFC

SEQ ID NO: 171042 - protein, 1340 aa, Oryza sativa
  Clone ID: PAT_MRT4530_6930C.1.pep
MRWRGKAERSDADDGRAAGGRVGVAGRGGSSAKCGQGRRWWCRMWRLSRGSQMRWEGATPESSPWGGQGRCNTGAGEEVCKVTGVHGVTFATPVLSNKSATDSSLGNQGDNSQGVHEVQGDGVHGVQGDGTQGLQGGNLNQNSDTAQDFFSNFQNRVDYVVHHALINQSGVLVNTLSNMMKSIADGSIAEHQAAGPVYLQGADEAKRLAKGKSVVTAPVNMVFTLPAEFRIDQADVDEVEEESAKLILSPKHTVFEKPEGTENRHLKPLYINGYVNGKPMSKMMVDGGAAVNLMPYATFRKLGRNAEDLIKTNMVLKDFGGNPSETKGVLNVELTVNRKGSYSLLLGRDWIHANCCIPSTMHQCLIQWQGDKIEIVPADSQLKMENPSYYFEGIVEGSNVYTTDTVDDLDDKTKLIELLKEFRDCFGWEYYEMPGLSRSIVEHRLPIKPGVRPHQQPLRRCKADMLEPVKAEIKRLYDAGFIRPCRYAEWVSSIVPLIKKNGKVRVCIDFRNLNKATPKDEYPMPVADQLVDAASGHKILSFMDGNAGYNQIFMAEEEIHKTAFRCPGTIGLFEWVVMTFGLKSARAMNYIYHDLIGWLVEVYIDDVVVKSKEIKDHIADLRKVFERTRKYGLKMNPTKCAFGVSAVQFLGFLVHERAIEVTQRSVNAIKKIQPPKNKTELQEMIGKINFVRRFISNLSRRLRHYLLSNECTVICKADVVKYMLSAPILKGRVGKWIFSLTEFDLRYESPRAIKGQAIADFIVEHRDDSIGSVEIVPWTLFFDGSVCNHGCGIGLVIISPRGACFEFAYTIKPYAINNQAEYEAVLKGLQLLKEVEADTIEIMGDFLLVISQLAGEYECKNDTLMVYNEKCQELMKEFRLVTLKHVSREQNIEANDLAQGASGYKPMIKDVKVEIAAMTADDWRYDVHQYLHNPSQSASRKLRYKVLKYTLLDDELYYRTIDGVLLKCLSADQAKVAIGEVHEGICGTHQSTHKMKWLLRRAGYFWPTMLEDCFRYYRGCQDCQKFGAIQRAPASAMNPIIKPWPFRGWGIDMISMINPPSSKGHKCILVATDYFTKWVEAIPLKKFDSRDAIQFVQEHIIYRFGIPQTITADQGSIFVSDEFVQFADSMGIKLLNSSPYYAQANGQAEASNKSLIKLIKRKISDYPRQWHTRLAEALWSYRMACHGSIQVPPNKLVYGHEAVLPWEVRIGSRRTKLQNDLTADEYYNLMADEREDLVQSRLRALAKVTKDKERIARHYNKKVVPKDFSEGELVWKLILPVGTRDSKFGKWSPNWERPFQIYKVVSKGAYMLQGLDGEVYGRALNGKYLKKYYPSVWVNA

SEQ ID NO: 171043 - protein, 205 aa, Oryza sativa
  Clone ID: PAT_MRT4530_69310C.1.pep
MDPMGGERGRSGNCEAGAGRESVGEWVQVIHVRAATAVGQADGEDRNREATCAAPIQVINKGHGESTLAIRPDNVYLIGFRTQAASWFAFKNSYNQISRATALGFDDSYTSLTGKGGYTNLKDIVVGKKSAQEAVATLAKYKKDGSVPEEEIKKALTTFILIICEAVRLVPVRTDVITVWDEAEGGKVGKVACDLTVKWKVISCA

SEQ ID NO: 171044 - protein, 68 aa, Oryza sativa
  Clone ID: PAT_MRT4530_69311C.1.pep
MDLASLAVTTDSTRSRELSLHAEIGEAAVMAVTARRESHTTVVIGEATRRIFSIILSWKSEHLSAHPF

SEQ ID NO: 171045 - protein, 176 aa, Oryza sativa
  Clone ID: PAT_MRT4530_69312C.1.pep
MCWRSAQTLHAGESERVVTTYHECVWAHKSEARVAKESHAFFDGIEGVGHGERASRPCRGGRVLYAVPLRRHTSSLFLFLPAAGQRLGAHCSLHASATLPSDSRPSELAATPSIRAHQCSPSVPPFDPCQPKLASRATPQCAPRGARRLQLVGRPAAARGPRAPRGRPSDHTRQDG

SEQ ID NO: 171046 - protein, 151 aa, Oryza sativa
  unsure (1)..(151): unsure at all Xaa locations
  Clone ID: PAT_MRT4530_69313C.1.pep
SRSWVDAPPSSAAPCFLCPGLFSPSISFHLTPPPPXSPPAGPRGGGGRRQRRRRRGLAARRAASRPGRRRRRRRRPPALAGCGPWRRAGPRXSSGGCPPRRTRSPRPPSTPSRAPTAAAAAPTRSRWRRTSAAAPSAGGAAAAAAAALDCT

SEQ ID NO: 171047 - protein, 83 aa, Oryza sativa
  Clone ID: PAT_MRT4530_69314C.1.pep
MRWQAAELGELGATAVEGVGEDELLAWAKEKRPSVRNAWMIEEVDWGPNQDLLQVFFHLTTSLLVHRRQEIKFYTFWIRIRAS

SEQ ID NO: 171048 - protein, 138 aa, Oryza sativa
  Clone ID: PAT_MRT4530_69315C.1.pep
PMSNQTSRLSTSDTTPQSTPEAANQTRTCVGDGGPLILHRNWTELMLLPASSPQPPPPPAAVPPVVRPCARASVPTYFVAKNIGHRLDVRPNQPQNQPQAVTRQAPHGRKPVDAAAGRRATSRAPPRARPPLQPRQPP

SEQ ID NO: 171049 - protein, 95 aa, Oryza sativa
  unsure (1)..(95): unsure at all Xaa locations
  Clone ID: PAT_MRT4530_69316C.1.pep
KPPKLISAAEGIIFVPPQPPNXLLLMVLYWGGSYLLIVEEFPPGLGFEGAPQGGLKSNKLNNVRPXFIIXVFWGGSLVGGFXVVLYXXPIXXIVG

SEQ ID NO: 171050 - protein, 116 aa, Oryza sativa
  Clone ID: PAT_MRT4530_69317C.1.pep
PATHTTWLAHFIYFSIFSIIRQAAPKQAFGRIHQHVWVALVWAWAVNAPNSSPRGMLAASEPLLLSMRYALAQTPSIGESHGRWQLFPARGLHHQSSGWVLDMQGKHILLLGPSLQ

SEQ ID NO: 171051 - protein, 69 aa, Oryza sativa
  Clone ID: PAT_MRT4530_69318C.1.pep
MADWAPVVVGVVLFVLLSPGLLVELPGTHRHVDFGSFRTNGKAIFVHTLIFFAAFAILTLALHLHIYTG

SEQ ID NO: 171052 - protein, 400 aa, Oryza sativa
  unsure (1)..(400): unsure at all Xaa locations
  Clone ID: PAT_MRT4530_69319C.1.pep
MRPNVITEAGISTRLNQWWGSIPFITSGVILICGAIYLVCLLTGYDSFAEICFLPSVVASRFQVYRFYTSVVFHGSLLHVLFNMLALVPLGTELERIMGSVRLLFLMFLLATTNAIFHLIIAFLAAYNPLYPLHFLVDECSIGFSGVIFSMIVIETSLSGVQTRSVFGLFNVPANWYAWILLVLFQFLASNVSLLGHLCGILSGFAYTYGLFNYLLPGPSFYSSIEGLSVLSVCVRRPGFILCTGGTTYGQLPTFSNTSTAPGALINAGFLRNISSWXLPSRQTTTTQGNTQEQDPRFPGRARTLSSAGTEPTAREASANLHASLLDSTTPSDPLTSSQHPAANTVRADATVAADQVDTFDEELKKLVGMGFEKTQAEVALAAADGDPNVAIEILMSQQG

SEQ ID NO: 171053 - protein, 762 aa, Oryza sativa
  Clone ID: PAT_MRT4530_6931C.1.pep
MASSRLFLAAALLETNWPYIVYLGSHPYGPDASAEEHARATQSHHDLLGSVLGSKQLAKDAILYSYTKNINGFAAHLEEEVATQIARHPDVVTVMASTMLKLHTTRSWDFMDMERDGQILPDSIWKHGRFGQDVIIANLDSGVWPESNSFTDEEVVGEVPKRWKGSCSDTAKYGVSCNKKLIGARYFNKDMLLSNPGAVDGNWSRDTEGHGTHTLSTAGGRFVPRASLFGYANGTAKGGAPRARVAAYKVCWSGECAAADVLAGFEAAIHDGADVISVSFGQDAPVATVASFLQEPVTLGSLHAAMNGVSVVCSAGNSGPLEDTVVNAAPWVTTVAASTVDRDFPNVVTLGNNAHMTGMSLETTTLHSTQLSSMIKASDAALASSDPAVASTCPPGTLDPEKVKNKIVVCVRGGDIPRVTKGMTVLNAGGTGMILANGEMDGDDIVADPHVLPATMITYSEAMSLYKYMDSSKNPVANISPSKTEVGVKNSPSVAAFSSRGPSGTLPCVLKPDIAAPGVDILAAFTEYVSPTEVPNDERRSEYAILSGTSMACPHISGVIGLLKAARPEWSPAAMRSAIMTTARTQDNTGAPMRDHDGREATAFAFGAGNIHPNRAVDPGLVYDLSKEDYFVFLCSMGFNSSDLAKLSAGNFTCPEKVPPMEDLNYPSIVVPALRHTSTVARRLKCVGRPATYRATWRAPYGVNMTVEPAALEFGKDGEVKEFKVTFKSEKDKLGKGYVFGRLVWSDGTHHVRSPVVVNALD

SEQ ID NO: 171054 - protein, 120 aa, Oryza sativa
  Clone ID: PAT_MRT4530_69320C.1.pep
MVISLYLRQEQRRAQIVRVQERYMGLLNGSCLLPPFYNLNVEDHWINSGTISKLTVGRTNLNGIIPYILGWRQMKPGIYLTGINVPSSGDNTLAPAKDECLEALILTGWGEACVRPLVAT

SEQ ID NO: 171055 - protein, 261 aa, Oryza sativa
  Clone ID: PAT_MRT4530_69321C.1.pep
MACPVMEACLDGLVGDGAADPGGWVSDVGVASPLDEVASLGEWATVRAKDVRAVPGEEEATKPSKQPDWLPEEGRQGPPDAVDVHQWDQASLASSFSTTMLPLPATNECYWEIGVRDPQNDGSNDVGRENILEMGGIIEWRRGWAVDITGRWNHGVSFMRTVGEARRSKKGGKVQRHGCQGRDAMGTMGRNVAGMDIACRVVTAAADAGEGVRGSVTTGVGARAVVAVPKLSAGGEGAKRRSLRTVKSASRAASEAHVAAF

SEQ ID NO: 171056 - protein, 403 aa, Oryza sativa
  unsure (1)..(403): unsure at all Xaa locations
  Clone ID: PAT_MRT4530_69322C.1.pep
SLVPFLRSTCTPSLPGYPSVTPGNSLVIXNLFVHKILVQESAEVHKHCTHKTQLHNXVTISSCAHAKHVTICVVVTRPLAYXTHHSAPFLDRSHPLRNDGNDKLTRKTRKKTNKNQINSTHKDHPNDQPKPANGTGSSXGSKLKDDSTRTNERSXGTPRLNERANDSITAATKPDTDRRPTEPKRSERDRXTAVNRRQHTETMTTLGPYKIRLDGIKTLGINYTGNGIGAAVAGERDGRRRDWDGGXFGSTAAMAFRRSSADDRWRTGFSSQLRIQWRRRRPKATTDVDERXAGGTAATAALRFMMTANLRWDSAKNNQRXGIELDFAEPREVAALTGDGRGDGALRLERRPEVEREGERGESVSGDGGGRDLXRRGTGARDQAHIDGKNSGKSRVLAGKRKN

SEQ ID NO: 171057 - protein, 189 aa, Oryza sativa
  Clone ID: PAT_MRT4530_69323C.1.pep
MILFGAPEWLAPSSNWTAPERLAPSPCRRGGAMLSPVHHICPDWHIHFPHEINEGLKVRMRGSILGVLAVHTDTVHPQAPSERGKSLICAILATTRFIAGGGEVEVRNEGRGGVAPNVSSLQITDGAIFVRFQVCRLTQSSLSLRLLGCRRQRDPLPSSLPLLAETLAPALASPSQVTTAVDEDFHPDS

SEQ ID NO: 171058 - protein, 190 aa, Oryza sativa
  unsure (1)..(190): unsure at all Xaa locations
  Clone ID: PAT_MRT4530_69324C.1.pep
ARGDCGRPTVHRDLKPSNILLDDDXNALIADFGIARLCIESGQKTGLVSSIGGTIGYIAPEYAGGGHASTSGDVYSFGVILLEMLTGKRPTDPMFGNGLDIVKFVETNLSHQILHVIDPCLIDEREEFARAKPESENMVHQCFVSLLQLGLLCTRPVPSERMNMKQIASKLHDIKSSYIGLKASNKSPLE

SEQ ID NO: 171059 - protein, 52 aa, Oryza sativa
  Clone ID: PAT_MRT4530_69325C.1.pep
DGCSRRRVPLIRQEAVAGAHRTRTSRPSFEAYGENLDMPDHQLLGDCEVTEG

SEQ ID NO: 171060 - protein, 521 aa, Oryza sativa
  Clone ID: PAT_MRT4530_69326C.1.pep
MPALSSTMTEGRIVSMASLASLSLPVSTASQGRARGAGPVTAAPRRRRVSVVRAKVREIFMPALSSTMTEGRIVSWTAAEGDRVAKGDPVVVVESDKADMDVETFYDGIVAVVLVPAGESAPVGAPIALLAESEEEVAVAQARAQALPRGPGQEPPPPHVPKAAPPPPPPPPPHAPPGPPPTKGVATPHAKKLAKQHRVDISMVVGTGPHGRVTGADVEAAAGIKPKLKGPKGAPPPPPPPPPSPHRHPAAHPPPPPHHPAPRPPPPMAAAPRQPAALPPVPGATVVPFTTMQAAVSRNMMESLSVPTFRVGYAVCTDKLDALCEKVKSKGVTKTLLLVKAAAMALTQHPVVNASCRDGKSFSYNSSINIAVAVAIEGGLLTPVLEDVDKLDVYLLAQKWRGLLKKARMKQLQPDEYSSGTFTLSNLGMFGVDRFDAILPPGQGAIMAVGGSRPTLVANKDGFFSIKNEMLIYACEVSVLCLSQPFQVNVTADHRIIYGADLAAFLQTFAKIIEDPESLTL

SEQ ID NO: 171061 - protein, 219 aa, Oryza sativa
  Clone ID: PAT_MRT4530_69327C.1.pep
MAGLGFDETELRLGLPGAGELAARSSGKRGFAETIDLKLKLQPAAPAAVSGEEGAQEDKEDADAAAAAADEKMSMKRSASQSSVVTAEPDPDKPRAPKAQVVGWPPVRSFRKNVLAEKCKAAALVKVSMDGAPYLRKIDVAMYKSYPELSMAFQNMFTSFTIGKCGSHQQLKESNKLRDDLEYVPTYEDKDGDWMLVGDVPWDTKGSGEMQELKLIKEN

SEQ ID NO: 171062 - protein, 85 aa, Oryza sativa
  Clone ID: PAT_MRT4530_69328C.1.pep
IRQAHFNLNPNMVQAGGSITPPLELDRANLKWMGYKTTGSQLTWAGIGLNFGGTETLGGGIPGGTIFKLAQKGAAKPWIEKIRAP

SEQ ID NO: 171063 - protein, 57 aa, Oryza sativa
  Clone ID: PAT_MRT4530_69329C.1.pep
SEQGKGCRALRRMDASRRRRRAASAALHLAVIRRRRPYEGDYNTNAACCKLKNGFLT

SEQ ID NO: 171064 - protein, 163 aa, Oryza sativa
  Clone ID: PAT_MRT4530_6932C.1.pep
MAYLEVVVGEGGEGGGEREGKEKPAEGMGRPASACSSAAPSLLNPRPPVRSASIRAAGSSPAALGLIRACHVRPLHGHHRRRYWEWGLAMGRRGAVWGCRPGKGKRGVGRGSGEERHRLGAPAEEGEEKRWPGKRRMPGEEKERRQREGKRDLELVALAYVAH

SEQ ID NO: 171065 - protein, 167 aa, Oryza sativa
  Clone ID: PAT_MRT4530_69330C.1.pep
MARPLGPEIFILKRTHYLLDFFWGSFDRLVASLRISLGKLELGIRLSGVWTGCSEDNIREMAKAVENQRWTTDIGRRQGNRATKMEKDDGETLEERASYLHLLGLRRHGQYSISAVRATVDRERTVVPSARLWRSRKGGGGSGMASLVNGSACGGEKKNKECVGVNE

SEQ ID NO: 171066 - protein, 102 aa, Oryza sativa
  Clone ID: PAT_MRT4530_69331C.1.pep
LFFTTPSQALALVPGAVDSRVGGGGGGSARVSFPLGRVQRLGALGMRLRALVVIDKETPESEPPPTLLRKDRSGAASGSARERFEAIIRRVHGEVCAALEEV

SEQ ID NO: 171067 - protein, 100 aa, Oryza sativa
  unsure (1)..(100): unsure at all Xaa locations
  Clone ID: PAT_MRT4530_69332C.1.pep
PCFRRRTPSLPRRRQNRGLPWLSPLLPHSTATPTRDRAVVAPGRSHXPPPHSTAAPRRSRGRPQSPPPSIAVPAGAKVVPSRHYRRERVRLREAALVIGH

SEQ ID NO: 171068 - protein, 158 aa, Oryza sativa
  Clone ID: PAT_MRT4530_69333C.1.pep
MEEAAVVTSSSATSGEEGGHLPQGWVKRKRSRRQRSEENLALCLLMLARGGHHRVQAPPPLSTTGPAPQCAWFYLVTVMFENNLAHPRKALPQVARKGTILESAIFRVDLAEYELTPSTLDYDGKNFTQVYAYYHGGIKGFNGSEQKPDSGSIVASIP

SEQ ID NO: 171069 - protein, 52 aa, Oryza sativa
  Clone ID: PAT_MRT4530_69334C.1.pep
PQLMAPGTNINFSDNLAYKRTEHQYYKQPTTQLSMILDDPKGKSRIQPPTRL

SEQ ID NO: 171070 - protein, 45 aa, Oryza sativa
  Clone ID: PAT_MRT4530_69335C.1.pep
MYTSRSQVISDGIAISLLRCSALSGNSGASVLIVTLSPSLSPRFI

SEQ ID NO: 171071 - protein, 112 aa, Oryza sativa
  Clone ID: PAT_MRT4530_69336C.1.pep
MSGNCSWHELFESTYTGGETMFAALFSPRFRAVRWGLGAAKDSELGGAAAAVEQCGHVWRQVCVPAWETLREETRPAGFPPAMGVSAVVRPSVLFAALAKWQVSEVASEKGK

SEQ ID NO: 171072 - protein, 101 aa, Oryza sativa
  Clone ID: PAT_MRT4530_69337C.1.pep
EQTIYTRSDIFVTGCLWQGKNSSILTKLTAAFYGSISLQSQISYSLRKSHVFAVMPTGIRHLSRTCRLGSIIHLANILLKAEVHEQGTPSCIRLQREVKLL

SEQ ID NO: 171073 - protein, 82 aa, Oryza sativa
  Clone ID: PAT_MRT4530_69338C.1.pep
YATETIQYTELPPPPPLPPPPPPPPPPPPPLPPNMPPPLPPPPPPPPPPPPPPQPQPPAPPPNPPSRQSLRSTLINPGDDYT

SEQ ID NO: 171074 - protein, 234 aa, Oryza sativa
  Clone ID: PAT_MRT4530_69339C.1.pep
MWCGIWICRRAKTERSPPSADKQIVVRRGPTCSVPGPRPIAHSIPPPRGPPTAPTEPKLNQKTLLRAGLDRKRTRAQLIRRMSIRRGVNINPHHHVPSIRYACLTKRSREHSILYYLHVVLSNTICKNHTTQTPTNYDWYSAVSLLQEELRPTVDLGPTEKRCVQLRKKSTFTLSIIGWILLIFLNRKSESNKELPMAATVVIETHRTQAHPPRPREGSKRRWQPLSRTCDDRL

SEQ ID NO: 171075 - protein, 604 aa, Oryza sativa
  unsure (1)..(604): unsure at all Xaa locations
  Clone ID: PAT_MRT4530_6933C.1.pep
MAEKPPASPSSAGELGSVKAKVHKLGLSEVDEANIVLVTMDKLTPEQQKDLEVMMQQARNQFLSSFTKTRKGTLVQKYKVKVIADVPGTGSSKVGEVKQAPDDAAQPSIKGAADDFQGDQGDGSQEIQGDGVQGVQGGGLNHDGNAAQLQFNNFQDQVDYAVHYALINQSRILVNTLSNMVKTMVDXAAPVSAPAPAAPSSAPXSSLGLSRKTLETYIGNLPLNGLRKSLYLTGSRFQTFQNSQGRIGMIAPIKEKFSSQDFDSLSHLGQKVTLHEQRFAEVRKNFKKVNHVCPYIYGSDDDDDDDSEIEWVRSKKVIPCQWVKNSGKVERYDFDITKADKIFDLLLREKQIQLPAGHTIPSAEELGKRLPSIEDCPGCEQAVFEKPEGTENRHLKPLKLGRNTEDLIKTNMVLKDFGGNPSETKGVLNVELTVGSKTIPTTFFVIDGKGSYSLLLGMDWIHANCCIPSTMHQCLIQWQGDKIEIVPADRKYGLKMNPTKCAFGVSAGQFLGFLVHERGIEITQRSVNAIKKIQSPKNKTELQEMIGKINFVRRLRALAKVTKDKERVARHYNKRVVPKAFSEELCLRELTCCKDSMEKFMDEH

SEQ ID NO: 171076 - protein, 130 aa, Oryza sativa
  unsure (1)..(130): unsure at all Xaa locations
  Clone ID: PAT_MRT4530_69340C.1.pep
EEEKQEQWAREARGAYGQGRPCRAPTGKIAGVNDPNITERKGPHWPKHETEHGQWKHKGGKXRRTKTLLFGEKVATATGCRNPEENPWGETGAEYAVETTGVFTDKDKDRANLKGGAKKDVITAPSKDAP

SEQ ID NO: 171077 - protein, 254 aa, Oryza sativa
  Clone ID: PAT_MRT4530_69341C.1.pep
MGKIFHATHTFFWIASAVNHCLAVKAAGVSVWADARCDATIELAAPADVVLLILNAVAARREAKAEAEADAQIREAAGAAARNVVPDPGDLQQPLVTLALPASTPSPRPERLRLRGSDAVLMFVVAFIYVCCAVLIVVGELLPVVGDLIPVDCQRQCQVQRRCLAWFFKNIGYLWLAVGHCCLIIPYAVLRLRRLARKKVASFFVSVPCMVHPQSSQIGFANPADNYVAKYVHHVLVLELNVACWMYGYSLILN

SEQ ID NO: 171078 - protein, 140 aa, Oryza sativa
  Clone ID: PAT_MRT4530_69342C.1.pep
MGGGFGGGWRGRGRPEPEEMETVDSSVTTDKDEPTTTTTAADEFDPWNPPLPPPPDNPDSAMCYTPSVLLESLFFTGFPTCMHFVFQYADVTEDILTESRLTNIITPERTPKVLGSLHLSHHFHLVGGLGLLLVILQCHG

SEQ ID NO: 171079 - protein, 830 aa, Oryza sativa
  Clone ID: PAT_MRT4530_69343C.1.pep
MPPSAGLATESLPAATCPAKKDAYAAAASPESETKLAAGDERAPLVRTTRISTTTIKLYRLTIFVRIAIFVLFFKWRITYAARAISSTDAGGIGMSKAATFWTASIAGELWFAFMWVLDQLPKTMPVRRAVDVTALNDDTLLPAMDVFVTTADPDKEPPLATANTVLSILAAGYPAGKVTCYVSDDAGAEVTRGAVVEAARFAALWVPFCRKHGVEPRNPEAYFNGGEGGGGGGKARVVARGSYKGRAWPELVRDRRRVRREYEEMRLRIDALQAADARRRRCGAADDHAGVVQVLIDSAGSAPQLGVADGSKLIDLASVDVRLPALVYVCREKRRGRAHHRKAGAMNALLRASAVLSNAPFILNLDCDHYVNNSQALRAGICFMIERRGGGAEDAGDVAFVQFPQRFDGVDPGDRYANHNRVFFDCTELGLDGLQGPIYVGTGCLFRRVALYGVDPPRWRSPGGGVAADPAKFGESAPFLASVRAEQSHSRDDGDAIAEASALVSCAYEDGTAWGRDVGWVYGTVTEDVATGFCMHRRGWRSAYYAAAPDAFRGTAPINLADRLHQVLRWAAGSLEIFFSRNNALLAGGRRRLHPLQRAAYLNTTVYPFTSLFLMAYCLFPAIPLIAGGGGWNAAPTPTYVAFLAALMVTLAAVAVLETRWSGIALGEWWRNEQFWMVSATSAYLAAVAQVALKVATGKEISFKLTSKHLASSATPVAGKDRQYAELYAVRWTALMAPTAAALAVNVASMAAAGGGGRWWWWDAPSAAAAAAAALPVAFNVWVVVHLYPFALGLMGRRSKAVRPILFLFAVVAYLAVRFLCLLLQFHTA

SEQ ID NO: 171080 - protein, 98 aa, Oryza sativa
  Clone ID: PAT_MRT4530_69344C.1.pep
MLRSEGCDGKSGKPFKTKVKCLKCRGEDCEQMHNPYGPGPKEYIATGVGKDVGFDLEEAKETKESDVTYVKINMHMGVTMKWKRLALQMIIRVDLEKF

SEQ ID NO: 171081 - protein, 187 aa, Oryza sativa
  Clone ID: PAT_MRT4530_69345C.1.pep
TSEPRDRLLGRSIDHSVGSIIWSRGAGRDRRCRDLNFLIAALSTRLHPSSLAGRGDDAVLPPQPQPPPPRPRRPAPDGGPRPALRVGDEKVPRALGPASAGARRRRRRRRRAGHLVQRGPDAALGVVEVEGGGVREHAEQAPRHGRLQVLHRHHALHHHHLRLHGRGAAASLGLCLRRTIHLGLEAY

SEQ ID NO: 171082 - protein, 185 aa, Oryza sativa
  Clone ID: PAT_MRT4530_69346C.1.pep
FFFFFVSCHTVRGGGTCNSITINIMQPHPVQSLSPVLLQSLSTSQHSPSPAGAISRLSIHSSHHSFIIQQCHLPPVRGASIIAHTGTSGALPIIHHMFIFLSSTIIIISISSPPKSKTPSSPNFAPAFQGGPRAAYVVHTLSGLATQGQRLSTAWHTLSMHLTCKLQQDPTLRTPKQGAAVPPAR

SEQ ID NO: 171083 - protein, 172 aa, Oryza sativa
  unsure (1)..(172): unsure at all Xaa locations
  Clone ID: PAT_MRT4530_69347C.1.pep
HSVGSIIWSRGAGRDRRCRDLNFLIAALSTRLHPSXLKNPTSRSLVEXAVLPPQPQPPPPRPRRPAPDGGPRPALRVGDEKVPRALGPASAGARRRRRRRRRAGHLVQRGPDAALGVVEVEGGGVREHAEQAPRHGRLQVLHRHHALHHHHLRLHGRGAAASLGLCLRRTIH

SEQ ID NO: 171084 - protein, 91 aa, Oryza sativa
  unsure (1)..(91): unsure at all Xaa locations
  Clone ID: PAT_MRT4530_69348C.1.pep
KKNKKKKNKKKEKMKIKKKKIYRKFKKYTRTKKEKKRSKDKRYKKKRGEIXKKKKKKENSRGKRXEKECKKKKNRRKKRKIKIKLNKKKEK

SEQ ID NO: 171085 - protein, 70 aa, Oryza sativa
  unsure (1)..(70): unsure at all Xaa locations
  Clone ID: PAT_MRT4530_69349C.1.pep
TPTSWKIFNDHPWEPPKLNFFFFPCGNSITLFILVQKIATQKFEKKTKRSLFFXFPWFRNSAGLKIQGIK

SEQ ID NO: 171086 - protein, 49 aa, Oryza sativa
  Clone ID: PAT_MRT4530_6934C.1.pep
RIFDNMQKPAFVFDGRNVVDPEKLREIGFIVYSIGKPLDAWLKDMPAVA

SEQ ID NO: 171087 - protein, 239 aa, Oryza sativa
  Clone ID: PAT_MRT4530_69350C.1.pep
MEQFFCFGAYVNGIASTFQIAYRKISYRKFGQGHTYEVSSDTYKVSDDSYHVLGDTSEVSGVGHQSIVAGGPIVHVSRWSLSAAAASSTVHATSELGGDDCCILHSPRHVGARHRRLRPPSSTSHVGASCRWPHPPPYMPRQNSSPAAASSVIYAPRRSSSATAASSIVHTTSELVAGGRVLLSLRLSTPTIAPSPAIATTHVHQLRLQARTAPQRGTSLRFSNDGQAPRAAAVISWCE

SEQ ID NO: 171088 - protein, 75 aa, Oryza sativa
  unsure (1)..(75): unsure at all Xaa locations
  Clone ID: PAT_MRT4530_69351C.1.pep
LIIYVVMEXYASNPAVTSSTKLVATHYHVGEAMQPGPHIPVTQLPRPVTVGELLAFFLSFSLPLCLPSKHCLSAY

SEQ ID NO: 171089 - protein, 79 aa, Oryza sativa
  Clone ID: PAT_MRT4530_69352C.1.pep
WWRAEGGAYQGRPGDGGSTRGQDEGGLLSRRWPGQAVAASTPSSRPRAASSYQGHCKLLASRARRRCTLRQAASTWLGC

SEQ ID NO: 171090 - protein, 92 aa, Oryza sativa
  unsure (1)..(92): unsure at all Xaa locations
  Clone ID: PAT_MRT4530_69353C.1.pep
MGNCWFRGSLIVNRVSSNAKHETPKIQSPSERDRSDESKLPSNAKEVEAMRLDSSPRNPLVAFSFEXELRAVTSNFRQDSLIGGRRLRPRLT

SEQ ID NO: 171091 - protein, 72 aa, Oryza sativa
  Clone ID: PAT_MRT4530_69354C.1.pep
TGRMVLPSGGDVGWWGDARWPVTAGGPRKEGVSNRVDDGREDAGGRPAEFVRRLRVVPYGSGRRRTPVESTV

SEQ ID NO: 171092 - protein, 129 aa, Oryza sativa
  Clone ID: PAT_MRT4530_69355C.1.pep
MVPAARSGWPAAAAVLVVVLVLSSPPGTSTVVVARAALSCSTVYNTLLPCLPYVQSGGAVPAACCGGIRSVVAAARTTADRRAACTCLKNVAAGAAGGPYISRAAGLPGRCGVSVPFKISPNVNCNAVN

SEQ ID NO: 171093 - protein, 130 aa, Oryza sativa
  Clone ID: PAT_MRT4530_69356C.1.pep
KGGKMDSLDMFQVKNMVLLEICTQGLISVAHCPALSCCHPCCQCGAGQFNLGMNCLALQIGNCCLLKNILIVYDSCKGQRFVVLNLLPKSSEGEFFFFLNSGYGAEFPQISGFYLGLVFFNPARQTMFLN

SEQ ID NO: 171094 - protein, 2451 aa, Oryza sativa
  unsure (1)..(2451): unsure at all Xaa locations
  Clone ID: PAT_MRT4530_69357C.1.pep
MAASEREAALLARVAANHLYLGQFEALRAALLSLRRRADPGLAAGFLRAVVAAGGRVPGVLWSAPPACPSPSHLAWLTALELAALPSTPNPEALRLKAEFLVLLQHVADDPAATGAEARGTLSRLLDLGVARLKREVEGGGEAGVGSSSTIQRGCNXIWSLKSSVQLNEGVLLTLLLSVLXLALDSGLGTDVLLWLRRSVQLAHLDAMKSLVAAGDLEGATGHLRFLCLDHGVEEDEYNLRIALGDLVRRGWPKPSNYGGTWFESHDRIIKMFGSALQSSTPQLVQLIQLILDDILSEEIEDHGASDANWMPLPFKKFMETLSLERGAYLDDKTMLNRAITSCKKDLYHYSRISGKHVLEVVMETVLSLIKREQLQEAANAISMFPLLQPLVAVLGWDILKGSMHKKLVNDCDSFYWQTSCEEYLCDLLCFHLDVACFVSSVNSGRQWNLRNSLLFTQQEQDSDVNSTEILDPFVENLILERLAVQTPIRVLFDVVPGIKFQDAIELVGMQPLSSTTAIWKRMHDIELMHMRYALQSAALSLGEMEKSAIDGNEHHYQIALSYLREMQSFMEAIKSTPRKIYMVSIVLSLLHMDDSIKLSEVAPSECSVSHECFDSNVESEEKNMVTSFVGLLLDILRHNLMLDMDNQSSMGLSPAGRQALEWRFKHAKHSIEDLDWRLSVLQRLPPLSERQWSWKEALVLLRAAPSKLLNVCMQRANYDIGEEAVQRFSLPAEDKASLELAEWVAGAYRIALVEDAVNRATDNSNATQELDILSFRAQLGPLTTILLCIDVAATSARSGDMCRFLLDEATSLLSEIFPGSSPKVGPNYWDQIQEVALISVIKRILQRLRDILDLEGYPYLQLVFTEMNASSSTESSRVGQKQRPLGLLHQMIDDAFKGKRQFLNGNFFYFIRLSGKLHNVARAIVDEDSDGTYSKESIKIEKRDILSSEKGIILGHGLRILKQASRTDQTASTVVENNAEHKGSTSRYLGPVSTKPSTYLSNFIIYIATIGDIVDGTDTTHDFNYFSLVYERPKDLLTRLVFERGSTDAAAKVADTMGVDFVHEIISACVPPVFPPRTGQGWACIPLLPTLSKINSENRSQSAQGWSAHDSSLSSRQEPLYPLQLNLVKHLAQLSSVRAVLACVFGSSILSGDSELCSNVKDAKQAPEIKRSFYEFALEQSERYPTLNRWIQMQCNLHRVSESAVSAETDNEVTLHQPKGKFSSKRAREPDSDAESEIEDIVISGKSTSNSLESPKCDEAKLEPTTFISFDWDNEGPYEKAVERLINEGKLTDALALSDRCLRNGASDKLLQLLIEQREEISLGARQSRAYGSHNFGSDTWQYCLRLRDKKLAAQLALKYLHNWDLDAAANVLTLCICHLPENDPMWSEVLRMKQSLQRYGHIMTADDHYTRWQEVEVDCEDDPEGLALRLAAKGAVSAALEVAESASLSIDLRRELQGRQLVKLLTTDPLNGGGPAAASRFLSTLRDSNDALPVAIGAMKLLPDLRSKQLLVHFFLKRTVGNLSDDDVARLNSWALGLRVLSLLPLPSQQRCSSLHEHPQLILEVLLMMKQLQSASLILKEFPSLRDDKLIVTYAKKAISINVNSTPREPRLTISGSRAKQKKVAAPAKTNFVQSFGNFQREARKAFSWVPRDSGTKTPPKDILRKRKSSGSGGERSSWEATPSVQEERAPEYPSEGQERLPFVSAPEEWVLTGDPDKDNATRACHRYESSPDITLFKHILFSTVCPGRDFQIIQETRTCNAQALLSLCTNDSIAGKGALEICITQMRDVLSSLQLPLNASMDNIARAYHATETYVQALSYAKNLLKKLVGTSDLSSSSERSRDVDDISVDTGSSSAGSQNIDGLSDLLPLADLWLGRAELLQSLLGSGIIASLDDFADKESSTNLRDRLVSDERYSMAVYTCKKCKIDAFPVWVAWGHALVRMEHYSQARVKFKYGKLCLQALQQYKGDATHFVLEIISTIEGGPPVDVSSVRSMYEHLAKSAATIFDDSLSADAYLNVLYMPSTFPRSERSRQSKGPMDSQFESVGSYLEDGPRSNLDGIRYAECIHYLQEYARPEMLAFMFRHGHYAEACSLFFPSNQPTDEGETSLSSIPRNDPLTTDYGTIDDLCDLCLGYGAMTVLENTILTITQSPTYQGSAMTQYMNAILTRICNYCETHRHFNYLYNFLVLKGDHVASGLCCIQLYVNSMSQEEALKHLGHAKSHFEEALSVRDRTTEATKLVRRTARNKSASEKMTREMIMKFSTRVSYQMDVVKALNSVDGPQWKTSLFGNPTDAETLRRRCMVVETLAEKHFDLAFRMLHEFDLPAVDIYAGVAASLAERKKGGQLTEFLKNIRGTIDDDEWDQVLGAAINVYANKHKERPDRLIDMLLSNHRKVLACVVCGRLKSAFQIASRSGSVADVQYVAHQALHANALPVLDMCKQWLAQYM

SEQ ID NO: 171095 - protein, 54 aa, Oryza sativa
  Clone ID: PAT_MRT4530_69358C.1.pep
ALVRVEGSVVEQLFSILNLEKEKVELKDNEQSESMRNVLDGIGRDILRNVYRLY

SEQ ID NO: 171096 - protein, 296 aa, Oryza sativa
  unsure (1)..(296): unsure at all Xaa locations
  Clone ID: PAT_MRT4530_69359C.1.pep
SSSPTTSPPTGRRSSVPSGMAGAGSAAIRRAQAYYYIFHKGHPSPATLIVPIPLYSATPNSRLLTPTSNSKLLLQWELIPNGVGDSLRSVWLVFSSRSEKKLKKQXKLKKKLKEKKKPXAGSPITWRRPPPPMRCLPPPPASSPPAAARRLATANTAGQPXTRAPPPRPPPRQPTPSPRSLSXPPLSWPKLPAAAAAAHRRSYWTREEDGGGERTGGEDVGRDSSVAFLHNYTKKLKGNGSFGVEWSSKNXLHPRSTILWSSSANSAPKNGGSRLFGTTPAPGKLGTGAVPNGALY

SEQ ID NO: 171097 - protein, 78 aa, Oryza sativa
  Clone ID: PAT_MRT4530_6935C.1.pep
MASTRLGLAGSMDIELAELKQRCAPAAGWPARNCLAEERRWTMAASAMKDNTDVQLRVDGRRLADGHAARAGDEVHQP

SEQ ID NO: 171098 - protein, 457 aa, Oryza sativa
  Clone ID: PAT_MRT4530_69360C.1.pep
MAFLAGLAALLAALLAAAFRRIRRHPHPAPAAGFFHPYTNDGGGGERVLWCAVRAAQELRPGLPCAVFTGDADASPDGLAARALDRFGVRLLRPPQVVHLNRRKWIEASTYPHFTMIGQSLGSVYLAWEALNKFTPQFYFDTSGYAFTYPLARLFGCKVICYTHYPTISSDMVERVKQRSSMYNNDSRIAGSIWLSRCKILYYSIFSWLYGLVGSCAHLVMVNSSWTRSHIENIWRIPERTRRVYPPCDTSALQMLPLERSTTPPILISVAQFRPEKAHGLQLEAFAIALKKLSPEFPKPKLQFVGSCRNKEDLERLQKLKDRSTELHIDELVEFHKDISYRDLVQLLGGAVAGLHSMTDEHFGISVVEYMAAGAIPIAHKSAGPMMDIVLDEDGQQTGFLASEKEEYAEAIVKVLRMPEAERHEMATAARKRAQRFSEHRFHEDFTDAVRPILSAT

SEQ ID NO: 171099 - protein, 59 aa, Oryza sativa
  Clone ID: PAT_MRT4530_69361C.1.pep
MAPIRLSGSAQLFGEASGRHNGPLGLLSVRFGHGFRHVAFAHMVAFSAFVARLRLESFT

SEQ ID NO: 171100 - protein, 400 aa, Oryza sativa
  Clone ID: PAT_MRT4530_69362C.1.pep
PFLSISASKPSPRWAGSPRPPPQLTTAPSPRAPRPAEDLLAASAGCGGAHGHSLFFDALVQLIPPRFYLSAADEHRPWYQGLSKSAKAAMKAQSRANVKAARRARLDPSAPPSSTLDLLKKSLADQDAHDSSSSSGEDASDDDDDDDDDEVEEREEDEGDEEGMQLAPAAVVSEDRSVTYEELRERLHRRIAELRGNRCTRPEFLNKPKREKGKKGKKGKDVGKKRKREDGGGGGGAQDGEGKDGKKSKKEEDSKAPDIVYGNVWVDPKEARRRKKRRIKNKKKALEEAKRMQQAKEDPEKATKLAWDLARRRAAGEKVHDDPKLIKESMKKDKKRQQKHAEQWKERQKMVDKQKKERQSKRTENIRERANQKKMRKIEKREKKLMRPGFEGRKEGYVNE

SEQ ID NO: 171101 - protein, 92 aa, Oryza sativa
  unsure (1)..(92): unsure at all Xaa locations
  Clone ID: PAT_MRT4530_69363C.1.pep
FLWSDFVELIHFPMFFNFTFSYCSFALLMSTASSIYFFSETSENSANPSRNVSKLDCKSVVWEXSGGSLTFHHLTFHSEKMREMALVLLERD

SEQ ID NO: 171102 - protein, 698 aa, Oryza sativa
  Clone ID: PAT_MRT4530_69364C.1.pep
MPIEMPRRLPFAVDTWGPSSRRRRHRFLTHAHRDHLVAAGGAADSGECPGAVYATRLTLDLALRHFPRLERGEFVEMEVGKTVVVDDPAGAFSVTAYDANHCPGAVMFLFEGQFGSILHTGDCRLTPDCVHNLPLKYIAKKGKENICRLDFVFLDCTFSKCFLKLPSKESAIQQVIACIWKHPHAPFVYLACDLLGHEEILIEVSRTFGSKIYVDKRRNSDCFRALSLIAPEIITEDPSCRFQILGFQNLYDKACTKIEEARASLQPEPLFIRPSTQWYAHCAQSQKPSLTEAVLDGCGVWHICFSIHSSRDELEQALELLQPQWVISTTPPCFAMELSYVKKKCFKTCLTADDPLWKIFKNPLRKSVSSPSTLLDSDTHTNEDHSISVDDDHDHSASPSGEECTDFDICTLELKFMPSPPVQEPDITLFGRARFGSEEIDIMREELCNQRIAVEEARAYSTAYLICDGSSEVETCPNSRTDFVIVQASKSQQSYSGYEDEDPSCQCAASPRQLESRSILSLPIGECSLSPVVDNPKKSEVVIESESTNHAESSNLCMVRRGYSGSEDDCQRAASPRQLEKLSIRSSPIGECSLSPVADKPEKSEVVIESESTNLAESSNLCMVRGEETTDCERGTLCVTGSSKCLNASLKRLYRSRNVPVPRPLPSLVGLLESTKRMKTQPGSDGSSLNSWHTLPSR

SEQ ID NO: 171103 - protein, 120 aa, Oryza sativa
  Clone ID: PAT_MRT4530_69365C.1.pep
CPQPSSGEPARATPTAQTAALLAAAAGLLLLASGALPVARCDPGGDGDGTAYDELGCRRLPLDLLPANVRGHTLDSGSGDFAEDPGSRCRVALPRASLVGYPRARLTGRVADPGLFWRAP

SEQ ID NO: 171104 - protein, 78 aa, Oryza sativa
  unsure (1)..(78): unsure at all Xaa locations
  Clone ID: PAT_MRT4530_69366C.1.pep
MGNCMDTTARVDHSMNNGAXSELPTPRTEGEILSSSNLKAFSFNDLRNATKNFRPDSXLLGEGGFGHVYKGWFVEHTL

SEQ ID NO: 171105 - protein, 477 aa, Oryza sativa
  unsure (1)..(477): unsure at all Xaa locations
  Clone ID: PAT_MRT4530_69367C.1.pep
MQQRTLSPTVSLGKEDLAMSIKVGSMSKLSLLHGRRVVWWWAVRGEGARGRAGEMGNCMDTTARVXDHSMNNGAYPSKVTSKTSLSSVPSTLKSNSSCSTLTLPSMKDRSELPTPRTEGEILSSSNLKAFSFNDLRNATKNFRPDSLLGEGGFGHVYKGWIDEHTLAPSKPGSGMVVAVKKLKPEGFQGHKEWLTEVNYLGQLHHKNLVKLIGYCSDGDNRLLVYEFMPKGSLENHLFRRGADPLSWAIRLKVAIGAARGLSFLHDAENQVIYRDFKASNILLDSEFNSKLSDFGLAKAGPTGDKTHVSTQVMGTHGYAAPEYIATGRLSAKADVYSFGVVLLELLTGRRALDKSKPGIEQNLVDWAKPHLGDKRRLYRVMDTKLGGQYPKKGAHAIANIALQCICNDAKMRPRMSEVLEELEQLQDSKYNMASPQVDIRRTSNAVPKSPMRIQPSPRRSLGAAASPLPGYRTAKVH

SEQ ID NO: 171106 - protein, 87 aa, Oryza sativa
  Clone ID: PAT_MRT4530_69368C.1.pep
KIKVAGKFFYPPIQTRDTLLCSLHMGFQKKKKKKTGFPILFEKMYGGLLASGYKSNARQESHSISKGHTGGGSPPCSGPSGSKTGAA

SEQ ID NO: 171107 - protein, 57 aa, Oryza sativa
  Clone ID: PAT_MRT4530_69369C.1.pep
KCWSETRGGTGGRRRVFKKKKKKKKKKKWEKKGKKKKKKTPKKKKKKKKPTRPVIDR

SEQ ID NO: 171108 - protein, 319 aa, Oryza sativa
  Clone ID: PAT_MRT4530_6936C.1.pep
MEERDWSSLPSDVLAVILERLRWSSHPSFALTCRHWRSAVSPFYPAWITPLLLSTAHVGVTNIRYYSPYYHKNFEVGGKDGDHAGAKICCAAGRHLTLDSPSAVLDVELVTGNINKVPHIYRGNFDFVIYDDRAHRIFGIDAVLPLKIGYANWNSDDGVWEDWTLMELGINGPRLLPSPVTNPVIHCGLIYLLNDQGGLVMYDPCKHDEGFEFLDNPTSFGFKHYNSYLVESDQHELMAVLLGRRGTLNHVIKLNEKKMEWEKVESLQGRTLFTGTLTSMVKKTKFKWMEDRVFLPVFYKWPDTIHADLISRDDELAFV

SEQ ID NO: 171109 - protein, 130 aa, Oryza sativa
  Clone ID: PAT_MRT4530_69370C.1.pep
MSNEKSESASEYATRRRDSGRSSGRGKSSPQRRTQSDEPMRVSATADEAAAHSAVASSGVLDRQDRAGERGDRRCHGSEDGSMDEVSRCLQQRERAAMVAYLDFGSHLAHDVSGIWWWQNAGGRRLEAWN

SEQ ID NO: 171110 - protein, 83 aa, Oryza sativa
  Clone ID: PAT_MRT4530_69371C.1.pep
CGSVVDWGWETTDGVRRGAAALWEAAARPEVACLAGGEQLETEERARGSASRWEWLCGGRRGGWSGCRGGAWHGGGSAARRRP

SEQ ID NO: 171111 - protein, 106 aa, Oryza sativa
  Clone ID: PAT_MRT4530_69372C.1.pep
MARSSRRNTHVGRAEGGRGGRVHELKRRRTGRLPRSQEVCGGGVSTTDDGGVWRERGTERERRIGELKKGQLQRGGGVVDLWCEKWRNVWSVRFLWWYRTTELKRF

SEQ ID NO: 171112 - protein, 140 aa, Oryza sativa
  Clone ID: PAT_MRT4530_69373C.1.pep
MAPQLEPLVIESGAGKLVLHLMDAFHAEVLALRAGVEAAARRGMMRVQFETDSLTLVQGLKSSNGYRLAATGGLCLDILQPCVISFNVFSFHYCPRNCNRVAHALAALGCNNSQTTDVRWDGSPPDVEDLVAGDLAEPVV

SEQ ID NO: 171113 - protein, 99 aa, Oryza sativa
  unsure (1)..(99): unsure at all Xaa locations
  Clone ID: PAT_MRT4530_69374C.1.pep
NLAKTCAELFFAXMRPGKHYTKIDGCFCRKVKIDCQEETTNRTNMAXTAEVRXTKSGDELTSLNGCEARMNEGHSESYSSTGASKKDDENFPLPEKVIK

SEQ ID NO: 171114 - protein, 129 aa, Oryza sativa
  unsure (1)..(129): unsure at all Xaa locations
  Clone ID: PAT_MRT4530_69375C.1.pep
KVRITPXNYRGRMNYPXEPQNRTFFIPNYTNRTNYSPRPNLRWFWSTXRTCGSPPHSSHSSSLSHGREGRGQRLRXWPRRGGGGGERWPARLAASGGVRGPSTDNDXRGGGGIRGELLRRGGEGAVTIE

SEQ ID NO: 171115 - protein, 840 aa, Oryza sativa
  unsure (1)..(840): unsure at all Xaa locations
  Clone ID: PAT_MRT4530_69376C.1.pep
MLRRAASNAYSWWWASHIRTTQSKWLDNNVQEMEIRVKAMIKLIDIEADTFARKADLYFKSRPDLINHVEXTYRSYQALADRYDRVSGELHKSNHTIATAFPEQVQLSLQDDNGDGFPKGITGININRGTSAAPKRTQTHKKISSKMSKDKAQEEIERLQKKILVLQTEKEFFKSSYESSLNKYLSIERQAAEMQEEVWSLQETFSTSAVIEDNEARALMAAQALISCEDKLASLHCEQKRSYEETTMEIQRVIDAKKKITIFKSECGYPDDQKDLPNHQDIEFSSIPSSIEDSDLIMKDCKLELQELSQKVKQKFESSSEASAVHLAGQVDEIVDKVISLEIAASSQNAQINRMKNEADELQKRLDSLEDEKAALIEDSSKLSERLKQVEEVLQTIQRIGKSVHSENGNIHQQLTEVDDSLNDFVKKLDAHSTDEIVNSSQDDSGIACKSKDEGLLDALDDSSKAHKEEPDETLGWQQLDLNGLEDKDKILLKDYASILRNYKDTQKQLLEIEKRNREYHLEAMSEMNELKSSSATKDDEIRSLRRMLSSLQTKLNNSLPQRFVESEESSEANASPSLENKNIAETEEYMKIREHEEPHDPSLEDKFRAEISRILEENLDFWLRFSTSYHYMQKFQKSFDKAKAEMDKLTDAKAQEGSDAVPSCQSARKQESAVLEKKLRGLSTDLQVWLEKNVLLQGELESRFSLLCSIEEEISKITALGQTDEAHFTPFQAAKFQGEVSSMKQENSKVTKELQTGMDHVRSLQVEVGRALLKLRENIELSIGRRNRTQHSFRSLSMKAGVPLRTFLFGSKPKKASLFSCMGPVMPKPVADMRAGPFG

SEQ ID NO: 171116 - protein, 190 aa, Oryza sativa
  unsure (1)..(190): unsure at all Xaa locations
  Clone ID: PAT_MRT4530_69377C.1.pep
PRSRACPRGWDGSGDQSARSPLPSPFSLPDRLAFLSLSTCPHRVVLGGGVDLDFLLAVVFLTIRAHLSRFRCRRITNGKGNPADEXPLLAKPPLLSEVAMPRRGRLRNGVGLVKSVCFMAASLVLLMLVDLMXLPRSVFFAAQFMAYLAXCGVVMTEKAVAVTARSHSVHLRLFWVGSMTLAKCFSPKSA

SEQ ID NO: 171117 - protein, 192 aa, Oryza sativa
  Clone ID: PAT_MRT4530_69378C.1.pep
MHLHLHGLRKGSTWPPPWCSSPGPASWSAPSSTPPSCLRLRPPSRAAASPRSSSPAAASPASASPRSPPRRCPATPARSSSEATASRRRGRRPPPSPGGTAPPTGCWTLTRPTTKRRWTPHSTTSSRTTPPPPRRARRTAATPTPTPRRTSGGTGAPAGRARRPPRRRRRRRRHAAGAAGTSHPPPPCSSSP

SEQ ID NO: 171118 - protein, 90 aa, Oryza sativa
  Clone ID: PAT_MRT4530_69379C.1.pep
FFFFFFFFFFFFFFFFFFFFFFLINTIITGLRPKSHVTGITTVECNKSQGAYNLQTLNQHCFALQQLVKFSIHGTSYRFYRTIALASGGR

SEQ ID NO: 171119 - protein, 80 aa, Oryza sativa
  Clone ID: PAT_MRT4530_6937C.1.pep
SDPSFCFYSREHLVNSPVSSKDPQKQVQFCESGQLKSIHGCRIIICAVHGLACLKDQYDVHRHVNQSFPHIAFLLYPSFQ

SEQ ID NO: 171120 - protein, 89 aa, Oryza sativa
  unsure (1)..(89): unsure at all Xaa locations
  Clone ID: PAT_MRT4530_69380C.1.pep
MRHHSSSVIQRRADRASVRAYQMSAGREEDKNPSPGEGSXDHMNFKVKGEDTNEVFLTIKRSTQLXKLMNTYCDREGWHSNAIGFLWGG

SEQ ID NO: 171121 - protein, 576 aa, Oryza sativa
  Clone ID: PAT_MRT4530_69381C.1.pep
MTPHLCRVSRRSPFPRAGHVLSGFRAGVVHGQGPTQIIIGVYNIIHWNPHVYQALSPYYMYKFLRKTQTGGWMSLGGILLCVTGSEAMYADLGHFTQNSIKMAFTLLVYPALVLAYMGQAAYISRHHNFEDGSHIGFYVSVPEKIRWPVLGIAILASVVGSQAIITGTFSIIKQCSSLNCFPRVKIVHTSSTVHGQIYIPEINWILMILCLSVTIGFRDTKHLTNAQGLAVITVMLVTTCLMSLVILLCWNKSIVYALSFLLFFGAIEVIYFAASLVKFHEGAWVPVTLSFIFMMVMCVWHYGTKKKYEFDVQNKVSISWLLNIGPSLGIVRVRGIGLIHTELMSGIPAIFSHFVTNLPAFHQVLVFLCIKSVSVPHVQPEERFLVGRIGPKKYRIYRVIVRYGYRDVQKDDVEFEKDLVSSIAEFIRCADSNQNSFMDGASHSCEGLSFISKGLPLEEEEGEFDGSDSTGSSAHKEINPNTTAPKPKRVRFALPKDTKIDREVRGELQELMEAREAGMSFITGRSHMKAKSGSGLIKQIVINFGYEFLRRNSRGPAFAVNLPHVSTVEVGMICLV

SEQ ID NO: 171122 - protein, 148 aa, Oryza sativa
  Clone ID: PAT_MRT4530_69382C.1.pep
SPVAAVARARCAGQEARGYRHQAGRQVRPWDEQGASRVGRARGDGVGAASASPATQEFDDGANTGLAGRVLAQCAAGRAPADCVQCLQDSARAMPRCCWNTRGLGESVAVVLSDDCVLQFTMHLAYLRRQALVELSVRLSSVPLEQQR

SEQ ID NO: 171123 - protein, 78 aa, Oryza sativa
  Clone ID: PAT_MRT4530_69383C.1.pep
MAAGATGPGRRWAAQRRPGKARRSSGNLPSAVTARGDAEASGAAWPPWPSSGAGVATATCAHAMAERWLGEDGFFGLG

SEQ ID NO: 171124 - protein, 122 aa, Oryza sativa
  Clone ID: PAT_MRT4530_69384C.1.pep
MDRGGRPGWLPSLGFAFLSFNCGMAIYRSSSDPSAVAFVVVAYLALIALFRCLHLLERAPAGGQARASMKAAVWGLSTLLTLMFSYKVAAIMPLWGAAGVWVMGLGTIVAGFYAFFVHREAP

SEQ ID NO: 171125 - protein, 57 aa, Oryza sativa
  Clone ID: PAT_MRT4530_69385C.1.pep
MGVGEEDETPGLSGPTYSALRNKFTGEKVDGVLPSIVSKAHSIEQGLWAIADVSVNL

SEQ ID NO: 171126 - protein, 51 aa, Oryza sativa
  Clone ID: PAT_MRT4530_69386C.1.pep
AGVFDPAKGAKCAPQNAPPVAGMGLSTQAIGVEKPKPQAPVSEPAKGTLSG

SEQ ID NO: 171127 - protein, 542 aa, Oryza sativa
  unsure (1)..(542): unsure at all Xaa locations
  Clone ID: PAT_MRT4530_69387C.1.pep
MWRRAATAALALGAGAGGAAIAYSDDPSATLKICAHLPPRLLRDAATAATIAFDYQYSLWGLDPGTPAWVSAKHDAHLRSANRLQELCFRNGGIYIKLGQHIAQLEYVVPEEYVQTMRASMLKRCPVSSYEQVCRVFGKDMGESPETVFVEFDPVPLASASLAQVHAARTHDGQKVAVKVQHDHLTDTSVIDIATVGLIVNTLHYIFPSFDYRWLVDEIRESAPKELDFLNEAKNSEKCVQNFRRLSPHIAGSIYVPKVYWTLSSSRILTMEFMDAKEVTDVKGIKELGIRPVDVSNLVSKAFSEMIFKHGFVHCDPHAANMMIRPLPQDSKKTFGWRRPQLILLDHGLYKELDYATRISYASLWKALVFADEKSIKENSVKLGAGEDLHALFAGVLTMRPWKSVIDPAVDHLGLDGSSNDRSELQMYASLYFPQISELLRRLPRVILLMLKTNDCLRSVNHALLKKLLACXFVIIGRISSEAVLEAKRMSSRSILNKLMIWLEEILLEARFFSLKLLLCFMQLKKVIGLLSSRSAYPLFLD

SEQ ID NO: 171128 - protein, 476 aa, Oryza sativa
  Clone ID: PAT_MRT4530_69388C.1.pep
MVARCAHADVGGGFRLWPIFSAAALRRKLLEVLTCGGGGGGGGGAGGGSCRSKNGYRSPQPRPRPRSDRLAELLRAEPSECGDEADDADAAVKKVEALEKLKVVVGALQACDGDNAGIGGGGDMCRVEAATVVRRKAKDDAGAREMLAMLGAIPPLVAMLDESDGGGGGEEMVAAALYALLNLGIGNDTNKAAIVQAGAVHKMLRIAEGASGVLTEALVANFLCLSALDANKPIIGASGAAPFHARQEALRAVLNLSIGPANAPHLLSAGLAPSLVAAVGDAPAAADRALAALCNLVAACPEGRRAVSRAPDAVPAFVDVLNWSDEPGCQEKAAYILMVLAHRSYADRAAMAEAGATSALLELTLVGTALAQKRASRILEILRADKGKQVADAAGIVATMSAPQERGGGGGARQEEADEAGMSNEKRAVRQLVQQSLQSNMRRIVRRARLPQDLAPPSSENLKALTASSTSKSLPF

SEQ ID NO: 171129 - protein, 92 aa, Oryza sativa
  Clone ID: PAT_MRT4530_69389C.1.pep
MAWAPEKPELVRPVATPCQPAGGRVDPTSTARQGGIGGGREQRLSGERRQQGEHDGGGGEAGRCRGAGASGVRVASGVWVASGGGGERGGRR

SEQ ID NO: 171130 - protein, 417 aa, Oryza sativa
  Clone ID: PAT_MRT4530_6938C.1.pep
MATVSAANSASNISASINSIPVLTGANFKEWKENVLIVLGVMDLDLALRKEQPILSDKSTKDENMEHERWDRSNRMSLMIMKRSIPEAFRDSTSEEVTTAKVFLETLQKRFARNEKAETSTLLAKLISMRYKGKGNMREYIMEMSHLASKLKALKLDLSEDLLMHLILISLPTQFNQFKVSYNCQKDKWTVNKLISHCVQEEERLKQDRIESAHLSMTSNNKKRKSKEAVDVQPPLKKRENNCGEEPCYFCKKEGHMKKNCTKYHAWRAKKGETDEYKEIKCPKSYRCLRTDSYRYLWAIPYGFLEWSTIFYHVHRRFLKIWQLTTMATVSGDGWWKKQLEAGLGMGARRLTMEMFGGSTRPRLFSGWEWRRRLVAEAGLGMRAAAGARLAAGAVAGGGGQGGEAVIRTFSILIIRE

SEQ ID NO: 171131 - protein, 82 aa, Oryza sativa
  Clone ID: PAT_MRT4530_69390C.1.pep
MEEKVQQASSTPLLSSSVSKSRRGGGSGVKFENALDAETATPTAHAQAHNHLPGRGEARPHARPRAAFRADGNIARAGRLGG

SEQ ID NO: 171132 - protein, 257 aa, Oryza sativa
  Clone ID: PAT_MRT4530_69391C.1.pep
QPHKAIVGANAFAHESGIHQDGMLKYKGTYEIISPDDIGLTRANEFGIVLGKLSGRHAVRSKLVELGYEITDKEFEDFFKRYKEVAEKKKRVTDEDIEALLSDEIFQPRVFGSLADVQATCGTLGLSTATVKLIGPDGEEKIACAVGTGPVDAAYKAVDDIIQIPTVLREYSMTSVTEGIDAIATTRVVVTGDVSDSKHALTGHSFSRAFSGSGAALDIVVSSVRAYLSALNKMSSFVGAIKASSEVSESQRVQTTE

SEQ ID NO: 171133 - protein, 354 aa, Oryza sativa
  Clone ID: PAT_MRT4530_69392C.1.pep
LLIRALMHSNTLFREFSLISMRRVPELPVGPHKLLAILAEPLKQKENLISLEDPEVSDNLREFEDWHEYYSLDATYRSWLKFEMENASISPEMLSAEEKSQAVAAAKETLELAFLLLYREDIPWLNAVESSPIEPSEHVFLELHATAILCLPSGECMLPDATSCTALTSALYSTVSETEVLHRQLKVDVNVSSKDPCCIQVSLLCLAVEGDGLGLHEANDGGLLAAIMAAGFKGELNRFQPGVSIEISRLDAWYSDGHGSVESTAAYIIRGLCRRCCLPETILRSMQASIALSEAGDSLDHCDKLIELVASSESGIMHLFSQQQLQEFLLFERECYLSKMELEEEQLEQLPADG

SEQ ID NO: 171134 - protein, 620 aa, Oryza sativa
  Clone ID: PAT_MRT4530_69393C.1.pep
MAQPRRPEYVPNRIDDPNYVRIFDTTLRDGEQSPGATMTSAEKLVVARQLARLGVDIIEAGFPASSPDDLDAVRSIAIEVGNTPVGEDGHVPVICGLSRCNKRDIDAAWEAVRHARRPRIHTFIATSEIHMQHKLRKTPEQVVAIAKEMVAYARSLGCPDVEFSPEDAGRSNREFLYHILEEVIKAGATTLNIPDTVGYTLPYEFGKLIADIKANTPGIENAIISTHCQNDLGLATANTLAGAHAGARQLEVTINGIGERAGNASLEEVVMAIKCRRELLGGLYTGINTQHITMSSKMVQEHSGLHVQPHKAIVGANAFAHESGIHQDGMLKYKGTYEIISPDDIGLTRANEFGIVLGKLRLNLAHLTLRKPLPGLLGYEITDKEFEDFFKRYKEVAEKKKRVTDEDIEALLSDEIFQPKVFWSLADVQATCGTLGLSTATVKLIGPDGEEKIACAVGTGPVDAAYKAVDDIIQVTVAIFLMVLALIYQFNGMEYGCVFSIYENETSCICKTGEILKHLRIICNSQIPTVLREYSMTSVTEGIDAIATTRVVVTGDVSDSKHALTGHSFSRAFSGSGAALDIVVSSVRAYLSALNKMSSFVGAIKASSEVSESQRVQTTE

SEQ ID NO: 171135 - protein, 147 aa, Oryza sativa
  Clone ID: PAT_MRT4530_69394C.1.pep
STSWAGPEAEAARRQRRDRAASSTKREGESSGGDRASSASPTSNGAPRRRAEEDTAAAMAAEGRPVKRVKEIPPSNRRRRKKRRRRRRRHRLRRSVVVGAPQIRRPRAAAAATAVIHLRLLFVVLLPLSHRSERRRCGLEGRKRRVR

SEQ ID NO: 171136 - protein, 350 aa, Oryza sativa
  unsure (1)..(350): unsure at all Xaa locations
  Clone ID: PAT_MRT4530_69395C.1.pep
EGCLEQCEVFQQAKAEHGMAPDLLRPLHVPLQVWEIPKSGRFYIILVVIDKFTKFAXLIPLSHPFTTLTVAQAFMSNIYETLTCQLFKLAYVKLNMSSSYHPXTDGQSEMLNQCVEAFLWCDVHACLTKXITIALSSSTXYNTDFHRALGKXPYEILFARKHTYFGEVNLGQSIMPDVQVWLQEYSQLNVVLRHQLIKAQXMVVHQANKHRTERWLELGDLVYLKHQLLIHQPYMQITVAXRSYHKLSFKYYGPYRVLDWVRAVAYKLELLVCSQIHLVVHLWLLKKALKVGTQVITDLPKLXDTTAEVVPEEVLQHQLIKSGRAMIPHVLIQWTRLPMELATWENLCQL

SEQ ID NO: 171137 - protein, 68 aa, Oryza sativa
  Clone ID: PAT_MRT4530_69396C.1.pep
KLHRFGFSNWGKGIIIRAGQGKVKWGGEKKQKKKQGTGLGAQNFKILITKVRGEKGKILGKIFGAGGG

SEQ ID NO: 171138 - protein, 55 aa, Oryza sativa
  Clone ID: PAT_MRT4530_69397C.1.pep
FPAKKSLNFTSDYWKLLKKKSHPDALLFSFNLCITISLSSVQSIYYHRFAYTLVF

SEQ ID NO: 171139 - protein, 44 aa, Oryza sativa
  unsure (1)..(44): unsure at all Xaa locations
  Clone ID: PAT_MRT4530_69398C.1.pep
MEGTRRHLEKDLESWNIIEYVQVKVEAXTKSTSSATRSPGLVCT

SEQ ID NO: 171140 - protein, 120 aa, Oryza sativa
  Clone ID: PAT_MRT4530_69399C.1.pep
EGKIDVGITLSDTHNNPPTVIQGPITRARARQLNLEVSSRHLEKDLEPCRIIEDVQVKVEAQTKSTSGAIRSLGPVCTKMDAQVAYVLGLGRSLYGWKSNKITFLMVLVPRPNSFQVNEN

SEQ ID NO: 171141 - protein, 94 aa, Oryza sativa
  unsure (1)..(94): unsure at all Xaa locations
  Clone ID: PAT_MRT4530_6939C.1.pep
GKKKRPIVFLNEEDLGDFKNXSLELRTLKPLHTGVRVQYECQTWIIMEGPXQTVLRNLTYLMTITIGNMNDLQKSVLGPSFIDGDMNSDGELVI

SEQ ID NO: 171142 - protein, 334 aa, Oryza sativa
  Clone ID: PAT_MRT4530_693C.1.pep
MPPPPPPATVLVTNGTVSPQAPPSAASFLDSTPGAYTTARATAAGGLLWWPRHLLRLADSTRLLARFHPHLLGLAAPPSRKPFEDSLRGIEPLVNRSVRVALDEMPGEDMALTALLRASPAEEESELEVCVHLGAYVPPVFGEAGARLAVAGRGRDAAAAKYAPWARMRKSMEKMRPPGVTELLLTNDGDHILEGSITNFFVVCRREEEHPLNKPLSVEMTANEFEVQTAPLGDGILPGIMRQIVIEVCHDIGIPFREVSPSWSKHKLWEEAFVTSSLRLIQHVETVQAPILWENIESKTWADVSWEVKQFQREISKRAIQEEYDIKDLLCCIT

SEQ ID NO: 171143 - protein, 94 aa, Oryza sativa
  Clone ID: PAT_MRT4530_69400C.1.pep
LIIHIAVPRNSGGYFGHVLAKLEPSIDMKDNLGLTPLQLSILLGKYAAMQKLIDFGADIHIHSLYGGPIHAAVALDDEIALEALMRKTNTRLLL

SEQ ID NO: 171144 - protein, 213 aa, Oryza sativa
  Clone ID: PAT_MRT4530_69401C.1.pep
RPSRTSPTTSSRSSSCGWTPPSPSSARRPRARGGAASSRTPASSAPSARSMGRATSPGGTTPSTLASGGHHTHASESSCSTATRPTPTTQEAAASACPISELSPLSTTAHGSTTVPCHWRACSPPEATAGGAYCRAPPPPPSTCRNDSISSTSQAVPAAVSTGESTAKTAPCSSSTWPPCDSRSTCSRRPSGRRTTNGPSGSSTAATLSASSA

SEQ ID NO: 171145 - protein, 412 aa, Oryza sativa
  Clone ID: PAT_MRT4530_69402C.1.pep
MSSKEKPTLGGQRIKTRKRNIAAPLDPASFSDAIVQIYLDNAGDLELVAKSIESSDLNFSRYGDTFFEVVFIGGRTQPGTIKPEEEGERHPYSVLDCAAQREAILPSVLYIQKTLRRRPFLIKNLENVMRKFLQSLEFFEENERKKLAIFTALAFSQKLSGLPPETVFQPLLKDNLVSKGIVLSFITEFFKEYLKENTLDDLIALLKKGKMEDNLLEFFPSAKRTSEALSEHFTKEGLTSLVEYNEKKMFEVKLKEIKLTLTTMINEEAEISEVTEAVKQQVKDAKFPDIEVVRMLWDVLMEAVQWSGKNQQQNSNSALRQVKAWAGLLNAFCTSGRLELELIYKVQTQCYEDAKLMKLFPEIIRTLYDQDVLAEDTILLWFRKGSNPKGRQSFVKALEPFVKWLEEAEEEE

SEQ ID NO: 171146 - protein, 57 aa, Oryza sativa
  Clone ID: PAT_MRT4530_69403C.1.pep
YLLLTNLLLQPIGMRYRFVLLVQLPSLLSSKFLLFFFLFFYFCYNLNTGEGEKFEKR

SEQ ID NO: 171147 - protein, 67 aa, Oryza sativa
  unsure (1)..(67): unsure at all Xaa locations
  Clone ID: PAT_MRT4530_69404C.1.pep
KQSKQLRTQEIXNGWLSMLNDMGAWFQTEXSGHDTIDNLFVHPPNFELATILQAFTPISGVLQVLQC

SEQ ID NO: 171148 - protein, 71 aa, Oryza sativa
  Clone ID: PAT_MRT4530_69405C.1.pep
GLLPFSLKSQFPRALRESPAKELPPRMGPMRRAPGNPIEPRKNPPMVYNRQGQAKIPGEIPKIVAGPDPPP

SEQ ID NO: 171149 - protein, 363 aa, Oryza sativa
  Clone ID: PAT_MRT4530_69406C.1.pep
MAGQGVACALAVALFIGSLVSIPTVYTPGIKPCRTHTNTFDLHGCMRALIVDQHSTAVRSIGVCNGILGNNLPSPADVVKLYQSNGIAAMRIYSPHAATLRALAGTDIAVIVDEPAIDQFLTLSAASDWVQSNIKPYQGVNIRYIAVGNEVSGDATRSILPAMENLTKALSAAGFGKIKVSTAVKMDVLGTSSPPSGGEFSDAAVMAPIAKFLASNGSPLLANVYPYFAYKGGDVDLNFALFQPTTATVADDGRTYSNMFAAMVDAMYSALEKAGAPGVAVVVSESGWPSAGGSGASADNARRYNQGLIDHVGMGTPKRAGAMEAYIFAMFNENQKDGDETERHYGLFNPDKSPAYPIKFRIS

SEQ ID NO: 171150 - protein, 147 aa, Oryza sativa
  unsure (1)..(147): unsure at all Xaa locations
  Clone ID: PAT_MRT4530_69407C.1.pep
RYKTEQTLWGGSTPVIARNAPVLAMCWIHFRPVLAHVVVRVAAIGPFERPAAVAAANIVVRDAVAAVLKEPPYPHLRRQVVVGGGDTAAGKGRLRRLRRRRRRRCQQLHHDRHCHPICRHLSTSLCDDAWADAWVDLEGGPVPNSXY

SEQ ID NO: 171151 - protein, 83 aa, Oryza sativa
  Clone ID: PAT_MRT4530_69408C.1.pep
MPLQSGKMMCKQLLAGTVALMLFPWQSSLAISGNAIQQGDQIRPEGTKENPLARSSIGTFSRIQRGREGGEQPNPEEVGALEP

SEQ ID NO: 171152 - protein, 102 aa, Oryza sativa
  unsure (1)..(102): unsure at all Xaa locations
  Clone ID: PAT_MRT4530_69409C.1.pep
XXLXGXGXEGATXRRXEXXIKXWAHEKVSGKHAXNEAPXXXTXPPPPPEXXGSRSXXVVPRHQXSXPPFAKPAXQRXLLTLXXLTPXXPTKLADLRARKGGG

SEQ ID NO: 171153 - protein, 325 aa, Oryza sativa
  unsure (1)..(325): unsure at all Xaa locations
  Clone ID: PAT_MRT4530_6940C.1.pep
LHDVGHPVTESXLVLNLLSGLNSCFSNTADNIAGAPVLPSFASARNTLLLKELRLAKEHKVQTETAMVAAVSSAFSCSSGTCATTISSQPRGGGGGSNNGKRNQRRNGGRNNGGGGSNGRQNNSGSGGYGNSGGNSYQQQQAGFRPAGPWFCFNPWAVQASTWRPPSNPGNSAGYLGLYPQAHTAFAGSYVSPPTPGWPPMLQVQPNWDQAGLIAALNQLSVNSPSPWVLDMGATSHMSSTDGILNLRTRRVILRCNSRGDLYTLPTAVPAITVHSFLAESSTLWHRRLGHPSPAASDVHQHLVEFVAYVKTQFSMPIKCFQADN

SEQ ID NO: 171154 - protein, 46 aa, Oryza sativa
  Clone ID: PAT_MRT4530_69410C.1.pep
IPSLIYNKRSKLKFPHFSPRSFPHCKPKKKKSKPFLLYVIESGQKI

SEQ ID NO: 171155 - protein, 78 aa, Oryza sativa
  Clone ID: PAT_MRT4530_69411C.1.pep
MAIDGGQVTGECWQMAQPLTEKGYRALVEVTVIFLLPYLGRTGNRGGNVNPERQPRTQCTHIIETPTDRDWKLRVWVW

SEQ ID NO: 171156 - protein, 248 aa, Oryza sativa
  Clone ID: PAT_MRT4530_69412C.1.pep
MPPALTSNPPSFRPLSTPLTRRRAATTFLCRVGPGKPSKDTGADDEPKKRSFFADFGKLSDGRSLIPAFPPAAAGSLFAGGRGRKDPQTVFVAGATGQAGVRIAQTLLRQGFAVRAGVPDLASAQELARLASAYRLISPTEARRLNAVESDFEDPEAIAKSIGPATKVVVTVGAAEKGPDGGVVTTDEALRVVQAADLAGVTHVVVVYDLGAGDPSGESTYNVLDGFTFFFSNLFSRVQSLPLNEFLA

SEQ ID NO: 171157 - protein, 75 aa, Oryza sativa
  Clone ID: PAT_MRT4530_69413C.1.pep
ATTCMHLLLILESCYYVSYYISYDDATVNRWSKESLYNLYDHHCILYSSWNSVLILGKLACPCVDYLSQCQEVCR

SEQ ID NO: 171158 - protein, 50 aa, Oryza sativa
  Clone ID: PAT_MRT4530_69414C.1.pep
KFEEKLAQAYFGIFANTVDGVHVCFAFWSVAFVAWLRFVCSFGYIILVCY

SEQ ID NO: 171159 - protein, 911 aa, Oryza sativa
  Clone ID: PAT_MRT4530_69415C.1.pep
MLTFVKGLDNEASAYIVDEARGRHRCVWTSSCSVDMIGTRNGLICVLDGDTGAVTVANPATRVAVHAAAAVTGVALAVLPRRVHVPCYFNKSGTFDAMYPLWIRPTAKLVTTFTTQAHIRHKLSRKIKAINSRLEDIIENKHKYKIEEANTKTTRTWKASTSISYTHKKLEYLHESDVPIHVEERKKLEKVLLTTPEDLHGKEHNPVIISVFGKSGVGKTTLVRKIFKEIGKQKQFDIPAMECFAPYLSATNILQQIVQQLTTDNQDCPRNKVLEILEKKLKEKKYLLVIDGEVSGTELNNILSTLPIGHAGSRIVHITESKPEEPPSNYHHVTIELKTIDKSISKKMFLHHMEVQNLDLENHEDDIIFQITGGLPLAIALLSGLMKTKESTGEWQKVFEYLKSKQSKQIDDMLSICFDDLPHELKCCFLYLAAFPANVTIEARNLVSMWVAEGFLRSKVGKSMEDIGYFYLKELSARNLVSLVQMDDDSNVSNMTVTIQNKVHEFLQFEAHEASFLEVHSGDDIPTLTSARRLSLQNYTDKYAVLANPLPKLRSIFSQFEQEPKEELETMTKSIQAYVCCSPQQGTIASMQKKNIKSHIKELLHGSEFLRVINIQGIEIGNRLTRAIGKAVHLQYLGITSCSLENIPSSIGNLTSLQTLDVRETKVRKLPKAFWMIKTLRHVFGFILKLPKQTVNLKQLHTLDSIELEDFEQGLDNTLGEMIHLEGLVIWKISNGNVKALLSALRKLESLKTLNLQGNNITSSVFTTLFLRRLKFMVLDGELDFSSDQLNNGLALPNLTMLTLKETKVTQEFINKLAKLPSLVTLALCLGSYKDQELVFFSNKFRCLQKLKVDVEKLKKVEIKLSMLPKLKKLEIQTHDSHHYQEHEVTHQEHEQKTVISWKKENAIQVE

SEQ ID NO: 171160 - protein, 335 aa, Oryza sativa
  unsure (1)..(335): unsure at all Xaa locations
  Clone ID: PAT_MRT4530_69416C.1.pep
TRLAYCLQPTEIPTTNSNIVDLTKSELSQYNSRLTQPDPQKIGTVTFKTKTSWRRIARASSRAVDRSIDRVRIPCASGEPRRRLASCSGSSAAAAAAAGARTAAPGRASRRAIPATQACRRRAPAGRPRRAPRSCPSAPCAPGGGCPAASAXSWSSSSGPSERVANPDSSSVPSLGPPSRSMAPPYGRAANCAPSSSSSSLRKASASSPSPQSPLLPHTSLKSMSLPLSSSSPSPSSRGASCAMSTTCMRISSSATSSSARPSVSTSGRSVGCSRPATSSPNARSAAAARTAPTSSPSPPRAIVRSRSGTRQETSSIVSTSPPPSSSSSSPYDER

SEQ ID NO: 171161 - protein, 67 aa, Oryza sativa
  Clone ID: PAT_MRT4530_69417C.1.pep
GGPKCQSKPGMPYFIHPGNLKGKFEPNLKKFTKPKKIGGKKMEKLNTKYIHSRVGKDQGMGKKMVHF

SEQ ID NO: 171162 - protein, 166 aa, Oryza sativa
  unsure (1)..(166): unsure at all Xaa locations
  Clone ID: PAT_MRT4530_69418C.1.pep
AAHACQAASRPRHPIYPRVDRGRSLLPAWQPTSPPRGAPLTDPVDRXPRAYDMWGPHVGAATLSDDVARGIIYAINQLSSLIACLHCLPCMSXDSGSPDAPVYFEIVAEVPPATEQGKSCLSLEHIDPILQMLYCKGGCDGAGWALQRPLSLPDSPRHERGLPATF

SEQ ID NO: 171163 - protein, 49 aa, Oryza sativa
  Clone ID: PAT_MRT4530_69419C.1.pep
ITYSHAHVFKHYVTILTIFNYYIKTRQFSQTKHNHQYQSNNTTHLNTIL

SEQ ID NO: 171164 - protein, 141 aa, Oryza sativa
  Clone ID: PAT_MRT4530_6941C.1.pep
MAASSSHTNKVPIPTVTLELGYGEDKAHTPCIDTTDCSKETHAKCLMAALNVNGGSNQAVVAFLTMTDMFKIIPTYVEPMDIFSARSTIDHKENIPMPHRRRMGSQNASWHLAPHRRRCSLTRPRLLVVPPSERWLPDRRA

SEQ ID NO: 171165 - protein, 119 aa, Oryza sativa
  Clone ID: PAT_MRT4530_69420C.1.pep
MAKSLRSKREKRLRTLRREIAQPFYDKKEAAKLAAQAAALEAPALPVRAPPPPSKDSGGSRAASSSASAMDVEMADEGNNKSKSFLKPIGSISKKKVQLHLKIKKDKRKARKKGRFSKK

SEQ ID NO: 171166 - protein, 153 aa, Oryza sativa
  Clone ID: PAT_MRT4530_69421C.1.pep
MALPVTAPPTPAASSPPLSPDWIESLARIESPDWIESPTPTLSSSCDAAATGKPTPTPAATAGTGKDGRRPALSASSTSAHGSSPLRASSSPALPASLDTEKRGGERGEERGSKLERREEEADMGAYVGPTLTQPSRRTKSGSKPPKDLCGRF

SEQ ID NO: 171167 - protein, 1631 aa, Oryza sativa
  Clone ID: PAT_MRT4530_69422C.1.pep
MATLPRAAAAAAPSPAAALLPLPRAAPLLAGRAAARSAARRLRARGTRAPPLAAARRGWGGVSPRAVLDLPRRREAAEKPAQKAADLNEILSERGACGVGFVANLKNEPSFNIVRDALVALGCMEHRGGCGADNDSGDGSGLMSGIPWDLFNDWANKQGLAPLDRTNTGVGMVFLPQDENSMEEAKAVVAKVFTDEGLEVLGWRTVPFNVSVVGRYAKETMPNIQQIFVKVAKEDNADDIERELYICRKLIERATKSASWADELYFCSLSSRTIVYKGMLRSEILGQFYLDLQNELYKSPFAIYHRRYSTNTSPRWPLAQPMRLLGHNGEINTIQGNLNWMRSREATLQSPVWRGREHEIRPFGDPKASDSANLDSTAELLLRSGRSPAEAMMILVPEAYKNHPTLSIKYPEVIDFYDYYKGQMEAWDGPALLLFSDGRTVGACLDRNGLRPARYWRTSDDFVYVASEVGVIPMDESKVVMKGRLGPGMMITVDLQTGQVLENTEVKKSVASANPYGSWLQQSTRSIKPVNFQSSVAMDNETVLRHQQAFGYSSEDVQMVIETMASQGKEPTFCMGDDIPLAVLSQKPHMLFDYFKQRFAQVTNPAIDPLREGLVMSLEVNIGKRRNILEVGPENADQVTLSSPVLNEGELESLLNDSKLKPKVLSTYFDIRKGLDGSLDKAIKVLCDEADAAVRNGSQLLVLSDRSEALEPTRPAIPILLAVGAIHQHLIQNGLRMSASIVADTAQCFSTHQFACLIGYGASAICPYLALETCRQWRLSNKTVNLMRNGKMPTVTIEQAQRNFIKAVKSGLLKILSKMGISLLSSYCGAQIFEIYGLGQEVVDLAFCGSVSKIGGLTLDEKFFYSIVKDIPVISLHEFCGMEFWAAQACDPGFDPHLRPCEYHANNPEMSKLLHKAVREKSDNAYTVYQQHLASRPVNVLRDLLELKSDRAPIPIGKVEPATSIVERFCTGGMSLGAISRETHEAIAIAMNRIGGKSNSGEGGEDPIRWSPLADVEDGYSPTLPHLKGLQNGDTATSAIKQVASGRFGVTPTFLVNAEQIEIKIAQGAKPGEGGQLPGKKVSAYIARLRNSKPGVPLISPPPHHDIYSIEDLAQLIYDLHQINPKAKVSVKLVAEAGIGTVASGVSKGNADIIQISGHDGGTGASPISSIKHAGGPWELGLSETHQLACLQTLIQNGLRERVVLRVDGGFRSGLDVLMAAAMGADEYGFGSVAMIATGCVMARICHTNNCPVGVASQREELRARFPGVPGDLVNYFLFVAEEVRATLAQLGFEKLDDIIGRTDILKAKHVSLAKTQHIDLKYLLSSAGLPKWSSSQIRSQDVHSNGPVLDETILADPDISDAIENEKEVSKTFQIYNVDRAVCGRVAGVIAKKYGDTGFAGQLNITFTGSAGQSFGCFLTPGMNIRLVGEANDYVGKGMAGGELVVVPVEKTGFVPEDAAIVGNTCLYGATGGQVFVRGKTGERFAVRNSLGQAVVEGTGDHCCEYMTGGCVVVLGKVGRNVAAGMTGGLAYILDEDDTLVPKVIVKVNKEIVKMQRVNAPAGQMQLKGLIEAYVEKTGSEKGATILREWEAYLPLFWQLVPPSEEDSPEACAEFERVLAKQATTVQSAK

SEQ ID NO: 171168 - protein, 41 aa, Oryza sativa
  Clone ID: PAT_MRT4530_69423C.1.pep
MSDLSNDRQWHVLTVRPREDQRSDRSSFGQTDPSRSDRPPN

SEQ ID NO: 171169 - protein, 214 aa, Oryza sativa
  Clone ID: PAT_MRT4530_69424C.1.pep
FGVFPIEVAALQVHREIVEMLFPLTSPISTVPDWSIDGIFAHAKNFGSKPLPEDLCVKKIAQMKVEGKEAFKRKDYLLAAQLYTSALGLGPSPDDSATLLANRSLCWLRLENGKQALADANMCRMFRPHWIKACYRQGAAFMLLKEYGNACDAFSDGLKLDPANVDIENALRAALQAVKNDRLCMITMWNLVVCYPVFGEAISVALSYLSASVL

SEQ ID NO: 171170 - protein, 218 aa, Oryza sativa
  Clone ID: PAT_MRT4530_69425C.1.pep
MGINMYTRGHCNESLNQYNYSRRIATSLPRFLLIIRQNLAPGAGLHRFSSISGEGGQTDWHARISSTFGPALELSRSPRPGGRPPSSAPRRRETARRPPCATVGRPPADRPPLSPSTWPLAVLCAPPKGGHPPTSTLHRGEAARRPAAPEPLNAAAHNPPRAAVGRPPTDLRAPPWGGRPTTGHSLSPSTRTLAVLRAPPWGGRQPSSAHHLPTGRPP

SEQ ID NO: 171171 - protein, 52 aa, Oryza sativa
  Clone ID: PAT_MRT4530_69426C.1.pep
PPKKYDPKYPLLRNGLPPKVEKSPNQMKDPKTKAKKIRGVKKTKAGDPGKKK

SEQ ID NO: 171172 - protein, 47 aa, Oryza sativa
  unsure (1)..(47): unsure at all Xaa locations
  Clone ID: PAT_MRT4530_69427C.1.pep
GQSRICVKPVTFCNCKHLLNFQDRRXGMLSSSQGEHNSIHNSAGFVI

SEQ ID NO: 171173 - protein, 176 aa, Oryza sativa
  Clone ID: PAT_MRT4530_69428C.1.pep
MAGATGWRAIKFLGSASSATAPVLCDYCCCIDAFTIMSTKIGDKEVNDINRGEGEGKDNWGKKIEGDSSANLVQKKNPHASHNNNKKVKPDVKPNATTNFKKKDKGKAKGDYFVCGKPGHWAKDCLEHKDKKSANMSISEGGGTSGYGQERFLLVVGKRIDADEHGNGGYQRTTIQ

SEQ ID NO: 171174 - protein, 608 aa, Oryza sativa
  unsure (1)..(608): unsure at all Xaa locations
  Clone ID: PAT_MRT4530_69429C.1.pep
HHAPAALATRQLALRTRGVVLPELGKPPRAMTPVEEVDLSAVRYQSPSLQAPHLTGFSLRAFVWLMESPLFGRLLTSVLKSQNNITRMLQDTVIPERPMYLPEYPPQEPEQGVLLLGDDRDPVDRVEEALHCLPPYDPSLRWPAGDKPPFLYWKIRDFVHAYRSGITTPSXCAEHIIAGVEEWSNKKPPMPMLVYFNADDLRKQAEASTKRFQQGNPISILDGIFIAIKDDIDCFPYPSKGATTFFDKIRSVEKDAVCVARLRKCGVLFIGKANMHELGLGVTGNNPNYGTARNPHSIDRYTGGSSSGPAALVSSGLCSAAIGTDGGGSVRIPSSLCGIIGLKTTYGRTDMTGALCDCGTVEVASPLAASVEDALLVYSAIAGSRPMDKLTLRPSPLCVPNLVSPDNNNILGSVKIGKYTEWFHDVSDRDISNTCEDALNLLCSSFGCQIEEIILPELEEMRTAHVVSIGTESFCDLNPHYRAGKRTEFTLDTRTSLALFGSFTSTDYVASQRISITAPEIPQSSLKLGESNYVVSAYLMRFVIAGNLLGLPAITVPVGHDKQGLPIGLQLIGRPWGEASLLRVASAIEELCLQKRKRPSAFHDILNA

SEQ ID NO: 171175 - protein, 369 aa, Oryza sativa
  unsure (1)..(369): unsure at all Xaa locations
  Clone ID: PAT_MRT4530_6942C.1.pep
MSRVSTSWGFVYSRVNKPRGGARGPGPREWGPRGSLTVHGGPGXAPGLAPAGAVSPTRQPHLRARAADSRAPHGSRGARPKAATPXQPTGGGAPTPLWYGGAAAERGEGRGKRXRRSTAHPGSTATTGTATGAEEGGGAARVDGVDGAPAVGDQNGEVDDVREDAAKPKEAAPTWEVVRGDNGGGPELGGDGGERERRRELDSGGERERRAAETVEGGTGRVYXIGLREGTGGRRRGKRARXVRPSLMAPARXGGKFKRIEGQREGKMGGKGEGIXGNISPLLIARGADGGGGIRGGGGSARARAGRRERREEGDDGWAPPVSXGGGRARPSAARARGGGXMGRGEEEXRGKEMGRAGPRGGGGGEKGL

SEQ ID NO: 171176 - protein, 235 aa, Oryza sativa
  unsure (1)..(235): unsure at all Xaa locations
  Clone ID: PAT_MRT4530_69430C.1.pep
MGLVTSNKRERPPRPSTSASPSSSSLLRRRSRRLTAPPPPPPPRLXYASPPVEAPDEEAPAPYAAEAPLTGQQGPEHGKHHHHESSSSSPPAEPPSSYNATEHKHHXPPPPPPPPPPRXAPQAQPPAHRSPPPHHLPPPPPAHPSSPPPAHASPPPHHLPPPAHASPPPPPPPSRYPPHSPPPPAHKYPPPPPHGKAAAAPPPRGHRKLPPPSPHSVNLAMAPSPSYFSADPPSN

SEQ ID NO: 171177 - protein, 137 aa, Oryza sativa
  unsure (1)..(137): unsure at all Xaa locations
  Clone ID: PAT_MRT4530_69431C.1.pep
GGWTGRHGGSVPTTIGQNRGVAGVEGDVGRYSASAGGVAGGXPAPGKEEEAGRGGVAMGKFGRRQKRENGRRGFHFIVEGREPATGKARAAPRMAAGGHERWLEMARPFRVIEGAIQGGKXGELKRKERGLIPPSPI

SEQ ID NO: 171178 - protein, 96 aa, Oryza sativa
  Clone ID: PAT_MRT4530_69432C.1.pep
TGIYIFGPWRTHPGQKFSAMVRRFFPHGTKGTFACAMRCTLKLNGKKICSWMGPHQRRVVDPPIGNSTLFIVFGVGVSWTPQDSANHPVFIPKRIG

SEQ ID NO: 171179 - protein, 75 aa, Oryza sativa
  unsure (1)..(75): unsure at all Xaa locations
  Clone ID: PAT_MRT4530_69433C.1.pep
YHCXLXSLXXEHLAXGFIIVWVXXXNCVWHXWVDLXASXRXTXHRXXXXLYXITAVXXIXCFSILMCTXDXPLXX

SEQ ID NO: 171180 - protein, 106 aa, Oryza sativa
  unsure (1)..(106): unsure at all Xaa locations
  Clone ID: PAT_MRT4530_69434C.1.pep
FFFFFFFFFFFFFFFFFFFFFFXXLLGPDFFFPWYKMEGTKIFPKGWSKKNPPPRSGSPFPSPPGNGFNAGPLFLFPEGHGLTFPKGLPPPLKPFGQTIPPPIPPP

SEQ ID NO: 171181 - protein, 146 aa, Oryza sativa
  Clone ID: PAT_MRT4530_69435C.1.pep
MKQLHRTAARQVPETGGGSAATPQSVQIWGPRCVGGGGGGGGGHVEAARRSDEVAEETGNCHMRTGNDTAPGGQCCWAEAPSSRPRHPHFSHLIVRTDHYTSFHASHSPFKQPITENLHYGVINLNKAVYPLVAREMVTADFDFLS

SEQ ID NO: 171182 - protein, 81 aa, Oryza sativa
  Clone ID: PAT_MRT4530_69436C.1.pep
MAHQMDWWKTTSLQAEVSQEMKSPGSRFCVGGIAGERERIKFRLSGENGSHGVRFLEGDAKSEAEIEFGNRAEIGWSPDRL

SEQ ID NO: 171183 - protein, 143 aa, Oryza sativa
  unsure (1)..(143): unsure at all Xaa locations
  Clone ID: PAT_MRT4530_69437C.1.pep
EIKREGLEGERQKGEGEGAGRRRRPWRCSPAHGAEXIPTADFGGQGVDGTACTTANATVSTAQLGTAASGDRSGGGGDGGXRRRGARALEGTGELGQMGKKREGERGWRWSLNRGRGARTWPVEAGIAGRHGEWGRRERRDSK

SEQ ID NO: 171184 - protein, 45 aa, Oryza sativa
  Clone ID: PAT_MRT4530_69438C.1.pep
MGKGRGAPVGVATEFRRLLTDKRTSIWAVNSQMDVQNSSRPYPVT

SEQ ID NO: 171185 - protein, 479 aa, Oryza sativa
  unsure (1)..(479): unsure at all Xaa locations
  Clone ID: PAT_MRT4530_69439C.1.pep
EEEESKRKPRRXFGLVPPRSHATPSSSSSSTSSSSSSSSSSSSPPATQSHLIDLLACIVRANPNPFPSPNLLLPRPRASSTWAPALCTSQTQRKHEASCSNSYWGDVRFLYWNFVPSSXSITKLHFPSSIVSYIEDKNSALTAQAILNHAWTAARNAKGNDTESSSDTAMKIYVPTNPRGAESLAPGIVVPESDFHPRRLWGNPDEDLPFKPKYLVTFTVGISQKENINRAVKKFSDNFAILLFHYDGRVSEWDEFEWSKRAIHVSVRRQAKWWYAKRFLHPDIVASYEYIFIWDEDLGVEHFNAEEYIKLVKKYQLEISQPGLEPDRGLTWQMTKRRGDHQVHKETEERPGWCTDPHLPPCAAFVEIMAPVFSRDAWRCVWHMIQNDLVHGWGLDFALRRCVDPAHEKIGVVDSQWIVHQVVPSLGNQGQSEHGRAPWEGVRERCRKEWGIFQTRIAEAEKSYYEMMGVPPPNVTFVH

SEQ ID NO: 171186 - protein, 130 aa, Oryza sativa
  Clone ID: PAT_MRT4530_6943C.1.pep
MFLDLELLGVAAAWRRLEDGEDGWLLDYFLLLVGFGELDVLVVACCLMLERLKSLPYNSTMLWTAASRAAAPPPCRLRLRFRGAAAPPSRRPLFLHECAALRRRPAARIRPHNRREFSYQQVLSSMVVAN

SEQ ID NO: 171187 - protein, 177 aa, Oryza sativa
  unsure (1)..(177): unsure at all Xaa locations
  Clone ID: PAT_MRT4530_69440C.1.pep
LEQQIRGGGDRRRAAHGAEVAVVIVRWPEAADLAALSLSLSPVEGGGGDPGGGRSGAAVAGSGPPADGVAPAAPHRDGGGAGGGRIDDGXSFFTGLADARPLLTLPFSLALAHLAPRPPFFFPAASGTFRSPLTRGPVTXGRRVEEEIKALGCVASRTARWAHLVGLEESPSLPYTT

SEQ ID NO: 171188 - protein, 169 aa, Oryza sativa
  Clone ID: PAT_MRT4530_69441C.1.pep
MWRRLQTLAPALRRAASASASAAASGAAGPASLARAAPLSTAAAAAFRRTSPLLSGDKPATVEDVMPIATGLEREELAAELKGEKRFDMDPPVGPFGTKEAPAVIESYYNKRIVGCPGGEGEDEHDVVWFWLKKDEPHECPVCSQYFVLKVIGDGGDPDGHDDDDEHHH

SEQ ID NO: 171189 - protein, 236 aa, Oryza sativa
  unsure (1)..(236): unsure at all Xaa locations
  Clone ID: PAT_MRT4530_69442C.1.pep
LEQQIRGGGDRRRAAHGAEVAVVIVRWPEAADLAALSLSLSPVEGGGGDPGGGRSGAAVAGSGPPADGVAPAAPHRDGGGAGGGRIDDGTVILHRTRRRRPLLTLPSSLXQRAAASSRRWWHQRWLHRXWRRRLLHRARHLAPRPPFFSPAASGTFASPLTRGPVTXGRRVEEEIKALGCVASRTYLRNGFLRPVPLXKSERATRPPARARVSSQGTTQTKSLMDSARETDRSTTL

SEQ ID NO: 171190 - protein, 102 aa, Oryza sativa
  unsure (1)..(102): unsure at all Xaa locations
  Clone ID: PAT_MRT4530_69443C.1.pep
GSGSGCRLMVDQTHGTREEGLPRGADVXRPRGSHVGGEADGPDLPSGRSNGGGCARPVRTGLAQAGPAAMARSGAAPAQRWRAAGSGERRRRDGDMGGANGG

SEQ ID NO: 171191 - protein, 55 aa, Oryza sativa
  Clone ID: PAT_MRT4530_69444C.1.pep
HVSCASTPMSALCVHHDPSVDAQQWVAHHVRGNHQVEYTPQSECPHAVEYMPQLV

SEQ ID NO: 171192 - protein, 38 aa, Oryza sativa
  Clone ID: PAT_MRT4530_69445C.1.pep
RVKSRAEMSCCWLHVNQNKSGLFSVYKWKTLSSSLLEK

SEQ ID NO: 171193 - protein, 62 aa, Oryza sativa
  Clone ID: PAT_MRT4530_69446C.1.pep
FYLDFSDPKFQPSHMMMYDFIFNIHTNYYLVTNSVPDQTPPTVANAPGSYSSSGRWTIWIAS

SEQ ID NO: 171194 - protein, 75 aa, Oryza sativa
  Clone ID: PAT_MRT4530_69447C.1.pep
ESCLEMIKCVPQQGFFCFSRLFLFPMMIITISHAIFLAIPPSSKYCFFLVGKYWDFLTSSLIHTRFMLLHDSRSE

SEQ ID NO: 171195 - protein, 350 aa, Oryza sativa
  unsure (1)..(350): unsure at all Xaa locations
  Clone ID: PAT_MRT4530_69448C.1.pep
MKSLSFVLGQLGIAAGNYLNSSILSIVVGAMSPSPTWRPPDLRYKRDPPRDLRHRISEPTQRPQPTKSETTGAKSPGSTTITSSFVDNGVNTGPILGVPTSTMLVWTQVGEIVFPVYTTVPISTDSSMTRNENVVAINPDDPVSKDPPAVAENGTSMPYEPEKVPSSAKSCPSDKNCEPTRTSSETKNHDFSSCKVFLRTMKTTLPKVQQSGTSLKDTDKEQEATLTSDRFVGVIDIDPHEPSVLHLLEDYGSSSSSTPRDVFAIGGTNTSAQANAEAENQTVTPTQHLGTVNAILREAPYDPVLNNDLAXAQPERPTAEGADGEPPKQRTSPRXATPQPRGTGDLHDHL

SEQ ID NO: 171196 - protein, 1604 aa, Oryza sativa
  unsure (1)..(1604): unsure at all Xaa locations
  Clone ID: PAT_MRT4530_69449C.1.pep
HRTSVPQYPLYPVYGYPSSTVARHVGSFGAQGSTTMTSSFVDNGVSTGPIHGVPTXTMLVWTQVGEIIFPVYTTVPISAGPSIIGNENAVAITPDDPASKDPPAVAENGTSTSYEPEKVPSVAEPCPSDKNSEPTRTTSEVKKSWYPIHKSRKHNLQACWVFLNVQAKIRACKERGIQRTSPTHDVYCPIHKTKNHDFSSYKVFLHAMKTTLPKVQQVGTSRKGTNKEQGATLTSDRFVGVIDIDPHEPSVLHLLEDYGSSSSSTPRDMFAIGGTSTSAHANAGAENQTVTPAQHLGTINAVLREAPYDPVLNDDLARWIERLWESVANLSNAFEEAATRAQQERLIAGAANGEPPEQRTSPRXATHPPRSTGDLRDHLNGRREARRTRDNENHSRHRVSSQRRENEERRHNCRDRDDREQRTPDDAGRGRQHDGDDNGDRRXDNNGGXRQNSREPKRRPRNRTPEPSEPPSSSSSSSSSSSDRHPRRTHNRRQPTAPCTGCRAFNRSLRDVRWPERFRPGAIEKYDGSTDPEEFLQVYSTVLYAAGADDNALANYLPTALKGSARSWLMHLPPYSISSWADLWXQFVANFQGTYKRHAIEDDLHXVVRRFNECRNTIPDITDASVIRAFKTGVRDRYTTQELATRRITTTRSLFEVVDRCAHADDAVRRKNDESKAGGEKKPAKDTPESSKKKSGKSGKRKAQAEVLVSEYKRPPKHPDPQGSDTKRIWCPIHKSDKHSLEECLIFKKSLAKQLALEKGKRVRVVEKATEATTQDSDSAYPDSDLHVSHIFXVPQRRYPIVVEPTIRNIKVARVFVDGGSSINLLFASTLDAMGIPRNELTPTDQPFHGITPXSSSKPLGXITLPVSFGQASNFRAEKITFDVAEFDTAYNAIIGRTALAKFMAASHYAYQVLKMPEPKGTISIQGNTKLAVQCDKQSLDMVEHTPSPPATAEPPKKMIKTTKMPKPDDAIKIVPLSSANPDKTELALITFLRDNADVFAWQLSDMPGVPREVIEYKLMVRPVAKPVKQKLRRFAPDQKQAIREELDKLLKAGFIREVLHPEWLANPVMVRKANGKWRMCVDFTDLNKACPKDHFPLPRIDQLVDSTAGCELLSFLDAYSGYHQISMAKEDEEKTTFITSFGVFCYVKMPFGLITAGNIFQRTVQGALSDQLGNNVEAYVDDIVVKTKTCDSLIDDLRETFDNLRQYRLMLNPEKCTFGVPSGKLLGFLVSGRGIEANPEKIKAIENMKSPTRLKEVLKLTGCMAALSRFVVRMGEQGQHFFALXKKQDKFVWTQEAXEAFIALKCYLSNPPVLVAPQPNEELFLYITATPYSVSTVIVVERENVQRPVYYVSKALHDAKTRYAQIQKLLYAVIMTSRKLHHHFQAHRVTVVSAFPLGEVMRNKDVIGRIAKWVVELSQFDVHFVPRTAIKSEVLADVIADWTMPNNRCLHPLALWILPSQMTRLPTHKANPLILVRIVVVLLLPLEVGGLLSFIFPLALVLGLVHNIGTGLPTIILRRGVFFPSFLLNIKRCYQPLNGVFLSLVRTEVRKLGRPSSFAADHRSSAVAVKPSCHRLPPRRRPSPFVDRRCGEYHRVRLDVFYA

SEQ ID NO: 171197 - protein, 1575 aa, Oryza sativa
  Clone ID: PAT_MRT4530_6944C.1.pep
MRVHTHMPRYKPEYLFGVEGFVQELRTMSFAIGFGTAPFYAQIPHDHHEKKCRVKVTLNSNSEDIPSVMFEAGGRNCIHACQEVARIAIGELHDRYSDQLADTEYRYHPRQPQGSDRGSYLETEGIENDATTRHLVEMLWAMDETRAETVLAAQDREDRNRGKICKLEDKVDRLEKELAALKGEAPPQKSRIRLTARKRALFVPRYQLAPKVRVVEKEVTPALADPPVVNMVLTRSNGNGPNNNNNNNNNNGENPTLAQVLSQQAQLMNMMMQQLQNQTTAEPITWLEFTTAFRKTHIPSGVVSLKKKEFRSLTQGSRSVAEYLHEFNRLAHYAPEDVRTDEERQERFLEGLNDELSYPLMTGDYSDFQKLVDKAIRQEDKYNRMEQKKRRIAKFKAQQGNSQRPRLTLGPQSMPQGGSSSVARPQRQFFNNNAVNNIRNQAPRPVAASTQQQPAKREQGSKPVVCFNCGDPGHYADKCPKPRRVKVVPVQSNSTVPASKARVNHVAAAEAQDAPDVILGTFLVNLVPTTVLFDSGATHSFLSMSFAGNHGMEVEDLRRPMMVSTPSNQALSLQRSPSVKIEIQGVPFLANLILLESKDLDVILGMDWLARYKGVIDCANRKVTITSNDGRVVTVHALSSESLRSRLNQITLEEIPIVREYPDVFPDDLPGMPPKRDIEFRIDLVPGTTPIHKRPYRMAANELAEVKRQVDDLLQKGYIRPSSSPWGAPVIFVEKKDHTQRMCVDYRALNDVTIKNKYPLPRIDDLFDQLKGATVFSKIDLRSGYHQLRIKEEDIPKTALIEEHEEHLRLALEKLREHQLYAKFSKCEFWLSEVKFLGHVISAGGVAVDPSNVESVTNWKQPKTVLEIRSFLGLAGYYRRFIENFSKIAKPMTRLLQKHVKYKWSEECEQSFQELKNRLITAPILILPDLKKGFQVYCDASKLGLGCVLMQDGKVVAYASRQLRPHEKNYPTHDLELAAVVHALKIWRHYLFGTRTEVYTDHKSLKYIFTQPDLNMRQRRWLELIKDYDMGIHYHPGKANVVADALSRKGYCNATEGRQLPLELCKEFERLNLEIVSRGFVAALEAKPTLIDQVREAQINDLDIQEIKKNMRRGKAIGFLEDEQGTVWLGERICVPNNKDLKDAILKEAHDTLYSIHPGSTKMYQDLKERFWWASMKREIAEYVAVCDVCQRVKAEHQKPAGLLQPLKIPEWKWEEIGMDFITGLPRTSSGHDSIWVIVDRLTKVAHFIPVKTTYSGSRLAELYMARIVCLHGVPKKIVSDRGSQFTSNFWKKLQEEMGSKLNFSTAYHPQTDGQTERVNQILEDMLRACALDFGGSWDKNLPYAEFSYNNSYQASLQMAPYEALYGRKCRTPLLWDQTGERQVFGTDILREAEEKVKIIQERLRVAQSHHKSYADNRRRDLSFDEGDYVYLRVTPLRGVHRFHTKGKLAPRFVGPYKVVSRRGEVAYQLELPQSLAGVHNVFHVSQLKKCLRVPTEEANLEQIEVQEDLTYVEKPIRILETNERRTRNRVIRFCKVQWSNHSEEESTWEREDELKSAHPYLFASSSESRGRDSV

SEQ ID NO: 171198 - protein, 342 aa, Oryza sativa
  Clone ID: PAT_MRT4530_69450C.1.pep
MSAAVNEETSVYVGGLPYEANEDMLRDAFGRFGTIVSVKVINDQRVRGKCYGFVTFTHADAAQHAISGMDGKRINRRVVRVNEVRTRGAREFGREGFRREPGSARDAYWDRRDRERSYDRDRDPYHDRDSDRSRDRDRDRFYEPRGFDQEIDYPMDQDHGDERRRDYDRAAEMHNVDSDNDREKENSKDYDSEREKEKEQRSRKRFSRPKDHDSRDLSVSSDDLHSDAKRQLNKAIQMREDLENEVSQIKDKVAAKEQHIADLQKRSQKLEDELSAARKVSSERQLVVTKLYKCFLQLQDYNDRVKMSEKELQSLIDDAMGEVDIGEEATTKDGSMYENGVA

SEQ ID NO: 171199 - protein, 214 aa, Oryza sativa
  Clone ID: PAT_MRT4530_69451C.1.pep
MPGVPREVIEHKLMVRPDAKPVKQKLRRFAPDRKHAIREELDKLLKAGFIREVLHPEWLANPVMVRKAHGKWRMCVDFTDLNKACPKDHFPLPRIDQLVDSTAGCELLSFLDAYSSYHQISMAKEDEEKTTFITPFGVFCYVKMPLGLITAGNTFQRTVQGALSDQLGNNVEAYVDDIVVTTKTCHSLIDDLRETFDDLRRYRLMLNSEKCTFG

SEQ ID NO: 171200 - protein, 452 aa, Oryza sativa
  unsure (1)..(452): unsure at all Xaa locations
  Clone ID: PAT_MRT4530_69452C.1.pep
VFLRAMRTTLPKVQQSGISLKETDKEQEATLTSDRFVGVIDIDPHEPSVLHLLEDYGSSSSSTTRDVFAIGGTSTSTHANAEAENQTVTPAQHLGTVNAILIEAPYDSVLNDDLARWTERLRESVANLSNAFEEAATRAEPERPTAGSADSEPPEQRTSPRRATPPPRGTGDLRDYLNGRQEARHAQDNKNRSRHRVSLRRRENEERGGRSNEDQHHHNRHSHRDRDNHEQRTPDDAGRGRQHDGGDNGDRRHDNNGGRRQNSREPVRRPRNRTPEPSEPSSSSSSSSSSLSDRHPRRTHNRRQPTAPSAGCRAFNRSLRDVRWPKRFRPGAIEKYDGSTDPEEFFQVYSMVLYAAGADDNALANYLPTALKGSARSWLMHLPPYSISXWADLWQQFVANFQGXYKRHEIEDDLHTLTQNSGESLRDYVXRFSECRNTIPDITDASVIRAFK

SEQ ID NO: 171201 - protein, 364 aa, Oryza sativa
  unsure (1)..(364): unsure at all Xaa locations
  Clone ID: PAT_MRT4530_69453C.1.pep
VKRLIVKGDSELVANXVHKDYKCSSPELSKYLAEVRKLEKRFDGIEVXHVYRKDNIEPDDLARRASRREPLEPGTFLDILKKPSVKEANDEDSPVTPDISSXGATEAEHAVADIETTDDWWTPLIKFISSDELPEDDAEAEKITRQAKIYCMIGNDLYKKAPNGVLLKCVSSDDGKHLLLDIHEGVCGSHAASRTLVGKAFRQGFFCLTALKDTCDMVQRCEACQFHSKHTKLPAQALQTIPLTWPFSCWGLDILGPFPRGQGGYKFLFMAIDKFTKWIEATPTGEIKADKAIKFIKGIFCRYGLPHRIITDSGSQFISADFQDYYIGLGVKICFASVSHPQSNGXVERANGIVLQGIKTRVYD

SEQ ID NO: 171202 - protein, 243 aa, Oryza sativa
  Clone ID: PAT_MRT4530_69454C.1.pep
DGIDDYRSIRPNSSSVPYHKNNIESDDLARRASRREPLEPSTFLDILTKPSVKEANDEDSPVTPDISSGATEAERDVADIETTDDWRTPLIKFISSDELPEDDAEAEKITRQAKIYCMIGNDLYKKAPNGVLLKCVSSDDGKHLLLDIHKGVCGSHAVGRTLVGKAFRQGFFWPTALKDACDMVQRCEGCQFHSKHTKLPAQALQTIPLTWPFSCWGLDILGPFLRGQGSYKFLFVAIDKFNK

SEQ ID NO: 171203 - protein, 85 aa, Oryza sativa
  Clone ID: PAT_MRT4530_69455C.1.pep
CIRTTEIPKVRYVCIPYFLQPEFFFVGLACVLCSFNNYRYSSFSYRKIYSSVFLQTCHGSYPFLQLLQFNVWPLCLCIHHLFPRI

SEQ ID NO: 171204 - protein, 126 aa, Oryza sativa
  unsure (1)..(126): unsure at all Xaa locations
  Clone ID: PAT_MRT4530_69456C.1.pep
TVHLRVYGRSLYTLRKFISKSINGKVPTRIGLGRHYIVQGPMSPSPTWRPPDLRYKRDPPGRPKASNLIANTTTTAYEAGAYRSQVAGXSSRINSTTISSILVPTYPNTLYIRSTGTHHLTKRNTM

SEQ ID NO: 171205 - protein, 616 aa, Oryza sativa
  unsure (1)..(616): unsure at all Xaa locations
  Clone ID: PAT_MRT4530_69457C.1.pep
SNQLDYDLVDPRTSVPQYPLYPVYGYPPSTVARQVGELGAQGSTTMTSSFVDNGINTGPIQGVPTSTMLVWTQVGEIVFPVYTTVPISAGPSMTGNESAVAITPDDPVSKDPPAVVENGTSMSYELEKVASAAKPCPSDKNHEPTRTTSEVTKSWYPIHKSRKHNLQACWVFLNVQAEIRACKERGIQRTSPTRDVYCPIHKTKNHDFSSCKVFLRAMKTPLPKVQQSGTSLKDTDKEXGATLTSDRFVGVIDIDPHEPSVLHLLEDYGSSSSSTPRDVFGIGGTSTSAHANAEAENQAVMPAQHFGTVNAILREAPYYPVLNDDLARWTERLWESVANLSNAFEEAATRAQPEHPTAGGADGEAPEQWMSPRRATPPPRGIGDLRDHLNGRREARRARDNENRSRHRVSSRRRENEERGGHSNEDQHHHXRHNRHDRDAREQRTPDDAGRGHRHDGDDNGDRCQDNNGGRRQNSRETERRPRNRTPELSDPSSSSSSSSSSSSDRHPRRTHDRRQPTAPSARCRAFNRSLHDVRWPERFRPGAIEKYDGSTDPEEFLQVYSTNPGESLRDYVWRFNECRNTISDITDASVIRAFKTDVRDRYTTQELATRRITTT

SEQ ID NO: 171206 - protein, 847 aa, Oryza sativa
  unsure (1)..(847): unsure at all Xaa locations
  Clone ID: PAT_MRT4530_69458C.1.pep
MAAGTASPPPDAEPPECPVCLSPFDAASAAPRVLPCGHSLCGPCIASLPPASASASASAASLRCPLCSQCVPFSRALGPSSLPKNLALISLLPSXQTPLVLAPPPRRRRLLMSRSTRTTRVSSPASATPSSRSPLRRSTRPLPPRASPSGPSLPTSAPRGSARXGHPVSLLPIETPAAAAKQESPLYYRPSHAARVAAAIDALSAAARDEVIDLVAVSSRLARRVCRVYGFWMGPEAAPLWLLSERHSRGVSCLLEERSRREETVALIRNVGMEVCEAFMGLHGEGLVLGCIGLGCFCLDRFGHCLLDLNQVLALCHGVRVGVCSSKSKAFMAPEVAEVVHDKLQIKDHDFSGLLGPSSDAWLLGCLLVALVTGDEQLAAGWSTEGSYDDWKNEVLTKVDASLVGTHMEPWSATIVSCLNYDPEGRPEIADVWKCINGSLMNSDIEALIPNVDLAARKSFMCLLLGELSSMCSNLGAVESDDTMHLSQDLDDKHSTPDDASSGGIINNEEVGAAGMDGPKCGLYNSSTLLAHRDCITGLAIGVDIFNVMHLTRTATQGLPNNRSSLTAGGFLFSSSYDKTINVWSLQDFSHKQSLKGHEHKITAIVVVDNDNQSLCISGDSGSGIFVWCVDPSLSNEPLNKWYESNDWIYRGVHCLAVSGTGYLYTGSRDKSIKAWSLEDYSLRCTMTGHKSTVSCLAVACGILYSGSWDGSIRSWWLTDHSPLSVLEDGTPGSITPVLSISTELDFVVASYENGCLKIWKDDVLVKSEKLQNGAIYAAKLNDKWLYAGGWDKVVNIQELLEDDSEVEIRDVATFTCDSIITSILYWDGRLIVGLSNREIKVFYKAS

SEQ ID NO: 171207 - protein, 1388 aa, Oryza sativa
  unsure (1)..(1388): unsure at all Xaa locations
  Clone ID: PAT_MRT4530_69459C.1.pep
MSTMRRDTRKYPNRGCDNTPCTTQLTAVHCSWIIITPSTTRGMDSPATPMDFSPLLSLVPRNESCYTKGKAVAHAGLWLATSLLSEVIKSWCLIHKSRKHNLQACGVFLNAQAEIRAYKERGIQRTSPTRDVYCPIHKTKNHDFSSCKVFLRAMKTTLPKVQQSGTSLEETDKEQGXLTSDRFVGVIDIDPRKPSVLHLLEDYGSSSSSTTRDVFAIGRTSTAFNRSLRDVRXPERFXPGAIEKYDGSTDPEEFLQAYSTVLYAVGADDNALANYLPTALKGSARSWLMHLPPYSISSWADLWQQFIANFQGTYKRHAIEDDLHALTQNQGESSRDYVRRFNECRNTIPDITDASVIRAFKIGVRDRYTTQELATRRITTSRRLFEVVDXYAHADDALRRKNDKPKAGGEKKPAKDASESSKKKSGKSGKRKAQAEVFASEYECPPKHPDPQGNDTKRIWCPIHKSDRHSLEECLIFKKSLERQLALEKGKRVRVVEKATETTTQDSDSAYPDSDLHVSHIFGGSTAYSSNTLDAMGIPRSELTPTDQPFYGITPQSSSKPLGKITLPVTFGQASNFRTEEITFDVAEFDTAYNAIIGRTALAKFMAASHYAYQVLKMPGLEGTITIQGNTKLAVQCDKRSLDMVEHTPSPPATAEPTKKELTLITFLRDNADVFAWQPSDMPGVPREVIEHKLMVRPDAKPVKQKLRRFAPDRKQVIREELDKFLKAGFIREVLHPEWLANPVMVRKANGKWRMCVDFTDLNKACPKDHFPLPRIDQLVDSTAGCELLSFLDAYSGYHQISMAKEDEEKTAFITPFGVFCYVKMPFGLITVGNTFQRTVQGALSDQLGNNVEAYVDDIVVKTKTGDSLIDDLRETFDNLRRYCLMLNPEKCTFGVPSGKLLGFLVSGRGIETNPEKIKAIENMKSPTRLKDEAEEAFIALKRYLSNPPVLVAPQPNEELFLYIAATPYSVSTVIVXEREKVQRPVYYISEALHDAKTRYPQIQKLLYAVIMTSRKLRHYFQAHKVTVVSAFPLGEVVRNKDVVGRIAKWVVELSQFDVHFVPRTAINSQVLADFVADWTMPENRSGSQIDNETRTMAFDGALNSQGAGAGFILTSPSGDQFKHAIHLNVKATNNTAEYEGLLAGMRAAAALGVKRLIVKGDSELVANQVHKDYKCSSPELSKYFAEVRKLEKRFDGIEPSVKEANDENSPVTPDISPGATEAERAVADIETTDDWRTPLIKFINSDELLEDNVEAEKITRQAKIYCMIGNDLYKKAPNGVLLKCFSFDDGKHLLLDIHEGVCGSHAASCTLVGKAFRQGFFWPTALKDDCDMIEATSTGEIKADNAIKFIKGIFCRYGLAHRIITDNGSQFISADFQDYYVGLGVNR

SEQ ID NO: 171208 - protein, 285 aa, Oryza sativa
  Clone ID: PAT_MRT4530_6945C.1.pep
MPRAAPRRRRPAPPPLRCRHTENVNERTNVNENKNERTNVNEPTNVNENERTNVNENKVNERERERCRTNMNEPTNVNVKCNYRQKDVVGVVPQAGVVELALEGIRPGKEILMDERNPTMDIVDGISQSVHDSQPDGGQSSRVAMEEDVPSRVGSHDSGHGIPETRMVVDNVDSSAVIPPEYADPQILTPMLGQRFKTERDAYNFYNVYAVSKGFGIRLDKDRKNTKNQRTMRQICCSHQGRNPKTKKPSVRIGCPAMMKINRSRAGSGWSVTKTIVLPWQLPLE

SEQ ID NO: 171209 - protein, 151 aa, Oryza sativa
  unsure (1)..(151): unsure at all Xaa locations
  Clone ID: PAT_MRT4530_69461C.1.pep
MGLREKKRNQRRVLARRSAAPRSGEGKDFLPLEERPGKKRAREEQPEEPENTSTVLYIGHTLQIAIVPPEKIHPKLWKGVRRGFTPIDRVAIERRRLNKDKTIEEHKKLVDKIVKRDEKRRXRIKAAGIDYECPPLIGSVQPSAKKIKFED

SEQ ID NO: 171210 - protein, 214 aa, Oryza sativa
  Clone ID: PAT_MRT4530_69462C.1.pep
MGLREKKRNQRRVLARRSAAPRSGEGKDFLPLEERPGKKRAREEQPEEPENTSTVLYIGHIPHGFYEEQMQGFFQQFGTVKRLRIARNRKTGKSKHYGFIEFENPEVAKIVADEMNNYLLFEHTLQIAIVPPEKIHPKLWKGVRRGFIPIDRVAIERRRLNKDKTIEEHKKLVDKIVKRDEKRRKRIKAAGIDYECPPLIGSVQPSAKKIKFED

SEQ ID NO: 171211 - protein, 82 aa, Oryza sativa
  Clone ID: PAT_MRT4530_69463C.1.pep
PAAPPPSSHRAAATKPPRCAAPCAVVEPEGVADPSEGQDPQDLEQGKSSLFLEHVDPNCEIILFINKIACNDEHPTCDYAMP

SEQ ID NO: 171212 - protein, 222 aa, Oryza sativa
  Clone ID: PAT_MRT4530_69464C.1.pep
MAKQLALVLLVAVVAAAATSVAAATKLTLHNLCPYPVWPLVTPNTGFPSISGNTARLDGGGRGLVSYDFPASFWAGRVVARTGCGGGGGLVRCETGNAPPATVVQLVVHSPEGAQDLAAYSVSLVDGFNVPAVCPALGCAADLNAGCPRSQRVVGAGGAVVACRGTADYFKARCPLTRTTGSDVEPVPQHCLAPGELKVVFCQPSMVAAAVPELIRTVVANI

SEQ ID NO: 171213 - protein, 233 aa, Oryza sativa
  Clone ID: PAT_MRT4530_69465C.1.pep
MAKQLALVLLVAVVAAAATSVAAATKLTLHNLCPYPVWPLVTPNTGFPSISGNTARLDGGGRGLVSYDFPASFWAGRVVARTGCGGGGGLVRCETGNAPPATVVQLVVHSPEGAQDLAAYSVSLVDGFNVPAVVSPQAIAGGGQCPALGCAADLNAGCPRSQRVVGAGGAVVACRGTADYFKARCPLTRTTGSDVEPVPQHCLAPGELKVVFCQPSMVAAAVPELIRTVVANI

SEQ ID NO: 171214 - protein, 627 aa, Oryza sativa
  Clone ID: PAT_MRT4530_69466C.1.pep
MEVMSRHHAPDRSLCLLLLLLFLLLGVPMAASTEQSPARLNKAHEDIMRDILSSVGSTKNWNTCSNPCQWSGVHCSSVASSAFVTRLSLPGCGLSNATILASICNLHTLRSLNLSRNSFTDLPSQLSPCPMKAELQVLDLSSNMLSGQLGDFVGFHKLEVLDLSSNSLNGNISTQLSDLPKLRSLNLSSNGFEGPVPTSIATSLEDLVLSGNNFSDHIPMGLFRYGNLTLLDLCRNNLHGDVPDGFLSFPKLRILVLSENNLTGKIPRSLLNVTTLFRFGGNQNNFVGSIPQGITRNIRMLDLSYNMLNGDIPSELLSPDTLETIDLTANRLEGFIPGNVSRSLHSIRLGRNLLGGSIPESIGNAIDLVNLLLDGNKLVGYIPWQLSRCKNLALIDLSSNQVQGNIPIGLGNLEQLVVLKLQKNNLSGDIPSSFSDMSALEILNLSHNSFTGELPFTNSTQSLKLCYLGLHGNKLNGVIPSSISLLQSLITIDLGNNELIGIIPTNIGTFLKLERLDLSKNYLSGQVPSSVANLERLMCLFLSDNNLSGPLPELPKWVMVNVTGNPGIILDTEENRTSGSMKGSQDDFRSAIWVAAASFVLGFSLSFYWAGPGEKLMPRLETLHCDD

SEQ ID NO: 171215 - protein, 106 aa, Oryza sativa
  Clone ID: PAT_MRT4530_69467C.1.pep
LEEERVPFKAIPFGGGPGQKPFEIPFTAPPRLHSWVHLWWEVFTSRRGGDAPPALGQNMLLGGCFFPKKKKEKTKKKKKKIKKYKPEKSKNNKKKKAAATGGSEAD

SEQ ID NO: 171216 - protein, 48 aa, Oryza sativa
  Clone ID: PAT_MRT4530_69468C.1.pep
TPSSKNAEGKNHLPVPSSHETDLCFLVFTVHHGHRQEINKQRLIIHHP

SEQ ID NO: 171217 - protein, 86 aa, Oryza sativa
  Clone ID: PAT_MRT4530_69469C.1.pep
MSLPWMACMWVRQEDRRSQREEDGGLTGDGDGKTEHWRSIDRGVMRCPTVRRSQVMPREGHVHKVEHVGGSVDRILQVDEMQECQY

SEQ ID NO: 171218 - protein, 60 aa, Oryza sativa
  Clone ID: PAT_MRT4530_6946C.1.pep
IMQLGQMCCCHKFRAKTYPRARSCFRTLGAGRIENGSSVICSRRELGICQMFPIGGSHDT

SEQ ID NO: 171219 - protein, 53 aa, Oryza sativa
  Clone ID: PAT_MRT4530_69470C.1.pep
ARAFPCIGMVNNICLNFDAFHGDKDHGGIPDGPEIVLWKWCKGATQPWKTPPW

SEQ ID NO: 171220 - protein, 67 aa, Oryza sativa
  Clone ID: PAT_MRT4530_69471C.1.pep
TQERNLSFRKKKKETKPTQRKPRSRTQPTAHSRRPALLISLSRSYRKSIIYAQRISSYDQGQTSIFQ

SEQ ID NO: 171221 - protein, 97 aa, Oryza sativa
  Clone ID: PAT_MRT4530_69472C.1.pep
GTAPYPSPRCLVARCPNPGSRHLDNGRISFSPRNGRGATNFWPVGTMMTLRCPSHLELMGSSERVCQPDGHWNGSLTSCHSEGYYTDVEKKTLYIFK

SEQ ID NO: 171222 - protein, 68 aa, Oryza sativa
  Clone ID: PAT_MRT4530_69473C.1.pep
RSATTARARAGGAAIWAASAGTTARVEKESSTRLTGRAGREREREREPGREGEMGREGFGPSNSREAK

SEQ ID NO: 171223 - protein, 339 aa, Oryza sativa
  unsure (1)..(339): unsure at all Xaa locations
  Clone ID: PAT_MRT4530_69474C.1.pep
HADIDEEGAAEERGSAPHRGPPHRRRRALRGPRRHLRPPPPPPPQGPASGRXPAASGDVNGSGXGSRSAAGCCGTRTGGTASPSPTPTPRSLPPPPSLSQACVNGQCATAAARGRAASAARSGGAETGGGRVGGAADVVERWPAGVTAPVPSCRGGSGARTGGERGPRARRVARQGVVGPGQAAGVVERRPAGLTAPVPPIAAEGGEVARAAKCPPLIPLSRAVGRSVRTPELAVVIFNVLGTLAPVPVSPSPPRPPELEAAGGGDSEGEPGLIVLQQERLERRRRRLGDDSDDSSGLHAPSPVSSPPSSLPAPLMQSTKSSQKNSSGAAARRLPSHRI

SEQ ID NO: 171224 - protein, 549 aa, Oryza sativa
  unsure (1)..(549): unsure at all Xaa locations
  Clone ID: PAT_MRT4530_69475C.1.pep
MRKEPTAGDTEATNEHQHEGAPRGGRRERQQTQATGTRTDRDANATPDESRRSEAKTATRQGRGEAAEGRRGERIRPRNRTPDRRRPRTNDKEERRPNPNKRKRGQAGEPDETKRRENEEATQPPRRRRTRQSRSTKXTRVGQPQRYSNATRETKRTKDGGAARRRRQERRGAPRAGRRREPRGEERNSRATRRRTEHDHINGAKRAGTTEAGGKRRTQEDEVGDRGTKATKTHRRDAGRKXRRAAXRRSEEAAHGGRRRRADNANRRXGSERRRYRXQEXTARREXXGTEQXHQQPTKRTQTNRQRAQRTHKXRQRRHTHKKRRXRRRHARILRLTRSTYSSPRENSRRQGXRQKTTNKNGEEDEGGLKDRTQQARRRRIETRRTHGGGQLTEKREVERGERTGRAKETPDKTRPTHRTKKKEARAKHTLEHRKRRLDRKASEETAGAARGEKEGKTQITNRTRXTEYDNHHQERNRQTAAERQEIIAHRRTNISAPERATKRAAGVIEERNKKRKYRGNRHRVTKRETRGQPIANTDGKRHRDNRRG

SEQ ID NO: 171225 - protein, 119 aa, Oryza sativa
  unsure (1)..(119): unsure at all Xaa locations
  Clone ID: PAT_MRT4530_69476C.1.pep
MASAGGCKKKTGNSRSRSPRSPVVLRRAMLHSSLCFLVGLLAGLAAPSDWPAAAGAAVFLRTLRASNVIFSRSSNRPQQPQLVVVVTTTEQSDDSXRRAAGLTRTAHALRMVSPALFWL

SEQ ID NO: 171226 - protein, 156 aa, Oryza sativa
  unsure (1)..(156): unsure at all Xaa locations
  Clone ID: PAT_MRT4530_69477C.1.pep
RRGVCGGRRCCLRGPPSPLRSDRAEGTAPRQPPPAVPKGPPPPLRLDPVEGRARPPPAAAAASAWPPPKPADSQLPPSTGSPPXPPPLSVGCPPPPXPVGSGGEEGXPPPPLPRPLGRLPAAGACRLRHAAMASRPGSGCGGGNSDGGVGRKQWGG

SEQ ID NO: 171227 - protein, 152 aa, Oryza sativa
  Clone ID: PAT_MRT4530_69478C.1.pep
VWEGDWCGALWDFAPSEKRWLLPRELNGGPLRFSQPYFFLNAGKLIDFGWTIKKSNILHIPVSRPLSSYNFPPFFFFFFFFFFFFFFFFFFELINYTCINLQQMADNKSSKILHNTLIVISYNIATSGSMMAWARPPCAHSTAYKQSWDCFA

SEQ ID NO: 171228 - protein, 307 aa, Oryza sativa
  unsure (1)..(307): unsure at all Xaa locations
  Clone ID: PAT_MRT4530_69479C.1.pep
CPHPSTSTPPLTPKPXAPPKRGRGRPRKNPPPPPPPATDPNPHPPSGAGAGAGAGAXHAPSPPATWSGARSSPTRPGPARSSPPPPPAPSSSSPSSATRPSPGATPPSSGPTSPTSPSPSCPMARPTTSRPPSMPPSSSSSPPFSSPPPPPISSPAHSYPAVSSRCCTTSPSTEWASPTVSTPPSLRRISEPSTSSGAYPTLPSTPSTSAYPMSPPPQPLPTTATPTPHPGGGGGRGRRWRRKSSMTPMRIGTHARRVPLTPIPKSISTARGSPRAAGAAVHHAGGHAGGLGKTMLGGLHTSRTRTR

SEQ ID NO: 171229 - protein, 219 aa, Oryza sativa
  Clone ID: PAT_MRT4530_6947C.1.pep
MSLVLIDVMPTPQGSARHGEQPVNLPPSPVLPSSDETELEPPAAIQPTQHAFAREDMQQPHCAAVAESTVRLKMTRQMITIEVAEALCDNVDKVQMDRPGMDKITFDVAEFDTAYNAIIGRTALAKFMAASHYAYQVLKMPGPKGTITIQGNAKLAVQCDKRSLDMVEQTPSPPATTEPPKKVCKTNKAPKPYGAIKIVPLSSANPDKTVKIGATLSEK

SEQ ID NO: 171230 - protein, 76 aa, Oryza sativa
  unsure (1)..(76): unsure at all Xaa locations
  Clone ID: PAT_MRT4530_69480C.1.pep
AHFLHLPPIEFETAKKKKXKHXSDYTCFXTHKHTNHTYTTRPSPSXQPHNXFNTRTFXFSRLIKQLSHACMHGCVR

SEQ ID NO: 171231 - protein, 69 aa, Oryza sativa
  unsure (1)..(69): unsure at all Xaa locations
  Clone ID: PAT_MRT4530_69481C.1.pep
SYIINHAYCSISFQSKLTLWRRLNTAIKFYARTFIISTKTLFXHNMXXLVLGICIVRALWPKITSTNLH

SEQ ID NO: 171232 - protein, 68 aa, Oryza sativa
  Clone ID: PAT_MRT4530_69482C.1.pep
TSENLTVTVLAPEASGSSSVVSLNSAPTTPNSSYDYLNGCVRRSGLGKRRSGFRRMYSFLAGSPKESD

SEQ ID NO: 171233 - protein, 308 aa, Oryza sativa
  Clone ID: PAT_MRT4530_69483C.1.pep
MYAAMYPETFGFSAYPQQQQPPPDAASCIYTTALPLIADPPDILGNMAQPSFLSEYDLGGEGDLFKAPEPIIEEPVLSLDPVAAAISMMSGSENVMDETIEVADISDIQNDSLLSEVLYECEKELMEKSAIEETISELLDVKIPMLQVEEFPRETQVQLPAMEKEKPSVPECCSLQKSVSSGCLNSADWINGPARPNFLDFQGLDFETAFGLRRAYSEGDIQNLGASTPRPGNSGNAQLASCERLVTISDLKSEERKQKLSRYRKKKVKRNFGRKIKYACRKALADSQPRVRGRFAKIEEGDLLKPRK

SEQ ID NO: 171234 - protein, 69 aa, Oryza sativa
  Clone ID: PAT_MRT4530_69484C.1.pep
QHYVTGRQNQIKIRTPYQRSNETPSTYVVTKLKYVDKPTNNIIFIAVSTEFIVYICQTFLQLNRAATDT

SEQ ID NO: 171235 - protein, 120 aa, Oryza sativa
  Clone ID: PAT_MRT4530_69485C.1.pep
SSPVRTGLWKEESKLQLQPPPRSPLLLLSKFQLLVSSDRSIGWSVSRSSERAGLASLAAAHYGPGPYCDEMQRGVHGALGVVGELVIGPCGHLPGLDRLSESPAPQLPMAAVSFPFSFPA

SEQ ID NO: 171236 - protein, 62 aa, Oryza sativa
  Clone ID: PAT_MRT4530_69486C.1.pep
MSTTTKSWSIRESGGWRGHRGLSESTGSIRREPTVAMRLVLSCVRKRGVEVEGVRSKASTRR

SEQ ID NO: 171237 - protein, 274 aa, Oryza sativa
  unsure (1)..(274): unsure at all Xaa locations
  Clone ID: PAT_MRT4530_69487C.1.pep
VNPKADQPDTPADPTPSRPPSPGADVSKGXAGGADMWAPRVSGSRERGRGAGTWAPRAVAQGGRGCGWQAGRTGLGSKREGAASAGLGSAPSRPAGXGERRRQAAIDGGYRREDGGGRRRGRWRIAATHMRGAAARTRGREGEGVLNGVRPATQEETTTVSDRRATSXAAELQDTLREEIREVXGREGVHGEREPWPTAAAMEGLTGTRRTTAFDGGIRWRRGGRAGGARGRRSGKGGGGGCSGAKNHKGHGEAKRAGTEGKKGGRGRCRGGVF

SEQ ID NO: 171238 - protein, 246 aa, Oryza sativa
  Clone ID: PAT_MRT4530_69488C.1.pep
MSGRRDDSAKMAKLKELLHRSENRICADCSAPDPKWASANIGVFICLKCSGVHRSLGTHISKVLSVTLDQWSDNEIDNVIEVGGNSHANAIYETFLPQNHSKPHPDSTQEEREKFIRSKYELQEFLEPSLRIVSHQSSDSGKHAGSASHSVSSKSEVGMIEFIGILNVKVKGGTNLAIRDMSSSDPYVVLTLGQQKAQTSVIKANLNPVWNEELKLSVPQQYGPLKLQFTESGEVELEMQWFPLNM

SEQ ID NO: 171239 - protein, 116 aa, Oryza sativa
  unsure (1)..(116): unsure at all Xaa locations
  Clone ID: PAT_MRT4530_69489C.1.pep
SDPSSPPPSSLQIHQHPLLLPSNRQRRLLRRRFSGGGARXLQQQRVAATATERVAATEGERAAVHGPSASLPXSLLSPRPPASLLSPPPLASLHSPPLCGEGGGGGRGAEWHREEV

SEQ ID NO: 171240 - protein, 733 aa, Oryza sativa
  Clone ID: PAT_MRT4530_6948C.1.pep
MDKQVKNHRPSDGTDGSREILMDERNPTMDIVDGISQSVHDSQPDGGQSSRVAMEEDVPSRVGSHDSGHGIPETRNLVPSLDWTEGNPYEKEGAGIPMERMVVDNVDSSAVIPPEYADPQILTPMLGQRFKTERDAYNFYNVYAVSKGFGIRLDKDRMNTKKQRTMRQICCSHQGRNPKTKKPSVRIGCPAMMKINMSGAGSGWSVTKVVSAHNHPMKKSVGVTKNYQSHNQIDEGTRGIIEEMSTFFGCALLREETEESFTWLFNTFKECMNGKVPIGILTDNCPSMAAAIRTVFPNTIHRVCKWHVLKKAKEFMGNIYSKRHTFKKVFHKVLTQTLTEEEFVAAWHKLIRDYNLEKSVNLRHIWDIRRKWAFVYFSHRFFAGMTTTQRSESANHVFKMFVSPSSSMNGFVKRYDRFFNEKLQKEDSEEFQTSNDKVEIKTRSPIEIHASQVYTRAVFQLFSEELTDSLSYMVKPGEDESTVQVVRMNSQESFLRKEYQVLVQYGLSRIPERYILKRWTKDARDTIPPHLHGYKDDVNASQSRSYRHVMLNRKTVEVAKIANKDVQTFKMAMTVMNKLLEDMKNQLSLDDGDNSREAPKRAARHKSRSTVLTEDGNEDVGGGDEDSEYDVPSEDEGGNLTADILPPLKKRSRGRPKVNRYKSGGEVASLKRRKEVGIEKKNTTNECESVEKENQVIDHEDEVPFPRRFCHTCHEAGHNSRTCGRTSTYKRKL

SEQ ID NO: 171241 - protein, 46 aa, Oryza sativa
  Clone ID: PAT_MRT4530_69490C.1.pep
PHLRGRMGGLVGCLVLHSNQPVGGEYSHRGQQLLFHTTQEALTIAV

SEQ ID NO: 171242 - protein, 295 aa, Oryza sativa
  Clone ID: PAT_MRT4530_69491C.1.pep
MSGRRDDSAKMAKLKELLHRSENRICADCSAPDPKWASANIGVFICLKCSGVHRSLGTHISKVLSVTLDQWSDNEIDNVIEVGGNSHANAIYETFLPQNHSKPHPDSTQEEREKFIRYFIPLLVRSTFKCRVGMIEFIGILNVKVKGGTNLAIRDMSSSDPYVVLTLGQQKAQTSVIKANLNPVWNEELKLSVPQQYGPLKLQVFDHDMLSKDDLMGEAEIDLQPMINAAAAFGDPGLLGDRQIGRWLKSGDNALVRDSAVVVAGGEVRQELALKLQFTESGEVELEMQWFPLNM

SEQ ID NO: 171243 - protein, 93 aa, Oryza sativa
  Clone ID: PAT_MRT4530_69492C.1.pep
GTYAALPTHDLFQLLTEETYCLIIHSATTLHKRILKSKTLMVEPPGYRLFLVKPYLLSLRKIKTILLLRRELQIVLNSVLSLGINDLKSPWML

SEQ ID NO: 171244 - protein, 181 aa, Oryza sativa
  Clone ID: PAT_MRT4530_69493C.1.pep
MAQLINREENLQKVPEQVGPSVKLQMKWMELVACRHPSLSSSISRKAAMHPTRRGTRDDVGRRFLKTALHKLLGLSVQGFSSRVYEDPQLNAATPGICTRTDRGLARSSSYHPNPVRSPVRKALARYTCRPLHPARCPFGPGPGGSSRWTGRMRYQCGRQRDERATCSVPVTYTSIARRLW

SEQ ID NO: 171245 - protein, 64 aa, Oryza sativa
  Clone ID: PAT_MRT4530_69494C.1.pep
MALPGSLSPPFPQDLVQGRALSPPPLGSPPDLAEGRRTPPGSPPHPLLLDWVEGRGSLGYCHLR

SEQ ID NO: 171246 - protein, 87 aa, Oryza sativa
  Clone ID: PAT_MRT4530_69495C.1.pep
TPCSTWNSGILPPGSCSTGNTYCFLTGSAAGDSLPPLQTILLLVPRSPFRRDLVHHSLIAWPWLLLLVDSCIGLSWTSVELFLSGWS

SEQ ID NO: 171247 - protein, 330 aa, Oryza sativa
  Clone ID: PAT_MRT4530_69496C.1.pep
MAGDGVDWESVAEATSGAVGALVSTTVLYPLDTCKTKFQAELQTQPGAHKYRNLSDVFWEAVQKRQILSLYQGLKTKNIQSFISQFVYFYGYSYFKRLYLEKSGAKSIGTKANLLVAAAAGACTVVVTQPLDTASSRMQTSAFGKSKGLRATLAEGTWLEAFDGLGISLILTCNPSIQYTVFDQLKQKLIQRQRRKNAEAGGGSSPVALSAFSAFLLGAISKSVATILTYPLIRCKVMIQAADPDEDDDDESERPGKSKSPKTMLGALHAMWSKEGIPGFFKGLHAQILKTVLSSALLLMIKEKISRFTWISLLALRRYLFVSQKRIKSA

SEQ ID NO: 171248 - protein, 112 aa, Oryza sativa
  Clone ID: PAT_MRT4530_69497C.1.pep
VRPNAVRVSHGQTTTTLETARASRHRCAPPLGLGWRVPARWPLRRRIRRWWGWGRIPGRARRRGMAFSELQREQQLLATCTRLYHQFTEHLGSLERRLCASSETLRTKRRLL

SEQ ID NO: 171249 - protein, 179 aa, Oryza sativa
  Clone ID: PAT_MRT4530_69498C.1.pep
MTNHFVVKRRLYIFAPRDPTLVTLIREREDFKRPNPNLTVTSLSPTPSLVSPSLLTHAITTVTGYGNDNKLFCATSCFLDSTLGYSTLIPIFSSSDAPFKCSNVEKMEDTTPLAWRRGSIDPLAEQLFFVEATTSKELDLVTTWCTPLMRRMPASLLVIPYILEGRGQHWGDGNGHAHA

SEQ ID NO: 171250 - protein, 849 aa, Oryza sativa
  Clone ID: PAT_MRT4530_69499C.1.pep
MRKTGQDENERLKEVKEKIIAKCNGSPLAIIMLAGRLLVNRNRSANEWEMLLEYAAEPTDHGDIDSIFHLCYAVLSFPLKQCFLYHSLIPKDHVISCDKVVQMWIAEGFVGADATSELPEVLGMKYYKELVARHLLEPVDEYDGQGHYKMDNLVHTFAKNVVESESLVVEEGEENPEPFDVEEGHIRRSWAAKEKIEWKAPKELHSLRTLIIIGNVIVQASTGRTLSSLSRLRTLHVNKNEHVHILLDSLHHMKHLRYLDLSYTDALALPNDIGEMKFLQYICLQGCKKLVKLPKSIVELHKLRYLNISETKIKSIPEEGFGGLKNMVSLHGFPSQMMESVIAKDWCSLGELKYMSQLMHLALEGLENCASGSMASLAKIDDKKNLASLRLSCTSRLSVNGEVDKETVEEVFDQLCPPPKLQELNIKGFFGARLPRWLIFTNLAELRVLKLDNLVCCNQLPSTLWQLPCLEYLYIKHTLNVKHIGHGFLLQSSIPGPRETDVAATTPTAATSATAATAATTTTTTIGGGSTHNRGPYHRLSGAGSVGSGEEGEIVAESATEDAATTTGSSNAIGFPKLKKLVMYGMMKWKEWEWEDQVEAMPKLENMHISWCLLNQLPPGLASQARSLRILVVDNVKNLISIDGFCSVVQLHVSSNFKLERISDLPKMESLTVSRCPKLNILQRLPALQSMELNDQEMERLPDCLRDLPAKLRHLRITCNLDLLTLISRGKGTPEWEKIKHIQQVNACTDAEDDKTDKRFVFYKRDSDSTETNIEPSPSTSQVGGRFSYFFFIFCSSFYNYKVHSNMVRRSYEYMGQLQVENAMGILKGANLHPEVLAEDPRLGDRKDG

SEQ ID NO: 171251 - protein, 454 aa, Oryza sativa
  unsure (1)..(454): unsure at all Xaa locations
  Clone ID: PAT_MRT4530_6949C.1.pep
LKTEPPTFAIAIDPMEASDWLRTVEKKLGLIQCTDQERVGFATHQLVGPASEWWNSYEASRPEGHTITWNELFSPATFMVVSIMVSRQVXITLRKREFRYLKQGDLTVTEYLHEFYRLAHYAPEDVETDEDKQEKFLQGLKDEXAVQLLLEDYEDFEKLVDKAMQLESEHNRMTNCKRRIVNIPVFPCGNQRQRTEPLQITGSSVVHQEFPRQEDGHNADNNISNTNDDDVTTNNHASCPNSDHSNQACNVNIIHQDVDDSINDGTQNDNPSNWDSEKDSDGDSNYGTTDANVSKDFQPPIPTPSQNDRPQTDSSAKKTLICYNCKEPGHYSRDCLQPRQSRPPHYRQFTRSRHPNRIVVTGANAVPVSLKGSRLKYHIVTRSIHNSRSEEYLVDKVDAKDMNYAKXSGTEAPSSGAATQSKSAKGSTRDKSGEEKIPSATGDRAKQSRVEKFC

SEQ ID NO: 171252 - protein, 148 aa, Oryza sativa
  Clone ID: PAT_MRT4530_694C.1.pep
MADELAEAISGGGRCPVGHGGGACDAEARPGSGGGSRRGKGRLGRARGEGEEAGHGRQQRSCRCGRDHRAWFSLSSIRFTPYVHSFFVDTCTVLQQRPADADLTTAAANGGCAFCPPGRVLHPTEFYCGKQQHKDELDLSLQKLKLLS

SEQ ID NO: 171253 - protein, 66 aa, Oryza sativa
  unsure (1)..(66): unsure at all Xaa locations
  Clone ID: PAT_MRT4530_69500C.1.pep
NSVRGKDVGKXFRCIRMVNNTXXNXDAFHGDKDHGGVXDXTTXVLXEWXKGDNXSXKIXXXGPEAH

SEQ ID NO: 171254 - protein, 301 aa, Oryza sativa
  Clone ID: PAT_MRT4530_69501C.1.pep
MDASRRPDAASSQSQRRSKRPRSSPTQHSPEQHKRPPRVWNPQDEVTILRALISYRAKNGALPGSSQDTGKLHNMIRGQLSVKASTTQLSDKVRRLKHKYNLILTRVTKSGRDPDLPTEHDREVYELSKKVWGTKSGGAGAGSGGGGGGGGGRVYENAEVVQSDEEQGSRDDSDEDMESGWDDRDHRNRRLKAIVVANGNGNAVTGGRSVHGNGSGKGDVADKGKDMYPYLWEAVEELSKEHPSGTAFRKAFGVLDGSRARAMEEKLNRFRLSEIRQQLRRMDLMKETIKMVLDALEGSDL

SEQ ID NO: 171255 - protein, 978 aa, Oryza sativa
  unsure (1)..(978): unsure at all Xaa locations
  Clone ID: PAT_MRT4530_69502C.1.pep
MEQNGENHLKDPLLQADGGGSGASPAGASPRKERKTRKVMFNVRGISCASCAVSIETVVAGLKGVESVXVSPLQGQAVVQYRPEEADARTIKEAIEGLNFEVDELQEQEIAVCRLQIKGMACTSCSESVERALQMVPGVKKAAVGLALEEAKVHFDPNITSRDLIIEAIEDAGFGADLISSGDDVNKVHLKLEGVSSPEDIKLIQSRLESVEGVNNVECDTAGQTIIVAYDPDVTGPRLLIQCIQDAAQPPKYFNASLYSPPKQREAERHHEIRNYRNQFLWSCLFSVPVFMFSMVLPMISPFGDWLFYKVCNNMTIGMLLRWLLCSPVQFIIGWRFYVGAYHALKRGYSNMDVLVALGTNAAYFYSVYIVLKALTSESFEGQDFFETSAMLISFILLGKYLEVVAKGKTSDALSKLTELAPETACLLTLDKDGNAISETEISTQLLQRNDVIKIVPGEKVPVDGVVIKGQSHVNESMITGEARPIAKKPGDKVIGGTVNDNGCIIVKVTHVGSETALSQIVQLVEAAQLARAPVQKLADRISRFFVPTVVVAAFLTWLGWFVAGQFDIYPREWIPKAMDSFELALQFGISVLVVACPCALGLATPTAVMVATGKGASQGVLIKGGNALEKAHKVKAIIFDKTGTLTVGKPSVVQTKVFSKIPLLELCDLAAGAEANSEHPLSKAIVEYTKKLREQYGSHSDHIMESKDFEVHPGAGVSANVEGKLVLVGNKRLMQEFEVPISSEVEGHMSETEELARTCVLVAIDRTICGALSVSXPLKPEAGRAISYLSSMGISSIMVTGDNWATSKSLAQEVGINPVFVEIDPCGKAEKIKDLQMKGLTVAMVGDGINDSSALAAADVGLAIGAGTDVAIEAADIVLMRSSLEDVITAIDLSRKTLSRIRLNYVWALGYNVLGMPVAAGVLFPFTGIRLPPWLAGACMAASSVSVVCSSLLLQLYKKPLHVEEVAAGPKNDPDLV

SEQ ID NO: 171256 - protein, 314 aa, Oryza sativa
  unsure (1)..(314): unsure at all Xaa locations
  Clone ID: PAT_MRT4530_69503C.1.pep
TRPVVAKGKTSDALSKLTELAPETACLLTLDKDGNAISETEISTQLLQRNDVIKIVPGEKVPVDGVVIKGQSHVNESMITGEARPIAKKPGDKGGIFWILIVFALVMNXYPDGSIDLFXQVIGGTVNDNGCIIVKVTHVGSETALSQIVQLVEAAQLARAPVQKLADRISXVFVPTGVGAVFLTWLGWFVAGQFDIYPREWIPKAMDSFELALQFGISVLVVACPCALGLATPTAVMVATGKGASQGVLIKGGNALEKAHKVKAIIFDKTGTLTVGKPSVVQTKVFSKIPLLELCDLAAGAEVGFLDANANNFC

SEQ ID NO: 171257 - protein, 113 aa, Oryza sativa
  unsure (1)..(113): unsure at all Xaa locations
  Clone ID: PAT_MRT4530_69504C.1.pep
MEHIVRALITLADRSAITISPGKTNRLVPIRVLLEMRASRHSSLAGASVLAPGDSTLVPVRYMPGFIATIKSKTLYEEGRTCRLVNXCVVDKNGHDPTLHLLLAEWRSTRTQE

SEQ ID NO: 171258 - protein, 76 aa, Oryza sativa
  Clone ID: PAT_MRT4530_69505C.1.pep
MAAVAACGVEARRRFCRLRRRREEDRGVGDRVAGAGENRRWQRSAMPRSASRATEISPRAIGQRADTLNETVNVYG

SEQ ID NO: 171259 - protein, 274 aa, Oryza sativa
  Clone ID: PAT_MRT4530_69506C.1.pep
MHDAALQALPMVLEWLKNKKLKTANVDMQQLTSQRDNDNGSTPLHLAASMAGLPSLGSMLLLDANVSTAYQPDNQGQYPIHAAASADSLEAVKALLEKCPDCATLRDARGRTFLHAAVEKKSFDDDNGVRLDMRNKEGMMPADVSWSMMPLKTYYAWNSSIRIRKLLLKLGAPLGESRGDLFDEKHNRIIGEKSKWDMEKMSENVTAAAQVLALFSVLITTVTFASAFTLPGGYRSAGDDGGAAGTPRQAQGLPTFHKSKSMRMSARRVRTENG

SEQ ID NO: 171260 - protein, 126 aa, Oryza sativa
  unsure (1)..(126): unsure at all Xaa locations
  Clone ID: PAT_MRT4530_69507C.1.pep
SQRDNDNGSTPLHLAASMAGLPSLGSMSAGPFATMLYSTPGLWFLXPKSAGPSSATRLLLDANVSTAYQPDNQGQYPIHAAASADSLEAVKALLEKCPDCATLRDARGRTFLHAAVEKKSFDVIRH

SEQ ID NO: 171261 - protein, 509 aa, Oryza sativa
  Clone ID: PAT_MRT4530_69508C.1.pep
MGCGGSKEAVATGNTVGSTGGRSSRRLFRRKSSVVAAANAAPSHAPPPPSDESSAAAVVKESSVNEEVKGKGKATPKEKAIDEEKKDVEESTTAAAADEVVVKDTGVVIVEKTTTAAAAKATPAAVKKIVEEKKKEEAKNKQEAVTDDKKKEKVIPTKVAIDEKKEDVVVPMKEEFVKEKEKITDAKNDVASTENVAAVDEKIKAEEDKNKNKNDDEVVATATMEAAVEEEDDDEAALAEDDDDDDDDEQPNDDESITFAVAPVAEDDEGSVTFPGARARPVVANADEVHQEDDVTSVTSPTTAPATLENDTSSSAAAAFPAAVPAPVAGEEVAQLEQPSSSKSNNGEMEAVAGVDQAEDAKKETSNIEAINVEQEEIKVEEEEEKIIVSQETEEEEEKSAVISRDEITKVEVEREEIKVEHEEIIVSQETEEEKSIAVSKDDDGQSDGKQTIELKEAMTATKTDEKGEEQVAKDKKDDEQEQQATAAPIESPKQEQQATADPIEAPLN

SEQ ID NO: 171262 - protein, 92 aa, Oryza sativa
  Clone ID: PAT_MRT4530_69509C.1.pep
MAKPSVVLLQIMVIGLNGHASLATARGSRNSSVATLHSGMAVTARSSLQHGTHDVSEVPRVVHCGSSWSPPERQNVAVQQLGLVGGESVNCD

SEQ ID NO: 171263 - protein, 885 aa, Oryza sativa
  Clone ID: PAT_MRT4530_6950C.1.pep
MDKQVKNHRPSVGTDGSREILMDERNPTMDIVDGISQSVHDSQPDGGQSSRVAMEEDVPSRVGSHDSGHGIPETRNLVPSLDWTEGNPYEKEGAGIPMERMVVDNVDSSAVIPPEYADPQILTPMLGQRFKTERDAYNFYNVYAVSKGFGIRLDKDRMNTEKQRTMRQICCSHQGRNPKTKKPSVRIGCPAMMKINRSGAGSGWSVTKVVSTHNHPMKKSVGVTKNYQSHNQIDEGTRGIIEEMVDSSMSLTNMYGMLSGMHGGPSMVPFTRKAMDRLAYAIRRDESSDDMQKTLDVLKDLQKRSKNFFYSIQVDEACRVKNIFWSHAVSRLNFEHFGDVITFDTTYKTNKYNMPFAPFVGVNNHFQSTFFGCALLREETEESFTWLFNTFKECMNGKVPIGILTDNCPSMAAAIRTVFPNTIHRVCKWHVLKKAKEFMGNIYSKRHTFKKAFHKVLTQTLTEEEFVAAWHKLIRDYNLEKSVYLRHIWDIRRKWAFVYFSHRFFAGMTTTQRSESANHVFKMFVSPSSSMNGFVKRYDRFFNEKLQKEDSEEFQTSNDKVEIKTRSPIEIHASQVYTRAVFQLFSEELTDSLSYMVKPGEDESTVQVVRMNSQESFLRKEYQVSCDLEREEFSCVCKMFEHKGILCSHILRVLVQYGLSRIPERYILKRWTKDARDTIPPHLHGYKDDVDASQSRSYRHVMLNRKTVEVAKIANKDVQTFKMAMTVMNKLLEDMKNQLSLDDGDNSREAPKRAARHKSRSTVLTEDGNEEVGGGDEDSEYDVPSEDEGGNLTADILPPLKKKSRGRPKVNRYKSGGEVASLKRRKEVGIEKKNTTNECESVEEENQVIDHEDEVPFPRRFCHTCHEAGHNSRTCGRTSTYKRKL

SEQ ID NO: 171264 - protein, 51 aa, Oryza sativa
  unsure (1)..(51): unsure at all Xaa locations
  Clone ID: PAT_MRT4530_69510C.1.pep
CSKPRTLISASPYAHGFIQXTLNAEHDFSVGFSASRHTFPTPPALAHDLAS

SEQ ID NO: 171265 - protein, 330 aa, Oryza sativa
  Clone ID: PAT_MRT4530_69511C.1.pep
MPRYDDHYGSTRLYVGRLSSRTRSRDLEYLFGRYGRIREVELKRDYAFIEFSDPRDADEARYNLDGRDVDGSRILVEFAKGVPRGAAGGSREYMGRGPPPGTGRCFNCGIDGHWARDCKAGDWKNKCYRCGERGHIERNCQNSPRNLRRERSYSRSPSPRRGRGHGRSRSYSRSRSRSYSRSRSRSLSGSPRGRRDRDDRRSRSLSYSRSPRRSISPAANGKERNPSPNGRRSPRSPQDRVSPPPKDNDERNGDSPWGRENSRSPSDGYRSPVAANGRSPSPRNNGSPSPMDNNSRSPRDNGSPSPRDGNGDGGSRGGSRSPRASESPEA

SEQ ID NO: 171266 - protein, 94 aa, Oryza sativa
  Clone ID: PAT_MRT4530_69512C.1.pep
FLLPPDPPPSFPPGDIHLSSPTARTPPSPAGPSPSRRGVAPSSPSPCPPSVPFLLCISSLQPRAAAAPKPRRPGPAMAATSIVDTYSRDSSPSP

SEQ ID NO: 171267 - protein, 389 aa, Oryza sativa
  Clone ID: PAT_MRT4530_69513C.1.pep
MLRSRARLPLRLPPAVRRCRSPSAAKEKDATSVKPDKNTAEGPQEMPRYDDHYGSTRLYVGRLSSRTRSRDLEYLFGRYGRSCVFDLNDLVEGFSVFYTTREWKLQVGDAFEYLSHDGLLFGNHWCRIREVELKRDYAFIEFSDPRDADEARYNLDGRDVDGSRILVEFAKGVPRGAAGGSREYMGRGPPPGTGRCFNCGIDGHWARDCKAGDWKNKCYRCGERGHIERNCQNSPRNLSRSRSRSLSGSPRGRRDRDDRRSRSLSYSRSPRRSISPAANGKERNPSPNGRRSPRSPQDRVSPPPKDNDERNGDSPWGRENSRSPSDGYRSPVAANGRSPSPRNNGSPSPMDNNSRSPRDNGSPSPRDGNGDGGSRGGSRSPRASESPEA

SEQ ID NO: 171268 - protein, 112 aa, Oryza sativa
  unsure (1)..(112): unsure at all Xaa locations
  Clone ID: PAT_MRT4530_69514C.1.pep
MYVVCRYGIPARILVISVYVKEIYHMIETESIHGRSPTRTRLGRYHIVWGPISSSPTWRSTDPRYKRDPRAGPKASNLTANTSTTAYEVGAYRSQVAGXSSRTNSTTVSSVS

SEQ ID NO: 171269 - protein, 179 aa, Oryza sativa
  Clone ID: PAT_MRT4530_69515C.1.pep
TRSRASTPLHVFCTNGCQTVSHHDSSTQMHHRLATSTKTVNNITPRAPFTKVLDKLWKNGHQFRRKKNGHQFHQGHPFHQTTTDLPGCVKNRKTFHICRKDILGHENECAKTVYQHTSVCFHNDHHSEASPEIEDAAEAAVRRRRRRCSLDGDRRRRRAGELARRRESRSRPRQESEAS

SEQ ID NO: 171270 - protein, 173 aa, Oryza sativa
  unsure (1)..(173): unsure at all Xaa locations
  Clone ID: PAT_MRT4530_69516C.1.pep
XHKVTNIYPFGALYNIKPDVQNQMISGYPDVEQKRRVQQVKIKFWVYHAGLITLFIPQTLQILEHLQTASLSHSPSQNLPILNKKSHSNSLSIPLSNHPDAQISSLTSQTCQLLHLPFTAIHGSHHAPPLSSSSSPPNGTRRQLPTHRLSRRRLDILEGPTYAYPLFYKCPIY

SEQ ID NO: 171271 - protein, 146 aa, Oryza sativa
  unsure (1)..(146): unsure at all Xaa locations
  Clone ID: PAT_MRT4530_69517C.1.pep
CSRRRGCRSGTGACSRASPRRTSAPTGPRRRRPRTRRGGASAARWASSCGLFMGSGGGRLLGAHIVVILVIVAWVSFTMALLFLVLNKLGLLRISAEXKMAGMDQAHHGGXYHDDDVSGKPDRGIGGFMLKSAHGTQVAAEMGGNV

SEQ ID NO: 171272 - protein, 59 aa, Oryza sativa
  Clone ID: PAT_MRT4530_69518C.1.pep
MRGKTEDACLANLQRTNEIVSIAKMSRFGLRRLWWMKMAKARAHDKDSQAYLVDLVDNF

SEQ ID NO: 171273 - protein, 959 aa, Oryza sativa
  Clone ID: PAT_MRT4530_69519C.1.pep
MLRAVAGVRGLAADDPFGVELMHVLIDDTDIDDNVRRLENTVPGAWATVESCDVAELLLASLDAASSFQLARRRDGVAVLVASDQSASRFPSTRACLLLDHGHGPEQLHLHQPAAATGGARRLHGLPRAVDAQHLELHGLLLPVVLVTVVFLVFQLGGADGGKAAVRACVGCCRRRRRPAHHWLAAVARMCMRCHALAAYVGAAAGGAERARLSPPLPNALVAPPPRGGGGSGALADAIRSVLWGPPYEPLPALYITDALRASMKIIQSFQDVPEDYDHWAPGSRRLQNRLYQRHRAAVPPATPPHGVAESRDYRACCYAPPPAAPRTAPPPATVITASRRQCDHSNIGHSYSTRVFYVFLLLLCYQSRHFLPPRPRRRPRPRREAPAAEPPTPTYTRDVVRRVDAILRGHPWSAARPLLLSLPGLAWDSHTVARVLKAHPPLHKAFLFFRLAAGAGGGFRHDRFTYTSMLHLLGEAGRVPAMMRLLAEMLRAGVDPDAATFTTVMHWLAHAGDVDAAMRVWEEMRARKGKCRPTLVSYTACVKILFDAGRPAEAREVFQEMVAEGLRPSCKTYTVLIEHLANVGEVFDQMPTMLFVTSTFCTALSLCTQYLSEVLHSLSHLCSTSCEEKIEQLLAFWNTLYIGKFEATMEIMDKMQEAGVEPDKALCNILVQKCSRAGETSVMTRILQYMKENFIVLRRPIFLEALEALKANGESDNLLREVNPHLAFEGIECDPAFTDLGYITVRSTILYLLASRNWSAVEHMINEMTPKNIKVESHILSDIIQASCANCRPSCGLAVLRYSLRIGNELDRSAYGSLLGHYIRNGSFDLVFEIVEILIKSGCNLGTYLSSILIIKLACAGHSSTAVRIFGLLTTDKNVVTYTALMSAYFQDGKVDKALQLFLQMSANGVSACPAESFQHLLLPEHDDIDTQMSLNYGVHLGSPLCNTNALSEIAYTE

SEQ ID NO: 171274 - protein, 176 aa, Oryza sativa
  unsure (1)..(176): unsure at all Xaa locations
  Clone ID: PAT_MRT4530_6951C.1.pep
AGVGAPGGRVGGGGGGPLPPFSRVALGSGPSVRPPRGAPLLPGPWTRSAVDRPXRVTAMRVPLAGALPPSPDVSPGXYCAINYLSSLIACLQCLPCMSLDSGSSDAPVYFEIVAEVPPAAEQGKSCLSLDHIDPILQMSXCKGGRDGAGRALRRPLSLPDSPRHERGLPVARWGRG

SEQ ID NO: 171275 - protein, 214 aa, Oryza sativa
  Clone ID: PAT_MRT4530_69520C.1.pep
MITGSLLGIPHEAASSGRRSLPPPTTTFPRPPTPLRRHRHLSSSSSSASSTESDGGGGSTNGSLPGLTPVVVEEEEEEFCPVECVTEFKTEEELARVLERAKATGALVVVDFFRPSCGSCKYIEQGFMKLCKGSGDHGSPVVFLKHNVIDEYDEQSEVADRLRIKVVPLFHFYKNGVLLEAFATRDKERIIAAIQKYTAPSSPPAESEEPSQEG

SEQ ID NO: 171276 - protein, 157 aa, Oryza sativa
  Clone ID: PAT_MRT4530_69521C.1.pep
MDEVRGHLSTINRILESHDLHLPNIDKHGSGVALHLPNIDKHGSGSSTGEESLVPNMDQSTSGSGVLRSTSQSSWTSTAKQEPLSLLKICEQFLHGHKVMEEDILWLASYHMIGNAQCWNIHFEEEEGEPSWPHFSERGAPQFHFGLTATNLHHWSW

SEQ ID NO: 171277 - protein, 153 aa, Oryza sativa
  unsure (1)..(153): unsure at all Xaa locations
  Clone ID: PAT_MRT4530_69522C.1.pep
MLRRSRHFLPPRPRRRPRPRGEAPAAEPPPXYTRDVVRRVDAILRGHPWSAARPLLLSLPGLAWDSHTGARVLKAHPPLHKAFLFFRLAAGAGGGFRHDRFTYTSMLHLLGEAGRVPAMMRLLAEMLRAGVDPDAATFTTVMHWLAHAGDVDA

SEQ ID NO: 171278 - protein, 303 aa, Oryza sativa
  unsure (1)..(303): unsure at all Xaa locations
  Clone ID: PAT_MRT4530_69523C.1.pep
MLRAVAGVRGLAADDPFGVELMHVLIDDTDIDDNARRPENTVPGAWATVESCDVAELLLASLDAASSFQLARRRDGVAVLVASDXSASRFPSTRACLLLGRGHGPEQLHLHQPAAATGGARRLHGLPRAVDAQHLELHGLLLPVVLVAVVFLVFQRGGADGGKAAVRACVGFRRRRRRPAHHWLAAVARMCMRCHALAACVVAAAGGAERARLSPPLPNALVAXPPPRGGGGSGALAGVRAGAKSQRPAVIDGWPTQGDVRHLSNAGLVLGLSLGSGRGGRTTNATAHRGGCWWPYRYRWSHR

SEQ ID NO: 171279 - protein, 113 aa, Oryza sativa
  unsure (1)..(113): unsure at all Xaa locations
  Clone ID: PAT_MRT4530_69524C.1.pep
FGNPGPARGRRFGLAEKKFPYNIFQPEALRGQKQLLLRXSNPINAKVPVFFHGNGNGRPVWKSFAFLKYLNNAFRKATLGFFPSRGNNRYARARARFWANYVNKKVYPVGTRL

SEQ ID NO: 171280 - protein, 95 aa, Oryza sativa
  unsure (1)..(95): unsure at all Xaa locations
  Clone ID: PAT_MRT4530_69525C.1.pep
CSPXXAGPXICLXKXLXXLQMKNXPGSVLLRHRLAVXQGXRVEQKMSLXLFXKNGLRMEXRPRDLAPVXDELRGADXRATAPCALKIRGPRRQDC

SEQ ID NO: 171281 - protein, 172 aa, Oryza sativa
  unsure (1)..(172): unsure at all Xaa locations
  Clone ID: PAT_MRT4530_69526C.1.pep
LKRFAPCTLGRRADIGPPSAIVRCTXAPXPXTGSIXKPXXXEANNNQEQEPNAAAAATPDEAGANPHRIPDDETPPSATATTSFAVARRVPSAILPPXSVPXRTALXXGEPPKLXKSGGSATKNLPLENPKGWAIXADFMEKXEGLMXPGRYXSXELLGTVAGXXTEPAREE

SEQ ID NO: 171282 - protein, 185 aa, Oryza sativa
  Clone ID: PAT_MRT4530_69527C.1.pep
MHADVVARRIENLENMCDERARMLQDQFNVSMNHVHALAILVSTFHHGKNPSAIDQKTFEDFTARTTFERPLMSGVAYALKVLHSERELFEQKLGWKIKKMETEDQSLVHDYNPEKLQPSPVQDEYAPVIFSQETVKHIISVDMMSGKEMRVMNKRQRSTSKGRVKGLISYVGSISLGMHTTITL

SEQ ID NO: 171283 - protein, 55 aa, Oryza sativa
  Clone ID: PAT_MRT4530_69528C.1.pep
MYIILLLFFFFFFFYFILYLPGLTSFIYFIGGNNSIFNNFCKGTQPPLFTNFVRF

SEQ ID NO: 171284 - protein, 65 aa, Oryza sativa
  unsure (1)..(65): unsure at all Xaa locations
  Clone ID: PAT_MRT4530_69529C.1.pep
LGAVWDLXFQFDXXXLTNXNARSXSGAHALVLCSSVRFHLASTCVICSVALGRSGSTFCPFPFVF

SEQ ID NO: 171285 - protein, 71 aa, Oryza sativa
  Clone ID: PAT_MRT4530_69530C.1.pep
LIPVSSASSTRSSITMCWCACQWGHPTPCVLVLSVLWSLCGVMLSLVLFSPFLGLRLGAFFCSVCYVPCMM

SEQ ID NO: 171286 - protein, 897 aa, Oryza sativa
  unsure (1)..(897): unsure at all Xaa locations
  Clone ID: PAT_MRT4530_69531C.1.pep
MVNFSQGTHHLSAMATTITDNLSFIITVVYGPSEDCDKENFLAELVAAKPPTDTPWLVMGDFNIIYEARDKNNQNLNRRLMGRFRATLKTLELKDIRLQNRXFTWSNEQGNPILSKLDRILSNSEGDILFYGHSLLALSTSCSDHCQLLLAPMQEPKRKPRFRFENFWIIVEGFLGVVTQAWNEPIQEGHPTWRLSQKLRNNEAALRKWSKQKFGQSKLQFIMVQELIYRLDVALETRTLTAKEHQFRKDLKIRILGLAGVEKARKKQASRVKWLKEGDANTRFFHIKMNARRRKNFIHCLQQDGNTLHTHEDKAAHLHAHFNSILGTRRQCGCTLNWEALGLSTIQDDSMDEPFTEDEIWEAIKNSPKEKASGLDGFTGAFYNSCWHIIKKKIVDVFASFHNLTGGNFGSINRAMITLLPKKDSPRSVNDFRPISLIHSVAKLISKTLAMRLAAWLGDLVSHAQSAFIKKRCIQDXFLYVRNMIRSLHMQRKPSLFFKLDITKAFDSISWEYLVEMLQWRGFSQRWRNWIVLLLSTASSRILLNGIVGEPTTHRXGLWQGDPLSPYLFILAIDPIQRLLNEATQEGLLSPLSNRAARFRISLYADDAAIFINPIKNDVNNLISILKFFGEATGLQVNLHKSSVMPIKCVEQNLSEVLENFNGQRGNFPITYLGLLLTPGRIKRIHLQPVMDKLQSRLVGWKGKLIQQSGRKTLVTSVLSSIPTYFLTALKPPKQFLTDMDKIRKKFLWAGDQEISGGKCKVNWKKXVCSPIKMGGLGLLDLDKFARALRLRWLWFEWECPDKPWARTTPPCDELDEQIFAAATKVTICNGWKAKFWTSNWIGHQPLKYLAPALFNHSKGKQCLVQDALTNDKWIDDIRHELSMPLIYHYVSRLIKM

SEQ ID NO: 171287 - protein, 134 aa, Oryza sativa
  unsure (1)..(134): unsure at all Xaa locations
  Clone ID: PAT_MRT4530_69532C.1.pep
QRLLNKATQEGLLSPLSNRAARFRISLYADDAAIFINPIRNDANNLISILXFFGEATGLQVNLHKSSVVSIKCAEQNLSEVLENFNGQRGNFPITYLGLPLTPGRIKRIHLEEGVEDTITWRWTNTGKYTAKSA

SEQ ID NO: 171288 - protein, 93 aa, Oryza sativa
  unsure (1)..(93): unsure at all Xaa locations
  Clone ID: PAT_MRT4530_69533C.1.pep
ERRDVTKWYQSRLAVSRARVSQLRRHGAHGWCGPGVVTQHGTCAGTGHTDVAKRGRSWPRKPIFKELXVKRAWSGAISGWVTDREILPGCTRM

SEQ ID NO: 171289 - protein, 75 aa, Oryza sativa
  unsure (1)..(75): unsure at all Xaa locations
  Clone ID: PAT_MRT4530_69534C.1.pep
EFFVVFRLIWDNETNLEEGVEDTIIWRWTNXREDSRAATLIWKTWAPSKCKNFAWLVLQNRIWTSDRLQLRQWPN

SEQ ID NO: 171290 - protein, 480 aa, Oryza sativa
  Clone ID: PAT_MRT4530_69535C.1.pep
MGKKQHSKDRMFITRTEWATEWGGAKQKEAGTPFKRLPFYCCALTFLPFEDPVCTADGSVFDLMSIIPYIKKFGKHPVTGTPLKQEDLMPLTFHKNSDGEFQCPVLNKVFTEFTHIVAVKTTGNVFCYEAIQELNIKPKNWRELLTDEPFTRNDLITIQNPNAVDSKILGEFDHVKKGLKLEDEELQRMKNDPTYNINISGDLKQMIKELGTEKGKLAFLHGGGGQKAQKERAAALAAILAKKEKDDSKSGKEPKPHQPFSIVDAASASVHGRSAAAAKAATAEKTAARIAMHMAGDRAPVNAKLVKSRYTTGAASRSFTSTAYDPVTKNELEYVKVEKNPKKKGYVQLHTTHGDLNLELHCDITPRTCENFLTHCENGYYNGLIFHRSIKNFMIQGGDPTGTGSGGESIWGKPFKDELNSKLIHSGRGVVSMANSGPHTNGSQFFILYKSAPHLNFKHTVFGMVVGGLTTLSAMEKVPV

SEQ ID NO: 171291 - protein, 268 aa, Oryza sativa
  unsure (1)..(268): unsure at all Xaa locations
  Clone ID: PAT_MRT4530_69537C.1.pep
PKPGTSLSRKRWRNWIVLLLSTASSRILLNGIAGEPTTHRXRPLAGNDVNNLISILKFFGEATGLQVNLHKSSVVPIKCAEQNLSEVLGNFNGQRGNFLITYLGLPLTPSRIKRIHLQPVMDKLQSRHELSMPLIREFFVLFHLIWDNETNLEEGVEDTITWRWTNTSSKADDVNPFRSLSMLVRIIDRIMIKLLSLSLPAAAGANNSIHPICTVADLSSPLRVRTTNCEVNGWMMSIASVSVDRDGVRAKVKFEQHAHGEFGVQRKL

SEQ ID NO: 171292 - protein, 681 aa, Oryza sativa
  unsure (1)..(681): unsure at all Xaa locations
  Clone ID: PAT_MRT4530_69538C.1.pep
GGGEGEGDFRPISLIHSVAKLISKTLAMRLAARLGDLVSHAQSAFIKKICIQDNFLYVRNMVRSLHMQRKPSLFFKLDITKAFDSVSWEYLVEILQWRGFSQRWRNWIVLLLSTASSRILLNGIAEEPTTHRRGLRQGDPLLPYLFILAIDPIQRLLNKATQEGLLSPLSNRAARFRISLYADDAAIFINPIRNDANNLISILXFFGEATGLQVNLHKSSVVSIKCAEQNLSEVLENFNGQRGNFPITYLGLPLTPGRIKRIHLQPVMDKLQSRLVGWKGKLIQQSGRKTLVTSVLSSIPTYFLTALKPPKQFLTDMDKIRKKFLWAGDQEISGGKCKVNWKKXCSPIKMGGLGVLDLDKFARALRLRWLWFEWECPDKPWVGTTPHYDELDEQIFVAATKVTIGNGQKAKFWTSNWIGHQPLKYLAPALFNHSKGKQRLVQDALTNDKWIEDIRHELSMPLIREFFAVFRLIWDNETNLEEGVEDTITWRWTNTGKYTAKSXLAQFAGREDSRAATLIWKTWAPSKCKNFAWLVLQNRIWTSDRLQLRQWPNNYFCQLCYRNLETAQHLFKNCPFTREIWDKIMARMNHNQPFPVHNPDESLVDWWESRTKQQSKCQSKGMQSLHMLLSWEIWCERNRRVFKDKRTSNPSTNGKNNGRNTYMVGMWGKKSCENSALTSHP

SEQ ID NO: 171293 - protein, 595 aa, Oryza sativa
  Clone ID: PAT_MRT4530_69539C.1.pep
MDASAASMLWTLIIILAAAAAASSVHPPQQQSYGVGCIAAERAALLSFKEGVMADPLRLLDSWQGAGDCCRWNGVGCSNRTGHVVKLDLRNTLYWDDQRQVRLDNPHAMRGQVSTSLLALRRLKYLYLSGNNLGGPGIAIPSFLGSLESLVYLNLSCIDFFGEVPTQLGNLSRLSYLDVGSMYYSGQIFSSDLSWLGRLSSLKYLDMSGVNLSMVSDWAHVVNMLPNLRVLNLELCQLTRSNPPLLHSNLTVLEKLVLSSNNFYGPLATNWFWGITTLRTLEVEFCSLYGPLPDSLGNMTALQVLDMQDNDNITGMFPPTLKNLCNLQEVFTGTNLSGDITEQMERLPKCAWDKLQALNLDATNMTGNLPVWLVNLTNLKDLSVSGNQLSGPVPLGLGALTKLTILYLGHNNLTGIISEDYLANLCNMVILDLSYTSLEVVVGSTWTPPFKLIRAQLASCQLGPGFPILFKHQKGIIYIDVSNAGIADAIPSWFWDEISYAFYVDMSHNQIDGELPAKLEARTRQELHLNSNQLKGSIPQLLRNITKLDISRNSLSAPLPSDFQAPELAALVLFSNYIPGSVPLSICDLQIFGYP

SEQ ID NO: 171294 - protein, 835 aa, Oryza sativa
  Clone ID: PAT_MRT4530_6953C.1.pep
MGESGLKQEMVNAASPTTMQTQAAPCAAAVPDVAVAREDRRRGRQVVAVLVRLFVAAEDRRSTVAAVNPKSAAASSSSPSPSVPLPPSLWSPMPRYKPEYLFGVEGFVQELRTMSFVIGFGTAPFYAQIPHDRHEEKCRVKVTLNSNSEDIPSVMFEAGGRNYIHACQEVARIAIGELRDRYSDQLADTEYRYHPRQPQGSDRGSYLETEGIENDATTRHLVEMLWAMDETRAETVLAAQDHEDRNRGKICKLEDKVDRLEKELAALKGEAPPQKARVRLTARKRVLFVPRYQLAPKVRVVEKEVAPTLADPPVIIISDDEEEESKRNHSKIEWVATQDDEDEPNEPSIDLRCSEGLDTTNPVEAGDWLHAIEKKLDLLQCTDQEKVSFASHQLHGTASEWWDHFRLNRTTVEPITWLEFTAAFRKTHIPSGVVSLKKREFRSLTQGSRSVTEYLHEFNRLARYAPEDVRNDEERQEKFLEGLNDELSYPLMTGDYPDFQKLVDKAIRQEDKYNRMEQKKRRIAQFKAQQGNSQKPRLTLEPQSMPQGGSSSVVRPQRQFFNNNAGNNIRNQAPRPVVAPTQQQPAKREQGSKPVVCFNCGDPGHYADKCPKPRRVKVVPAQSNFTAPAPKARVNHVAAAEAQDAPDVILVKFLGHVISAGGVAVDPSNVESVTNWKQPKTVSEIRSFLGLAGYYRRFIENFSKIAKPMTRLLQKDVKYKWSEEYVAVAREDRRRGRQVVAVLVRLFVAAEDRRSTVAAVNPKSAAASSSSPSPSVPLPPSLWSPMVGALCQSLAWSLTNANDVDALYEPFSLKEDCFVLSILHGNHQFREVETC

SEQ ID NO: 171295 - protein, 105 aa, Oryza sativa
  unsure (1)..(105): unsure at all Xaa locations
  Clone ID: PAT_MRT4530_69541C.1.pep
PPNFFDFPPSLGPPAFSLFPSASFFFWICHRLPFSPRDQLFPCFPPALIRLPLGKAGSPPGPGPVFQKNPARPFVPPPLFPPFLXFGRFCSSFFXPFFFPPPVLF

SEQ ID NO: 171296 - protein, 136 aa, Oryza sativa
  Clone ID: PAT_MRT4530_69542C.1.pep
MVSPQSIRPEKERGGRIGRKQRRRRELGFRRRWREEDEGPDRRDPPVSGSGRARAAADWAGWAEKREKAGVTSYLSEREGGRGRLGRQNGLEGEREPSGPREEAGPRGRERGRAGRGRERRDWAERGPKRGRRILF

SEQ ID NO: 171297 - protein, 143 aa, Oryza sativa
  unsure (1)..(143): unsure at all Xaa locations
  Clone ID: PAT_MRT4530_69543C.1.pep
MAAAVKAGMAASDGXSRAWQRATSSWSGSVWRRGWRLAWRREAQPMAAEAGSTREAWPMEVGQIGARIIRWRRPAWHERRGRRWRRRPRCEEGLPVDVAWSLAHEGWPMGGAGAVVPHVGKGXVVVEHRGVSRGFAGAAVGHA

SEQ ID NO: 171298 - protein, 273 aa, Oryza sativa
  unsure (1)..(273): unsure at all Xaa locations
  Clone ID: PAT_MRT4530_69544C.1.pep
GGGCKVNWTKTGLPISRGGGXLGVLNLDKFTRALRLRLLXIXWKDPTKPWVGLEMPCDGLDKDFFAASTKITVGDRNTARFXDSAWIDGQRPKDLMPLVYGISKNRRKSLRQGKEGDAXVNDLTLDAASPITINLVEQLVRLWEAVRNVQLDSEEPDQIAWRFTSNGHYTASSAYHAQCLGVPNSSLNSLIWKVWAPGKYKFHAWLIIQNRVXTSDRLATRGWQKNGHCPLCRSEAETGLHLVFKCRYRKRIWHLVATWMGYQQLEPTEWEEP

SEQ ID NO: 171299 - protein, 83 aa, Oryza sativa
  Clone ID: PAT_MRT4530_69545C.1.pep
MLTNWATSCCGDDADVRGSAASFGDDSWCSEWAIRRHRIHGVCEKGIQRLHFFRIAGWMGLTELSQPAKIVLQLKDELLKRRI

SEQ ID NO: 171300 - protein, 437 aa, Oryza sativa
  unsure (1)..(437): unsure at all Xaa locations
  Clone ID: PAT_MRT4530_69546C.1.pep
MDLISRVRREKTLSSISKAVVTTAGDQVFGSVRRDYSLFVNVYFVFINMSNTGDNNNTGDKKKEREHHSTGILDGTDEAYSSEKPPSDTYSYYGKRQRPSQGPPRSITPTLAWMCQLEESYTTSPAVAHAGLCGARVVGLPWTGTTRVVHRRSMGSTARVGPGPIGRCGGGLARLGSAQSRPAGHGKGGGTRASTGDSKRRRGQRQQMASQRRRRPKATASAGGGDPRGIGGRKGKGEGVLTRGDSDDRRRGATEGGRQAADGEEGERGHRRRERRPKAADMATLTVARXERRSGGEPRRRRGGRGGSRPREPDGGDGGVRRRAXRRLAAAGVAGKAAAGGCKVRERWRAQESSAKWEKRERGWRRRRGGSGRGRRGCEGDVDGVAREARTRGAATVAGAAASGWRLGEDPTGGGGGGGSGLGRIGGGCRGGREGDR

SEQ ID NO: 171301 - protein, 150 aa, Oryza sativa
  unsure (1)..(150): unsure at all Xaa locations
  Clone ID: PAT_MRT4530_69547C.1.pep
WLIDRRRCSRPLPPPRRRRRPPRRCRRPPPASLLSAPPLPASTPPTADAPPLRRIWGGKEWEERGAGSHVRGGRPPDPCGDGRRPPDPAPPPPPRGGGRRAPPSLSPPXPHPPRQRRRPXPPASRRRRFSRPPRRPPPSPWAAAEERRKE

SEQ ID NO: 171302 - protein, 69 aa, Oryza sativa
  Clone ID: PAT_MRT4530_69548C.1.pep
SFISKASSWTRGTSSPSTCQTELYRLSAQFLADCPENSDKLNKLKKNLMQIQLIWIILECRHYKIVLLD

SEQ ID NO: 171303 - protein, 50 aa, Oryza sativa
  Clone ID: PAT_MRT4530_69549C.1.pep
SANTTSRKCHCTSHFVLEMLLPSLLCHLYSVRYCVKTILMYMQTNNFEFS

SEQ ID NO: 171304 - protein, 155 aa, Oryza sativa
  Clone ID: PAT_MRT4530_6954C.1.pep
QYPSYNTIHCSAPSWFIITPADDPDDVGNDVTDSGGGSAERTARAAHARRRTAALRHKRRAPARRGRRGELTGDQNGGGRTTDDDGDEEEAAATFGSTVTAMLRRSSAVAKAHGGRRRGRKDREERIRDKLESNAFQNDLAKDSKGEKVEEIPRI

SEQ ID NO: 171305 - protein, 165 aa, Oryza sativa
  Clone ID: PAT_MRT4530_69550C.1.pep
MRAGGRGGCGCVRRRRWPRRGLARESTALRVRSYGCIGCSLSCPLLLLAVEVAAYLQWWHLEEVALLLAVDCLFVASYAGWMRLRLDYLAPPLQFLTNACSCTKTSEEMQIFGRNAHHTSGNHKIVAKSHKAEKKGKNAITTKGLNVLFLQLTPLKPAVRSGLHG

SEQ ID NO: 171306 - protein, 345 aa, Oryza sativa
  unsure (1)..(345): unsure at all Xaa locations
  Clone ID: PAT_MRT4530_69551C.1.pep
MATASSSPSQRCVVSRRPRRRLGHQLPVHVLDYVRKLAVTINGHTLGPTIHAVQGDTIVVNVKNSLPTENVAIHWQDIRQIGTPWADGTESVSHPEVVPVPVRRLSTSLRRSSSPVVVVPSGEXLPPLSSPSPIPRVPPPPTLVVAFGRRHRRGAVRYRRPRRRFLSPVDXPPPHRPIGPGLIRAVDPVDRRWTTRVVPVHGFVRAVEDACGVVFPLQFYDGGGVAQHGAPGLRAGGVRRGAREDVPLPHRQRHLPLRGPFAPVGLIDMFNAGDAIEECAIDATAAVVPPRVRGCGRFGAYFSWRPARCTLDGADVGFTYDSDMRRTCSQWGPHWINLSQGQTGL

SEQ ID NO: 171307 - protein, 577 aa, Oryza sativa
  Clone ID: PAT_MRT4530_69552C.1.pep
MMRCSDRLLCSLFLAAALFGVAAAATRRHDWDISYQFTSPDCVRKLAVTINGHTPGPTIRAVQGDTIVVNVKNSLLTENVAIHWHGIRQIGTPWADGTEGVTQCPILPGDTFAYTFVVDRPGTYMYHAHYGMQRSAGLNGMIVVEVAPGAAGDGEREPFRYDGEHTVLLNDWWHRSTYEQAAGLASVPMVWVGEPQSLLINGRGRFVNCSSSPATAASCNVSHPDCAPAVFAVVPGKTYRFRVASVTSLSALNFEIEGHEMTVVEADGHYVKPFVVKNLNIYSGETYSVLITADQDPNRNYWLASNVVSRKPATPTGTAVLAYYGGRRNSPRARPPTPPPAGPAWNDTAYRVRQSLATVAHPAHAVPPPPTSDRTILLLNTQNKIGGQIKWALNNVSFTLPHTPYLVAMKRGLLGAFDQRPPPETYAGAAAFDVYAVQGNPNATTSDAPYRLRFGSVVDVVLQNANMLAANSSETHPWHLHGHDFWVLGHGAGRFDPAVHPAAYNLRDPIMKNTVAVHPFGWTALRFRADNPGVWAFHCHIEAHFFMGMGIVFEEGVERVGELPPEIMGCGKTRGGH

SEQ ID NO: 171308 - protein, 129 aa, Oryza sativa
  Clone ID: PAT_MRT4530_69553C.1.pep
MADEANRAAFVELQGRMIDTTGKIKQLQTQMRSKEGEKKRAYLTLEELRQLPDNTNTYKTVGKVFILEPKSLLLNEQEQKLNDSESAIASMQTSKEYLEKQLAEVENNIRELLQQDPGLARQILSMTVQ

SEQ ID NO: 171309 - protein, 118 aa, Oryza sativa
  unsure (1)..(118): unsure at all Xaa locations
  Clone ID: PAT_MRT4530_69554C.1.pep
WICIWIYLYLCIHIYICIYIYTNKYFDISKSIYIYINKCHLYISGSISVSKSTYIYIYDDCALQEEPHLNISTSTLIFVSISYICFYICICIXALMYMYMYIFIFMYSYLYLYLYLYQ

SEQ ID NO: 171310 - protein, 196 aa, Oryza sativa
  Clone ID: PAT_MRT4530_69555C.1.pep
MADEANRAAFVELQGRMIDTTGKIKQDHSREGKPVGNRVCLQTAVLGPDRFDPSYFYLTALTGYPPQFSMLHLTPMSLYEVSCLMGRTLLLSPLQTQMRSKEGEKKRAYLTLEELRQLPDNTNTYKTVGKVFILEPKSLLLNEQEQKLNDSESAIASMQTSKEYLEKQLAEVENNIRELLQQDPGLARQILSMTVQ

SEQ ID NO: 171311 - protein, 346 aa, Oryza sativa
  Clone ID: PAT_MRT4530_69556C.1.pep
MASPPSLLPSAGEDDESQREVYEQLRQLVSTYPTVPSGLDTPYYRHPDGWYTFLPAMVSVMVAQRHFTARDTDIIIATFPKCGTTWLKALLFATVHRDGGGAGGVEDDAALAQLRARNPHQLVPFLEIQVYVRDRAPDLSSLPAPRLLATHIPRPSLPASVAISGCKVVYMCRDPKDCLVSLWHFLDAQRPEPRGDVGEDFRLFCDGVSLVGPYWDHVLAYWRWHVERPGQVLFMTYEELSGDTLGQLRRLAEFVGRPFTGEERAARVDEAIVKACSFESLAGAEVNRSGTIELMEEPMRNAEFFRRGVVGGWPNYLSPEMATRIDEITESKFRGSGLVLPTMMTM

SEQ ID NO: 171312 - protein, 113 aa, Oryza sativa
  Clone ID: PAT_MRT4530_69557C.1.pep
MEEGKRKREEYSNSEQRSRSRARSQRRLAAQAAALRSENGAVEVSAREPVGRCAAVDAENELLRAREAELAARMRSLIDLQQAQRMHEATPFWPPPPPRPSTSVDLNHSIKNK

SEQ ID NO: 171313 - protein, 240 aa, Oryza sativa
  unsure (1)..(240): unsure at all Xaa locations
  Clone ID: PAT_MRT4530_69558C.1.pep
MARQVGGLGAQDSTTMSSNLVNNSVDPIVNQGVPTSTMLVCTQVGEIVFPIYTMVPVSTGPSMTRSENAVAVTPDDPLSNDPPAEAEXGMSTTSKPEEDLSAAKSCPSDKNHEPTRTTFEATRSWCPIHKTRKYTLQACWVFLNAQAEIRAGNLHDHLNDRREARGARDNENRSRHRVSSRRRENEERGGRSGENRDRDDRHNRQERDDREQRMSGDVGRGRHHNGDDDRDRRRNDNGGR

SEQ ID NO: 171314 - protein, 458 aa, Oryza sativa
  unsure (1)..(458): unsure at all Xaa locations
  Clone ID: PAT_MRT4530_69559C.1.pep
MALHLLHLLAFSLLFAVATPIRDITDVCSSQIKDFQYLNSTGLHLELHHPRSPCSPAPVPADLPFTAVLTHDDARISSLAARLAKTPSARATSLDADADAGLAGSLASVPLSPGASVGVGNYVTRMGLGTPATQYVMVVDTGSSLTWLQCSPCLVSCHRQSGPVFNPKSSSTYASVGCSAQQCSDLPSATLSPSACSSSNVCIYQASYGDSSFSVGSHAWGPLSFAAGCVPGDYDGCGWESAGVPLSPAGFIGLARNKLSLLYHXAPSLACTFTYCLPSSSSSGYLSLGSYNPGQYSYTPMVFSSLDDSLDFIKLSGMTVAGNPLSVSSSAYSSLPTIIDSGTVITRLPTSVYSALSKAVAAAMKGTSRASAYSILDTCFKGQASRVSAPAVTMSFAGGAALKLSAQNLLVDVDDSTTCLAFAPARSAAIIGNTQQQTFSVVYDVKSSRIGFAAGGCS

SEQ ID NO: 171315 - protein, 236 aa, Oryza sativa
  Clone ID: PAT_MRT4530_6955C.1.pep
GFTPTPQKAVGGPLLRRGESGSWTTGHPGRPNSITPTLATEWTSLTSSKGRGGAGKRAPPVSGTRAPVHRGPGPPRRSTAGPREPTARIGPKPIGRPRGGAAGARARHETGSAEPWCWAACGLRRQQPAAPNGGEQPEDGGAHGQWRCTRKGRGAGGGAHRACGPTRQSGRSPAAGRGGGAPRGGNGDGGSAAFREEEPAADGRRDLGKEMKRLGEAHREARGDESGDDRRTRRDC

SEQ ID NO: 171316 - protein, 124 aa, Oryza sativa
  Clone ID: PAT_MRT4530_69560C.1.pep
HEAGGDAATLRAIAAVKMAGNVWSKVPLHWSGATRRDEGMDIATNGGESILQSTVSLAADSVADEALDFRFQFLVVDWYGRGGGRVLVAWAVVRPFVKRRKRRGGSSPTEGARRRRRSWRGGAP

SEQ ID NO: 171317 - protein, 495 aa, Oryza sativa
  Clone ID: PAT_MRT4530_69561C.1.pep
MAAAPVASPFPALPSSSSSTTIAASTAARRCHDALLPPPAAAGREPARTRGSSSSLAGAAGERRRRRGEEDGGEVEAEAERRRKEEVNRKIASRKALSVILRREATKAVLDKRKPGKGTRRLLPRTVLEALHERITALRWDSALKVFDLMRDQVWYRPYVGIYVKLITMLGKCKQPERAHELFQAMVDEGCAPNLESYTALVSAYSRSGRFDRAFSLLEQMKATPGCRPDVQTYSILIKSCLHAYDFERVKYLMEDMARAGIRPNVVTYNTLIDAYGKAGRFAEMESTLLEMLTENCKPDVWTMNSTLRAFGGSGQIETMESCYEKFQASGISPNIKTYNILLDSYGKAKMYEKMGAVMEYMQKYYYSWTIVTYNVVIDAFGRAGDLEQMEYIFRLMKSERIKPNCVTLCSLVRAYGRAGDVKKIKTVLRIVENSDITLDIVFFNCLVDAFGRVGCLAEMWDVLDIMKLQRCKPDKLYMIFSIDSCKDGEKLKWL

SEQ ID NO: 171318 - protein, 137 aa, Oryza sativa
  unsure (1)..(137): unsure at all Xaa locations
  Clone ID: PAT_MRT4530_69562C.1.pep
PGSPGPLXRFFGSFLCLPCLLCFLXLRDTFVSEEKFRDASYFSAPVRVFHMVKRETCRCGRLPPQVRRAVPAEGSFEHVVLSCIAASDHGIIWFEKEAQKALDPINYSFFPFYESAQANPRGDPLESTCRHASLSIL

SEQ ID NO: 171319 - protein, 70 aa, Oryza sativa
  Clone ID: PAT_MRT4530_69563C.1.pep
EYSPKPRSNKRFFTVLEERRYHILAVRYTPSNGWESFGTSWYRTTVRAEAVIVGVDDDNGDLLDDGGDGL

SEQ ID NO: 171320 - protein, 107 aa, Oryza sativa
  Clone ID: PAT_MRT4530_69564C.1.pep
SYVQMQTQQPDRDHPCCPPPVYAFEWSIGCSQPRRTWAPSPAERRITHPFDKITWIVLCFKHMGDGVCSRHRRGIAPALVEVVLVQCLISNSNSNPSPRSVCTFKRS

SEQ ID NO: 171321 - protein, 88 aa, Oryza sativa
  Clone ID: PAT_MRT4530_69565C.1.pep
MWLSDSVNNKVGRDRESIVTIGSDGWCVAPWAPETPVQNGDGSNTSPDAGDGDGEREISVCPGVGTGYHNPTGAAPLPSLSIYEEQSL

SEQ ID NO: 171322 - protein, 53 aa, Oryza sativa
  Clone ID: PAT_MRT4530_69566C.1.pep
ALPPPSSVPPPPPSSVPPPPPSSVPTTVSFLPPPCCSTLNRLFNRFLLFASCS

SEQ ID NO: 171323 - protein, 430 aa, Oryza sativa
  Clone ID: PAT_MRT4530_69567C.1.pep
MAPRKPTKAGLTGEDPGSLGEGWSCFLGKSLVKEAALAELVLSGVLVARRLCTRDLCEEFCLLRISPLAREWGVSVSEDEEVLGLPRLAFPPGVKRRSIPAKAGDDDVGTSRKRKQAVAKGGQVRSHRATKDTAESGGEEEEDDREAGSEDDGSRGYTPSPTPVKSGAGSHVSPIRQQDVAVANTLLAISSTAAKPGSVARGKKKKGKVVQIGCAFLDSDGSDGTPTSLVLQRAPSRGRRTSPPPASDAEAATGGSASAPAAGANVSQDERVEAIPSPARQWEGKASAVEATMSDVTLTAPYFVPADFATRPEIAPFVDGVCQVIAPSEGLGLFTEMNEFGESCAAVESLSVRGLAAHLSAKKSSFERLDGYRLRLRKAKDDLRHKEDKRRVVADTMRKANAENKSLMGEKKSLCAKLESANRRGTEHDR

SEQ ID NO: 171324 - protein, 76 aa, Oryza sativa
  Clone ID: PAT_MRT4530_69568C.1.pep
MDVSAFFGLFQRQQPQPIAVNSDDKKVVPGQEVQPMGGPCRPDGCWAVPSRAWAGPCRAGPLAIYTDREQRDTADL

SEQ ID NO: 171325 - protein, 848 aa, Oryza sativa
  Clone ID: PAT_MRT4530_69569C.1.pep
MAFTIGLRPNGYDVFGLNPRWFLGFGKPGRRASWHAANKPLTGKGEIWYLRLCVLSCLSTSPLLSPQTRWLLASLRRLGRLAKTLAALARGGHASLANHLSRRPPWPSLSFSGVLAEDQATCGGEAVVRSPGDGQTVVFAAFFAAGLRLPCDDFLPSVLEMYEVRLSQLSPLVFLKLTVFAWMCRTCGFDPTAELFAVLFTVTTKDVSTLAGPKRTVFGCVNFILHPERSYAWLVPASMVKWERNWIQKWFYINNPYSAKDSKANWLRFEHLVVLIASKPSVELDGVLESRLILLRKVVRWLGTHDLCEEFCLLVNGGCPLMRTKWCSGFPASLLPLESSISSLCLSAPSLGGRANRVHFGELPGRSIPAKAGDDDVGMSRKRKRAVTKGGQVRSRRATKDTAEHGGEEEEDDREAGSEDDGSRGYTPSPTPAKSGAGSHVSSIRPQDVAVANTLLRISSTAAKLGSVARGKKKKGKVVQIGRAFSDSEGSDGTPTSPVLQRAPSLGRRTSPPPASDTEAATGGSASVPAAGANVSEDERGLAAHLSAKKSALEMLDGYRLWLRKAVDDLRHKEDERRVMADTLRKANAENNSLRADLEAANRRGTEHDRQLAAAEERIRSLEACLVSAEAAASTHVPVTESAKQACYTLRLALNDLGTRAEGAPGDDGMAFDFSEWTQEAAGSVVEVAGAYGDCCARVSAGFVLSLLHAHGCEHIKDFPDHVTEEWPLNSQCSGVALKAFRKGFWEDGSWDCEEGIAKDEEAAAAHTGGDPGLSEPAAEHEGEGNRGQDHPEACGRKACVRPPTGDWRKENEKFVAVKGLPKVRRPLRPVYREMLINGNSYQVVKVA

SEQ ID NO: 171326 - protein, 97 aa, Oryza sativa
  Clone ID: PAT_MRT4530_6956C.1.pep
SQSLLKTPSNQTDRLGWSRKRSETIGIGSIFSETMLDRPVIDHIYHLNYSVLTLIRCRKNCEKTTFKNSQKRYGQKRYLLYGNDAQSIGRSKGADRS

SEQ ID NO: 171327 - protein, 39 aa, Oryza sativa
  Clone ID: PAT_MRT4530_69570C.1.pep
LFNQLGGCRKIKYRYLLVASIMFGSCFHRECDFNNNPKK

SEQ ID NO: 171328 - protein, 710 aa, Oryza sativa
  Clone ID: PAT_MRT4530_69571C.1.pep
MQIPRTELKPSGAPFHGVIPGLSSTPLGQITLPVTFGTRENFRTENVCFEVADFETAYHAILGRPALAKFMVVPHYTYLMMNMPGPRGVISLRSDIKKAVTYDKESCEMAQTHEITLAHESIRLAASTTTEGVVPATNMPKTEEGDVKTKKIPLDPSDLSKTTVIDADISAFRMKLNPEKCTFGVLSGKLLGFMVSHRGIQANPEKINAILNMKPPSSQKDIQKLTGCMAALSRKLSYYFQSHSVTVVTSFPLGDILHNREATGRIAKWALELMSLDLSFKPRTSIKYQALADFVAEWTECQEDTLGEKLEYWTMHFDGSKRLSGTGARVVMFSPTRERLSYVLWIHFQASHNVAEYEALLHGLKIVVSLGIQRLVVRGDSQLVINQVMKDWSCLDDNMAAYRQEVRKLLVHLPAQELQTIPLSWPFAIWGLDMVGPFKRATGGFTHLFVVVDKFPKWIEAKPVVTITADEAHDFFINIVHRFGVPNRIITDNSTQFTGGVFKDFCEDFGIQIYYASIAHPMSNGQVDCANGMVLQGIKTLVFDRLRPYAGKWVEQLSSVLWSLRTTPSRATGQSPFFLVYGAEAMLPSEVEFESMRFHNFKEERYEKDRVDDLNQLEEASEAALIQSACYLQGLRRYHNRNVRSHAFLVRDMVLRKIQTIRDRHKLSPLWEGPFIISEVTRPGSYRLKREDGSVVDNSWNIEHLCRFYA

SEQ ID NO: 171329 - protein, 165 aa, Oryza sativa
  unsure (1)..(165): unsure at all Xaa locations
  Clone ID: PAT_MRT4530_69572C.1.pep
HRHLLCCQIHFVLLISRQGKVRLTKWYNPYPQKERSKXVSTLVLTRGPKMCNFVDWHGYRVVYKRYASLYFCMCIDAADNELETLQIIHHFVEILDRYFGNVCELDLIFNFHKAYFILDEVLIAGELQESNKKAVLRLITTQDNLVEAAKEEASSLRNIIAQATK

SEQ ID NO: 171330 - protein, 340 aa, Oryza sativa
  Clone ID: PAT_MRT4530_69573C.1.pep
MSTPRAAASLAKKAALVALAVLAAALATAARAEQCGAQAGGARCPNCLCCSRWGWCGTTSDFCGDGCQSQCSGCGPTPTPTPPSPSDGVGSIVPRDLFERLLLHRNDGACPARGFYTYEAFLAAAAAFPAFGGTGNTETRKREVAAFLGQTSHETTGGWPTAPDGPFSWGYCFKQEQNPPSDYCQPSPEWPCAPGRKYYGRGPIQLSFNFNYGPAGRAIGVDLLSNPDLVATDATVSFKTALWFWMTPQGNKPSSHDVITGRWAPSPADAAAGRAPGYGVITNIVNGGLECGHGPDDRVANRIGFYQRYCGAFGIGTGGNLDCYNQRPFNSGSSVGLAEQ

SEQ ID NO: 171331 - protein, 103 aa, Oryza sativa
  Clone ID: PAT_MRT4530_69574C.1.pep
MAKAGKPHRYSESKGISGEGISGELQRLCHDKFGIKEAQQAAPGLLGLFAIDQQPISPLKAHMAVRCGHVVTVSTWPCSGEARASVPCGDDASGGSVVCLPRA

SEQ ID NO: 171332 - protein, 65 aa, Oryza sativa
  Clone ID: PAT_MRT4530_69575C.1.pep
KLFFFHMEVPFIVNSFTKSNSHSVITHLTRSLRSWARSGSHLLSYFFLPPRSLIPNSNSTPETKL

SEQ ID NO: 171333 - protein, 399 aa, Oryza sativa
  Clone ID: PAT_MRT4530_69576C.1.pep
MPTVTCNACNAGFDDEEQQRLHYRSEWHRYNLKRKVAGVPGVTEALFLARQTALAEGSNSDSTPMLYSCALCGKEYRSSKAHAQHLNSRSHLMKASQEPNASIAGITIVKPRPERVQRRAPSAVEEDEDEDEEEEWVEVDPSELESTSEMQVDEHSSKSDDEIDEFEELDPTFCFMCDLEHDTIENCMVHMHKKHGFFIPDSEYLKDPNGLLIYVGLKVKRDFICLYCNDRCQPFQSLEAVRKHMDAKGHCKVRYGDGGDDEDADLEDFYDYSSSYADVEGKELVAADDKDNIELGSGGAELVITNKSEKGTRVRTLGSREFIRYYRQKPRPSVATDRALALSLASSYKSMGLVTVQSKEQVVRLKVLRAMNKTGVETMRTKIGMKSNVIRNLPKNCPY

SEQ ID NO: 171334 - protein, 544 aa, Oryza sativa
  Clone ID: PAT_MRT4530_69577C.1.pep
SGLRKFLEFAIPAAAWTLSLQERIYPVADATTFFTDMHYILRVLAAGDIRTVCYKRLNLLEQKFNLHLMVNADRELLAQKAAPHRDFYNVRKVDTHVHHSACMNQKHLLRFIKSKLRKEPDEVVIFRDGTYLTLKEVFESLDLTGYDLNVDLLDVHADKSTFHRFDKFNLKYNPCGQSRLREIFLKQDNLIQGRFLAELTKEVFSDLEASKYQMAEYRISIYGRKKSEWDQMASWIVNNELYSENVVWLIQIPRIYNVYREMGTINSFQNLLDNIFLPLFEVTVDPASHPQLHVFLQQVVGLDLVDDESKPERRPTKHMPTPEQWTNVFNPAYAYYVYYCYANLYTLNKLRESKGMTTIKLRPHCGEAGDIDHLAAAFLTSHNIAHGVNLKKSPVLQYLYYLAQIGLAMSPLSNNSLFIDYHRNPFPTFFLRGLNVSLSTDDPLQIHLTKEPLVEEYSIAASLWKLSSCDLCEIARNSVYQSGFSHRLKSHWIGRNYYKRGHDGNDIHQTNVPHIRIEFRHTIWKEEMELIHLRNVDIPEEIDR

SEQ ID NO: 171335 - protein, 500 aa, Oryza sativa
  unsure (1)..(500): unsure at all Xaa locations
  Clone ID: PAT_MRT4530_69578C.1.pep
MASINRPIVFFTVCLFLLCNGSLAQQLLGQSTSQWQSSRRGSPRECRFDRLQAFEPIRSVRSQAGTTEFFDVSNEQFQCTGVSVVRRVIEPRGLLLPHYTNGASLVYIIQGRGITGPTFPGCPESYQQQFQQSGQAQLTESQSQSQKFKDEHQKIHRFRQGDVIALPAGVAHWCYNDGEVPVVAIYVTDLNNGANQLDPRQRXDFLLAGNKRNPQAYRREVEERSQNIFSGFSTELLSEALGVSSQVARQLQCQNDQRGEIVRVEHGLSLLQPYASLQEQEQGQVQSRERYQEGQYQQSQYGSGCSNGLDETFCTLRVRQNIDNPNRADTYNPRAGRVTNLNTQNFPILSLVQMSAVKVNLYQNALLSPFWNINAHSVVYITQGRARVQVVNNNGKTVFNGELRRGQLLIIPQHYAVVKKAQREGCAYIAFKTNPNSMVSHIAGKSSIFRALPNDVLANAYRISREEAQRLKHNRGDEFGAFTPIQYKSYQDVYNAAESS

SEQ ID NO: 171336 - protein, 73 aa, Oryza sativa
  unsure (1)..(73): unsure at all Xaa locations
  Clone ID: PAT_MRT4530_69579C.1.pep
EDSATNPNSMVSHXAGKSSIFRALPTDVLANAYRISREEAQRLKHNXRGDEFGAFTPLQYQSYQDVYNVAESS

SEQ ID NO: 171337 - protein, 1732 aa, Oryza sativa
  unsure (1)..(1732): unsure at all Xaa locations
  Clone ID: PAT_MRT4530_6957C.1.pep
IPTFPESPFLQEKNLKSSKASKASPGLEWYIPGLEIELCSRDGCSGWLGLCSMMPRFKPEYLFGVEGFVQELRTMSFAIGFGTAPLYAQIPHDRDEEKCRVKVTLNSNSEDIPSVMFEAGGGNYIHACQEVARIAIGELRDRYSDQLADTEYRYHPRQPQGRDRGSYLETEGIENDATTRHLVEMLWAMDETRAETVLAAQDREDWNRGKICKLEDKVDHLEKELAALKGEAPPQKARVRLTARKRALFVPRYQLAPKMVFTRSNGNGPNINNNNNNNGKNPTLAQVLAQQAQLMNMMMQQLQNQQNQGNNHAPPQNKLAEFLRVRLPTFSSTTNPVEAGDWLHAIEKKLDLLQCTDQEKVSFASHQLHGPASEWWDHFRLNRTTAEPITWLEFTAAFRKTHIPSGVVSLKKKEFRSLTQGSHTVTEYLHEFNRLARYAPEDVRTDEERQERFLEGLNDELSYPLMTGDYHDFQKLVDKAIRQEDKYNRMEQKKRRIAHFKAQQGNSQRPHLTLGPQSMPQGGSSSVVRPQRQFFNNNAGNNIRNQAPRPVAAPTQQQPAKREQGSKPGVCFNCGDLGHYADKCPKPRRVKVVPAQSNSTAPASKARVNHVAAAEAQGAPDVILGTFLVNSVPATVLFDSGATHSFLSMGFAGNHGMEVEDLRRPLMVSTPSNQALSLQRSPSVRIEIQGVPFLANLILLESKDLDVILGMDWLARYKGVIDCANRKVTLTNNDGRVVTVHALSSESLRSSLNQIALEEIPIEQEYPDVFPDDLPGMPPKRDIEFRIDLVPGTTPIHKRPYRMAANELAEVKRQVDDLLQKGYIRPSSSPWGAPVIFVEKKDHTQRMCVDYRALNDVTIKNKYPLPRIDDLFDQLKGATVFSKIDPRSGYHQLRIKEEDIPKTAFTTRYGLFECTVMSFGLTNAPAFFMNLMNKVFMEYLDKFEVVFIDDILIYSRTKEEHEEHLCLALEKLREHQLYAKFSKCEFWLSEVKFLGHVISAGGVAVDPSNVESVTNWKQPKTVSEIRSFLGLAGYYRRFIENFSKIAKPMTRLLQKDVKYKWSEECEQSFQELKNRLISAPILIXPDPKKGFQVYCDASKLGLGCVLMQDGKVVAYASRQLRPHEKNYPTHDLELAAVVHALKIWRHYLFGTRTEVYTDHKSLKYIFTQPDLNMRQRRWLELIKDYDMGIHYHPGKVNVVADALSRKGYCNATEGRQLPLELCKEFERLNLGIVSRGFVAALEAKPTLIDQVREAQINDPDIQEIKKNMRRGKAIGFLEDEQGTVWLGERICVPDNKDLKDAILKEAHNTLYSIHPGSTKMYQDLKERFWWASMKREIAEYEAVCDVCQQVKAEHQKPAGLLQPLKIPEWKWEEIGMDFITGLPRTSSGHDSIWVIVDRLTKVAHFIPVKTTYSGSRLAELYMARIVCLHGVPKKIVSDRGSQFTSKFWKKLQEEMGSKLNFSTAYHPQTDGQTERVNQILEDMLRACALDFGGSWDKNLPYAGFSYNNSYQASLQMAPYEALYGRKCHTPLLWDQTGERQVFGTDILREAEEKVKIIQEGLRMAQSRHKCYADNRRRDLSFEEGDYVYLRVTPLRGVHRFHTKGKLAPRFVGPYKIVSRRGEVAYQLELPQSLAGVHNVFHVSQLKKCFRVSIEEANLEQIEVQEDLTYVEKPILILETDERRTRNRVIRFCKVQWSNHSEEESTWEREDELQSAHPHLFASSPESRGRDSV

SEQ ID NO: 171338 - protein, 77 aa, Oryza sativa
  Clone ID: PAT_MRT4530_69580C.1.pep
KRMSNRRMELVPLTGGPKGSHEAQEKPLIWTSNRGYLGGCFFPFKRTWAFMFFECRIGDSCHLCSIQSMIGNQRLVG

SEQ ID NO: 171339 - protein, 806 aa, Oryza sativa
  Clone ID: PAT_MRT4530_69581C.1.pep
MAFGRCSKMDGRRSSPSSSLCTTTTVVVFVALCLVGAWMMTSSTIFPLEITSNKKAAVKEQPARVNYGASEEAAAASGNSAEGVDRFGDTDNNDNAVPEEPNNTVPSEEEKFSENTVEKPVESSEEKAPPKEKEESKDTFDDANGKTEHSSAKEDGDSESGSGQSDGSKNGDEEEKSEEKKDDEQSDGERKDDQEEKAEGSGSKDTTDQPQIEETVDESGEKGQGAKSNEVFPDGAQSELLKESNTENGSFKTQDAESKNEKESQAASNSSDDETTYNWKLCNNNAGTDYIPCLDNEKAIKKLRTTKHYEHRERHCPVEPPTCVVPLPEGYKRPVEWPTSRDKVWYSNVPHTKLAEYKGHQNWVKVSGDHLLFPGGGTQFKNGALHYIDTIQQALPDIAWGKRSRVILDVGCGVASFGGYMFERDVLTMSFAPKDEHEAQVQFALERGIPAISAVMGTKRLPYPSRVFDVIHCARCRVPWHIEGGMLLLELNRLLRPGGYFVWSATPVYQKLPEDVEIWNAMSSLTKAMCWKMVNKTKDKLNQVGMAIYQKPMDNSCYEKRPENSPPLCKETDDADAAWNVPLQACMHKLPAGQSVRGSKWPETWPQRLEKTPYWIDDSHVGIYGKPGNEDFEADYAHWKRVVSKSYVNGMGIDWSKVRNVMDMRAVYGGFAAALRDQKVWVMNIVPTDSADTLPIIYERGLFGMYHDWCESFSTYPRTYDLLHADHLFSKLKKRCKLLPVFAEVDRILRPEGKLIVRDNAETINELQGMVKSLQWEVRMTYTKGNEGLLCVQKSMWRPKEIEASM

SEQ ID NO: 171340 - protein, 501 aa, Oryza sativa
  unsure (1)..(501): unsure at all Xaa locations
  Clone ID: PAT_MRT4530_69582C.1.pep
MASINRPIVFFTVCLFLLCDGSLAQQLLGQSTSQWQSSRRGSPRGCRFDRLQAFEPIRSVRSQAGTTEFFDVSNELFQCTGVSVVRRVIEPRGLLLPHYTNGASLVYIIQGRGITGPTFPGCPETYQQQFQQSGQAQLXTESQSQSHKFKDEHQKIHRFRQGDVIALPAGVAHWCYNDGEVPVVAIYVTDINNGANQLDPRQRDFLLAGNKRNPQAYRREVEEWSQNIFSGFSTELLSEAFGISNQVARQLQCQNDQRGEIVRVERGLSLLQPYASLQEQEQGQMQSREHYQEGGYQQSQYGSGCPNGLDETFCTMRVRQNIDNPNRADTYNPRAGRVTNLNSQNFPILNLVQMSAVKVNLYQNALLSPFWNINAHSIVYITQGPSXQVQVVNNNGKTVFNGELRRGQLLIVPQHYVVVKKAQREGCAYIAFKTNPNSMVSHIAGKSSIFRALPTDVLANAYRISREEAQRLKHNRGDEFGAFTPLQYKSYQDVYNVAESS

SEQ ID NO: 171341 - protein, 72 aa, Oryza sativa
  Clone ID: PAT_MRT4530_69583C.1.pep
AMQMIDVYTIFSYDQAVIRGVSGRKSRVETFAGANRTYTIESIMGYRNVLQAGTSHILGQNFFRSFGTQFMD

SEQ ID NO: 171342 - protein, 334 aa, Oryza sativa
  unsure (1)..(334): unsure at all Xaa locations
  Clone ID: PAT_MRT4530_69584C.1.pep
MEGSPPRRKLRPPSPPGSAAQPSLDCLPSEILENIVARLGIREAVRTSAVSGAWRRRWETSPGLSFEWDRGEVDPAIVATVLARYSRPVASFRSGWVEREHSAAPFRYSDRWLLLLAGKGVQSLFLXLTVGRGDPYAAFSIFSCCELTQLELADCYIPGLPTCFAGFPNLTSLRLSDVGFPDGAKGLEILLARSPLLKSLSLLMLLFPAKNGVYHQWVIQAPNLQNFFITGLYDDGWQIGDLTFLEEATVDWPLYSYDRDFVKLITGLSQARELDFAMPSTQETATSKAENTLSLALLFISFRRNKSSKFLGARCQPKESLQTHHTNEAIGQIS

SEQ ID NO: 171343 - protein, 61 aa, Oryza sativa
  Clone ID: PAT_MRT4530_69585C.1.pep
LPPSRTMSRLENTEDGATPLLLCLLQRPRQIMGKLTLQVWIMNHDRWCSTMDRSLCALASP

SEQ ID NO: 171344 - protein, 181 aa, Oryza sativa
  Clone ID: PAT_MRT4530_69586C.1.pep
SVVTAGGWAPERRRRLGWGILDCSALSSTLRTQQSRGQIVEAHLVVATWFMDPSTWNPAQSSKASQNQSVGPRRTPQEREREGGGALPLAAVSACPPPLWPLPPLAAVFACPRRSGPRRTPREKEREGLHRSPPSPVAHAALALAATCGRRDRREGERDKRETAPQYANDIGVPHIFFLST

SEQ ID NO: 171345 - protein, 85 aa, Oryza sativa
  Clone ID: PAT_MRT4530_69587C.1.pep
MILRWACEEEEEEAELSRSLMEQNAWGRIDKYTYCYSKSLSCNQDKGVYCDSISSSSSARVCAGLCAMETGAREEFFCVAMAFVD

SEQ ID NO: 171346 - protein, 43 aa, Oryza sativa
  Clone ID: PAT_MRT4530_69588C.1.pep
MPWRRCASGYVHLTVEADVMRRNSRTRIPKRNEHENPCPVPVK

SEQ ID NO: 171347 - protein, 141 aa, Oryza sativa
  Clone ID: PAT_MRT4530_69589C.1.pep
DDWAISPSLGYSILNEPDYAQIGVTLGLNLAHWDASRSLMPSGRRSSQRQKRSGRESVKSLGVLELLLNLGNDGLGSSRCCLCLTCPRSGPTSRGQTCLGGKWGLLLKLESLGLELGGFLGDLEKGSWVRHDAVRSWTLSM

SEQ ID NO: 171348 - protein, 185 aa, Oryza sativa
  unsure (1)..(185): unsure at all Xaa locations
  Clone ID: PAT_MRT4530_6958C.1.pep
PRKPPSLEGGPPKGKKGPPQGHGPEFPGNPPRPVPPGQPPDQRPGGPPPRRPGGKGXPGQRRGGQKPRGPPFQKTQRAFSPPPPGKPAPPGGPPKKREQGGGGQRPPAGPPSSGTNPGPKGPGRPGPXAEPEPVKRNPTGREPKSSRRPNQKGAPQTRXKPKQSPGIRGREGPKPRPPPPPPKRY

SEQ ID NO: 171349 - protein, 163 aa, Oryza sativa
  unsure (1)..(163): unsure at all Xaa locations
  Clone ID: PAT_MRT4530_69590C.1.pep
SAQVAFKTGDFNHQVIFIGGLTDGFLATDYLEPLSLALEVEKWSLVQPLLSSSYTGYGISSLEQDALELDQLISYLINKENSDGVILLGHSTGCQDIVHYMRTNFACSXAVSGVILQAPVSDREYRATLPETAEMIDLAAKMLSEGRGMDLMPREANPDAPIT

SEQ ID NO: 171350 - protein, 77 aa, Oryza sativa
  Clone ID: PAT_MRT4530_69591C.1.pep
CSRVVKPLSLMVEDGKSEKAPSLPNARKSKCSLSRTPTQFQLTTYAFQLLSSLSLRHRHVGPTHALSLSSDTKKAMD

SEQ ID NO: 171351 - protein, 350 aa, Oryza sativa
  unsure (1)..(350): unsure at all Xaa locations
  Clone ID: PAT_MRT4530_69592C.1.pep
MTSSPSWFSGIARASSAMPPGGVASAAAPLSDGAGGRGGGGGGGGGGGGVVAAVVAAGPGAGAGVGAGGKRRQVQGALFKYGPKSAQVAFKTGDFNHQVIFIGGLTDGFLATDYNSLYPLSLALEVEKWSLVQPLLSSSYTXDALELDQLISYLINKENSDGVILLGHSTGCQDIVHYMRTNFACSKAVSGVILQAPVSDREYRATLPETAEMIDLAAKMLSEGRGMDLMPREANPDAPITAYRYHSLCAYMGDDDMFSSDLSEDQLRQRLGHMSTTQCQVIFSMGDEYVPEYVDKEALVDRLCRALGNAEKVEIEWGNHALSNRVQEAVRAIVDFVKREGPKGWDDPWS

SEQ ID NO: 171352 - protein, 401 aa, Oryza sativa
  Clone ID: PAT_MRT4530_69593C.1.pep
MGDALCDQLLLVDSDGGEFIPHHADADADDLFTILETWEGCANVVAGGAPATTTTLGSPIAAAACISGVVGGQNHQQLPEPAAAKTVPATNNKRREEEVADRDGDGDDDDGSPQKRRKCCSPESSTTDVAAATTPKTAHIAVERNRRKQMNENLAVLRSLMPCFYVKRGDQASIIGGVVDYIKELQQVLHSLEAKKQRKVYTDQVLSPRPPATVAASCCSPRPPQLSPRLPPQLLKSTPPLSPRLAVPISPRTPPTPGSPYRLLRLPPPPPPASGSNYASPAMTPTHHETAAPSLDAIAAELSAYASRQALGGGLLLPDVKVEFAGANLVLKTVSQRSPGQAVKIIAALEGRSLEILHAKISTVDDTAVNSFTVKYIFGQIGIECELSAEELVQVIQQTFT

SEQ ID NO: 171353 - protein, 347 aa, Oryza sativa
  Clone ID: PAT_MRT4530_69594C.1.pep
MATAISVGVAVPAASRRREDGAGPPLLLRRRCLVEGQVRCRLPWLRPIRHNVRVQTSNVNVGAGSYEGGEAGSHGEHLDSSATRDSNKPTKPPSGSRYPQSIAAVLLLCALASAFIVFFKGQPSAVVAMLAKSGFTAAFTLIFVSEIGDKTFFIAALLAMQYQRALVLLGSMAALSLMTIVSVIIGRIFQSVPAQFQTTLPIGEYAAIALLAFFGFKSIKDAWQLPDNANGNLQGNSESGELAEAEELVKEKVAKKLTSPLEVLWKSFSLVFFAEWGDRSMLATIALGAAQSPFGVASGAIAGHLVATFLAIVGGAFLANYLSEKLVGLIGGVLFLLFAVATFFGVF

SEQ ID NO: 171354 - protein, 129 aa, Oryza sativa
  Clone ID: PAT_MRT4530_69595C.1.pep
LRPTERRHPLHPPKDKHRDPPRLHCHPHGVAERRSLMARGAVWSKKGQPAVGDGRRCSTPGFPCSAAPDSLQQQQWQHEHLLSTSRHPHRARGPAAAVQPLAHQVFDTRRRRDLNFLWWSKSFRGKGSK

SEQ ID NO: 171355 - protein, 81 aa, Oryza sativa
  unsure (1)..(81): unsure at all Xaa locations
  Clone ID: PAT_MRT4530_69596C.1.pep
RLDATAHGRLNTDGTPASEYANSLLXNPGSAVRRPTTFNYAYDYSTTAAAPEEKSEQPYGHLPCTTTVLGNLSLGLPYGLP

SEQ ID NO: 171356 - protein, 137 aa, Oryza sativa
  Clone ID: PAT_MRT4530_69597C.1.pep
LRPTERRHPLHPPKDKHRDPPRLHCHPLIKIFNSKSEYQPYSRSGGTAKFDGAWCGVVEKGAAGGRRWSQMFDARFSLFSSSRLPPTAAMATRAPPLHIPPPTPGERPCGSGATPRSPGVRHPTATRSQFPLVEQEF

SEQ ID NO: 171357 - protein, 115 aa, Oryza sativa
  Clone ID: PAT_MRT4530_69598C.1.pep
MQIELVAVVAVPFSSPSWAAAVLGSLVALEAAKRQIEAASSPSSSPLHSPALSTTVGQGAPGGGAEWVAEGDFGSGGQTHGRRTTVDGKHDGLGDLLNSSAGPSLHLVLRVCQLV

SEQ ID NO: 171358 - protein, 658 aa, Oryza sativa
  Clone ID: PAT_MRT4530_69599C.1.pep
MVETTVSGGWRSMGGSGARVRVGEQLPVVFGAREPAAENRLRKVQVFSVDRRRTAKTLRNRGQIDCTRGVSREQRAINRRKKLESSSGYVKSRKRLLKVYVEYQKRLKALDAFEKNQCAIEEERFGEGLCDREVSTIAFKEESFGHIVEPSQQTYRTSASDDLDLSDIVVSLALFDGDKMLFAFSGIPLPSRRSREELTSFVTSADLARAFNEHRNRDDNLTVAVRLPDNTTTDGFLGLYDHDIVIVTCLGLEEVSPIDFNGTPACPDGSPLLAAGRAFKSGNLMAMSGSVHSGNTWVPDSQDISKAVLRGPLLGKDNIFLGMNFSIYDDDDRTVKYAFLPMELLHERLKHFGILDPKHLHFRGYSLPKGVKSIVPSGFMKTIYRLKSFGYPMPPPLVLERLVRSFACTGLIINWHGSKALRPVILTSASLISHNKDKIDSNLKIEVFLPPNQRGSGILEFYSLNYNIAIVSLKRNFNAVRPENIFSGTVEMPSEKVVAIGRDVTLGPLMATIGKVIQHGKNNCKLDCKDLKVSTCKITKAGIGGPLIKFDGSFVGMNFYDGSRVTPFLPKDKIVKVLSTVNNLPSESGRNHPMPIDVDDGTKKNSLDYYIQQSTYMGNIILDDRWPVPEPYWYHGSLDVDMHYIPKLIGRVSLVDSC

SEQ ID NO: 171359 - protein, 241 aa, Oryza sativa
  Clone ID: PAT_MRT4530_6959C.1.pep
MSFVIGFGTAPFYAQIPHDRHEERCRVKVTLNSSSEDIPSVMFEAGGRNYIHACQEVARIAIGELRDRYSDQLADTEYRYHPRQPQGSDRGSYLETEGIENDVTTRHLVEMLWAMDESRAETVLVAQDREDWNRGKICKLEDKVDRLEKELAALKGEAPPQKAKIRLTARKRALFVPRYQLAPKVRVVEKEVAPADPPVVNVSDDEGEESKRTHSKIEWGATQDDEDEPNEPSINSDARKN

SEQ ID NO: 171360 - protein, 1101 aa, Oryza sativa
  Clone ID: PAT_MRT4530_695C.1.pep
MLSVVVLLLLAAALPMSCSNDTDLTALLAFRAQVSDPLGILRVNWTTGTSFCSWIGVSCSHHRRRRRAVAALELPNIPLHGMVTPHLGNLSFLSFINLTNTGLEGPIPDDLGRLTRLRVLDLSRNRLSGSVPSSIGNLTRIQVLVLSYNNLSGHILTELGNLHDIRYMSFIKNDLSGNIPENIFNNTPLLTYINFGNNSLSGSIPDGIGSSLPNLEYLCLHVNQLEGPVPPSIFNKSRLQELFLWGNYKLTGPIPDNGSFSLPMLRWIDLHWNSFRGQIPTGLAACRHLERINLIHNSFTDVLPTWLAKLPKLIVIALGNNNIFGPIPNVLGNLTGLLHLELAFCNLTGVIPPGLVHMRKLSRLHLSHNQLTGPFPAFVGNLTELSFLVVKSNSLTGSVPATFGNSKALNIVSIGWNLLHGGLDFLPTLSNCRQLQTLDISNSFFTGNLPDYMGNFSNQLVIFFAFGNQLTGGIPASLSNLSALNLLDLSNNQMSNIIPESIMMLKNLRMLDFSGNSLSGPIPTEISALNSLERLLLHDNKLSGVLPLGLGNLTNLQYISLSNNQFFSVIPPSIFHLNYLLVINMSHNSLTGLLPLPDDISSLTQINQIDLSANHLFGSLPASLGKLQMLTYLNLSYNMFDDSIPDSFRKLSNIAILDLSSNNLSGRIPSYFANLTYLTNVNFSFNNLQGQVPEGGVFLNITMQSLMGNPGLCGASRLGLSPCLGNSHSAHAHILKFVFPAIVAVGLVVATCLYLLSRKKNAKQREVIMDSAMMVDAVSHKIISYYDIVRATDNFSEQNLLGSGSFGKVYKGQLSDNLVVAIKVLNMQLEEATRSFDSECRVLRMARHRNLMRILNTCSNLDFRALLLEFMPNGSLQKHLHSEGMPRLGFLKRLDTMLDVSMAMDYLHNQHYEVVLHCDLKPSNVLFDDEMTAHVADFGIAKLLLGDESSMVSVSMLGTIGYMAHEYCSMAKASRKSDVFSYGIMLLEVFTGKMPTDPMFAGELSLREWVHQAFPLRLTDVVDSNLLQDCDKDCGTNHNDNAHEDAASSRLITDLLVPIFEVGLMCCSHAPDERPTMKDVVVKLERIKRDYADSTGSQRTE

SEQ ID NO: 171361 - protein, 920 aa, Oryza sativa
  Clone ID: PAT_MRT4530_69600C.1.pep
MALSASNSECVGDLDGEQIRKAKLISLGRGNRFAAVRDDEQTADALSRRYRDYNFLDYHEKVIDGFYDIFGPSMESSKQGKMPSLADLQTGIGDLGFEVIVINRAIDTTLQEMEQVAQCILLDFPVANIAALVQRIAELVTDHMGGPVKDANDMLTRWLEKSTELRTSLHTSLLPIGCIKIGLSRHRALLFKILADSVGIPCKLVKGSNYTGDDDDAINIIKMNEREFLVDLMAAPGTLIPSDVLSWKGNSLNSNARLTQNPLAGSSSTTDSNLSANALPPGHKGGQLPLFSSGDWILASQSGYEKDGATTSSQASSSGTTSVAAGSAFDSSWTLVSHGQSDDPSTSAGMSAQQKVILPGGEHPWNENINARNENIKLVSDLQGNSESINLFADLNPFGGREPKRTSVPLNGPDNRNNELQRRRENVVPSTRRPQQRLVMKNWSPYNDVSNNKQYNYVEDSFARRNIGDNAASSSQVARPSAKNTNLNVGVRTDTPYMAAHNYDNSMAGSSAMKMTSTAGIGKVPDKVLYGDLDKGLTNSRLGDQPPIERHKWGNSVEGRIPTGTVHNQAKEHKENFDGKQDNKKLHPDPKKSPLDRFMDTSMPSRNPESVSPSFARSHKLDTMFDDVSECEIHWEDLVIGERIGLGSYGEVYRADWNGTEVAVKKFLDQDFYGDALDEFRSEVRIMRRLRHPNIVLFMGAVTRPPNLSIVSEYLPRGSLYKILHRPNCQIDEKRRIKMALDVAKGMNCLHISVPTIVHRDLKSPNLLVDNNWNVKVCDFGLSRLKHSTFLSSKSTAGTPEWMAPEVLRNEQSNEKCDVYSFGVILWELATLRMPWSGMNPMQVVGAVGFQDKRLDIPKEIDPLVARIIWECWQKDPNLRPSFAQLTSALKTVQRLVTPSHQESQSPPVPQEIWVNSSTP

SEQ ID NO: 171362 - protein, 1525 aa, Oryza sativa
  Clone ID: PAT_MRT4530_69601C.1.pep
MEQQLGELMTTMTSIQKQNEAIMISVESIEEIKPMVVELAGWKPTVEKVVAELRDEVGDIRAQLEKMVKQPAPSPNQVKSESVKPDPVKPEEMAPRLPTPPGAKRLPKRTVENRPSTSAFGKGAPRQFCHHEASNHRGKAVWGNNSPRTPPVKGAYNSTSPFHSVPESSGGCRGFSFGGQISASRVECPEFAGENPKAWKLKCETYFGLCGTPSDHWIGVAILQFSGTALTWLQSTRAHEVSGSWEEFAAWVCGKFGREEFQSLIRQFNRLRQTSTVWAYAEKFNELMHGLHAHHPSWNSVFFVTQFMDGLKAEVRSAVVLHCPTDLDTAVELACLQEEVLEQNRKEGRRFEPTGGARGPLHTGVGPFVPKGDDKLTTEVSATDKVAALRAFHRAKGLCHTCGEKWSRDHRCGPTVQLHVIEEVLQLFSDEVPEEVESSTSPLLNQMMVSYWPFLEKLYLVLSLLVCSLTPLKVKIADGGILQCCQEFPNCHWWVQGESFSTNLKVLPLGCYEVILGMDWLEKHSPMQIDWKLKTIQFVLDSRQVLLQGVVPDVSCCPVISADQLKGLFHHNAVLHTVELCASEAVAISLVLPREVEGLLQEFAKVFDEPSGLPPPRAFDHSIPLLPGAQPVNLRPYRYSPAQKDEIERQVADMLKQGVIQRSASPFSSPVLLVQKKDGTWRFCIDYRHLNAITVKNRYPLPIIDELLDELARACWFTSLDLRAGYHQIRMKPEDEHKTAFKTHNGHYEFRVMSYGLTGAPATFQGIMNTIFEPFLRKGVLVFIDDILIYTRTLEEHVRLLRAVFDILSANQLQVKRSKCVFARSSLTYLGHVISAEGVSTDAKNIQAVLQWPVPSNVKEVRGFLGLAGYYRKFVRHFGILSRPLTNFLKKNVIFHWTAETQASFDALKTALTSAPVLALPDFSKTFEIETDASAVGVGAVLMQEGHPLAFLSKALGPRNRGLSTYEKECLAILLAIDHWRSYLQGAEFVIRTDQRSLIHLGDQKLATPWQQKALTKLMGLQYRLVYKKGSENSAADALSRRVADDSTEVLSLSVCIPAWLEEVQKGYDQDPHSSQLVAQLTLKSDALPHFSLESVGGHSGVQVTYSRVKRLFAWTGLRKAVKTYVANCTVCQQAKTERVRYPGLLQSLPVPDHAWQMVSLDFIEGLPTSSGFDCIMVVVDKFSKYAHFVPLAHPFSAFDVAQAYLSNIYKLHGLPQSLISDHDRIFTSTLWTTLFKLADTQLCMSTAYHPQTDGQTVRVNQCLETFLRCFVHACPKKWSQWLALAEFWYNTSLHSALGTSPFEVLYGHPPRHFGIVDIAACAVPDLQEWLKECTVITSLLHQHLHRARQRMKHQADKKRLERQFAVGDWVFMKVQPHAQSSVAVTARVGAVAYRLALPASSMIHPVVHVSQLRKASEPASSTVATLPPAVEEADPVPVRVLARRLIRRGSAAVDQVKVCWSGCPTSEATWEDLERLKERYPAAPAWGQAGCEGGEDVTNPVKTRPKSSRQRQPNTRIIGPDWVA

SEQ ID NO: 171363 - protein, 91 aa, Oryza sativa
  Clone ID: PAT_MRT4530_69602C.1.pep
HIEADQIGVERINKGDPYVPLSPSSLQDGEVQSNGHSTQRYDGVNTGGAHGKATPSLYLPWGHTQAVSTPSGADSVGSDPGKFPDRYLQAY

SEQ ID NO: 171364 - protein, 55 aa, Oryza sativa
  Clone ID: PAT_MRT4530_69603C.1.pep
MRLLEAVQLPGDRQSVIHFVGLGNSIDMATRQRLVTQAYNFLAESPRTTGTTRGA

SEQ ID NO: 171365 - protein, 1371 aa, Oryza sativa
  Clone ID: PAT_MRT4530_69604C.1.pep
MEQQLGELMTAMTSIQKQNEAIRISVGSIEEIKPMVVELAGWKPTVEKAVAELRDEVGDIRAQLEKMVKQPASSPNQVKSESVKPDPVKPEEMAPLLPTPPGAKRLPERTVEDRPSTSAFGEGAPGQFCHHEASNHRGKAVWGKNSPRTPSVKGAYNSTSPFHSVPESSGGCRGFSFGGQISTSRVECPEFAGENPKAWKLKCETYFGLCGTPSDHWIGVAILQFSGTALTWLQSTRAHEVSGSWEEFASWLCGKFGREEFQSLIQQFNRLRQTGIVWAYAEKFNELMHGLHAHHPSWNSVFFVTQFMDGLKAEVRFAVVLHRPTDLDTAVELACLQEEVLEQNRKEGHRFEPTGGARGPLRTSAGPFVPKGDDKLTTEVSAADKVAALRAFRRAKGLCYTCGEKWSRDHRCGPTVQLHVIEEVLQLFSDEVPEEVESSTSPPAESDDGELLAISREVVLGIESSRTVRLQGLIQRHEVLMLVDSGSSHSFISEKLANKLQGVRSSLTPLKVKIADGGVLQCCQEFPNFHWWVQGESFSTNLKVLPLGCYEVILGMDWLEKHSPMQIDWKLKTIQFVLDSRQVLLQGVVPDVSCCPVISTDQLKGLFHHNAVLHTVELCTSEAITEFAKDFDEPSGLPPPRAFDHSIPLLPGAQPVNLRPYRYSPAQKDEIERQVADMLKQGVIQRSASPFSSPVLLVQKKDGTWRFCIDYRHLNAITVKNRYPLPIIDELLDELAGACWFTSLDLRAGYHQIRMKPEDEHKTAFKTHHGHYEFRVMSYGLTGAPATFQGIMNTIFEPFLRKGVLVFIDDILIYTRTLEEHVRLLRAVFDILSSNQLQVKRSKCVFAQSSLTYLGHVISAEGVSTDAKNIQAVLQWPLPSNVKEVRGFLGLAGYYCKFVRHFGILSRPLTNLLKENVVFHWTAETQASFDALKTALTSAPVLALPDFSKTFEIETYASAVGVGAVLMQEGHPLAFLSKALGPRNRGLSTYEKECLAILLAIDHWRSYLQGAEFVIRTDQRSLIHLGDQKLATAWQQKALTKLMGLQYRLVYKKGSENNATDALSRRVADDSTEVLSLSVCIPVWLEEVQKGYDQDPHSSQLVAQLTLKSDALPHFSLESGILRYKGRVWIGANPHVQSQILQSLHAGAVDGHSGVQVTYSRIKRLFAWTGLRKAVKTYVANCTVCQQAKTERVRYPGLLQPLPVPDHAWQMVSLDFIEGLPTSSGFDCIMVTARVGAVAYRLALPASSMIHPVVHVSQLRKASEPASSEVANLPPAVEEADPVPVRVLARRLVRRGSTAVDQVKVCWSGCPTSEATWEDLERLKERYPAAPAWGQAGCEGGEDVTNPVKTRPKSSRQRRPNTRIIGPDWVA

SEQ ID NO: 171366 - protein, 53 aa, Oryza sativa
  Clone ID: PAT_MRT4530_69605C.1.pep
FLQKKARALSIKAAVCIYFDFGRLGRRVFMSRSVIDQENIRQHICLSKQLILQ

SEQ ID NO: 171367 - protein, 117 aa, Oryza sativa
  Clone ID: PAT_MRT4530_69606C.1.pep
HHSAALHFSPSRSTPPPVCPPPPASTAPAPPPAPCQRRLQHRASAATARPPPPVSTAPSSPPPAIRRSTSTASSLHRADIAQASTARAMAVASALALPPSVCCRSPEASSPHLPSPS

SEQ ID NO: 171368 - protein, 992 aa, Oryza sativa
  Clone ID: PAT_MRT4530_69607C.1.pep
MADRAWMNKERYCASYIEGVDIFMKAAKKNAASKKTKDIRYLEEMLHHAEPEVVAGSAHGLDNFDALKKAANDLLYDEAKGCEKDFTLLRTVLELMRLKARNDARQWNEFDRKYHKFAEDPRNGPRQLGNDMDVFLEPLLEDMRDLWEHGIRVWDEFLREYFTLHAIIFVTVNDLPTLFSLLAQIKEKKGCVICVDCTMYRYLKGSKKLVYMWHRRFLRKNHSYRSQAEYFDGTVEEDIRHSIDVMHLEKNVFDSTIGTILDIPTKTKDGPKSCKDLVDMQIRKELHPVDEAGVSVDNFGLTIVDFDNVGHKDDPWLLHSCLLLLLSAAASSSSSSLPPPPDPAPTVILSATAGSSSSTPPPPRPAAYTSGVAAAGRGASSLPSPGLVVVLGPSRPHHRQDAAAAAPGLVSSSPPPHPPPLGGRAETPGCRTATPRSPQAKRPRRQVVIVVIVRPTAPPQSRRRRRRKPPDKPTQEQPTGDKGKETQLVMEEDICTQVVVEESSLSSSSEPGSGSYHSPSDPHPSLGKKRKGGSNNEVDSDYVPPEQVELGACKNTGLHQKLQEVAVNMKNIVTQQQAGTFVPDRDRDELTYALGKSEQSGRVWGVSSKTNWKDGFKQDAHTYKKRDRYKEEIDSQARAAAHDECNIYWSQKMMHGAAVLEPEPSYPFDDVTEDTPCKLLIPVGRAGKKILVATGRFIPGHRFHCQDIPDDYAKVEDQSHLLHHLQDQSLLLHHLGQKRMQKNNRKELSSLAADLRLTQVEILLCWRLRYVRRQQRHVFAGGRPKATAREDISLLAGVPFSTASEDAFWLALLKTLRVRGHTSHIPFDVWYIPYLRRAKLFVFVTMAQRPMPLYNAAALTALVDIWRPETHTFHLPFGELTVTLEDVAMIQGLPIRGQAVTGDTASGNWRQRVEEYLGVEPPVAADGQRLTKTSGVPLSWLCANFSQCLTDADEDTVQRYCRAYVLYIFGSILFPDSGGDMASWMWLPLLAD

SEQ ID NO: 171369 - protein, 100 aa, Oryza sativa
  Clone ID: PAT_MRT4530_69608C.1.pep
RVMQQRDHNNKRRGKIYNMIRPITLYCHLLLLCNMIRPITQICHLLVLCNMTTPICQTCHFLSLFNMIRPIRHNCHLLMLCNMIRPLSHNCHLLLLHMMT

SEQ ID NO: 171370 - protein, 41 aa, Oryza sativa
  Clone ID: PAT_MRT4530_69609C.1.pep
MGREQLARARQLATPDAIPVQGAAADCSFGTAFAPMVAVGY

SEQ ID NO: 171371 - protein, 47 aa, Oryza sativa
  unsure (1)..(47): unsure at all Xaa locations
  Clone ID: PAT_MRT4530_6960C.1.pep
LSLFPILRMVKWEKNLSWRXSMSSSAKKTPSLPTYDRSGAPLEGVLA

SEQ ID NO: 171372 - protein, 892 aa, Oryza sativa
  Clone ID: PAT_MRT4530_69610C.1.pep
MVDRAWMNKERYRASYIEGVDIFMKTAKKNAASKKTKDIRCPCVHCKNQKSWNDPSVIEQHLVTHGFVESYTNWSHHGEIPASKCRTRLHVDDGNFADLEEMLRHVEPEVVAGSARGLDNFDALKKAANDLLYDETKGCEKDFTLLRTVLELMRLKARNGWSDSSFNDLLVLLKKLFPQPNSLPTSTYEAKKLICPLSLGVRKIHACVNHCILFRKEYEDLDRCPTCKSSRYKTSRSQSEGLDVALDDVEEFDPCKDSNKKKIPQLVMWDHDNLAMTWMFLEPLLEDMRDLWEHEIQVWDEFLREYFTLHAIIFVTVNDLPALFSLLGQIKGKTGCVICVDGTVYRYLKGSKKLVYMRHRRFLRKNHSYRSQAEYFDGIVEEGDAPEPWKGDKVFRMTKNLKVVFGKVKKRETNKRKRNDAEVPASPSVPFKKHSIFFKYLPYWKDLDIRHSIDIMHLEKNVFDSTIGTILDIPTKTKDGLKSRKDLVDMQIRKELHHVDEVFLAIAIRVVEPVHVKLVITKLCYFFNCISQKVIDLEELGPLWAFAIQTVCELEMCFPPSFFDMMQHLIVHIMPQIIALGPLYLHQMWSFERYMSILKGYVWNRAHPEGSMIEGYTTEEVVECCIDYLKDGKAIGLPVPRHEARLSGKGTKGKKRIHDNDYKKVKDAHFTVLQQLAIVEPYIEQHLHELQATNVGRSNAWIMKKHKHHFTEWFKNLDLPDGHTMEERTIKMLTDGPSSVYTLWQAYDLNGYTFYTKAKDKRSACQNSGIRVEAIDTTGQKSTYYGFIEKICELDYGPNMQIPLFWCQWVKHPAGVSVDNFGLTIVDFDNVGHKDDPWVLADRVAQVFYVTYPSHLKKDIVISGKQKILGVDDVEDVEAYNQYENMTLFTDF

SEQ ID NO: 171373 - protein, 1013 aa, Oryza sativa
  Clone ID: PAT_MRT4530_69611C.1.pep
MADRAWMNKERYRASYIEGVDIFMKAAKKNAASKKTKDIRCPCVHCKNQKSWNDPSVIEQHLVTHGFVERYTNWSHHGEIPSKQVTNQATVRDEVLSWDEDVIVVAEEEEEVYAVEPVDDDDVVVGGNGQHNTVDDADDGNVSVDNGNFADLEEMLRHAKPEVVAGSARGLDNFDALKKAANDLLYDEAKGCEKDFTLLWTVLELMRLKARNGWSDSSFNDLLVLLKKLFPQPNSLPTSTYEAKKLICPLSLGVRKIHACVNHCILFRKEYEDLDRCPTCKSSRYKTSRSQSEGLDVALDDVEESDPCKDSNKKKIPQLVIQYLPVKDRLKRLFSNPRDAELMRWHHEKRKKDGMIRHPADARQWKEFDRKYHKFAEDPRNIKSLYVYNLNNNLPTWLCPKRKYILLTILVQGPRQPGNDMDVFLEPLLEDMRDLWEHGIRVWDEFLWEYFTLHVIIIVTVNDLPTLFSLLGQIKGKTGCVICVDEYFDGTVEEGDAPEPWKGDKVFRMTKNLKVVFGKVKKKETNKRKRNNAEVPTSPSVPFKKHSIFFKYLPYWKDLDIRHSIDVMHLEKNVFDSTIGTILDIPTKTKDRLKSRKDLVDMQIRKEYLPPACYTLTREDKIALCKSLHGVRVPTAFSSNIKRLVSMKDLSLSGYNSHNCHVMLTVFLAIATRAVEPVHVKLVITKLCYFFNSISQKVIDPKELCPLQAFTIQTVCELEMCFPPSFLDMMQHLIVHIVPQIIALGPLYLHQMWPFERYMSILKGYVRNRAYPEGSMIEGYTTEEVVECCIDYQKDGKAIGLPVSRHEGRLSGKGTKGKKIIHDNDYKKVKDAHFTVLQQLAIVEPYIEQHLHELQATNVGRSNAWIMKKHKHHFTEWFKNLDLPDGHTMEKRTIKMLADGPSSVYTSWQAYDLNGYTFYTKAKDKMSACQNSGVRVEAIDTTGQKSTYYGFIEEICELDYGPNMQIPLFRCQWVKHPAGVSVDNFGLTIVDFDNVGHKDDPWVLADRVAQVSM

SEQ ID NO: 171374 - protein, 76 aa, Oryza sativa
  unsure (1)..(76): unsure at all Xaa locations
  Clone ID: PAT_MRT4530_69612C.1.pep
PHTQLVAPPSHYXALSIVQTIVPQLQTQPFNGVYFDQNQAQAPTLLTXFNFPSICGIYPNYYSAPRTLAPVGGVWY

SEQ ID NO: 171375 - protein, 687 aa, Oryza sativa
  Clone ID: PAT_MRT4530_69613C.1.pep
MTHGFIERYINWSHHGEIPSKQVPNQVTVRDEVLSWDEDVIVVAEEEEEEEVHAIEPVDDDDVFGDNGQHGTVDDADDGNVSVDDGNFADLEEMLCHAEPEVVAGSAHGLDNFDALKKAAKDLLYNEAKGCEKDFTLLRTVLELMRLKARNGWSDSSFNDMLVLLKKLFPQPNSLPTSTYEAKKLICPLSLGVRKIHACVNHCILFHKEYEDLDRCPTCKSSRYKTNRSHSEGQDVALDDVEEFDPCKDSNKKNIPQLVMWYLPVKDRLKCLFSNPRDGELMRRHHEKRKKDGMIRHPADARQWKVFDTKYHKFAEDPRNVRYLKGSKKLVYMRHRRFLRKNHLYRSEAEYFDGIVEEGDAPEPWKGDKVFKMTKNLKVVFGKKNVFDSTIRTILDIPTKTKDGLKSLFLAIEIRAVEPVHVKLVIIKLCYFFNAISQKQLAIVEPYMEQHLQELQATNVGRSNAWIMKKHKHHFTKWFKNLYLPDGHTMEERTIKMLADGPSSVYTLWQAYDLNGYTFYTKAKDKRSACQNNGVRVEAIDTTGQKSTYYGFEDEICELDYGPNMQIPLFRCRWVKHPAGVFVDNFGLTIVDFDNVGHKDDPWVLADRVAQVFYVTDPSHLKKDIVISRKQRILQVDDVEDVEAYNQYENMTLFTDFRNKILRVEESIGESLKPYLRNEGVGKNVRC

SEQ ID NO: 171376 - protein, 1780 aa, Oryza sativa
  Clone ID: PAT_MRT4530_69614C.1.pep
MADRVWMDKERYCASYIEGVDIFMKAAKKNAASKKTKDIRCPCVHCKNQKSWNDPSVIEQHLVTHGFVEGYTNWSHHGEILSKQVPNQATVRNEVLSWDEDVIVVAEEEEEEVHAVEPVDDDDVVGGNGQHSTVNDADDGNVSVDDGKFVDLEEMLRHAEPEVVAGSARGLDNFDALKKAANDLLYDEVKGCEKDFTLLRTVLELMRLKASNDWSDSSFNDLFVLLKKLFPQPNSLPTSTYEAKKLICPLSLEYEDLDRCPTCKSSRYKTSRSQSEGLDVALDDVEESDPCKDSNKKKIPQLVMWYLPVKDCLKRLFSNPRDAELMRWHHEKRKKDGMIRHPADARQWKEFDRKYHKFAEDPRNGPRQPGNDMDVFLEPLLEDMRDLWKHGIRVWDEFLREYFTLHAIIFVTVNDLPALFSLLGQIKGKTGCIICVDGTVYRYLKGSKKLVYMRHRRFLRKNHSYHSQAEYFDGTVEKDIRHSIDVMHLEKNVFDSTIGTILDIPTKTKDGLKSRKDLVDMQIRKELHPVDEGNNGKVYLPPACYTLTRAEKMALCKSLHGVRVPTGFSSNIKRLVSMKDLSLSGYNSHDCHVMLTVFLAIAIRAVELVHVKMVITKLCYFFNSISQKVIDPEELGPLRTFALQTVCELEMCFPPSFFNMMQHLIVHIVPQIIALRPLYLHQMWPFERYMSILKGYVRNHAHLKGSMIEGYTTEEVVEYCIDYLKDGKAIGLPVPRHEGRLSGKGTKGKKRIHDNDYKKVKDAHFTVLQQLAIVEPYIEQHLHELQATNIPLFRCQWVKHPAGVSVDNFGLTIVDFENVGHMDDPWVLVDRVAQVFYVIDPSHLKKDIVISGKQKILGVDDVEDVEAYNQYENMTLFTDFRNKILRVEESIGESPKPYMRDEENDSISQLTLIHLQAISMDKPTQEQPTGDKGKETQLVMEEDICTQVVAEESSSSSSSEPGSQSYHSPSDLHPSLARKRKGGSDNEVDSDYVPPEPVLNAPRRSKRKAQAATEPEAEATAVVHTTALSKTKKRRGERGKNMLLKEVSVLTRMSETGEHLSPEDSCSKYSNQCGAVVRDIMEITWKDWKKVPESRKNSCWTSLQSKFEYPEGTDDDKAKDYALKTMGKLWRNWKTDLNKKYVQKGLTPFKDYGRITQAQWDEFVALKTSAEEKEKSQKMAELARRNEYPHHLGSTDYRQADAHTYKKRDRYKEEIDSQARAAAHDECNIYWSQKMMHGAAVLEPEPSYPFDDVTEDTPCKLLIPVGRAGKKILVATGRFIPGRRFHCQDIPDEYAKVEVWTVIEAYRMHELDFPTTEQIVYLGDAVDQFILWHKNDIELGSTDGTDRPPRIPVSPSRPPVVASPRDSPIASPPRLDPPVASPLGPEPPVASPRGPEPPVASPPVPEPPVASPPVPEPPVTSHPVPEPPVTSPQTEKDAEEPSEPVQAEPTKLAAGEIEAVPDQPMPDQPEQSQPEPSQPEEPKGADVPVMVRTHKHKAKGESKKNYMVTTFRGRDNDIINAEFDNRKLKGFKQTFDDYLNYINSPDVPHEFENGKPFIYDWQLREGSWQLRRWHDWMNYVEAEAMKKPVAYLNPCRISKLNHTYMLDEKKLPEHIKAMTPEERKAYIAQKHLEKMLDVATYVAIALESTQDKECVYAPYAFDAFKRYYQRGGQRKNSRERISVRNKWPCHKQPVGTTLCGYYCCEFLRVNGKYCANYDELPKFPKSERDLNDTSIQNIQVDMCYFIHRKCAHQLGQFFDNEGVLALPENESLSNWTRRII

SEQ ID NO: 171377 - protein, 200 aa, Oryza sativa
  Clone ID: PAT_MRT4530_69615C.1.pep
TDLSTAVVPVAARPLLLATPSSSRIASSSSSPTSPPRPPPVASARGCHCRRRPPSPHQRPRPMEPALSSPRWPLPDGAGAVLPPSAGPSSSPSCCPPPRARCPPATSTAAVVSLSLSLSPRVSSSSSPSSFRRLSSPPASTRPCTVHARPSPATAGWSASRSASTHSAPTTGATTPPASRTTPSSPSTSSRPTRRAPSPR

SEQ ID NO: 171378 - protein, 890 aa, Oryza sativa
  Clone ID: PAT_MRT4530_69616C.1.pep
MVDRAWMDKERYRASYIEGVDIFMKAAKKNVASKKTKDIRCPCVHCKNQKSWNDPSEIEQHLVTLGFVEGYTNWSHHGEIPSKQVPNQATVHDEVLSWDEDVIVVAEEEEEEVHAVEPVDDDDVGGNDDGKFADLEEMLRHAEPKVVAGSAHGLDNFDALKKTANDLLYNEAKGCEKDFTLLRMVLELMRLKDRNGWSDSSFNDLLLLLKKLFPQPNSLPTSTYEAKKLICPLSLGVRKIHACVNHYILFRKEYEDLDRCPTCKSSRYKTSRSQSEGLDFALDDEEESDPCKDSNKKKISQLVMWYLPVKDRLKRLFSNPRDAELMRWHHEKRKKDGMIDILQMYLKGSKKLVYMRHRRFLRKNHSYHSQAEYFDGTVEKGVAPEPWKGDKVFRMTKNLKVVFGKVKKKETNKRKRNDAEVPASPSVPFKKHSIFFKYLSYWKDLDIRHSIDVMHLEKNVFDSTIGTILGIPTKTKDRLKSRKDLVDMQIRKELHPVDEGYVRNRTHPEESIIEGYTTEEVVKCCIDYLKDEKAIGLPIPRHEAAPGLVIAPVYLGDAVDQFILWHMNDIELGSTDGTDRPPRIPVSPSRPPVVASPRDSPIASPPRPEPPVASPLGPEPPVASPRGPEPPVASPPVPEPPVTSPPVPEPPVASPQTLKDAEEPSEPVQAEPTKLAAGEIEAVPDQPMPDQPEQSQPEPSQPEEPKGADVPVMDELRGSGSDEKACRLPKPVQDNDHWIVFLLYPKYNEVIVLDSLDKDGNTYQEFLRIINLAFKRYYQRGGQRKNSRERISVRNKWPCHKQPVRTVLCGYYCCELLRVNGKYCANYDELPKFPKSERELNDTSIQNIQADMCYFIHRECAHQLGRFFDNKGVLALLENESLSNWTRRII

SEQ ID NO: 171379 - protein, 143 aa, Oryza sativa
  Clone ID: PAT_MRT4530_69617C.1.pep
ALHVILALFFLPLFPFSLSASAFCKRQWQQRREGGHWRRWSGGSDGRGSERLRVSGELGDRRWLAGRELVAKAAPIFLPPRRAPHAPAPIGGADYAVGSVPRAAKGGRLGLRGGLTDGDAGLAEEGCGRRATITAEESAVASE

SEQ ID NO: 171380 - protein, 824 aa, Oryza sativa
  Clone ID: PAT_MRT4530_69618C.1.pep
MKAAKKNAASKKTKDIRCPCVHCKNQKSWNDPSVIEQHLVMHGFVEGYTNWSHHGKIPSKQVPNQATVHDEVLSWDEDVIVVAEEEEEEEEEEEEEEEHSTVDDADDGNVSVDDGNFADLEEMLRHAEPKIVAGSARGLDNFDALKKALNDLLYNEAKGCEKDFTLLWMVLELMRLKARNGWSDSSSNDLLVLLKKLFPQPNSLPTSTYEAKKLICPLSLGVRKIHACVNHCILFRKEYEDLDRCPTCKSSQYKTSRSQSEDLDVALDDIEESDPCKDSNKKKIPQLVMWYLPGPRQPGNDMDVFLESLLEDMHDLWEHGIRVWDEFLREYFTLHAIIFVTVNDLPALFSLLGQIKGKTGCIICVDGTVYRMTKNLKVVFGKVKKKETNKRKRNDAEVPASPSVPFKKHSIFFKYLPYWKDLDIRHSIDVMHLEKNVFDSTIGTILDIPTKTKDGLKSRKDLMDMQIRKELHPVDEGNNGKVYIPPACYTLTREEKMALCKSLHRVRVPTGFSSNIKRLVSMKDMSLSGYNSHDCHVMLTVFLAIAIRAVEPVHIKLVITKLCYFFNSISQKVIDPEELGPLRAFAIQTVCELEMCFPPSFFDMMQHLIVHIVPQIIALGPLYLHQMWPFERYISILKGYVRNRAHPEGSMIEGYTIEEVVECCIDYLKDGKAIGLPVPRHEGRLSGKGTKGKKRIHDNDYKKIPLFRCQWVKHPAGVSVDNFGLTIVDFDNVGHKDDPWVLADRVAQVFYVTDPSHLKKDIVILGKQRILGVDDVEDVEAYNQYENMTLFIDFRNEILRVEESIGESPKPYMRNEGVRKSVRC

SEQ ID NO: 171381 - protein, 190 aa, Oryza sativa
  Clone ID: PAT_MRT4530_69619C.1.pep
MVDRAWMDKERYRASYIEGVDIFMKAAKKNVASKKTKDIRCPCVHCKNQKSWNDPSEIEQHLVTLGFVEGYTNWSHHGEIPSKQVPNQATVHDEVLSWDEDVIVVAEEEEEEVHAVEPVDDDDVGGNDLEEMLRHAEPKVVAGSAHGLDNFDALKKTANDLLYNEAKGCEKDFTLLRMVLELMRLKDRNG

SEQ ID NO: 171382 - protein, 42 aa, Oryza sativa
  Clone ID: PAT_MRT4530_6961C.1.pep
DSVFMITVLMFSIIIKNENEVSLLIDHATWNNIWFFCSANFQ

SEQ ID NO: 171383 - protein, 88 aa, Oryza sativa
  unsure (1)..(88): unsure at all Xaa locations
  Clone ID: PAT_MRT4530_69620C.1.pep
MMKQRPQHPVLSNNAFNRTDGAVGVAGVNRNNMPPHNEDDYFDDNDDDEDDVDGNKMQYEIQFQHQHHXQQKQQHRHQQRVVRNETPP

SEQ ID NO: 171384 - protein, 109 aa, Oryza sativa
  Clone ID: PAT_MRT4530_69621C.1.pep
MGASRSLVPLLDYFARREFAAAGLSPGAVTLPYPGDGGEATCTVHYWASTGEPLLPPLLLVHGFGPRATWQWRCQVGPLSRHFHLIVPDLIGFGGSSFGRRLRRFAAVR

SEQ ID NO: 171385 - protein, 965 aa, Oryza sativa
  Clone ID: PAT_MRT4530_69622C.1.pep
MADRAWVNKERYRASYIEGVDIFMKAAKKNVASKKTKDIRCPCVHCKNQKSWNDPSVIEQHLVTHGFVEGYTNWSYHGEIPSKQVPNQATVHDEVLSWDEDVIVVAKEEEEEEEEEEEEEKVHAVEPVDDDDVVGGNGQHSTVDDADDGNVSVDVSNFAYLPEMLRHAEPEKLFPQPNSLPTSTYEAKKLICPLSLGVRKIHACVNHCILFRKEYEDLDRCPTCKSSRYKTSRSQSESLDVALDDVEESDPCKDSNKKKIPQLVMWYLPVKDHLKRLFSNPRDAELMRWYHEKRKKDGMIRHPADARQWKEFDRKYHKFAEDPRNKRKYILLTILVQGPRQPSNDMDVFLEPLLEDMRDLWEHGIRVWDEFLREYFTLHAIIFVTVNDLTALFSLLGQIKGKTGCIICVDGTVYRYLKGSKKLVYMRHQRFLRKNHSYRSQAKYFDGTVEKGVAPEPWKGDKVFRMTKNLKVGFGKVKKKETNKRKRNDAEVPASPSVPFKKHSIFFKYLPYWKDLDIRHSIDVMHLEKNVFDSTIGTILDILTKTKDGLKSRKDLVDMQIRKELHPVDKVFLAIAIRAVEPVHVKLVITKLCYFFNSISQKVIDPEELGPLRTFAIQTIIALGPLYLHQMWPFERYMSILKGYVRNRAHPEGSMIEGYTTEEVVECCIDYLKDGKAIGLPVPRHEGRLSRKGTKGKKRIHDNDYKKVKDAHFTVLQQFAIVEPYIEQHLHELQATNVGRSNRWIMKKHKHHFTEWFKNLDLPDGHTMEERTIKMLADGPSSVYTSWQAYDLNGYTFYTKAKDKRSACQNSGVRVEAIDTTGQKSTYYGFIEEICELDYGPNMQIPLFRCQWVKHPASVSVDNFRLTIVDFDNVGHKDDPWVLADRVAQVFYVTDPSHLKKDIVISGKQRILGVDDVEDVEAYNQYENMILFTDFRNKILRVEESIGESPKPYMRNEGVGKSVRC

SEQ ID NO: 171386 - protein, 488 aa, Oryza sativa
  Clone ID: PAT_MRT4530_69623C.1.pep
MEGKPIPTELRNKDLQDQERAEKVMLKAVDVLASSLITVKENVSGLKPVLHGFHVHALGGTTNGCMRNGLWCASWGNCSKSVGIIYSNPTRKEHGGHKKSPHAFLRKMMESTMDDWSIRKGLQQSGGVINDIFEIPLQCTRNMHKLARMNNLEILPVRFHYNGEFANSRRIVQYVGGDEGMLYIENDKISMPEIRGHLADHVEVKDAMQLHCCIAEGGVAEIFVEETMSDYNSKESDWETDSVKSDEMENVEGTQYDANKEGSVGEDSDTIDSDYQPESGNSSPDDEEVVNLRKFAEMYNKKLKAMRLILQDPDANSVPIELIGHGDDSLNEIIDEPTYDSSEGYSYDDDSGEHNDHTVRRKSRWTRYDSNSAIPHFSVGMTFRGKEEMKKALLKYGIVTKRHIVFIKDERDKIRAPRCPWLIYGSKRSKCDWFQVGTLCDEHTCPPKEEASHSLQGAGEGTIHRLGKTPVRSSKKVSLKGKPTGVAI

SEQ ID NO: 171387 - protein, 133 aa, Oryza sativa
  Clone ID: PAT_MRT4530_69624C.1.pep
MLVLMQPDGPPEPSPTPRVADGAVSYTSRGRRSRRLHLARPPEPPPPPRARTAAAATTSRGRRSRLLHLGSILRRLTCSDLAEGAHWEVVLMALSAAATALLVLAAAAAIDDHYSARHLTSSSNSNKSEADFD

SEQ ID NO: 171388 - protein, 115 aa, Oryza sativa
  Clone ID: PAT_MRT4530_69625C.1.pep
AATLAPNRPPAASSCACYDLRNVPVQSFIARSSAISPRFVLPPALGHPSAAPYFTRPARNPSQSHPNPDFSIHHAANSRSSHRRHHLPRRRRGAAWPCGCKVIPCDGASLALVPN

SEQ ID NO: 171389 - protein, 90 aa, Oryza sativa
  Clone ID: PAT_MRT4530_69626C.1.pep
RAARARRRSLWRWVVATAGDAAVAGVDRRGARRTRTPATSSNVAWTGEDAAVGNELRHGVWMMEDVAPATSSGVGWRMPPAATSSGVRRG

SEQ ID NO: 171390 - protein, 234 aa, Oryza sativa
  unsure (1)..(234): unsure at all Xaa locations
  Clone ID: PAT_MRT4530_69627C.1.pep
NKCKSILLSLSAQKAVPAPFLTKTYQLVDDPATDHIVSWGDDRVSTFVVWRPPEFARDILPNYFKHNNFSSFVRQLNTYGFRKVVPERWEFANEFFRKGEKQLLTEIHRRKTXPHRRRRRLRRRSSRRHHHAFVGDDGVVAAHGIGMPFPQPHWREPNLPVATRLLALGGPAPSPSSAEAGGAGRAATAAVLMEENERLRRSNTALLQELAHMRKLYNDIIYFVQNHVRPVAPS

SEQ ID NO: 171391 - protein, 65 aa, Oryza sativa
  Clone ID: PAT_MRT4530_69628C.1.pep
MMGRRANWYVLAMSVSIHRSSHSLPFPRDSSSVPPPRRRREAPPPVAGARPSRSGRFPSPQLLPL

SEQ ID NO: 171392 - protein, 310 aa, Oryza sativa
  Clone ID: PAT_MRT4530_69629C.1.pep
GFRKVVPERWEFANEFFRKGEKQLLTEIHRRKTSSASTASPSPPPFFAPPHFPLFHHPGVAAAQHHHAFVGDDGVVAAHGIGMPFPQPHWREPNLPVATRLLALGGPAPSPSSAEAGGAGRAATAAVLMEENERLRRSNTALLQELAHMRKLYNDIIYFVQNHVRPVAPSPAAAAFLQGLGMQARKKPAAANVLNNSGGSTTSSSSLTIAEEPSPPPQQQHLAGEKSGGEAGNSSAARSSAPTKLFGVHLSAAPCGAGSKRASSPEEHPPTSPATKPRLVLECDDLSLTVAPSSSSQQQLSAASSPTSTS

SEQ ID NO: 171393 - protein, 741 aa, Oryza sativa
  unsure (1)..(741): unsure at all Xaa locations
  Clone ID: PAT_MRT4530_6962C.1.pep
MSVLLGFLLLLSLHPPTSYATTDTVSPGQTLAGGDRLISNNSKFALGFFKMDSKNSSYTSRNSYLCIWYNKLPMITPLWSANGENPVVDPASPELTISGDGNMVIMDQATKSIIWSTRVNTTTNGTVVVLLNDGNLVLQSSSNSSMVFWQSFDYPTDSLFADAKIGWNKVTGLNRRLVSRKNSIDQAAGLYSLEFDINGVGHLVWNSTVTYWSSGDWNGQFFGSAPEMFGATIPNFTFVNNDREVYLTYTLNNEKAITHAAIDVNGQGLAGVWLDSLQDWLINYRMPLLHCDVYAICGPFTVCNDNNDPFCDCMKGFSIRSPKDWEIEDRTGGCMRNTPLNCGSTMNKTGFSDKFYYVQNIILPRNAMHVQEAASKDECSDVCLSNCSCTAYSYGKGGCSVWHDELYNVRQQSDASAVGNGDNFYIRLAANEVHEVQSAERKKKSGVIIGVAIGASTAAFCLMILLLMFWRRKGKLFARGAENDQGSIGITAFRYIDLQRATKNFSEKLGGGSFGSVFKGYLNESTPIAAKRLDGTCQGEKQFRAEVDSIGMIQHINLVKLIGLCCEGDKKLLVYEYMPNGSLDVQLFKDNDKVLDWNLRYQIAIGVARGLAYLHDSCRDCIIHCDIKPENILLNESFVPKIADFGMAKILGREFSHALTTMRGTIGYLAPEWISGTVVTAKVDVYSYGMVLFEILSGRRNSSQEYFKDGDHXAYFPMQVARQLINGGIGNLVDAKLHGDV

SEQ ID NO: 171394 - protein, 74 aa, Oryza sativa
  Clone ID: PAT_MRT4530_69630C.1.pep
SSSSSSSPRHARTLALTQGRRGEPDRTHRPPPEESSGGGAAPFPLSLSLSPLRPEFQNLYEFAICSPEISGSGT

SEQ ID NO: 171395 - protein, 201 aa, Oryza sativa
  Clone ID: PAT_MRT4530_69631C.1.pep
MDNVLLDRRSSGSFEFPRRGGGFRPGHLGGGATPAMAPRQQYKGGAWSHASLPALPYARPPLYSSPSLPLLPSNQPPLLPLPPAATKDRRRKPSRPPPSTETTKGGTQKKKPLERATPLPPAPAVAEALDDLEQEVARNFVQDLLHVLAPPPSSLPLPRFVITSSSSSPAAGNKVVPPPPPAPSCNAEAAAADSLRRVLRL

SEQ ID NO: 171396 - protein, 110 aa, Oryza sativa
  Clone ID: PAT_MRT4530_69632C.1.pep
TRRCISSTIPSPMLPPPLSLDLAEGRAPPCRQALCCLPSSSPPPAATFSSPPPAATSSSPLPPPLLKTPRPPLSRIQPPCPPPTGRPTYGSGPLPQAMDDGDCTVISSDP

SEQ ID NO: 171397 - protein, 793 aa, Oryza sativa
  Clone ID: PAT_MRT4530_69633C.1.pep
MDNRNHGRCSLPRLAVGAAVLLLAVSLAATPAASHAGHDDTGLHSNYLVIVRKPYAYDTNLYKNVSSWHASLVASVCDMAKEALERDPSSVSRLIYSYRNVVNGFAARLTPEEVEEMSKNDWFIRADPEKTYQLQTTHTPQLLGLMGGARRGGVWNTSNMGEGIIIGILDDGIYAGHPSFDGAGMKPPPAKWSGRCDFNKTVCNNKLIGARSYFESAKWKWKGLRDPVLPINEGQHGTHTSSTAAGSFVPGANVSGYAVGTAGGMAPRAHIAFYQVCYVEKGCDRDDILAAVDDALEDGVDILSLSLGDEQAGDFSDDPVSLGGYSAAMHGVLVSAAGGNTGPGPSTVVNEAPWVITVGAGTTDRRFVATVKLGSGVSLDGESLSEPKDFGAEMRPLVHDVGDGMCTTESVLRAMNVTGKIIICDAGGDVSVAKAKLVLRSGAAGMIVIAPQVYGSVIVPRPHVLPTVQMPFMIGQKIKAYIRSTPSPTANFIFKGTVFKAKSPVAAPFSSRGPNRRSRGILKPDIIGPGVNILAGVPKIEDLALGAEEVMPKFDIKSGTSMAAPHISGVAALIKNAHPTWSPAAIKSAMMTTADYTDNLRKPITDVDGAPATYYAIGAGYVNARKAIDPGLVYNLSSLDYIPYLCGLGYKDQKVNSIIHPGPAVECAKMPKVDQKDLNYPSITAVLDMEPYEVSINRSATNVGAATSTYAVEVDVPATLAVEVNPAKLEFRALNEVLNYTVTVKTASGKAPASTIEGQLKWVSGKKYVVRSPILVCAGTGGKSAASMGAAPA

SEQ ID NO: 171398 - protein, 465 aa, Oryza sativa
  Clone ID: PAT_MRT4530_69634C.1.pep
MGKAARWFRSLWGGGGGKKEQGREHGRTAAAPPPPDRKRWSFAKSSRDSTEGEAAAAVGGNAAIAKAAEAAWLKSMYSDTEREQSKHAIAVAAATAAAADAAVAAAQAAVEVVRLTSQGPPTSSVFVCGGVLDPRGRAAAVKIQTAFRGFLAKKALRALKALVKLQALVRGYLVRRQAAATLQSMQALVRAQAAVRAARSSRGAALPPLHLHHHPPVRPRYSLQERYMDDTRSEHGVAAYSRRLSASIESSSYGYDRSPKIVEMDTGRPKSRSSSVRTSPPVVDAGAAEEWYANSVSSPLLPFHQLPGAPPRISAPSARHFPEYDWCPLEKPRPATAQSTPRLAHMPVTPTKSVCGGGGYGASPNCRGYMSSTQSSEAKVRSQSAPKQRPEPGVAGGTGGGARKRVPLSEVTLEARASLSGVGMQRSCNRVQEAFNFKTAVLSRFDRSSEPAAERDRDLFLQRRW

SEQ ID NO: 171399 - protein, 69 aa, Oryza sativa
  Clone ID: PAT_MRT4530_69635C.1.pep
MASSSTSAAASKTLRGLLPGGESAPPFRSDHSGVLRESTATASGSPRAAAPLPTGYLHARSVATIRPMV

SEQ ID NO: 171400 - protein, 435 aa, Oryza sativa
  unsure (1)..(435): unsure at all Xaa locations
  Clone ID: PAT_MRT4530_69636C.1.pep
MKLLLTAFEKLSGLKINFHKSELICFSQAKECHEQYSNIFVCKLGDFPVRYLGILMHFRKLTNKDWIIIEHRIEKKAXVFGRINMSVAGRLVLINSVLSSLAMFMISFFEIPRGVLQKIDYYRSCFFWKGDEXLKKKYRLTRWDIICQPKDXGGLGVHSLEIQNQCLLSIWLFKLINEQGVXQDLLKRKYLSDKSITQVERKQGDSHFWSGLMKVKNSFLNMGSXIINNGEQSKILEGXIKWLGNYSLKDKYPSLFXIIRRKNASIASVMGFVPLNVSFSRVAVQNLVIWHNLCASIVHVNLTDKDDIFRWNFHQNDQFSVXSMYLTLINNGYIERNKIIWKLKMPLKIKILMWYLLKRVVLTKDNLARRNWNGSLRCCFCMKNESIYHLFLEHNEDIKLINDACHKLEMTITQLFANFGWRFSSSESFQKWVES

SEQ ID NO: 171401 - protein, 351 aa, Oryza sativa
  Clone ID: PAT_MRT4530_69637C.1.pep
MAGVVSWYGPLIDLSAAAGHLGGFVQLLASVRRVLPHQEQNAADGRAFQKTMLEVGDDTRSRFCVSLWPKRGSSVLAGDVLLLQNIKIVEFRNGLEGRASQISAVQVLLNSKDLVRLKNWKDEKEKESGNFLSISELLSQSKLHGVGVYASISKMVLTGSLASHFNRKFSVIERFSLKEHDDIFRDLVTAGCTLCGSPLYPKNLHGENTYPIDCPKSPKYLHVIGQIYKPFMIYVRDQSGQIPVLVRNKAAEILFANIIADDVSECYKNHHPMLLDTCDCGSLNTSGGETGIIKRKRTKEKPDWHLIWLIIIKCLLNQHKNSPFCLQISVNTDKSVEDGRFELVSLTMTIP

SEQ ID NO: 171402 - protein, 117 aa, Oryza sativa
  Clone ID: PAT_MRT4530_69638C.1.pep
LANTDRHGGNILIRKDENGQIELIPIDHGYCLPESFEDCTFDWLYWPQARQPFNVETLDYIKSLDEEEDIKLLKLNGCEPSSKENITTKSKIEEIVEEAEHVVLPGIGEKAFMEAIS

SEQ ID NO: 171403 - protein, 433 aa, Oryza sativa
  Clone ID: PAT_MRT4530_69639C.1.pep
MTLVNGEKLDESTLISTICETNTSDTDFLANKSENFNGNEIEESFEQLSISSDIGNNLQFDDAKEKYPLIEPVLVNPSVTLTPKITGMIEATLAGLEMEHTPVMSSEGTGGVYFMLDSSGQEYVAVFKPINEEPMAKDNPNGYPLSSDGEGLKRGTRVGEGAFREVAAYILDHPISGYRVSDELGFAGVPPTVLVRCLNGYVDQTKYDCAEKEPKIGSLQMFVKNSGSCEEFGPRAFPVQEVHKIAVLDMRLANTDRHGGNILIRKDENGQIELIPIDHGYCLPESFEDCTFDWLYWPQARQPFNVETLDYIKSLDEEEDIKLLKLNGCEPSSKCVRVFRLSTMMLKKGAVRGLTPYEIGNMLCRENITTKSKIEEIVEEAEHVVLPGIGEKAFMEAISDTFIQKTKKLYLDTRTQRNLAKLNDELYERCTRL

SEQ ID NO: 171404 - protein, 1414 aa, Oryza sativa
  Clone ID: PAT_MRT4530_6963C.1.pep
MQTRKGTLVQKYKVKVVADDLGTSSSKGEDGKQAPDGSAQLSDKGATDGSLGSQGDNSQGIHGVQGDGVHRVQGDAAQGLQRGNLNQNSDVAQDFFNNFQDRVDYAVHHALINQSGIQVAIEGGRIKFDDSKKPMRVDDNQFPVNMVHKAGRTADPGRMRGYQVSSARIINKCQRKYDKQQERHHEEDNGGFDPHWGCEFFRFYWNEGMRLPSIEDCPGCSDVAGGSSRLYDGGSWPKQTRVPVHQRLGPVNQRGDSEYDENKKTQWCPPVIFTKNQKRRVQRLRSRERFQEVEQEINHRLKKPKPRQEWSVKNQAPVADDVAADEAKRLAKGKSVVTAPVNMVFTLPAEFRIGQADVDEVEEESAKLVLSPEQAVFEKPEGTENRHLKPLYINGYVNGKPMSKMMVDGGAAVNLMPFATFRKLGRNAEDLIKTNMVLKDFGGNPSETKGVLNVKLTVGIPVIKKNGKVRVCIDFRDLNKATPKDEYPMPVADQLVDAASGNKILSFMDGNAGYNQIFIAEEDIHKTAFRCPGAIGLFEWVVMTFGLKNAGATYQRAMNYIYHDLIGWLVEVYIDDVVVKSKEIKDHIADLRKVFERTRKYGLKMNPTKCAFGVSAGQFLGFLVHERGIEITQRSINTIKKIKPLENKTELQEMIGKINFVRRFISNLSEKLEPFTPLLRLKADQQFTWRAEQQKALDNIKGYLSSPPILIPPQKGIPFRLYLSAGEKSIGSILIQELDGKERVVFYLSSRLLDLETRYSPVEKLCLCLYFSCTRLRHYLLSNECTIICKADVVRYMLSAPILKGRVGKWIFSLTEFDLRYESPKAIKGQAVADFIVEHRDDSIGSVEMVPWTLFFDGSVCTHGYGIGLVIISPRRACFEFAYTITPYATNNQAEYEAELKGLQLLKEVEADAIENIGDSLLVISQLAGEYECKNDTLIVYNEMCQELMKEFRLVTLKHVSREQNMEANDLAQGASGYKPMIKDVQVEIAAITADDWRYDVRQYLHNPSQSASRKLRYKALKYILLDDELYYQMIDGVLLKCLSADQAKVAIGEVHEGICGTHQSAHKMKWLLRRAGYFWPTMLEDCFRYYKGCQDCQKFGAIQRAPASAMNPIIKPWPFRGWGIDMIGMINPRSSKGHKFILVATDYFTKWVEAIPLKKVDSGDAIRFVQEHIIYRFGIPQTITTNQGSIFVSDEFVQFADSVGIKLLNSSRYYAQANGQAEASNKSLIKLIKRKISDYPRQWHTWLAEALWSYRMACHGSIQVPPYKFVYGHEAVLPWEVRIGSRRIELQDSLTADEYYNLMADEREDLVQSRLRALAKVTKDKERVARHYNKKVVPKDFSEGELVWRLILPIGTRDNKFGKWSPNWEGPFQIYKVVSKGTYMLQGLDGEVYGRALNGKYLKKYYPSVWVDA

SEQ ID NO: 171405 - protein, 911 aa, Oryza sativa
  Clone ID: PAT_MRT4530_69640C.1.pep
MQPPTGAVSGSSSSSLECVSSCRTSWRGGGRPYECSVLSCAWNAPRALTGALASTTAQCSSCSHAEAGAGWRRRGQSQRSNNSLLHITWAEGINRGKFGYGSSAHSFPTGNFFKSWSTSVDPTWRVFCYSSSESFNHISPETLWEDLKPAISYLQPEELNFVHDALKLAYEAHNGQKRRSGEPFIIHPVEVARILGEHELDWESIAAGLLHDTVEDTDMVTFERIENEFGVTVRRIVEGETKVSKLGKLQCKNEGNSKQDVKAEDLRQMFLAMTEEVRVIIVKLADRLHNMRTLTHMPQHKQYAIAMETLQVFAPLAKLLGMYRIKSELEYLSFMYMNPGDFAELKKRVEDLYKAHEQELEEANQILGEKIAEDQFLDLVSVETQVRSVCKELYSIYKTALKSKSSINEINQVAQLRIIIKPKSCNGVGPLCTAQQICYHVLGLVHGIWTPIPQAIRTEDMDLIAERGIAAHYSGRGVVSGPVRPGISSGRNSNGKVICLNNTGFALRIGWLNAIREWQEEFVGNMSSREFVDTITRDLLGSRVFVFTPKGEIKNLPKGATVVDYAYLIHTEIGNKMVAAKVNGNLVSPIHVLANAEVVEIIIYDKLSAKYAFQRHQQWLQHAKTRSARHKIMKFLREQAALSAAEITADAVNNFVADLEDESDYEQSIPSSENKDYTFNWQKILNSDKLSFGNKKSDCFLPVKNVSVPKVNGKHNKTVKELGIKINGSTFRGDSFTDFIHPGVSSSKEVLPSVDNWKAGMVAEVSSALTACGITICSCVAERDKRRGIGVMLFHFEGAYENVVSACSGVDMILGVLGCGQQASRCISSPSPAKRRDNFEAPRNQSAQWFRSSPILVDDAVQPITCPSKKNVDNVDQAKPFSHVLPRRIARAKDSLTLDSVEKWEIFLFGI

SEQ ID NO: 171406 - protein, 33 aa, Oryza sativa
  Clone ID: PAT_MRT4530_69641C.1.pep
LLQCMLCLIRSIYLIKKKPKNKKGRTAKKGSQE

SEQ ID NO: 171407 - protein, 892 aa, Oryza sativa
  Clone ID: PAT_MRT4530_69642C.1.pep
MQPPTGAVSGSSSSSLECVSSCRTSWRGGGRPYECSVLSCAWNAPRALTGALASTTAQCSSCSHAEAGAGWRRRGQSQRSNNSLLHITWAEGINRGKFGYGSSAHSFPTGNFFKSWSTSVDPTWRVFCYSSSESFNHISPETLWEDLKPAISYLQPEELNFVHDALKLAYEAHNGQKRRSGEPFIIHPVEVARILGEHELDWESIAAGLLHDTVEDTDMVTFERIENEFGVTVRRIVEGETKVSKLGKLQCKNEGNSKQDVKAEDLRQMFLAMTEEVRVIIVKLADRLHNMRTLTHMPQHKQYAIAMETLQVFAPLAKLLGMYRIKSELEYLSFMYMNPGDFAELKKRVEDLYKAHEQELEEANQILGEKIAEDQFLDLVSVETQVRSVCKELYSIYKTALKSKSSINEINQVAQLRIIIKPKSCNGVGPLCTAQQICYHVLGLVHGIWTPIPQAVKDYIATPKPNGYQSLHTTVIPFLNESMFHLEVQIRTEDMDLIAERGIAAHYSGRGVVSGPVRPGISSGRNSNGKVICLNNTGFALRIGWLNAIREWQEEFVGNMSSREFVDTITRDLLGSRVFVFTPKGEIKNLPKGATVVDYAYLIHTEIGNKMVAAKVNGNLVSPIHVLANAEVVEIIIYDKLSAKYAFQRHQQWLQHAKTRSARHKIMKFLREQAALSAAEITADAVNNFVADLEDESDYEQSIPSSENKDYTFNWQKILNSDKLSFGNKKSDCFLPVKNVSVPKVNGKHNKTVKELGIKINGSTFRGDSFTDFIHPGVSSSKEVLPSVDNWKAGKICAWHNTEGSSIQWLCIVCVDRKGMVAEVSSALTACGITICSCVAERDKRRGIGVMLFHFEGAYENVVSACSGVDMILGVLGWSVGCSCNPLGVLEC

SEQ ID NO: 171408 - protein, 76 aa, Oryza sativa
  Clone ID: PAT_MRT4530_69643C.1.pep
SSLRACWKKMHAIDVSKLNPQFHGKKKTKNWKVGKRAPPFPNFFFSENTRDPFTKSTKFRPPGLQLTIKVPYIIMA

SEQ ID NO: 171409 - protein, 44 aa, Oryza sativa
  Clone ID: PAT_MRT4530_69644C.1.pep
KHINRGGILFWHTGLPLGGLNKLLRPRGEKDYFQKTFKGGQITN

SEQ ID NO: 171410 - protein, 564 aa, Oryza sativa
  unsure (1)..(564): unsure at all Xaa locations
  Clone ID: PAT_MRT4530_69645C.1.pep
MVTVFLLPYFSSRLLLQMVNTRTTRSGNNVNEEQLLGNGSGDISENPPLAXTIARQTQIMTTMINQMQQQYHQMMQHMMQQQXQNQQHNGPPQSKLPKFXCVRPLTFSSTSNPMEAYDWLYAIEKKLNLLKCTDQEKVAFATHQLQGLALAWWDNXMITYSAGIEVTWXEFCRVFRKAQVPDGIVAXKKREFRSLHQGNMTVTEYLHEFNRLARYAPEDVRTDAERWEKFLAGLYDELTNELISRDYADFQRIVDKAIRQEDXRNKMDRKRKAIQFRSQQXDNRSSATVLXQHNGPTTMIVRQHRPYQPGNFSQGNSGNQNNRNPVPRPPMKQSQASQPQQPKELGGKPLTCFNCGDPGHFAGKCPKRKRNGPKIVQARVNHVSTEEAQAALEVVLGTFPANSIPAIVFFXSGATYSFISKRFVGVHGLRKVELSSPMKVNTPGNSSTLVSFCPSTMIEIQVSPFLANLILVECKDLDVILGMDWLTKHNGVIDCASRTVTLVNGKGEVVVMQSPLTQKKGVSLNQVESEHQVPLLTKNVQILHYKPYGTKYYHTCTISLPMPH

SEQ ID NO: 171411 - protein, 105 aa, Oryza sativa
  Clone ID: PAT_MRT4530_69646C.1.pep
MAEEGEDGGSKAAMALQRWRLKREGLRGGTRLYSGGESKVIENTIFLPDSKVHLVKKPFGISWFMEIGTGQLAALAVFVCIFACVGMADSQNITGDGSRLAERQK

SEQ ID NO: 171412 - protein, 101 aa, Oryza sativa
  Clone ID: PAT_MRT4530_69647C.1.pep
RCGGDNADGGHVEPPWWWWGAGRIPAEEITELISKLQALLPESSRSRGASRSSASKLLKETCSYIKSLHREVDDLSDRLSELMSTMDNNSPQAEIIRSLLR

SEQ ID NO: 171413 - protein, 49 aa, Oryza sativa
  Clone ID: PAT_MRT4530_69648C.1.pep
DHNSHQGDIIAPGERLVMNQRPLIICCIHYGLTAKAYNLNILGSGVAGN

SEQ ID NO: 171414 - protein, 734 aa, Oryza sativa
  Clone ID: PAT_MRT4530_69649C.1.pep
MAEERESFESQWAPSDVTEENLKEMVAHGVLPAKEIIGWRPACGETFPTPDTHEVVLFSHFFYGGFSVPTSSFFRAILDFYGISLHHLNPNSIVHIANFIHACEAFLGIRPHFALFRRIFFLKPQPNKSKPCVVGGAGFQLRGTLSQKYFSMPFKTSNKGWHANWFYVQNPKPALPGYSCLPPVYRDTWNSLSMGEEAAQALDLLDRMLKLKEQGLQGEQITRHFIKSRLAPIKERSRTAFEFDGKHDPNRENPESLEFKIIYSHLLLVVPYNTFNPPPPEFALMKSDTPIAQRRSPRRHTGQASGGPKIQSDVQPNTSRSTNQSDSRKRKLVSSDDEGDDAEKTDNKGVIGKQPKQANPKKKTSSRPMPKIRKSSRKPSDIDPSGKDPMPTGTETSPSAETGPTAEDRPGNNQPATGNIDTSNEPPTGNQSAEAEVGADQEPPTGNQLGTEQNRDIPEVEAQANSPPKTDAAADPGTNSPVRVQGPARPRPEIIMGPMIGNEEEVLQIRSGEDSRPPILVKWWDDEMQPQGIVINKQKEDEERIHLRNEAKTATLEKLVPHLGTLEATRDQLREAKELARKTEHDLRDRTAELQDSNFELSGSLKDRKIKSQAQFDVLLNKIKRLEGARDEVANAATPLVQAMFFITTMNIKEAGSMGAGLALAMTKSLYPKIDIDAIDGFADGTSEEATLDLINDTQKAADKIAADVVERFQDNDLWPTRSNNSDDEKTETD

SEQ ID NO: 171415 - protein, 761 aa, Oryza sativa
  unsure (1)..(761): unsure at all Xaa locations
  Clone ID: PAT_MRT4530_6964C.1.pep
METTRSDGSIMVVGAVDIDCPQHRLCGYRDLIRGVSGGGAAMSRWPEAAPFVPQIASTGGDGGAAVAGGGWSSGSSSPAPSSCSSSSSWREGDCCYDVCWCSSSTVHELRSIAERMVRDGYIEGLIRAFGGAATAGAAGRRGPPDELLLHNWFSQLDVEWVLLLHTCSEEEEDEHVRRPPPLPVEDLMALMERWIRALLTMVQVLCITQLELRAKKPTVAGVRRAIQFFLLRRDSKTAHADYVQQVVQFARFAEESILRMLAFVDAATLAVVEEDDDDHRVAEALPGMLQVYACISEASPTVLAMFKEASDLLASGSSRHGQEAQVFDGMDGIFLRKRKKLSDAIWDMMEKVRSSFLQDGCWQVSPEASASGVHETTVLMMNYIALLWRNDDVLTFILQDHHFSVFVSHTQGFSSVVNLITDIISCLGHKLEEIASSLSNSILDPALRCIFLLNNWQLVLHRIESLDLPSWALIDRCRTRRYIDTYIDVFWSPLLCCIFIGNSSDTPRKKTYRPAFGFRRYLSLENFEIEFRKTYAKHKFFKVPDPKLRQRLRQAIIQKIIPHYSIRRLIPKLHTLVASNQSAFIKDRCIPDNFTMFYQSTKRLHERRRPALRLKLDIAEAFDSISWQFIILEVLEHKGFGQRWNSWIAMLLRTASMKILLNGMPGDVREIRAATEILNIFGEASGLWANFAKCAALPIQCSEEDLLLAQAELPCPLAAFPCKYLGLPLSIFRLKKEDLQXLIDKVTNRLPTWKAEQMEPI

SEQ ID NO: 171416 - protein, 89 aa, Oryza sativa
  unsure (1)..(89): unsure at all Xaa locations
  Clone ID: PAT_MRT4530_69650C.1.pep
GGSHKGLPSPTPLTHPPHPLLAGRRCVADVSAPPLPVVTLPXPPPPAPPVTTPPPLVAVSALPPPVVAPPPSSLRRASLPGHQSEARAE

SEQ ID NO: 171417 - protein, 54 aa, Oryza sativa
  Clone ID: PAT_MRT4530_69651C.1.pep
MTEVMSAASMVLVGKPTPMGVPNCKDDDGEEEKQKQVQQSSQGVPSQALHRPLA

SEQ ID NO: 171418 - protein, 461 aa, Oryza sativa
  Clone ID: PAT_MRT4530_69652C.1.pep
MVAHSVLPAKEIIGWRPACGEAFPTPDTHEVVVFSHFFYGGPHFSLFRCIFFLKPQPNKSKPCVVGGAGFQLRGTLSQKYFSMPFKTSNKGWHANWFYVQNSEPTLPRKECTKSSRMPSWSTIHTYCQSCHIMPSTLLHRKPTDIDPSGKDSEPTGTETGPSTETGLTTEDRPSGDQSATDNVATSNKPPIGNQSAKAKVSADQEPPTGNQSGTEQSKDIPEAEAQTNSPPKTNTGAGSGTNSPVRVEGPAHPRPEIITVQAAKMSELERRNRALEKDKGELTKQRDSALKDVEDHKIKSQAQFDVLVNKIKRLEGARDEVANAATPLVQAMFFNNNGPSSFDASEIFDKLRIAPDTYFKNIKEAGSMGASLALAMTKSLYPKIDIDAVDGFTDGTREEAALDLINDAQKAADKIAVDVVERFQENDLRPTGSGYFTGFLQSVDIVYSVFSVALLAEVAKS

SEQ ID NO: 171419 - protein, 635 aa, Oryza sativa
  unsure (1)..(635): unsure at all Xaa locations
  Clone ID: PAT_MRT4530_69653C.1.pep
MAKERESFESQWASSDVTEENLKEMVAHGVLPANEIIGWRPACGETFPTPDTHEVVVFSHFFYGGFSLPTSSFFRGILDFYGLSLHHLNPNSIVHIANFIHACEAFLGIRPHFALFRRIFFLKPQPNKSKPCVVGGARFQLRGTLSQKYFSMPFKTSNKGWHANWFYVQNPEPTLPGYSCLPPAYRDTWNSLPMGEEAAQALDLLDRMLKLKEQGLQGEQITRHFIRSQLAPFKERSRTAFEFDGKHDPNREXQFKIMQERMYKIFSNAIVISYSHLLPVVPYNAFNPPPPXPFGKDPMPNGTETGPSAETEPTAKDHPGPMIGDEEEVLRIQSAEDSRPPILVKWWDDEIRSQGIVINKQKEDEEVCLLKKTLGQATHLVNRIHLRNEANTATLEKLVPYLGTLEATRDQLCEAKELARKTEHDLRDWIAELQDSNFELSGSSKLESNIVQAAKISELERRIQALEKDKVERAKQRDSALKDVEDRKIKSQAQFDVLVNKIKKLEGARDEIANAATPLVQAMFFNNNGPSSIDAAKIFNKLRTAPDTYFMNIKEAGSMGASLALAMTKSLYPKIDIDAVDGFADGTSEETALDLISDAQKAADKIAADVVERFRDNDLKPTRSDNSDDEKTESD

SEQ ID NO: 171420 - protein, 137 aa, Oryza sativa
  Clone ID: PAT_MRT4530_69654C.1.pep
GWFFFFLGVFFFFFFFFFFFFFFPPAKKKFIGGGNQKYKNGIFSKLNPGAQGGKKNYLWGRERKSSGGNPNSLEKPQKKRAPPIAGIAEGLGTEKKAKRGGGGGPPPPKWNWPKGKSKGAPGGFGEAGKDLSRGGGG

SEQ ID NO: 171421 - protein, 660 aa, Oryza sativa
  Clone ID: PAT_MRT4530_69655C.1.pep
MVAHGVLPAKEIIGWRPTYGEMFPTPDTHEVVVFSHFFYGGFSLSTSSFFRGILDFYVISLDHLNPSSIVHIANFIHACESFLGIRPHFALFCRIFFLKPQPNKSKPCVVGGAGFQQRGTLSQKYFSMPFKTSNKGWHTNWFYVQNPEPALPGYSCLLPVYRDTWNSLPMGEEAAQALDLLDCMLKLKEQSLQGEQITRHFIKTRLAPIKERSRTAFEFDGKHDPNRENPESLEFKIMQERMYKIFSNAIVVNYSHLLPVVPYSAFNPPPPSTENLEDHAQEFALMKSDPPIAQRRSPHRHTGQASGGPKIQSDVQPNTSRSTNQSDSRKRKLVSSDDEGDDAEKTGNKGVIGKQLKPTNPKKKTSSRPMPKIRKSSRKPSDIDPSGKDPTPTGIETGPSVETGSTAENRPGNNQLATGNVDTRNEPPTGNQSAEAKASADQEPPTRNQSGTEHNRDIPEMEAHANSPPKMDIGADPGTSSPVRLKGPARPRPEIITGPLIGDEEELLRIRSAEDSCPPILVKWWDDEMRPQGIVINKQREHALVQAMFFNNNGPSSFDAAEIFDKLRIAPDTYFKNIKEAGNMGAGLALAMTKSLYPKIDIDAIDGFADGTSEEAGLDLINDAQKAADKIAADVVERFQDNDLLPTGSNNSDDEKNDTD

SEQ ID NO: 171422 - protein, 117 aa, Oryza sativa
  unsure (1)..(117): unsure at all Xaa locations
  Clone ID: PAT_MRT4530_69656C.1.pep
QENPLXXVLKHPYGRSKSVXWPMAHHASDLQIRTLSMCQSLEDIGRHCTLPKQHVGFFVLCAAGTGQLTIKLTDTPLKYLASPPPAKKKVTDEVLIRTWSYVSWVCHIPSRQNTCSI

SEQ ID NO: 171423 - protein, 100 aa, Oryza sativa
  Clone ID: PAT_MRT4530_69657C.1.pep
MATVVPANSGEGGGYGEHQWSKGSVVVAAAQPGEAGSGGAPCGWRRPNRAATPGGGNGGTPASDWMGKQKGMGLRNDGIMEAGSWRCRPGIRSSFVLVEA

SEQ ID NO: 171424 - protein, 811 aa, Oryza sativa
  Clone ID: PAT_MRT4530_69658C.1.pep
MVEERQSFESQWAPSDVKEGNLKEMVAHGVLPAKEIIRWRPACGEMFPTPDTHEVVVFSYFFYSGFSLPTSSFFRGILDFYGFSLHHLNPNSIVHIANFIHACEAFLGVRLHFALFRHIFFLKPQPNKNKPCVVGGAGFQLRGTLSQKYFSMPFKTSNKVYRDTWNSLPMGEEVAQALDLLDRMLKLKEQGLQGEQITRHFIKSRLAPIKERSRTAFEFDGKHDPNREDPESLEFKIMQERICAIKCLQPSSTGYTCLPLVYRDTWNSLPMGEEIAQALDFLDRMLKLKEQGLQGEQITRHFIKSRLAPIKERSRTAFEFDGKHDPNREDPESLEFKIMQERMYKIFSNAIVVSYSHLLPVVPYNAFNPPPQTGNKGVTGKQPKQTNMKKKTSSRPMPKIRKSSRKPSNIDPSGKDPTSTSTETGPSVETRPTTEDRPGNNQPATGNVDTSNEPPTGNQLAKAEASADQEPPTRNQSGTEQNRDIPEVEAQANSPPKTDYGPTIGDEEEVLRIRSAEDSRPPILVKWWDDEMRPQGIVINKQKEDEEVCQLKKTLGQATRLVNRIHLRNEAKTATLEKLVPHLGTLEATTDQLREAKELARKTEHDLRDRIAELQDSNFDLSGSSKVQTTKISDQEKRIKALEKDKGELTKQRDSALKDVEDHKIKSQAQFDVLVSKIKRLEGARDEVANAATPLVQSKFFNNNSPSSFDTAKIFDKLRIAPDTYFKNIKEAGSMRAGLALAMTKSLYPKIDIDAIDGFADGTSEETALDLINDAQKATDKIAADVVERFQDNDLWPTGSSNSDDEKTDTN

SEQ ID NO: 171425 - protein, 96 aa, Oryza sativa
  Clone ID: PAT_MRT4530_69659C.1.pep
FRFRTAQALLRWGQDDPAREEARIVRRTTNDGRYHEQAVGLLARSDGQHGDLLRRPQHKDIVDGRMRGGNVTGVQAEWDAVEAVVGAATAALPDLG

SEQ ID NO: 171426 - protein, 1900 aa, Oryza sativa
  unsure (1)..(1900): unsure at all Xaa locations
  Clone ID: PAT_MRT4530_6965C.1.pep
AADQIDWYASIPEGEFWTCTGVKQISQASCFTSTLFWHARWDRXKSDKQFLLMAEKPPLSPSSASSGTVKEKIQKLGLTDVNEGNVVPIDPEKFTPDQKKDFEAMMQAARDQFLNSFMQTRKGTLVQKYKIKVVLDDPETGSSKDGEGKQTQDGSAQLNDKGATDGFPPNQGDNSQGVHGVQGDGFRGIQDQVDYAVHHALINQSXNMVKSMIDGSMAEYQVTGPVYLQGGVFPNYRPLITDNLPVXQSVPLNAPSAQPTIPASAPAPTAPPSAPGQLINPRLLVREQPQHTGQNVNRLTQDQVASMFLRPQHTIDPAQXSRFSRHYQGSRLCNQVCNTWWSTHAACRKSGCPRTLGSSCAARWHDVMKEQFGLRPKDAGNLYRQPYPEXFERVPLPNRFKVSDFSKFSGQDSTSTYEHISRFLAQCGEASAVDALRVRLFRLSLAGSAFTWFSSLPYGSINSWANLEKQFHSYFYSGIHEMKLSDLTSIKQKHDEPVHEYIQRFREMGNKCYSLSLTDAQLADLAFXGMIALIKEKFSYEDFESLSHLTQKVALHEQRYAEARKNSRKVNHVCPYIYGSDDEDDDYEIAAAEWVRSKKVIPCQWVKSSGKKERYDFDITKADKIFDLLLREKQIQLPASHTIPSAEELGKKRYCKWHNSGSHMTNDCKVFRQQIQAAIEGGKIKFDDSKRPMKVDGNPFPVNMVHTAGRTADRGRARGFQVNSAKIINKYQRKYDKQQEKHHEEDDDGMRLQSIEDCPRCGDIAESSSRSYSRGNRLRQTRVPVHQRLGPVNQDRGXEDNENKKNQWCPSGIFTKNQKRRKTKPRRVWRVKNQVPVADEATADEAKRLAKGKSVVTASVNMVFTLPAEFGIKXADIDEVEEESAKLILSPGQVVFEKPEGTENXHLQPLYINGYVNGKPMSKMMVDGGATMNLMPYATFRKLGRNAEDLIKTNMVLKDFGGNPSETEGVLNVELTVGNKTIPTTFFVIDGKGSYSLLFGRDGIHANCCIPSTMHQCLIQWQGDKIEIVPADSQLKMESPSYYFEGAVEDSHVYNKDTVDDLDDKQGXGFMSADDLEEIDIGLEFRTKLIELLKEFRDCFAWEYYDQIFMAEEDIHKTTFRCPGAIGLFIWVVMTFGLKSAGATYQRAMNYIYHDLIGWLVEVYIDDVVIKSKEIEDHIADLRKVFERTRKYGLKMNPTKCAFGVSAGQFLGFLVHERGIEVTQRSVNAIKKIQPPENKTELQEMIGKINFVRRFITNLSGRLEPFTPLFRLKADQQFTWGAEQQKALDNIKEYLSSPPVLIPPXKGIPFRLYLSAGEKSIGSVLIQELYXKGXVVFYLSRRLLDAETRYFPVEKLCLCLYFSCTRLRHYLLSNECTVICKAGVVKXMLSAPILKGRVGKXIFSLTEFDLRYESPKAIKGQAIADFIVEHPDDSIGSVEIVPWTLFFDRSVCTNGCGIGLVIISPRGACFEFAYTIKPYATNNQAEYEAVLKGLXLLKVVEADAIEIMGDSLLVISQLAGEYECKNDTLMVYNEKCQELMKEFRLVTLKHVSREQNIEPNDLAQGASRYKPMIKDAKVEIAAITADDWRYDVHQYLHNPSQSASRKLRYKALKYSLLDDELYYRTIDGVLLKCLSTDQAKVAIGEVHEGICGTHQSAHKMKWLLRRAGYFWLTMLEDCFRYYKGCQDCQKFGAIQRVPASAMNPIIKPWPFKGXGIDMIDMISPPSSKGHKFILVATXDYFTKWVEAIPLKKVDSGDAIQFVQEHIIYQFCIPQTITTDRGLIFVSDEFVQFADSMGIKLLNSSPYYAQANGQAEASSKSMIKLIKRKISDYPRHWHTRLAEALWSYRMACHGSIQVPPYKLVYGHAAVLPWEVKIGSRRIELLNGKYLQKYYPSVWVNA

SEQ ID NO: 171427 - protein, 730 aa, Oryza sativa
  Clone ID: PAT_MRT4530_69660C.1.pep
MVAHGVLLAKEIIGWRPACGEMFPTPDTHKVVVFSHFFYGGFSLPTSSFFRGILDFYGISLHHLNPNSIVHIANFIYACEAFLGIRPHFALFRRIFFLKPQPNKSKPCVVGEAGFQLRGTLSQKYFSMPFKTLNKGWHANWFYVQNPEPALPGYSSLPPVYRDTWNSPPMGEEAAQALVLLDRMLKLKEQGLQGKQITWHFIKTRLAPIKERSRTTFEFDGKHDPNRENPESLELKIMQERMYKIFSNAIVVSYSHLLPVMPYNAFNPPPLSTENLKYHAQEFALMKSNPPIAQRHSLHRHTGQASGGPKIQSDVQPNASRSTNQSDSRKRKLVSSDDEGDDAEKTGNKGVIGKQPKSTNPKKKTSSHPMPKIWKSSRKPSNIGLSGKDPTPTGTETGPSVETGPTTENRPGNNQLATGNVDTSNEPPTGNQSAEAEASADQEPPTGNQSGTKQNRDTPEMEAQVNSPPKTDTCAFPGTSSPARVQGPARPRPEIITGPMTSDEEEILRIRSTEDSRPPILVKWWDDEMLPQGIVINKHKEDEEICLLKRTLGQATRLVNRIHLRNEAKTATLEKLVPHLGTLEATRDQLHEAKELARKTEHDLRDQIAELQDSNFELSGSSKGSIRRLGQQIKRLEGARDEVANAATPLVQAMFFNNNGPSAFDASEIFDKLRIAPDTYFKKIKEAGSMGASLALAMTKSLYPKIDIDTIDGFADGTSEEAALDLINDA

SEQ ID NO: 171428 - protein, 313 aa, Oryza sativa
  unsure (1)..(313): unsure at all Xaa locations
  Clone ID: PAT_MRT4530_69661C.1.pep
MQCLQPSSTDTSNEPPTRNXSAEAGVGADQEPPTGNQSGTEQNRDMPEAKAQANSPPKTDAGAGPGTNSPVRVQGPARPRPEIITEEVLRIRSXLLKKTLGQATRLVNRIHLRNQAKTATLEKLVPHLGTLEATKDQLREAKELARKTEHDLRDRIAELQDSNFELSGSSKVQTAKISELERRIKALEKDKGELTKQRDSALKDVEDHKIKSQAQFDVLVNKIKRLEGARDEVANAAAPLVQAMFIXDAAKIFDKPIIAPETYFKNMKEAGSMGASLALAMTKSLYPKINIDPIDGFADETSEEAALDLINDA

SEQ ID NO: 171429 - protein, 98 aa, Oryza sativa
  unsure (1)..(98): unsure at all Xaa locations
  Clone ID: PAT_MRT4530_69662C.1.pep
HASGQRHGGGQRTSESGGXGGGAERPVSSSQVQIVHRRRAPPRGKRGGGVAAVVGDEFEGEGPEEARGGRRAPPKSKSVVGELHRVEWRRWGGHGRWR

SEQ ID NO: 171430 - protein, 727 aa, Oryza sativa
  Clone ID: PAT_MRT4530_69663C.1.pep
MAEERESFESQWVSSDVMEENLKEMVAHGVLPAKEIIRWRLAYGEMFPAPDTHEVVVFSHFFYGGFSLPTSSFFRGILDFYGISLHHLNPNSIVHIANFIHACEAFMGIRPHFALFRHIFFLKPQPNKNKPCIVGGAGFQLRGTLSQKYFSMPFKTSNKVYRDTWNSLPMGEEAAQALDLLDRMLKLKEQGLQGEQITRHFIKTRLASIKERSRTAFEFDGKHDPNRENPESVEFKIMQERMYKIFSNAIVVSYSHLLPVVPYNAFNPPPPEFALMKSDPPIAQRCSPRRHTGQASGGPKIQSDVQPNASRSTNQSDSCKRKLVSSDDEGDDAEKTGNKGVTGKQPKPTNPKKKISSRPIPKIRKSSRKPSDIDPSGKDPTPTGTETGPSVETGPTAKNHPGNNQPATGNVDTSNEPPTGNQSAEAKANADQEPSTGSQSGTEQNRDIPEIEAQANSPPKTDTGAGPGTSSPIRVQGPARPRPEVITAKELARKTEHDLRDRIAELQDSNFELSGSSKGNSHPCLTHFMLLSMCYQPTRSNTVQAAKISNLEKRIKALEKDKDELTKQRDSALKDVEDRKIKSQAQFDVLVNKIKRLEGARDEVCNAATPLVQAMFFNNNGLSSFDAAEIFDKLRIAPDTYFNNIKEAGRMGAGLALAMTKSLYPKIDIDAIDGFADGTSEEAALDLINDAQKAADKIAADVVERFQDNDLRPTGSNNSDDEKTDTD

SEQ ID NO: 171431 - protein, 50 aa, Oryza sativa
  Clone ID: PAT_MRT4530_69664C.1.pep
IYGFGFYFFLDFERITVFHRKQFLPSFPQLLMSLPIWKILFVFKLRSVFS

SEQ ID NO: 171432 - protein, 55 aa, Oryza sativa
  Clone ID: PAT_MRT4530_69665C.1.pep
YLAMCASVSRVQGPASVTYRFARFMPVSSRHKFASCFQLAFVLLVYGTSPYVNAG

SEQ ID NO: 171433 - protein, 697 aa, Oryza sativa
  unsure (1)..(697): unsure at all Xaa locations
  Clone ID: PAT_MRT4530_69666C.1.pep
MAKERESFESQWASSDVTEENLKEMVAHGVLPANEIIGWRPACGETFPTPDTHEVVVFSHFFYGGFSLPTSSFFRGILDFYGLSLHHLNPNSIVHIANFIHACEAFLGIRPHFALFRRIFFLKPQPNKSKPCVVGGARFQLRGTLSQKYFSMPFKTSNKXPTLPGYSCLPPAYRDTWNXLPMGEEAAQALDLLDRMLKLKEQGLQGEQITRHFIRSQLAPFKERSRTAFEFDGKHDPNREXQFKIMQERMYKIFSXAIVISYSHLLPVVPYNAFNPPPPEFALMKSDAPIAQRRSPRRHTGQASGGPKIKSNVQPNTSRSTNQSDSRKRKLVSSDDEGDDAEKTGNKGKPSDIDPFGKDPMPNGTETGPSAETEPTAKDHPGPMIGDEEEVLRIQSAEDSRPPILVKWWDDEIRSQGIVINKQKEDEEVCLLKKTLGQATHLVNRIHLRNEANTATLEKLVPYLGTLEATRDQLCEAKELARKTEHDLRDWIAELQDSNFELSGSSKLESNIVQAAKISELERRIQALEKDKVERAKQRDSALKDVEDRKIKSQAQFDVLVNKIKKLEGARDEIANAATPLVQAMFFNNNGPSSIDAAKIFNKLRTAPDTYFMNIKEAGSMGASLALAMTKSLYPKIDIDAVDGFADGTSEETALDLISDAQKAADKIAADVVERFRDNDLKPTRSDNSDDEKTESD

SEQ ID NO: 171434 - protein, 172 aa, Oryza sativa
  Clone ID: PAT_MRT4530_69667C.1.pep
MEIEGALVAQMRRWLGGRAVSGKEVPIAVTRDLRQGGGRNSGVRIVPAPVVAPESLVEGRRRSGAGPGLPGGVWLFAIWDGGAGPAVRRRWPVARKEDACGGRRSEEAAGNRGAESARRGFARRVIAWVRNRCNRRGGQRMDKIRVDRRWTNEMRGDDFTRRIARHNSSFLY

SEQ ID NO: 171435 - protein, 430 aa, Oryza sativa
  Clone ID: PAT_MRT4530_69668C.1.pep
MAPAHSHRRGATEANEQMRRKKEKALREKEAGDDDFDEGRYKRAVEHYARAAALDPGDISFPIKCAKSYFHMDQYEECVRRCDEAVERGRELRAKKSLVALALLLKGTALLNLADCASDCKAAIRALKQSLDEHYHKGTEAILDEAESAMEEMEELEKEAAKHHREKGKELLSKKKYKEAAIQFTKAIKRNPLNPRNFSDRAKCRIELNALAEGLEDADKCIEVDPTFWKGYFCKGEVQFLMHNYEDAMTTYLDGLKYGPQKTTIYDGIKRCLEQIKMAKDRDVRDKDLWEAFKKSSSSQVEKLTMQRDVVTVELKSAKERNANLELQLSEQIGRIERLLSIQNSEPPHFICPISQEVMNDPHFAADGHTYEAEHIRKWLNDGHDTSPMTNERLQHKKLTPNHALRSAIREWHQHRNMRHTSPRRQQLFL

SEQ ID NO: 171436 - protein, 310 aa, Oryza sativa
  Clone ID: PAT_MRT4530_69669C.1.pep
MEPINITSVRELEEAIGKYGAGESVRVTINVANVFEADELLRLIGDRELEVRWELSPGGMDMLRSAADYYLNLDLLYEFMDLMRLDLRDGVPVKKSLFDWIRTASTDVLTSSHPSSTRRILEQITLEAQLIGRVAKGLGFGADDVQQYLITPHEMSWYLEEDAVAVRKRRASLSSGDAATSDVAAGASDPVELLKNHKQRLLDKVAHLQQKHGDEGMRWAPASNVPMGDQPTGGDDSPLKRRTSDEKRGAEEADRTPPRTSLRRRMGEDCGGAAEESRNGGAATQRPSAAAINSTDPPTSLRCCVAFVFK

SEQ ID NO: 171437 - protein, 121 aa, Oryza sativa
  unsure (1)..(121): unsure at all Xaa locations
  Clone ID: PAT_MRT4530_6966C.1.pep
LNHMIGAAIVMLRFLKEGATRTXHAVESDCIYTPVDTACDTGCHGSLLXLRFEGMMHGAVELVASDCPHWNRSEGADHLYVTPDDLGAGLHXHEEEALGRGMLPXLHSAMLVETSGQRNHV

SEQ ID NO: 171438 - protein, 214 aa, Oryza sativa
  Clone ID: PAT_MRT4530_69670C.1.pep
MAPPDTSRAPAQGEEAASTSPWPLRKLQSFTPGLCSQYKAYENAFVDMAKGTISDAMVLVNEHQTEAIGCATVAGFILLRGPRRFLYRNTLGRFKTEKDLLNDAEQSMMEYKTSIEQLKKDSKYTLDKIAVGESDLQRGQTDLRSTGKQIRSLIGSIYKAESTATGLMDRLRTIPTRQSLELRAEVASMASDLKNQRCVLQERINKISEYGVRV

SEQ ID NO: 171439 - protein, 228 aa, Oryza sativa
  unsure (1)..(228): unsure at all Xaa locations
  Clone ID: PAT_MRT4530_69671C.1.pep
MAEAAAAPPAAASTNYEVDLGNLMAYDPSHHLPAASSSREELREECLRKGTELAQAVADALFALPATEDRDGPMVRLPPPTTRFPREKHLPRPKPPTKWEQFAKMKGITKHKKNKREWDEQTQTWKRTYGYDRVNDDKDIPIIEAKATDEPGVDPFAQRREDKKKHVEXQEKNRXRNLKKAAKVGALPSHIQLAATALPITGTKADIPKKSRKKDLRDVAGMASSATA

SEQ ID NO: 171440 - protein, 332 aa, Oryza sativa
  Clone ID: PAT_MRT4530_69672C.1.pep
MAEAAAAPPAAAATNYEVDLGNLMAYDPSHHLPAASSSRSAPIAATAIVPCCFDSVTKFPGVARREELREECLRKGTELAQAVADALFALPATEDRDGPMVRLPPPTTRFPREKHLPRPKPPTKWEQFAKMKGITKHKKNKREWDEQTQTWKRTYGYDRVNDDKDIPIIEAKATDEPGVDPFAQRREDKKNHIQLAATALPITGTKADIPKKSRKKDLEDVAGMASSATASGGKFDEKLPGEKPPKNPGKHRKFLPVVEGKGMGNQEKQQNDKILNALLAKSSEDQMDVGRAITMYKVKKEKQRRKDKEKSSSSNKLKPQKKTLKKSSKKKA

SEQ ID NO: 171441 - protein, 356 aa, Oryza sativa
  Clone ID: PAT_MRT4530_69673C.1.pep
MAEAAAAPPAAAATNYEVDLGNLMAYDPSHHLPAASSSRSAPIAATAIVPCCFDSVTKFPGVARREELREECLRKGTELAQAVADALFALPATEDRDGPMVRLPPPTTRFPREKHLPRPKPPTKWEQFAKMKGITKHKKNKREWDEQTQTWKRTYGYDRVNDDKDIPIIEAKATDEPGVDPFAQRREDKKKHVEKQEKNRLENLKKAAKVGALPSHIQLAATALPITGTKADIPKKSRKKDLEDVAGMASSATASGGKFDEKLPGEKPPKNPGKHRKFLPVVEGKGMGNQEKQQNDKILNALLAKSSEDQMDVGRAITMYKVKKEKQRRKDKEKSSSSNKLKPQKKTLKKSSKKKA

SEQ ID NO: 171442 - protein, 62 aa, Oryza sativa
  Clone ID: PAT_MRT4530_69674C.1.pep
SIARRLQPPPHHAGRTLTPQPRRSISPCRHAFSPLTNCKKQFFNPPSFFPHDFPFQIGFSIH

SEQ ID NO: 171443 - protein, 94 aa, Oryza sativa
  Clone ID: PAT_MRT4530_69675C.1.pep
LYISLGFLLFSLHVTPPCSAATNDTLAAGEVLAVGDKLVSRNGRFTLGFFQPSVVVKSGNITSPNWYVGIWFSNIPVFTTVWVANRDSPVTELQ

SEQ ID NO: 171444 - protein, 122 aa, Oryza sativa
  Clone ID: PAT_MRT4530_69676C.1.pep
GLIPADDGVFDSLQYSDAPMFLPGHDTGVVAENHYVEFGASGIQNQGFQHTTELWAHNQVALNVRNHMKDNHVVFAHSSDATIIHTVNEQPPNRSSNASQSWFNGALSAWRDSVPSSPAMAG

SEQ ID NO: 171445 - protein, 145 aa, Oryza sativa
  unsure (1)..(145): unsure at all Xaa locations
  Clone ID: PAT_MRT4530_69677C.1.pep
SSNTWLASPRRSASVSPPPPLAAIGQSMRRQQPAPCRQPARCRSPPNRASLTGDDGRXEEREWKELFRGSSVAFLCKYIKKIKGXVGFLGWSRAVEQKNQLHPRSTNLWSSFANPAPKMRICTISAPALDKLELGAGAIPNGALI

SEQ ID NO: 171446 - protein, 187 aa, Oryza sativa
  unsure (1)..(187): unsure at all Xaa locations
  Clone ID: PAT_MRT4530_69678C.1.pep
MESNSGEIEELPPPPPLPPNAEPIKTDDTKKLSKPKRALMARSGCGKKGQPIQLLTNHFKVSLKAADEFFHHYYVNLKYEDDRPVDGKGIGRKVLDKLQQTYASELANKDFAYDGEKSLFTIGALPQVNNEFTVVLEDFNTGKSSANGGRPGNDRPXNDRDRVRNAYPTKTFIVELNFXAKIPMSAI

SEQ ID NO: 171447 - protein, 124 aa, Oryza sativa
  Clone ID: PAT_MRT4530_69679C.1.pep
RRPRGGGCCGEERDQRHAYEPLLRAWSEARLTEDSDEHSEQVLWTRSLVIPRGSEPEGLMVPRYRSTPGLGYMIQGRGSMGLTLPGCPATYQQQLQQCLPEGQSQSQKFRDEHHKIHQFRQGDI

SEQ ID NO: 171448 - protein, 42 aa, Oryza sativa
  Clone ID: PAT_MRT4530_6967C.1.pep
DAFVFYIACRQKNDQHVMQDNHVMKCHELFEHCYTGSLYRGT

SEQ ID NO: 171449 - protein, 55 aa, Oryza sativa
  Clone ID: PAT_MRT4530_69680C.1.pep
MASSSGRASYVDGMTARYNGLHPGMWGLARTASGSFQEAKYPSMVKGVKEEKRTS

SEQ ID NO: 171450 - protein, 263 aa, Oryza sativa
  Clone ID: PAT_MRT4530_69681C.1.pep
MQRIVYCLKTRDAAQKLNTGIHMHIAEIPYENELVMQTKGIDHGTVTYLEKIDFLRSNLLAAHSVWLNKPEIGHFLKADVKVSHCPASAMRMLGFAPIREMLDSGVCVSLGTDGAPSNNRMSIVDEMYLACLINKGREAYITGTTNPTALPAETVLKMATINGAKAVLWDDEIGSLEVGKKADMVVVNPLIWSMVPVHDCIANIVYCMRTENIESVMCNGRWIMREKKIVNLNEEEVIASAEKIARDLLARAGINLPNRMNYL

SEQ ID NO: 171451 - protein, 64 aa, Oryza sativa
  Clone ID: PAT_MRT4530_69682C.1.pep
MARSVAVVVLLAIAAVAADQAPGPAATPAESATGPADVAESPAEGRPYTTRATPMEETQLDARL

SEQ ID NO: 171452 - protein, 101 aa, Oryza sativa
  Clone ID: PAT_MRT4530_69683C.1.pep
MCPATTRSPLLTASLSAHCSNSLPTPFMCSPSSMHRLTLSPCSAVMPIHDQPHVADTQRRLTVKSPGYTLDHSVPSSRWPQLAQPSTTPPPWTFPSTRRGW

SEQ ID NO: 171453 - protein, 85 aa, Oryza sativa
  Clone ID: PAT_MRT4530_69684C.1.pep
DEYQVAASTSTHQIYEHVSKIPPGHFLKANLPIYALHFYHLPLQLQMFMARNDVDAIHFILGFITGYIGRVTNKTQQFPSIRSNR

SEQ ID NO: 171454 - protein, 107 aa, Oryza sativa
  Clone ID: PAT_MRT4530_69685C.1.pep
LLTLKPINIFKELHLELPYSLQTLPAYSIHPTLRLFQLISESAESDYLNHLTNLNQPRLFGQPLEEGMDLQQPLLNSNNPDTELFEPFEPSEPTDHLDQLNLPSLLS

SEQ ID NO: 171455 - protein, 72 aa, Oryza sativa
  unsure (1)..(72): unsure at all Xaa locations
  Clone ID: PAT_MRT4530_69686C.1.pep
RTRPRCQPQFKRHCARHGAPDDPLHQHCWQDCCXHLDRCYNSWCMSYMLKHMYRDLYSELVANDMAHAMPDW

SEQ ID NO: 171456 - protein, 40 aa, Oryza sativa
  Clone ID: PAT_MRT4530_69687C.1.pep
FAEPGVFSPGIFVFPEADRLRWGGTPLTTEPVVVLSALVF

SEQ ID NO: 171457 - protein, 407 aa, Oryza sativa
  Clone ID: PAT_MRT4530_69688C.1.pep
MSGTTSTNTVSKRSRTSEVWQHFDEVTALTGPDRRQVSGGGRRGCGGGVRAVAERGEDAAAAGGAERMDVDSRSWNENLIRHVMKKEDADEILKIRLYTRQLEDFPAWHLEKTGLFTVKSAYRLAWNLSRNVVEATSSRAILGERKLCLSIWKTKVQAKVKIFAWKLALDRLPTWNNKCRRKIERQGTCQMCGLTDEDGFHATVECTKAKALRKVLRDVWRLPLENKFVKTGPDWLLLLLDESNEIERAHTLYMLWRAWHLRNEMMHGNKKGKRPMFEEPPARAEINAAQKMKWEPPPEGVAKINVDAGFNKEMGEAGAGIIARDCRGLVLLAACKKLSRCSSAAQAEALACLEGVQLAANWVQMPIILESDNADVVAGLNATQDSRAEWRGIIAEVKAAVQCLVQV

SEQ ID NO: 171458 - protein, 99 aa, Oryza sativa
  unsure (1)..(99): unsure at all Xaa locations
  Clone ID: PAT_MRT4530_69689C.1.pep
HHTQLPTSRLHTVGERRCIPDLEVEIAGVEAERQRXWQDWVVVAAGHQREEEGDGLAGRRREMDPPAXPPAVRPLRRPHRSSDRAAPPPSRSSDCAAPP

SEQ ID NO: 171459 - protein, 1831 aa, Oryza sativa
  Clone ID: PAT_MRT4530_6968C.1.pep
MAEKQPPPPSSPCSVKGKALKLGLTDIIEENVMPIDPEKFTPEKKEEFEATLQQARDQFLNSFMQTRKGTLIQKYKIKVVADSPGTGSSKDREVKQAPGGSAQPSIKGATDGSLGDQGDNSQGVHGVQGDGAQGPQGGNLNQNSEVAQDFFNNFPDRTIADGSIAEHQAAGPVYLQGGVFPNYRSLITDVQPSIQAVPSVAPTTQPTAPASTPLPATSAMVPGQPMNPRLLTREHPQHSGHVANRPTQDQVAAMFLPPQHAVDPKQQQPIQQTPPIQQAVQPIQQQAVQPIQQQVVQPVQQTPPRQQLLQPIQQTPLRQQIVQPIQHPGSPPSPQAQYQPGGLAQPQFASQYGQFEPMQQQPQAAAQQRPWADVIADVMREQFGLKPKETGSLYRQPYPEWFERVPLPNRFKVPDFSKFSGQDADLAFQGMIAPIREKFSSEDFDSLSHLIQKVTLHEHRSAEVRKSSKKVNQVFPYMYGSDDEEDDSEIAAAEWVRSKKVIPCQWVKSPGKEEKYDFDITKADKIFDLLLREKQIQLPVGHTIPSAEELSKKRYCKWPNSGSHSTNDCKVFRQQIQVAIEGGKIRFDDSKKPMKVDGNPFPVNMVHTAGQTADRVRAKGFQVNSAKIINKYQRKYDKQQNTMMVLILIGVNQKRRVQRLRNRERLQEVEQEINHCLRKPNPRQEWCVKNQVPVADDVAADEAKRLANGKSVVAAPINMVFTLPAEFRIDQADVDEVEEESAKLVLSPEQAVFEKSEGTENRLLKPLYVNGYVNGKPMSKMMVDGGAAVNLMPYATFRKLGRNAEDLIKTNMVLKDYGGNPSETKCVLNVELTVGSKTIRTTFFVIDGKGSYSLLLGRDWIHANCCIPSTMHQCLIQWQGDKIEIVPADSQLKMENPSYYFEGVVEGSNVYTKDTVDDLDDKQVPVIKKNGKVRVCIDFRDLNKATPKDEYPMPVADQLVDAASGNKILSFMDGNAGYNQIFMAEEDIHKTAFRCPGAIGLFEWVVMTFGLKSAGATYQRAMNYIYHDLIGWLVEVYIDDVVVKSREVEDHIADLRKVFERTRKYGLKMNPTKCAFGVSTGQFLGFLVHERGIEVTQRSVNAIKKIQPPENKTELQEMIGKINFVRRIISNLSGRLEPFTPLLRLKGDQQFTWGAEQQMALDNIKEYLSSPPVLIPPQKGIPFRLYLSAGEKSTGSVLIQELEGKEQVVFYLSRLLLDAETRYSPVEKLCLCLYFSCTRLRHYLLSNECTVICKADVVRYMLSAPILKGRDGKWIFSLTEFDLRYESPKAIKGQAIADFIVEHRDDSIGSVEIVPWTFFFDGSVCTHGCGIGLVIISPSGACFEFAYTIKPYATNNQAEYEAVLKGLQLLKEVEADTIEIMGDSLLVISQLAGEYECKNDTLMVYNEKCQELMKEFRLVTLKHVSREQNIEANDLAQGASGYKPMIKDVKVEIAAMTADDWRHDAKVAIGEVHEGICGTHQSAHKMKWLLLRAGYFWPTMLEDCFRYYRGCQDCQKFGAIQRAPTLAMNPIIKPWPFRDWGIDMIGMINPPSSKGHKFILVATDYFTKWVETIPLKKVDSRDAIQFVQEYIIYRFGLPQTITTDQGSIFVSYEFVQFADSVGIKLLNSSPYYAQANGQAEASNKSLIKLIKRKISDYPRQWHTRLAEALWSYRMACHGSIQVPPYKLVYGHEAVLPWEVRIGSRRTELQNDLTADEYYNLMADEREDLVQSRLRALAKVTKDKERVARHYNKKVVPKDFSEGELVWKLILPIGTRDSKFGKWSPNWEGPFQIYKVMSKGAYMLQGLDGEVYGRALNGKYLKKYYPSVWVNA

SEQ ID NO: 171460 - protein, 73 aa, Oryza sativa
  unsure (1)..(73): unsure at all Xaa locations
  Clone ID: PAT_MRT4530_69690C.1.pep
EENLKYIYXEGPPMVSQRLGPYFMPFYSHNFFWFRQLGNFFPFFQVFFPVALRWPPKGWIPPFFFFPALEFLK

SEQ ID NO: 171461 - protein, 183 aa, Oryza sativa
  Clone ID: PAT_MRT4530_69691C.1.pep
MFYSSAIHVHTSHSLQLATLALLSEMLGRGLLPTSHTCAAAAAPALLLAYGQRWKRGDKGRDNGERGRRKKGEERDDGMWPDRVNGLFCQIWIMFEETKILKASWFDLNIALDDGDEHAIPNLNEAVAEETAAADQEDDQVGGDLHGGANRELPGGDFQGGANHVLPFDLNLHASDQRRNTSR

SEQ ID NO: 171462 - protein, 48 aa, Oryza sativa
  Clone ID: PAT_MRT4530_69692C.1.pep
KNCGNELNCMQLYLIMSGPDKHTILRLCMRNYSEALSMVPYLDIGTLT

SEQ ID NO: 171463 - protein, 307 aa, Oryza sativa
  Clone ID: PAT_MRT4530_69693C.1.pep
MAHLPLLLLSFLLLIGVHASVSDGSPLPHTYNTSICSKSYKCGGVNISYPFYLSNATGETYDYTQFSCGYTDLNITCSWDGSKQTPFIQLNGDNYTILEIIYDSRTIVLVDTDALRGGSCPRVRHNITFSQADEWLQYTGPRDNLTFFFGCNLVPLPPMDPGLTRFVDKNQINCKDFSNWPDGGDSFVFTSVELEAPMEYELASRCRQVIVVPVNGSILNSSSQSALPSGEYGQVLKKGFELAWKSRKDKQCNLCEQSRGQCAYSQNRTFLGCLCADGKVSSTDCTSSKSFDADPSFFSPPFCKANN

SEQ ID NO: 171464 - protein, 51 aa, Oryza sativa
  Clone ID: PAT_MRT4530_69694C.1.pep
MDELAGDLEAAEATMDKTSPKVGRGLGEPSQLPPLLILPSPASCFCCCPSY

SEQ ID NO: 171465 - protein, 67 aa, Oryza sativa
  Clone ID: PAT_MRT4530_69695C.1.pep
LENDPPPHNACSPTIPNFDAARLSQRSHRPHSVFDDPTISASDLRNIHSADIAHETTISRGACRDIR

SEQ ID NO: 171466 - protein, 64 aa, Oryza sativa
  Clone ID: PAT_MRT4530_69696C.1.pep
FLGGLIIFEPEPQAKIIDEPGNPNRAPVGSPYLHIRGLFKAGSNQGQTPYLRQIQIRRKFRSCS

SEQ ID NO: 171467 - protein, 56 aa, Oryza sativa
  Clone ID: PAT_MRT4530_69697C.1.pep
LYYCTMKFSWIRLVPTILIKLLFFFLKRMNFTVDSYKNSSKIVSNEALTPLLLQHE

SEQ ID NO: 171468 - protein, 68 aa, Oryza sativa
  Clone ID: PAT_MRT4530_69698C.1.pep
DTAEFNLFFLLLTIVKEREITANTCFYPRDFFNTYGHHLLRNSWLYFWMMPSERMLEKGVFFRQAQPQ

SEQ ID NO: 171469 - protein, 53 aa, Oryza sativa
  Clone ID: PAT_MRT4530_69699C.1.pep
FGIQNAEMQPMHHAWTKAKDVRRRTVSGTHEDHSDFCISHGAGRQLQISGLPE

SEQ ID NO: 171470 - protein, 1032 aa, Oryza sativa
  Clone ID: PAT_MRT4530_6969C.1.pep
MAPARTTARTAGTERRRRGKRGQSGRLGWRSAGADDGEARRAALDSGGVEKWRVEARLCIKGATDGSLGNQGDNSQGVHGVQGDGVHGVQDDGAQGPQGGSLNQNNDVAQDFFNNFQDRVDYAVHHALINQSGVLVITLSNMMKTIADGSIAEHQAAGPVYLQGGVFPNYRCGLTDVQPSIHAVPSVAPTTQPTAPTSTPLPATSAMAPGQPMNPRLLTREHPQHSGQVANRPTQDQVAAMFLPPQHAVDPVPQQPIQQTPPIQQPNLHNYQGGNLSYQYQPPSPQAQYQPGGLAQPQFTSHYGQFEPMQQQSQGAAQQRRWADVIADVMREQFGLKPKETGSLYRQPYPEWFERVPLPNRFKVPDFSKFSGQDGVSTYEHISRFLAQYGEASAVDALKGMIAPIREKFSSENFDSLSHLIQKVTLHEHRSAEVRKSSKKVNHVCPYMYGSDDEEDDSEIAAAEWVRSKKVFRQQIQVAIEGGKIMFDDSKKPMKVDGNPFHVNMVHTAGQTTDRVRAKGFQVNSAKIINKYQRKYDKQQEKHYEEYDDGFDPHWGCEFFRFYWNEGMRLPSIENCPGCSDIVESSSQSYNRGNRLRQARVSVKQRLGPVNQDRGQEDEVIRKNQWCPSGIFMKNQKRRVQRLKNRERLQEVEQEINHRLRKAKPRQEWRVKNQVPVADDVAADEAKRLAKGKSVVVAPINMVFTLLAEFGIDQADADEVEEELAKLVLSPEQAVFEKPEGTENRHLKPLYINGYVNGKPMSKMMVDGRAAVNLMPYATFRKLGRNAEDLIKTNMVLKDFGGNPSETKGVLNVELTVGSKTIPTTFFVIDGKGSYSLLLGRDWIHANCCIPSTMHQCLIQWQGDKIEIVSVDSQLKMENPSYYFKGVVEGSNVYTKDTVDDLDDKQGVRPRQQPLRRCKADMLEPVKAEIKRLYDAGFIRPCRYAEWVSSIVPVIKKNGKVRVCIDFRDLNKATPKDEYPMPVADQLVDAASGNKILSFMDGNAGYNQIFMAEEDIHKTAFRCPGAIGLFEW

SEQ ID NO: 171471 - protein, 856 aa, Oryza sativa
  Clone ID: PAT_MRT4530_696C.1.pep
MPTKGQFSRERNVKATLGRDGRQRGNSQDQSVQVPKEKIAVVGGNIDGKFEDRIRVVKNEKFRRQREPRSADAGGSLKGSKPWPGRKATTVDELVKHMSNVPSYLQRKETSGHLQDKALNVGVLEWGLLARWSHQQKHEFSSSHGASPSNTSRSLIFSSPSQSSASPSSKSLESNQSPTLNDHQHCSMEFQQSDLEDKYHGKARYSPSPNSAVLNLLPVHGKHFPENTGKYGDLNLRNISPLSDPLLTATGSSMRHEMVDDEETTRNIEEAVHHCSRRLFTDDDNIGQSFFTSHNNDSACGDFQQSSGVTGEVFETLVSSAVMEMERNASLSPVGFSKDIGQHHEFPRIPYSCPLPIMDSSEELGTSRTGTQGDSVGAAVTIGENRNQKQISRGASERTPRISAKFSDMDASPHRHLVSGLNRVNRCSSLKDGPCPRQPEASTSVDKINGDKSSGNKGSRRSPLRRMLDPILKPRQSSTSGPIQPSFVPKCHLPGHIDKQSLSLGGSALQNVQRRSVDSVVNSNCRTETNTNQPPQVLNSERYLQQDIDSTTTRHALLQLAWKNGLPFFMLSCGSDILVATVRRKGISDNNDLESTYTLFGVEDPKKRGGAWIKAEQLPSSEESGDSHVSREFAAFISAVSQQEPETSRHSSSQHSSRSMSTPTDCSCPLGNFHPNTRDDSCASSSVLAVLPNGFHGTSTSGQPLPLIERWKSGGACDCGGWDEGCMLSVLSDDARENKGDKSTQANQTTDGSQRFDLFVQGRSREDKHAFSMVSFREGLYTVEFRSSIALLQAFAMCIVMLHGRRPTRTQAGVHASQEHASLADHKLNKIMAASQGRAQASYVPHRPPLSPVGRA

SEQ ID NO: 171472 - protein, 280 aa, Oryza sativa
  Clone ID: PAT_MRT4530_69700C.1.pep
MSTAAPASATAAASLFLRRSLSSSSPRHVFLPHWVAPIVVARPARLSAVPAKRGGGGVVAAASAAAGSAQFGAGDSENPYEILGISPLDGFDQVKMAYKRRRKDAESNKDAEHLFKLERAYDMVMMEQLQNRKNGVAYGSIQVSKDIKYADNQPVVPWGPRYSRSTGKDLRINMAISATFIMYISTMGHADWKPMQFLCFAYFYRILDKLKATESASTPIYNEYGEVEGRGIHMAKRVLRSLGLVLGSILAVSLGYTGLANFSQFLGQYIPSVVYNFQVK

SEQ ID NO: 171473 - protein, 176 aa, Oryza sativa
  unsure (1)..(176): unsure at all Xaa locations
  Clone ID: PAT_MRT4530_69701C.1.pep
MSSTGEQSQAKAEAEEAVELVLFQVAECYVYLIPPRKTAASYRADEWNVNKWAWEGTLKVVSKGEECIIKLEDKNTGELYARAFLREDEPHPVEPVIDSSRYFVLRVEEXIDGRQRHAFIGLGFRERPSAYDFQAALHDHMKYLNKKKTAEEMVXHYEKSSSVDYSLKEGKLWVCS

SEQ ID NO: 171474 - protein, 205 aa, Oryza sativa
  unsure (1)..(205): unsure at all Xaa locations
  Clone ID: PAT_MRT4530_69702C.1.pep
YPSAYLSLAILAARCAHKGGSKFDLIGEWKXXAXIEXGRKLAXXHPXXRIKTXXXCHXRRCGKNPXPXWXXXVPXXPLXSCSPTXXXSSSAXXSPSSPXRSXSPXXXXLXXPXGVGXPXXXYXSFPXXPKNQFXNXLXLSTXVPLWXASXPXFXXTTXXIXXXFPFXXXHPXVSXXPAGSPPXLPSXXXPPLPHWXPLXXPLLXE

SEQ ID NO: 171475 - protein, 352 aa, Oryza sativa
  Clone ID: PAT_MRT4530_69703C.1.pep
MAPRKPTKAGSTGEDPGGLGEGWSCFLGKSLVKEADLGELVSSGVLVKGQGSCGGKAVVPSPSDGRTVVFPAYFAAGLRLPCDDFLSSVLATYEVRLPQLSPSAFPKLAVFAWMCRTCGFAPTAELLATLFTACASTKVVQTPAGPRKTVFGCVNFMLRPEHSDAWPVPASMAKWDRNWMQKWFYIANPYPAEVVKANWLLFECSAVSIIAKPNMEIDGTLESGLILLHKVAQRLSTRDLCEEFCLLRISALAHVRDVSVNESEEVLGLPRLVLPTGSKRQTNGRMNRVHIGELPSRSNPSRAGDDEVGPSKKRKRAVTKGGQVRTCCSANIAVESDGEVEEEEDGEAGGWF

SEQ ID NO: 171476 - protein, 325 aa, Oryza sativa
  unsure (1)..(325): unsure at all Xaa locations
  Clone ID: PAT_MRT4530_69704C.1.pep
MRPQDVVVANTLLAISNTAVKPEMTARRKKKKEKVVQVARGFSKSEESDGTPTSPVLRRAPSRSRRMSPPPASDAEAATGGSASAPAAKAIVSEDERVEAVIAPTDGLGLFTELNEFGESCAAVESLFVRGLAAHLSMKKSALERLDGYRLRLRKSEEDLRHKEDERRIVAETLKKANAENKALSGDNKSLHADLEAANKRDAERDRQLASAEEKIKSLEARLVSAEAAAATLVPATESAKQACYTLRLTLNDLGARAEGAPGEGGTAFDFSEWTQEAAGSVIEVAGAYGDCCARVSTGFVLSLLHAHGSDHIGSFPXFVKEEWP

SEQ ID NO: 171477 - protein, 690 aa, Oryza sativa
  unsure (1)..(690): unsure at all Xaa locations
  Clone ID: PAT_MRT4530_69705C.1.pep
MAPRKPTKAGSTGEDPGSLGEGWSCFLGKSLVKEADLGELVSSGVLXRAKDHVGAKPLSLCLVMDERLSSLXYFAAGLRLPCDDFLSSVLATYEPNMKIDGTLESRLILLRKVARRLSTQDLCEEFCLLWISPLARVWDVSMNEGEEVLGLPHLVLPTGVETRTLEDAEIEASKMIGALTTAEFARLLQRQTDGRVNWVHIGELPSRSNPSRAEDDKVGTSKKRKRAVVKGGQVRTRRSAKVAVESDGEEEEEEDGEVGSEDDGSHGYTPSPTLAKSRVGSHVSPTRPQDIVVANTLLAISSTAAKPVMTARRKKKKGKVVQVGRGFLDSEGSDGTPTSPVLRRAPSRGRRMSPPPASDAEAATGGSALAPATKANVSEDERVEAIPSPARQREGKALAVEAAISDVTLIAPHFVPADFATRPEITPFVDGVCQVIAPTDGLGLFTELNEFGESCVAVESLFVRGLAAHLSAKKSALERLDGYRLRLRKTEEDLRHKEDERRVVAETLKKANAENKVFSGDNKSLRADLEAANKRDAERDQQLALAEEKIKSLEARLVSAEAAAATLEAAGSVVEVAGAYGDCCACVSAGFVLSLLHAHGCDHIGNFPDFVKEEWPSNTQCSGAALRAFRKGFWEDGGRDCVKTRLRENLERITRDEEAAAANTGGDPGPSEQATEHEGEGNGGQDHLEV

SEQ ID NO: 171478 - protein, 68 aa, Oryza sativa
  Clone ID: PAT_MRT4530_69706C.1.pep
SPMVLPRLHKFEFVGLVEDICKPSSVIFSFIYYTSKCSHFASKKKKKKKKKTETSSLPRADSSARGST

SEQ ID NO: 171479 - protein, 87 aa, Oryza sativa
  unsure (1)..(87): unsure at all Xaa locations
  Clone ID: PAT_MRT4530_69707C.1.pep
MAGYLYGREVVVKGGCGGGDREAHGDDSGVQGRATAAGFRFLXAATFAAAXQCTARAXGGGGGSAGVWAGLGRLGLAGTAAQDGGGK

SEQ ID NO: 171480 - protein, 68 aa, Oryza sativa
  unsure (1)..(68): unsure at all Xaa locations
  Clone ID: PAT_MRT4530_69708C.1.pep
MFGHHKXEEKXAAXXAPKDAGDYXKEEKHHKHXEQIAKLGXXXPGXYAMHEKKQAKKDXEHAXSHKMK

SEQ ID NO: 171481 - protein, 143 aa, Oryza sativa
  Clone ID: PAT_MRT4530_69709C.1.pep
MSWIWAWRRLLHSVQHVQRGGREEAPAPGKKGKQRRHWGGRKAARARDAMRQGRCRRRGARREERRRGRRSGREDGGGGGAATRDERRRRRHATREARRRRVVDFHWSGWWTNIPRDWREKAGLYPNEALGAIEEEGKGINSP

SEQ ID NO: 171482 - protein, 1418 aa, Oryza sativa
  unsure (1)..(1418): unsure at all Xaa locations
  Clone ID: PAT_MRT4530_6970C.1.pep
MMSLCMNKCYNLSFTNAQLADLAFQGMIAPIREKFSSEDFESLSHLTQKVTLHEQRFAEARKNSRKVNHVCPYMYGSDDEDDDSEIAAAEWVRSKKVIPCQWVKSSGKEERYDFDITKADKIFDLLLREKQIQLPAGHTIPSAEEYGKKRYCKWHNSRSHTTNDCKVFRQQIQAAIEGDKIKFDDSKRPMKVDGNPFPVNMVHTAGRTAYGGRARGFQVNSAKIINKYQRKFCWNEGIRLPSIEDCPGCGNVAESSSRSYNRGNQLGQTRVPVHQRLGPVNQDHGQEDNENRKTQWCPPAEFGVKQSDVDEVEEESAKLFLSPEQAVFKKPEGTENRHLKPLYINGYVNGKPMSKMMIDGGAAVNLMPYATFRKLGRNTEDLIKTNMVLKDFSGNPLETKGVLNVELTVGNKTIPTSFFVIDGKGSYSLLLERDWIHANCCIPSTMHQCLIXWQGDKIEIVPADSQLKMENPSYYFEGVVEGSNVYTKDTVDDLDDKQGQGRRLLIELLKEFRDCFAWEYYEMPGLSRSIVEHRLPIKPGVRPHQQPPRRCKADMLEPVKAEIKXLYDASFICPRRYAKWVSSIVPVIKKNGKVRVCIDFRNLNKATLKDEYPMPVADQLVDAASGHRILSFMDGNAGYNQIFMAEEDIHKTTFRCPGAIGLFEWVVMTFGLKSAGATYQRAMNYIYHDLIGWLVEVYIDDVVVMSKEIEDHIADLRKVFERTRKYGLKMNPTKCAFGVSAGQFLGFLVHERGIEVTQRSVNAIKKIQPPENKTELQEMIGKINFVRSFISNLSGRLRHYLLSNECTVICKADVVKYMLSAPILKGRVGKWIFSLTEFDLRYESPNAVKGQAIXPWTLFFDGSVCTHGCGIGLVIISPRGACFEFAYTIKPYATNNQAEYEVVLKGLQLLKEVEADAIEIMGDSLLVISQLAREYECKNDTLMVYNEKCQELMMEFRLVTLNHVSXEQNTEANDLAQGASGYKPMIKDVEVEVASITADDWRYDVHQYLQNPSQSASRKLRYQALKYTLLDDELYYRTIDGVLLKCLSADQAKVAIGEVHEGICGTHQSAHMVKWLLRRGGYFWPTMLEDCFRYYKGCQDCKKFGAIQRAPASAMNPIIKPWPFRGWGIDMIGMINPPSSKGHKFILVATDYFTKCVEAIPLKKVDSGDAIQFVQXHIIYRFGIPKTIITDQGSILVSDEFVQFADSMGIKLLNSSPYYAQANGQAEASNKSLIKLIKRKISDYPRQWHTRLAEALWSYRMACHGSIQVPPYKLVYGHEAVLPWEVRIGSRRTELQNNLTADEYYNLMADEREDLVQSRLRALAKVTKDKERVARHYNKKVVSKDFSEGELVWKLILPIGTRDSKFGKWSPNWEGPFQIHKVVSKGAYMLQGLDEEVYGRALNGKYLKKYYPSVWVNA

SEQ ID NO: 171483 - protein, 62 aa, Oryza sativa
  unsure (1)..(62): unsure at all Xaa locations
  Clone ID: PAT_MRT4530_69710C.1.pep
LLIWSVICVIINNWVTATRNQGYSWNEFLFTDFIFFCFAFIYTXLLHLSSSVLAPKYRVAAL

SEQ ID NO: 171484 - protein, 140 aa, Oryza sativa
  Clone ID: PAT_MRT4530_69711C.1.pep
VLTAMAWTEAYGGFSSALVWLLVMHSAQREIRERHHYTVDCIVAIYVGILLWKMTGFIWSREATSSNRRLNKFEKIQSRLIQASKDSDIDEVRELLKEFELSSEESKNQIGIKYARLFRSATIVFALTIVVLAFTLPSDG

SEQ ID NO: 171485 - protein, 127 aa, Oryza sativa
  Clone ID: PAT_MRT4530_69712C.1.pep
SPSTRCGGRSPGSPSMRGGGRSPGSPSTRGRAQGSPSTRGGGRSLGSPSTRGRGRSPASPSMRGGGRSPGSPSTLGRCQSPGSPSPWPADLPPPPASWRFRPQLCRNRDKPPTSHPPPASWCFRPHL

SEQ ID NO: 171486 - protein, 57 aa, Oryza sativa
  Clone ID: PAT_MRT4530_69713C.1.pep
MVALAPQPAAALISMALDPLFNLLQRRLRYIRGDTGDWKPPSAAFKMRRGEAPVAVR

SEQ ID NO: 171487 - protein, 420 aa, Oryza sativa
  Clone ID: PAT_MRT4530_69714C.1.pep
MSPLRFAALTPCCSGVSGWARGGGCGKASTVSTSLTTRTVLYRLRKLFLPLDTTTPATESPSTAAKQCSPDSGHSPVVRRRRIVAIARLLLCAEPVRTILAADERVETAAVNLLAESAAVRLRSPEPAAGKELAARLTECGFPSVARRGGAASGASDSARKWREMAARKAELLTRSRGRVAFAWTLVALCCGSHATHFLHSLGIHVGHGTFLDLLHNSYVKCGIAIAALFGPGRGFLSFSQNVFNVTPDILFDGLRAFKQGSPNMNSLVGFGSAAAFAISSVSLLNPELEWNSTFFDEPVMLLGFVLLGRSLEESARLKASSDMNELVSLLSPQSRLVVTSSSDDPSSDGVLNSDAITVEVPVDDVRVGDFILVLPGETIPVDGNVLGGSSFVDESMLTGESLPVPKEKGFPVFAGTVNW

SEQ ID NO: 171488 - protein, 331 aa, Oryza sativa
  Clone ID: PAT_MRT4530_69715C.1.pep
MMRGKDQKFPAMKKETAAVAKEEVWEVRPGGMLVQKRSPESEPPPGGAPVPTIRVKVKYNGVYHEIYINSQASFGELKKLLSEKTGLHPDDQKVVYRDKERDSKAFLDIAGVKDRSKMLLLEDPTAQAKRLLEERRHCKAERAAKSVSRVALDVDKLASKVSALEAIVSKGGRVVDADVVALTEALMNELVKLDSIAADGEVKEQRRVQEKRVQKYVEALDAIRAKTKKAAAAPPKARPPHLPPRPPPAQQQQRRQFQPPAPATATAPAPQTATASWESFDLLSSVPSTSSAPVTTMAPATTTTTSPSPRVQNLCARRQGKLIILGLWGLY

SEQ ID NO: 171489 - protein, 96 aa, Oryza sativa
  Clone ID: PAT_MRT4530_69716C.1.pep
MAGETAAALAPRRRHDEEDRRRQRRLQRGDDGWRTVGGGCVGSRAGGSWARRRRRTEGTSRRGCSWKEVAAVAEGWQLRGAVEGAVASGSGGMAPR

SEQ ID NO: 171490 - protein, 290 aa, Oryza sativa
  Clone ID: PAT_MRT4530_69717C.1.pep
MRKKLDTRFPAPRIKKIMQADEDVGKIALAVPVLVSKALELFLQDLCNRTYDITVQRGVKTLSSSHLKQCIHSYNVYDFLRDVVSKVPDMGTSDAGVDDKLGKRRKTAEDDSEEESKRTRNEAASQTSTGRGRGRGRGRGRRGGRVSEREIISAYEKFEENHEFPPGQFSKPSQLKVDVSVDGTDAIETKEATPLSNARASLRNIDLNIELTDYDDEGSAPLEVQPPAPAAGVVTTSSGPLVSEVNEEAKTKDFLGWQLPELTKMAMDPVQFALSSNHRLEEDEDYDNEE

SEQ ID NO: 171491 - protein, 548 aa, Oryza sativa
  unsure (1)..(548): unsure at all Xaa locations
  Clone ID: PAT_MRT4530_69718C.1.pep
MATGSLGLSTSFLPGHDTLLRRRRRRPPATTAASFRPVTAELGGELGRQLVEAVGVGLPCTVMACGDVIYRSTLPRNDGLTITAPGVALALAAASYLWSTPGVAPGFFDMFVLAFAERVFRPTFRKVSAGTRDSXSGTSLGEGGSDLVYKASLDXQRHAGEGRVLVVVKKATEYGAVEIWMNERVRRACASSCADFIYGFRESKAKGKGADEYWLIWRYEGEDTLFDLMQSMDKEFPYNVETLILGDVQDLPKGIARENKIIQTVMRQLLFALDGLHSTGIVHRDVKPQNVIFSEGSRTFKIIDLGAAADLRVGINYIPSEFLLDPRYAAPEQYIMSTQTPSAPSAPVATALSPVLWQLNLPDRFDIYSLGLIFLQMAFPSLRTDSSLIQFNRQLKRCNYDLEAWRNLVEPRATPELRRGFDILDLDGGIGLHCRIQIARARGSLSLSVMQNLRXQLLRATQKDYSEAARWVVGLMARSGTEAEGGFTEAQLQELREIKPKKGSARRNLLASVLRVQRKVVRTINESMDELSSQSKSIWWSRWIPKEE

SEQ ID NO: 171492 - protein, 172 aa, Oryza sativa
  Clone ID: PAT_MRT4530_69719C.1.pep
PRVRNYIPSEFLLDPRYAAPEQYIMSTQTPSAPSAPVATALSPVLWQLNLPDRFDIYSLGLIFLQMAFPSLRTDSSLIQFNRQLKRCNYDLEAWRNLVEPRATPELRRGFDILDLDGGIGWELLTSMVRYKARQRTGAKAALAHPYFNREGLLGLSVMQNLRLQLLRATQKD

SEQ ID NO: 171493 - protein, 2005 aa, Oryza sativa
  unsure (1)..(2005): unsure at all Xaa locations
  Clone ID: PAT_MRT4530_6971C.1.pep
LQDQMNWHASIPKGKFWTCTGVKQISXASCFISTRFWHAQWDRLEVXKSFLMDDKPPTSPSLASPGSVKVKIQQLDQYEVNEGNIVNITPDKLTPDQKKDFEAMMQQARNQFLNSFMQTRKGTMVQKYKVREVADVPGTGSSKDGGVKQAPDGSAQPSNKGAXDDSHGNQGDNSQGVQGVQGDGAQGVQDQVDYAVQHALINQSGILTNTLANMVKSMVDGSMAKYQATGPVYLPGGVFPNYQPLITDNQPVVQSAINAPSAKPMAPLPAPAXAPPSVPGQLVNPRLLVREQSXHSGRNVNRLTQDKVASMFLPPQHTIDPTXNSRFSKHRQGSRLCSRVCDTWWSACATXCKSSCPGALGSSRTTIXHDVMKEQFGLRPKDAGNLYRQPYPEXFERVPLPNRFKVPDFLKFLGQDSTSTFEHVSRFLAQCGEASAVDALRVRXFWLSLSGSAFTWFSSLLYGSINSWADLEKHFHSYFYSGVHEMKLSDLTAIKQRHDEPVHDYIXMFREMRNKCYSLSLTDALLADLAFQGMIAPIREKFSSEDFESLSHLTQKVTLHEQRFAEARRNSRKVNHICPYMCGSDDEDDDFEIATAEWVRSKKVVPCQWVKNSRKEERYDFDITKVDKIFDFLLREKQIQLPASHTIPSVEELGKKRYCKWHNSGFHTTNDCKVFRQQIQAAIEGGKIKFCDSKRPMKVDGTPFPVNIVHTASRTADGGRTRGFQVNSTKFINKYQRKYDKQQEKHYEEDDDGMRLPSIEDCPGCGNTAKSSSRSYNRGNRPGQTRVPVHQRLGPVNQDYGQEDNENRKTQWCPSGIFTKNQKRRRTKPKQEWRVKKQAPIADEAAADEAKRLAKGKXSVVTASVNMVFTLPAXLGVKQADVDEVEEESAKLFLSPEQAVFEKPEGTENRHLKPLYINGYVNKKPMSKMMVDCGAAVNLMPXATFRKLGRNTEDRIKTNLVLKDFSGNPLETKGILNVELTVGNKTIPTSFFVIDLKGSYSLLLGRDWIHANCCIPSTMHQCLIQWQGDKIEIVPADSQLNMENPSNYFEGVVEGSNVYTKDTVDDLDDKQEQGFMSADDLEEIDIGPXFRTKLIELLKEFRDCFAWEYYEMPGLSRSIVEHRLPIKPGVRPHQQPPRRCKADMLEPVKAEIKRLSDAGFIRACRDAEWVSTIVPVIKKNDLNKATPKDEYPMPVADQLVDAASGHKILSFMDGNAGYNQIFMVEEDIHKTXFRYPGAIDLFEWVVMTFGLKSAGATYQRAMNYIYHDLIGWLVEVNIDDVVVKSKEIGDHRADLRKVFERTRKYGLKMNPTKCAFGVSAGQFLGFLVHERGIEVTQRSVNAIKKIQPPENKTXLQETIGKINFVRRFISNLSGRLEPFTPLLRLKADQQFTWGAEQQKAFDSIKEYLGSPPVLILPQKGIPFRLYVSAGEKLIGSVLIQELEGKERVVFYLSRRLLDAETRYSPVEKLCFCLYFSYKRLRHYLLSNEFTVICKADVVKYMLLAPILKGSVGKWIFSLTEFDLRYKSPKAIKGQAVADFIVEHRDDSIGSVEIVPWTLFFDGSVCTHGCGIGLVIISPRGAGFEFAYTIKPYATNNQAEYEAVLKGLQLLKEVEADAIEIMGDSLLVISQLAGEYECKNDTLMIYNEKCXELMKEFRLVTLKYVSREQNSEANDLAQGASGYKPMIKDVEVEVASITADDWRYDVHQYLQNPFQSASLKLRYEALKYTLLDDELYYRTIDRVLLRCLSADQAKIAISEVHEGICGTHQSAHKIKWLLRRAVYFWPTILEDCFRYYKGCXDCKKFGAIQRAPASAMNPIIKPWPFRGWGIDMIGMINPPSSKGHKFIMVATDYFTKWVEAIPLKKVDSGDSIXFVHEHIIYRFGIPQIITTNXGSIFVSNEFVQFADSMGIKLLNSSPYYAQANGXAEASNKSLIKLIKRKISDYPRQWHTVLAEAXCHGSIHIPPYKPVYGHEAVLPWEVRIGSRRTELQNTLTADEYYNLMADE

SEQ ID NO: 171494 - protein, 60 aa, Oryza sativa
  Clone ID: PAT_MRT4530_69720C.1.pep
MKCQRLMRAHIHCSSAGVHEPNNGREPHLVEFVCRTRLRRLSMLHMLAIAQGRVVLAWTM

SEQ ID NO: 171495 - protein, 62 aa, Oryza sativa
  Clone ID: PAT_MRT4530_69721C.1.pep
TDAEKYTTATINKNTEIKLKIKFQNSIFGWANKLTSNEGRIATRYSGKKERERIATSHGQCY

SEQ ID NO: 171496 - protein, 107 aa, Oryza sativa
  Clone ID: PAT_MRT4530_69722C.1.pep
KLLICSIVLLTIITMLYITSPEHRWELVSFECLHPTLPPPNQPLSLATTKLISASMSFLFLLDATHKINHTVFIIFIYLTYFTYHNATKAHPCYCKWQDFFFSFMYE

SEQ ID NO: 171497 - protein, 67 aa, Oryza sativa
  Clone ID: PAT_MRT4530_69723C.1.pep
TALSIVPQRLCHSYNCSPFSGVYFDQTHSSSPNSVDLQLAIHMWYLPLTTISAPHGALAHLLVVSGT

SEQ ID NO: 171498 - protein, 120 aa, Oryza sativa
  unsure (1)..(120): unsure at all Xaa locations
  Clone ID: PAT_MRT4530_69724C.1.pep
LHQQVLXPCSEFVSPQYSHSATPFCQPATFQLINTPXSSHQCCQQLRLVAQQSHYQPISIVQAIVQQLQLHQFSGVYFDQTXQAQAQTLLTFNLPSICGIYPNYYSAPQXSLPPVGGVWY

SEQ ID NO: 171499 - protein, 51 aa, Oryza sativa
  Clone ID: PAT_MRT4530_69725C.1.pep
FCCKGRSRDFSSFFFSFQNIQLANGGGFEDYPKPINFPLNLQPFQKNLVKF

SEQ ID NO: 171500 - protein, 71 aa, Oryza sativa
  unsure (1)..(71): unsure at all Xaa locations
  Clone ID: PAT_MRT4530_69726C.1.pep
SVGVGGSKDGGSEGKNDRDKRSGEDQLGEELHGGRRDRHVPGGVXXXPGSRCLFNRLDGALGHPQRGGGFK

SEQ ID NO: 171501 - protein, 113 aa, Oryza sativa
  unsure (1)..(113): unsure at all Xaa locations
  Clone ID: PAT_MRT4530_69727C.1.pep
VRKQQYSIVPNPLLPNQATFQIDKQTKSMQATIVFPNKLQGLVAQQSHYQPISIVQAIVQQLQLQQFSGVYFDQTQAQAQTLLTFNFPSICGIYPXYYSAPQEPFPPVGGFWY

SEQ ID NO: 171502 - protein, 75 aa, Oryza sativa
  Clone ID: PAT_MRT4530_69728C.1.pep
CTSCCRWRRAAGSSLAGLVIRMRPHKYLYESFKPHLVLKGEIHELAIIYTFLKILPLKISLDMLMALITCGHAHI

SEQ ID NO: 171503 - protein, 87 aa, Oryza sativa
  unsure (1)..(87): unsure at all Xaa locations
  Clone ID: PAT_MRT4530_69729C.1.pep
GVRKANKYSIVATPLLGNQLRVAIDKQTKCMQAAVVANKLRLGSTNKSALTRPLSIVQAIVQQLQTGSKFSGCLXLDQTQAQAQTLV

SEQ ID NO: 171504 - protein, 607 aa, Oryza sativa
  unsure (1)..(607): unsure at all Xaa locations
  Clone ID: PAT_MRT4530_6972C.1.pep
GILAEYKKFQNILCKFLTDXCGQKSVVKTCGILEFVRDNSRVRSQKAVFLMAEKPPPSPSSASPGSVKEKIQQLDLSEVNEGNVMTITLDKLTPDQKEFEAMMQQARNQFLNSFMQTRKGTVVQKYQVRVVADVPGTGSSKDGEMKQALGGSAQPSNKGATNGSAQENQGDHSQGVHGVQGDGTQGPRGGSLNQDGSASQEFFNNFQDRVDYAVHNAFINQSGVLVNTLSNMMKSIADGSIAKHQAAGPVYLPGGQLVNPRQLMRENPQHSGQVANRLTQDQVATMFLPLQPTVDLVQQQPIQQTPPIQQVVQPIQQQVVHWADLEKQFHSYFYSGVHEMKLYNLTAIKQRHDEPVHEYIQRFREMRNKFISLSLTDAQIADLAFQGMIAPIREKFSSEDFESLPHLTQKVTLHEQRFAEARRNSRKVNHVCSYMCGSDDEDDDSEIAAAEWVRSKKVMPCQWVKNSGKEERYDFDITKADKIFDLLLWEMQIQLPAGHTIPSAEELGKKRYCKWHNSGSHTTNDGKVFRQQIQSAIEGGKIKFDDSKKPMKVDGNPFPVNMVHTAGQTADGGRARGFQMNSAKIINKYQRKYNKQQEKHYEEGDDG

SEQ ID NO: 171505 - protein, 105 aa, Oryza sativa
  unsure (1)..(105): unsure at all Xaa locations
  Clone ID: PAT_MRT4530_69730C.1.pep
QYSIGQTPVWXQPATFQLINQPESGSSSVVQQLRLVAQRSHYQAXSIVQAIVQQLQLHXYGVYFDQTQAQAPTLLTFNXPSICGIYPNYYSAXPRSLAPVGGVWY

SEQ ID NO: 171506 - protein, 151 aa, Oryza sativa
  unsure (1)..(151): unsure at all Xaa locations
  Clone ID: PAT_MRT4530_69731C.1.pep
YSQYQLXSHLLLQHKXAQPISEFVRPPYSIVXTPFWQPATFQLINQPQSXAQCSHTAQLVAPQSHYQALSIVQAIVQQLQLQQFSGVYFDQTQAQAPTLLTFNLPXYVGISPNYYSAPRSLAPVGGVLVLNCNNIIVRMLKIKSYIIMCDC

SEQ ID NO: 171507 - protein, 1507 aa, Oryza sativa
  Clone ID: PAT_MRT4530_69732C.1.pep
MDTGEAAFGVASLRLRGSMASASSRRAPSYRDYDVFSIASSSRAEAEDDEEALKWAALEKLPTHARVRKGIVAAADDGQGSGAAGEVVDVAGLGFQERKHLLERLVRVAEEDHESFLLKLKQRIDRVGLDFPTIEVRYEHLSIDALAHVGSRGLPTFLNTTLNSLEVKNLDPQNPLISDDFWANFSLNLLFFDPHLDVQSLANLLHVVPNKKRPLNILHDVHGVIKPRRMTLLLGPPGSGKTTLLLALAGKLGSDLKVSGKVTYNGYGMDEFVAQRSAAYISQHDLHIPEMTVRETLAFSARCQGVGTRYDMLTELARREKAANIKPDPDLDVYMKAISVGGQETNIITDYVLKILGLDICADTIVGNEMLRGISGGQRKRVTTGEMIVGPARAMFMDEISTGLDSSTTFQIVKSLGQITSILGGTTVISLLQPAPETYNLFDDIILLSDGHIVYQGPREHVLEFFESMGFKCPDRKGVADFLQEVTSRKDQQQYWARTHQPYRYIPVQEFACAFQSFHVGQTLSDELSHPFDKSTSHPASLTTSTYGASKLELLRTCIARELLLMKRNMFVYRFRAFQLLVITIIVMTLFLRTNMHHETRTDGIVYLGALFFAMVAHMFNGFSELAMATIKLPVFFKQRDYLFFPSWAYTIPTWILKIPISCFEVAITVFLSYYVIGFDPNVGRLFKQYLLLLLVNQMAAALFRFIAALGRTMVVANTLASFALLVLLVLSGFILSHHDVKKWWIWGYWISPLQYAMNAIAVNEFLGHKWNRLVQGTNTTLGIEVLKSRGMFTEAKWYWIGVGALFGYVIVFNILFTIALGYLKPSGKAQQILSEEALKEKHANITGETINDPRNSASSGQTTNTRRNAAPGEASENRRGMVLPFAPLAVAFNNIRYSVDMPPEMKAQGVDQDRLLLLKGVSGSFRPGVLTALMGVSGAGKTTLMDVLAGRKTGGYIEGDISISGYPKKQETFARVSGYCEQNDIHSPNVTVYESLAYSAWLRLPSDVDSETRKMFIEQVMELVELNPLRDALVGLPGVNGLSTEQRKRLTIAVELVANPSIIFMDEPTSGLDARAAAIVMRTVRNTVDTGRTVVCTIHQPSIDIFEAFDELFLMKRGGEEIYVGPLGHHSCDLIEYFEGVEGVSKIKPGYNPATWMLEVTTLAQEDVLGISFTDVYKNSDLYQHEVLTKSLDSYGIVAHCRRNQSLIKGISRPPQGSKDLFFPTQFSQSFSTQCMACLWKQNLSYWRNPPYTVVRFFFSLIVALMFGTIFWRLGSKRSRQQDLFNAMGSMYAAVLFMGISYSSSVQPVVAVERTVFYRERAAGMYSALPYAFGQVVVELPYVLVQSAVYGVIVYAMIGFEWEAKKFFWYLYFMYFTLLYFTFYGMLAVGLTPSYNIASIVSSFFYGIWNLFSGFVIPRPSMPVWWRWYSWACPVSWTLYGLVASQFGDLKEPLRDTGVPIDVFLREYFGFKHDFLGVVAVAVAGFATLFAVSFSLSIKMLNFQRR

SEQ ID NO: 171508 - protein, 107 aa, Oryza sativa
  unsure (1)..(107): unsure at all Xaa locations
  Clone ID: PAT_MRT4530_69733C.1.pep
FVRQQYSIVATPFWQPATFHLINNQVMQQQFCQQLRLVAQHSHYQAISIVQAIVQQLQLQHFSGVYFDQTQAQAQTFLTFNXPSICGIYPNNKSAPRSIATVGGVWH

SEQ ID NO: 171509 - protein, 263 aa, Oryza sativa
  unsure (1)..(263): unsure at all Xaa locations
  Clone ID: PAT_MRT4530_69734C.1.pep
FRKPPVYHTTIPYYSHPPCLHQQVLSPSSEFVSQQXSIVPTPFCQPATFQLINDTQVMQXQQCCQQLRLXVRNNSHYQPISSVQAIVQQLQXLQQVGVVYFDQTQAQAQALLALNLPXSYVGIYPNYYIAPRSIPTVGGSLVLNCNSIMVQMLKIKSCIIMRDSCNSTVHVCLISYFALWCLATNYETNPYNHPSSTSMTRCIMSYIILTSKEPLFTWQILFLMKIIPHSTQINNPPVHPRFSFSFTLPIFLEAFHLNWSKKG

SEQ ID NO: 171510 - protein, 156 aa, Oryza sativa
  Clone ID: PAT_MRT4530_69735C.1.pep
MKIIFVFALLAIVACNASARFDPLSQSYRQYQLQSHLLLQQQVLSPCSEFVRQQYSIVATPFWQPATFQLINNQVMQQQCCQQLRLVAQQSHYQAISSVQAIVQQLQLQQVGVVYFDQTQAQAQALLPLNLPSICGIYPNYYIAPRSIPTVGGVWY

SEQ ID NO: 171511 - protein, 83 aa, Oryza sativa
  Clone ID: PAT_MRT4530_69736C.1.pep
KYIYSNSHRHHYTSKDRTKNGPGTYADSIYWYADHHRSYNVSSIGIGKDEECPKLAKASPSILVRDRVSSRSPGLDSTDEEKK

SEQ ID NO: 171512 - protein, 156 aa, Oryza sativa
  unsure (1)..(156): unsure at all Xaa locations
  Clone ID: PAT_MRT4530_69737C.1.pep
FSHXLKDSTHITEAPRERPPRAANAPATTTNYCTQARVSKAIRHGPCDRSIHRPGRSNTALLTAIPMNSMLPSNARPSLXRRSTSSALPMLDGLGXCAGEKLGVAYAVAYGGGVPEVDTTGYAGTDDADMAGMQEILPLPAPAVGSSPPACPLVXR

SEQ ID NO: 171513 - protein, 92 aa, Oryza sativa
  Clone ID: PAT_MRT4530_69738C.1.pep
MPGDRGDVLTEYKSVQHKSLFILEMKWIDAFLVVIHKGLLSEATTAVDHIVAMFELQLLEKKVYAQFIMQLQLHEAIQDDLSAYKKRNIADR

SEQ ID NO: 171514 - protein, 57 aa, Oryza sativa
  Clone ID: PAT_MRT4530_69739C.1.pep
HRNQENCKKENDIYMINLLRSITMNLADCIVSLHVLISSLVTMYIFFLIHEARNKQN

SEQ ID NO: 171515 - protein, 643 aa, Oryza sativa
  Clone ID: PAT_MRT4530_6973C.1.pep
MNPTKCAFGVSAGQFLGFLVHERGIEVTQRSINAIQRIKPPENKTELKEMIGNINFVRRFISNLSGKLEPFMPLLRLRADQQFTWGVEQQKALDNIKDYLSSPPVLIPPQRGIPFRLYLSAGEKSIGSVLVQELEGKERVVFYLSRRLLDAETRYSPVESYACAFIFRVQAEYEAVLKRLQLLKEVEADTIEIMGDSLLVISQLVGEYECKNDTLLVYNEKCLELMKEFRLVTLKHVSRDQNLDANDLTQGASGYKPMIKDVKVEIAAISANDWRYDVHQYLSNPSQSASRKLRYKALKYTLLDDELYYRTIDGVLLKCLSADQAKVAIGEVHEGICGTHQSAHKMKWLIRRAGYFWPTMLEDCFRYYKGCQDCQKFGAIQRAPASAMNPIIKPWPFRGWGIDMIGMINPPSSKGHKFILMATDYFTKWVEAIPLKKVDSGDAIQFVQEHIIYRFGLPQTITTDQGSIFVSDEFVQFADSVGIKLLNFSPYYAQANGQAEASNKSLIKLIKRKISDYPRQWHTRLAEALWSYRMACHGLIQVPPYKLVYGHEAILPWEVRIGSRRTELQNDLTANEYYNLMADEREDLVQSCLRALAKVTKDKQRVARHYNKKVVPKDFSEGELVWKLILPIDTRDSKFDKWS

SEQ ID NO: 171516 - protein, 98 aa, Oryza sativa
  Clone ID: PAT_MRT4530_69740C.1.pep
GDGGDRRVHTLFRTSLFGSCARIGRGLDQRRAADVGLAELEAVGAVLEHLRRRRTVASCRRSVAKVASWPLVRSYMVVVRPILCKIPPCSYLCSQIEK

SEQ ID NO: 171517 - protein, 252 aa, Oryza sativa
  unsure (1)..(252): unsure at all Xaa locations
  Clone ID: PAT_MRT4530_69741C.1.pep
MEKVPATKREAKLCVVLAALLLLLGAPGVATADAVATSGSGRGGCTRSSGNISIEYPFGMEPGCYYVVGFNLTCDTRTTHPGCSSIHGMDQLGMDLLADIYMVDQGFNYTTDTFYSNSTEYPPRALPALLKWVIITLTTTSRSGRGGCMRSCGNISIEYPFGVEPGCYHAVGFNLTCNHSYQLPRLFLDDGTVQVLNISIPNGTVRINSGRINLEDNGLGSTNGTWXGGPPIGGPFFLSESESRLVLMGCNS

SEQ ID NO: 171518 - protein, 218 aa, Oryza sativa
  Clone ID: PAT_MRT4530_69742C.1.pep
MADCRSLIEFLRAFEHHRRAADSAAAAGCSSSSSRSRRGGSSLTALCDHSPMAAVDAVVLLAVVAALGFLVVPYAKMALLEMGALLHPAASCLSAAAFAGAAVAVAAAVLAWELVGHHARKCGKPRCRGLKKAVEFDIQLETEECVRGHPAPAARSALLAAAGAHPVELGDAHRELEAELRKMAPPNGRTVLIFRSPCGCPKGRMEVWGAKKVRRIKK

SEQ ID NO: 171519 - protein, 68 aa, Oryza sativa
  Clone ID: PAT_MRT4530_69743C.1.pep
MAGQLKSKIVAVAVAAVVVVASSLVGTASAADAPAPAPTSGATATAGAAPAFAAVSVAAAALGGYLFC

SEQ ID NO: 171520 - protein, 113 aa, Oryza sativa
  Clone ID: PAT_MRT4530_69744C.1.pep
MVTDAAMLLKDIIILSTGACTAISVVCGFSDKEFIHGLHKWELDHRSIVLPFSMAILTCSDHQEHGDVVTHSRWQRDLVGEGSEIPLGSIQLDTTGELLPHRQSLRCHWQQHH

SEQ ID NO: 171521 - protein, 83 aa, Oryza sativa
  Clone ID: PAT_MRT4530_69745C.1.pep
MTWEKGGRSARASSGLERPRDERRRRASTSAATQEKGTRGGHRHAGELEDGDPSGGEVSDLHDIVQTYVIFEKKSKRQRELRG

SEQ ID NO: 171522 - protein, 142 aa, Oryza sativa
  Clone ID: PAT_MRT4530_69746C.1.pep
NTTHYNGKLVRLQVPSGISPVRPTASARTPSPPTARSSTPATSPLTRPSRSRCRRQERRWLRPAAAEAGGYGGRRHTVVVQAGGGYRPAASEGRLHVVAGGYRWQPSGGRQATGGGYRQHAAAGNSDRELEELTVGPSWPSY

SEQ ID NO: 171523 - protein, 291 aa, Oryza sativa
  Clone ID: PAT_MRT4530_69747C.1.pep
MSGGILLLLLLLLLLLAAACVEAGELPPISRRSFPKGFIFGTSSASYQLSGMVCEGGAAEGGRGPSIWDTFTYQHPGMFNYKIADKSNGDVADNTYHLYKEDVHMMKEMGMDAYRFSISWSRILPRVQSFVTLFHYDTPQALEDKYNGFLSPNIINDYKDYAEICFKEFGDRVKHWITFNEPWIFCSKAYASGTYAPGRCSPWEMGKCSVGDSGREPYTACHHQLLAHAETVRLYREKYQFTEEVVRQSQFIHDNDLHRRSAKLSFIIQNYLLLGIHFQPGPGGRVCQYRH

SEQ ID NO: 171524 - protein, 82 aa, Oryza sativa
  Clone ID: PAT_MRT4530_69748C.1.pep
MEAKKPVGGRQVNREGEIISRRKHNHPLATAEMSGSMKQSCCRCFTWRRVDVVVQLVQTEIFEVVEVECLFRSKDEDNDSWS

SEQ ID NO: 171525 - protein, 379 aa, Oryza sativa
  Clone ID: PAT_MRT4530_69749C.1.pep
LHPLALEDKYNGFLSPNIINDYKDYAEICFKEFGDRVKHWITFNEPWIFCSKAYASGTYAPGRCSPWEMGKCSVGDSGREPYTACHHQLLAHAETVRLYREKYQFTEEVVRQSQFIHDNDLHRRSAKALQKGKIGIIVNSQWYVPFSPSKTNKDAARRVLDFVLGWLMDPLIRGDYPLNMRELVGNRLPKFTKEQSEMVKGAFDFIGLNYYSSSYAENVLPSYGLKNSYNTDFHARITGSRNGTLIGPQAASSWLHIYPQGLRELLLYIKENYGNPTIFITENGVDEVNNKTMPLKEALNDNTRIEYYHKHLLALRNAMRDGANVKGYFAWSLLDNFEWADGYTLRFGLNFVDYDDGMKRHPKNSAHWFKKFLREMKQG

SEQ ID NO: 171526 - protein, 1122 aa, Oryza sativa
  unsure (1)..(1122): unsure at all Xaa locations
  Clone ID: PAT_MRT4530_6974C.1.pep
MLQQAQDQVLNSFMQPRKGTLVQKYKVKEVKVTTLKGCMEFKTRKGTLVQKYKVKVVADDPGTSSSKGEDGKQAPNGLAQLSDKAATDGSLGSQADNSQGVHGVQGDGAQGLQRGNLNQNSDAAQDFFNNFQDRVDYVVHHALINQSGVLVNTLSNMTKSIADGSIAEHQAAGPVYLQGALADSTDTPESAGCTTNPATSCVTSPANATKATASAADSANAIKIANHSADSAPRLNERIGQGAAQQRPWADVIADVMREQFGLKPKETGSLYRLPYPEWFERVPLNIQFKVPDFSKFLGQDGVSTYEHISRFLAQCGKASVVDALRVRLFQLSLFGSAFTWFSSLPYGFINSWADLEKQFHSYFYSGVHEMKLSDLTAIKQRHDDSEIAAAEWVRSKKVIPCQWVNSSRKEEKYDFDITKADKIFDLLLREKQIQLPAGQTIPSVEELSKKRYGKWYNSGSHSTIDCKVFRQQIQVPIEGGKIKFDDSKKPMRVDGNPFPVNMVHTASGPXDTGRMRGYQEKLHEEDNGSSDPHWGCEFFRFCWNEDDENKKTEWCPLSIFTKNQKRRVQRLRSRECFQQVEQEINHRLKKAKSRQEWCVKNQAPVADDVAADEAKRLAKGKSVVTAPVNMVFTLPAEFGIDQADVDEVEEESAKLVLSPEQAVFEKPEGTENRHLKPLKLGRNAEDLIKTNIVLKDFGGNPSETKGVLNVELTVGIDKIEIVLADSQLKLENPSYYFEGVVEGSSVYTKDTVDDLDDKQGEGFMSADDLEEIDIGPGDRPRPTFISKNLSLEFRTKLIELLKEFRDCFAWEYYEMPGLSQSIVEHRLPIKPGVRPHQQPPRRCKANMLEPIKAEIKSLYDAGFIRPCQYAEWVSSIVPVIKKNGKVRVCIDFRDLNKATPKDEYPMPVADQLVDAVLGNKILSFMDGNAGYNQIFMAEEDIHKTAFRCSGAIGLFEWVVLTFGLKSAGATYQRAMNYIYHDLIDWLVEVYIDDVVVKSKEIKEHIADLRKVFERPRKYGLKMNPTKCAFGVSDGQFLGFLVHERGIEITQRSINAIKKIKPPENKTELEEMIGKINFVRRFISNLSGKLKPFTPLLRLKADQHFTWGXEQQKALDNIKGYL

SEQ ID NO: 171527 - protein, 401 aa, Oryza sativa
  unsure (1)..(401): unsure at all Xaa locations
  Clone ID: PAT_MRT4530_69750C.1.pep
MAPASRRSAGEASPRGSSSGQPRRRISSLMNKKEKEQNYKQICATFLHREYVGTDSHRKAMLLGNAQIGTKYEGGAAEGGRGPSIWDTFTHQHPEKIADRSNGDVASDSYHLYKEDVRLMKDMGMDAYRFSISWTRILPNGSLRGGVNKEGIKYYNNLINELYRXGVQPFITLFHWDSPQALEDXYNGFLXPNIINDYKEYAEICFKEFGDRVKHWITFNEPLSFCVAGYASGGMFAPGRCSPWEGNCSAGDSGREPYTACHHQLLAHAETVRLYKEKYQVLQKGKIGITLVSNWFVPFSRSKSNIDAARRALDFMLGWFMDPLIRGEYPLNMRELVGNRLPKFTKEQSEMVKGAFDFIGLNYYSSSYAENVLPSYGLKNSYNTDFHARITVETVLSLVLR

SEQ ID NO: 171528 - protein, 144 aa, Oryza sativa
  Clone ID: PAT_MRT4530_69751C.1.pep
FFPLGVFFPLQVPNFLPLGLSSWPRPLPLFSGPGLRLVFVVFPLSGGPISGLLYLAQVLAPPFSLWPLVWLFPGGTRFGCFFFSAPPDDPFGIFFLSPVPFLGGFPGPFFFFFWASFRTLAGFPPLSFLCSIPCKNQISNWYRI

SEQ ID NO: 171529 - protein, 531 aa, Oryza sativa
  Clone ID: PAT_MRT4530_69752C.1.pep
MSLFQPLGHTHILPMAAAGEVVMLGGILLPLLLVVAVSGEPPPISRRSFPEGFIFGTASSSYQYEGGAREGGRGPSIWDTFTHQHPDKIADKSNGDVAADSYHLYKEDVRIMKDMGVDAYRFSISWTRILPNGSLSGGINREGISYYNNLINELLLKGVQPFVTLFHWDSPQALEDKYNGFLSPNIINDYKEYAETCFKEFGDRVKHWITFNEPLSFCVAGYASGGMFAPGRCSPWEGNCSAGDSGREPYTACHHQLLAHAETVRLYKEKYQVLQKGKIGITLVSNWFVPFSRSKSNIDAARRALDFMLGWQKAQTMNSLCRFMDPLIRGEYPLSMRELVRNRLPQFTKEQSELIKGSFDFIGLNYYTSNYAGSLPPSNGLNNSYSTDARANLTAVRNGIPIGPQAASPWLYIYPQGFRELVLYVKENYGNPTIYITENGVDEFNNKTLPLQEALKDDTRIDYYHKHLLSLLSAIRDGANVKGYFAWSLLDNFEWSNGYTVRFGINFVDYNDGAKRYPKMSAHWFKEFLQK

SEQ ID NO: 171530 - protein, 65 aa, Oryza sativa
  unsure (1)..(65): unsure at all Xaa locations
  Clone ID: PAT_MRT4530_69753C.1.pep
MVASPRSHTPPLLRSAGRRSAPLAAVRCYSPAAKRMKRRREKRKGKDXASPAAGPPLPPRPVSLL

SEQ ID NO: 171531 - protein, 107 aa, Oryza sativa
  Clone ID: PAT_MRT4530_69754C.1.pep
PHNFIKRPHSLPSGYKKGPPRSAFIAMVQSLQHAKNGVDFVSAPRIRPPFARPNWRKVFFDLGNAPQNSRIGVFYCGSPPPPKQLKGFSKKFSPPPPPRFPFPKENF

SEQ ID NO: 171532 - protein, 70 aa, Oryza sativa
  Clone ID: PAT_MRT4530_69755C.1.pep
LGNLKIHLFSLKHGDWLPGPSPFPPLISPPFLKAHANFNWIPTPFAHKTLMNSTTPPAPFNNYHFPGPGK

SEQ ID NO: 171533 - protein, 66 aa, Oryza sativa
  unsure (1)..(66): unsure at all Xaa locations
  Clone ID: PAT_MRT4530_69756C.1.pep
GLDGSRPHEERLYNLPKKCGKCVXIIPVIVEEYHRNGESSQLAAPWGSKCTMLKAGXVRGFSIHLR

SEQ ID NO: 171534 - protein, 535 aa, Oryza sativa
  Clone ID: PAT_MRT4530_69757C.1.pep
MALAFDEFGRPFIILREQEKKSRLRGLDAQKANIAAGKAVARILRTSLGPKGMDKMLQSPDGDVTITNDGATILEQMDVDNQIAKLMVELSCSQDYEIGDGTTGVVVMAGSLLEQAEKLLERGIHPIRIAEGYELASRIAFDHLEHISHKFEFSATNIEPLVQTCMTTLSSKIVNRCKRTLAEIAVKAVLAVADLERKDVNLDLIKVEGKVGGKLEDTELVYGIIVDKDMSHPQMPKRIEDAKIAILTCPFEPPKPKTKHKVDIDTVEKFQMLREQEQKYFDEMVQKCKDVGATLVICQWGFDDEANHLLMHRNLPAVRWVGGVELELIAIATGGRIVPRFQELSPEKLGKAGIVREKSFGTTKDRMLYIEQCANSRAVTIFIRGGNKMMIEETKRSLHDALCVARNLIRNNSIVYGGGSAEISCSVAVEAAADRYPGVEQYAIRSFADALDAIPLALAENSGLSPIDTLTAVKSQQVKESNPHCGIDCNDVGTNHMKEQNVFETLIGKQQQILLATQVVKMILKIDDVISPSDY

SEQ ID NO: 171535 - protein, 183 aa, Oryza sativa
  unsure (1)..(183): unsure at all Xaa locations
  Clone ID: PAT_MRT4530_69758C.1.pep
MKNVTHSFVFLAHWPSAGSFGLNTDILATNLINLTVVVGVLIYFGKGAXADLLDNRKQRILSTIRNSEELRRGTIEQLEKARIRLQKVELEADEYRMNGYSEIEREKANLINATSISLEQLEKSKNETLYFEKQRAMNQVRQRVFQQAVQGALGTLNSCLNTELHFRTIRANISILGAMEWKS

SEQ ID NO: 171536 - protein, 46 aa, Oryza sativa
  Clone ID: PAT_MRT4530_69759C.1.pep
VRLHPFACLLVSGLWIIISLVVLAHTVDERIKCGCIPRNAGQVHLN

SEQ ID NO: 171537 - protein, 39 aa, Oryza sativa
  Clone ID: PAT_MRT4530_6975C.1.pep
VTLKKSYGCAMQVCVSLLLFYFFFFFFFFFFFFFFFFFF

SEQ ID NO: 171538 - protein, 103 aa, Oryza sativa
  unsure (1)..(103): unsure at all Xaa locations
  Clone ID: PAT_MRT4530_69760C.1.pep
VQILCEESRGDSRASXILNPPILPYFSYQYSLYIDYLIEWLGAGSVCKXGGMREGDPYAGEGVIGVQVRHCSIRTSVTSIADCAESSRSVRFHIPLLLKWIEI

SEQ ID NO: 171539 - protein, 80 aa, Oryza sativa
  Clone ID: PAT_MRT4530_69761C.1.pep
MGHGCSPSSICCFFHQLPLVNQDAPLSTFAADFLPVDLRRTPATGGVYEPAFTNFSDGNYTSNDVCEDMGNSDADSTEES

SEQ ID NO: 171540 - protein, 70 aa, Oryza sativa
  unsure (1)..(70): unsure at all Xaa locations
  Clone ID: PAT_MRT4530_69762C.1.pep
HASASRNRGFLFVEYXNHACADYARQKLSAPNFKVDGSQLTVSWAEPKGSSDSSSAAAQVSLLYEKKTYW

SEQ ID NO: 171541 - protein, 1175 aa, Oryza sativa
  unsure (1)..(1175): unsure at all Xaa locations
  Clone ID: PAT_MRT4530_69763C.1.pep
MSQHYTKTICIAVVLVAVLFSLSSAAAAGSGAAVSVQLEALLEFKNGVADDPLGVLAGWRVGKSGDGAVRGGALPRHCNWTGVACDGAGQVTSIQLPESKLRGALSPFLGNISTLQVIDLTSNAFAGGIPPQLGRLGELEQLVVSSNYFAGGIPSSLCNCSAMWALALNVNNLTGAIPSCIGDLSNLEIFEAYLNNLDGELPPSMAKLKGIMVVDLSCNQLSGSIPPEIGDLSNLQILQLYENRFSGHIPRELGRCKNLTLLNIFSNGFTGEIPGELGELTNLEVMRLYKNALTSEIPRSLRRCVSLLNLDLSMNQLAGPIPPELGELPSLQRLSLHANRLAGTVPASLTNLVNLTILELSENHLSGPLPASIGSLRNLRRLIVQNNSLSGQIPASISNCTQLANASMSFNLFSGPLPAGLGRLQSLMFLSLGQNSLAGDIPDDLFDCGQLQKLDLSENSFTGGLSRLVGQLGNLTVLQLQGNALSGEIPEEIGNMTKLISLKLGRNRFAGHVPASISNMSSLQLLDLGHNRLDGVFPAEVFELRQLTILGAGSNRFAGPIPDAVANLRSLSFLDLSSNMLNGTVPAALGRLDQLLTLDLSHNRLAGAIPGAVIASXATCRCTSTCRTTRSRARXPAEIGGLVMVQTIDLSNNQLSGGVPATLAGCKNLYSLDLSGNSLTGELPANLFPQLDLLTTLNISGNDLDGEIPADIAALKHIQTLDVSRNAFAGAIPPALANLTALRSLNLSSNTFEGPVPDGGVFRNLTMSSLQGNAGLCGGKLLAPCHGHAAGKKRVFSRTGLVILVVLIALSTLLLLMVATILLVSYRRYRRKRRAADIAGDSPEAAVVVPELRRFSYGQLAAATNSFDQGNVIGSSNLSTVYKGVLAGDADGGMVVAVKRLNLEQFPSKSDKCFLTELATLSRLRHKNLARVVGYAWEAGKIKALVLDYMVNGDLDGAIHGGAAAPPPAPSRWTVRERLRVCVSVAHGLVYLHSGYDFPVVHCDVKPSNVLLDGDWEARVSDFGTARMLGVHLPAAANAAAQSTATSSAFRGTVGYMAPXVRVHEDGVDEGGRVQLRGAGDGALHRAAADGDDRGGRRAADAAAARRQRGLEGARRRPRRPGPPHEGRHRGRPVHGGGRARRCPVLRRVRAGRPARHGRRALVLAQDEQARRRRL

SEQ ID NO: 171542 - protein, 253 aa, Oryza sativa
  unsure (1)..(253): unsure at all Xaa locations
  Clone ID: PAT_MRT4530_69764C.1.pep
QCDHLSLQLIKRTIPRQRASFPIKYLXLIPLAITRLYNAXLQPLFDKPVGCIAYWYGRNMGIAKRTTLVGLVLTLQPVYLLMALKVSKEFLEVPDNVGKKNXLLRVGSGELTGGKYKTNWERKTSMPMAHSELGVLNLETFARVLWVRXLCHEXKVLEKIWVGIEXPCENIDKFLLLATTTITIGKGETIHLCDSIWIHGRHLKDVTPQIYAISKKKNKTLSQSIESNTXIQDLNFSPDASIXVELLGQLVTL

SEQ ID NO: 171543 - protein, 135 aa, Oryza sativa
  Clone ID: PAT_MRT4530_69765C.1.pep
MATSSVAGDIELDRPNLEDYLPYDSLPQEFPRNLHLRDLLDISPVLTEAAGAIVDDSFTRCFKSNSPEPWNWNIYLFPLWCLGVVIRYGVLFPLRGLTLLVGWLAFFAAFFPVHFLLKGQKMRSKIERKLVEMMC

SEQ ID NO: 171544 - protein, 107 aa, Oryza sativa
  Clone ID: PAT_MRT4530_69766C.1.pep
MRMASAGGSRQKAVVAADDCCSTASLSLAGKGHCAVYTADGARFEVPLPYLGTPLFGELLTMSREEFGFAGDDGRITLPCDASVMEYVMCLLSRDASEEVERAFLSS

SEQ ID NO: 171545 - protein, 135 aa, Oryza sativa
  Clone ID: PAT_MRT4530_69767C.1.pep
TKVKSLVGDMGPGVSGLEGGGCPPMPRGPPPRGVRPEVTTYGGLGVRLQVPTYPHLWRPERSRHAAFNAVCNALNRSVTGRMTDGTQDVLPFPGVIGAQKSSPIKCPRISPTAPGRTHKGGLHGSLVEEFILRQP

SEQ ID NO: 171546 - protein, 72 aa, Oryza sativa
  Clone ID: PAT_MRT4530_69768C.1.pep
MMMKGSHPLIPAGVGPPALVKVRLPFPGVIGAQKSHREVRRWRRPLRVPPDLHGDHRGGGGWRPGHGERLPH

SEQ ID NO: 171547 - protein, 135 aa, Oryza sativa
  Clone ID: PAT_MRT4530_69769C.1.pep
MDAASRREASSSGRYTEKHTGGDTGENGIDKTLIGDVMLQHREEAANETLGHQQMNRKEKKMGICLDGGRAGEEIEVSRGAEGGFRVIHRSFSIHGLGTGNCQGPDPPTPRGLIPMGVNTEERMRTPLNRRIEKT

SEQ ID NO: 171548 - protein, 1481 aa, Oryza sativa
  Clone ID: PAT_MRT4530_6976C.1.pep
MTITPDKLTPDQQKDFDAMMQQARNQFLNSFMQTRKGTVVQKYKVKVVADVPGTGSSKDGEVKQAPDGSAQPSNKGAADGFQGNQGDSSQGVQGVQGDGAQGVQGEGPNQDGNAAQLQFNNFQDQVDYAVHHALINQSGILVNTLSNMVKTMVDGSMAKYQATGPPMAPVSAPAPAAPSSAPGQLVNPRLLVASMFLPPQHTVDPTQQQPIQQTPPRQQIVQPIQQTPPIQQVVQPIQQMSPRRQVLQPIQQTPLRQQVIQPIQQQGLMNASAGFTTPGSQPGQHATSQVVPEHLVHHVQPDQTVIPQVVPEHLPYPEWFERVPLPNRFKVPDFSKFSGQDSTSTYEHISRFLAQCGEASILDALRVRLFRLSLSGSAFTWFSSLPYGSINSWADLEKHFHSYFYSGVHEMKLSDLTAIKQRHDEPVHEYIQIFRDMRNKCYSLSLTDAQLADLVFQGMIAPIREKFSNEDFDSLLHLTKKVTLHEQRFAEARKNSRKVNHVCPYIYGSDDEDEDDSEIAAAEWVRSKKVIPCQWVKSSGKEERYDFDITKADKIFDLLLREKQIQLPAGHMILSAEELGKKRYCKWHNSGSHTTNDCKVFRQQIQAAIEGGKIKFDDSKRPMKVDGNLFPINIVHTTGRTADGGCARGFQKRRVQRLRNRERFQEVEQEISHRLKKTKPRQEWRVKNQVPAADEATADEAKRLAKGKSVVTASVNMVFTLPAEFGVKQADVDKVEEESAKLILSPEQAIFEKSEGTENRHLKPLYINDYVNGKPMSKMMVDVGAAVNLMPYATFKKLGRNTKDLIKTNMVLKDFGGNPSETKGVLNVELTVGNKTIPTTFFVIDGKGSYSLLLGRDWIHANCCIPSTMHQCLIQWQGDKIEIVPADRSVNVASANLALWEMDGLDCLSGKVWDGDFLKMENPSNYFEGVVKGSNVYTKDTVDDLDDKQGHGFMSADDLEEIDIGPGDRPRPTFISKNLSSEFRTKLIELLKEFRDCFAWEYYEMPGLSQSIVEHRLPIKPGVRPHQQPPRRCKADMLEPVKAEIKRLYDAGYNQIFMAEEDIHRIAFRCPGAIGLFEWVVMTFGLKSAGATYQRAMNYIYHDLIDWLVEVYINDVVVKSKEIEDHIADLRKVFERTKKYGLKMNPTKCAFGVSADQFLGFLVHERGIEVTQRSVNAIKKIQPPENKTELQEMIGKINFVRRFISNLSGRLRHYLLSNEYTVICKADVVKYMLSAPILKGRVGKWIFSLTKFDLRYDSPKAVKGQAIADFILEHRDDSIGSVEIVPWTLFFDGSVCTHGCGIGLVIISPRWASFEFAYTIKPYATNNQAEYETVLKGLQLLKEVEADAIEIMGDSLMVISQLAGEYECKSDTLMIYNEKCQELMKEFRLVTLKHVSREQNTEANDLAQGASGYKPMIKDVEVEVASITADDWRYDVHQYLQNPSQSASRKLRYKALKYTLLDDELYYRMIDGVLLKCLSAN

SEQ ID NO: 171549 - protein, 433 aa, Oryza sativa
  unsure (1)..(433): unsure at all Xaa locations
  Clone ID: PAT_MRT4530_69770C.1.pep
MVRGSHPLIPAGVGPPALVKARLLFPGVIGAQKSSPIKCPRISPAAPGRTHKGGPHGSLVEEFILRHLARQVGGAFVIFEVFSSAGVVSVTPPLRGKAQHPLECRATPGRGQGPPHPHRVSLAXQVFVASLRNVRGPPKLQPYLTEKYDDGADPSKSLQICMAIIEAARGGDRVMANVFPMALRGQVRGWPMNLLPPRFTALVLPAGYGVRPGSTDRPFKLQRLALVPPASYSTRPXAQLWMGIAGSRVFXLSHSCESNRPCRRKRDWKQATERKEQTECVAWGHRLKISSQPKVRASESPSGXGEKGAWVLVPAKKEXEIGPTCHLTNRVASTLTTXEKFWSGLTPGATVGDMGPGVCSALNRSVTDRMNDGTQDVRRTIACVRRRAARHIPSNNDGERFSSSYPSRSRSSRSGQSKAPVSRCNRSPEVFTP

SEQ ID NO: 171550 - protein, 204 aa, Oryza sativa
  Clone ID: PAT_MRT4530_69771C.1.pep
MANVFPTALRGEARGWPMNLLPPRFTPGRTLAVLSSGIGAQAHWSLTLFAKWSQASLKGSKPRVGSPLRAKGLKGRDVLPLERVTPRQLARQVGGAFVIFEVLLSAGVVSVAPPLRRKAQHPQECRATPGWGQGPPHPHQPCLTEKYDDGADPSESLQICTAIIEAAGSGYRVMANVFPMALRGQARAAGFSPAGWLQCPGWLN

SEQ ID NO: 171551 - protein, 399 aa, Oryza sativa
  unsure (1)..(399): unsure at all Xaa locations
  Clone ID: PAT_MRT4530_69772C.1.pep
PGYLFPGVXGTRKSSTIKEPRISPAAPGXTHKGGSHDLPLERITARQLARQVGGXFVIFEVLSSTGVISVAPPMHGKAQLPXECRATPGRGLGPPHLHRIRLAARSLWRVFGMTDDPQSFGXQPHRRYHGSVNPSESLQIHATIIEAAWGDDRVKANFFPKALQGQARGSLMNLPPASRLALVLPAGYGARPGSANRPFKLQWLVFVLPAGYGARPXAQLWTGIAGSSVFRLSHSCESSRPCRRERYWKEATERNEQTECVAWGHRLEISSQPKVXVGESPSSXGEKGAQLLXPTAPRNPKTGPTRHQTRVAPTLATCGRLRPGLTPGTTIGDMCPGACCASDRSVTGRMTDETATVYPRPGVCDAHGHTPYTIAWVVVVRCTRKREIRKTHWHVSWLS

SEQ ID NO: 171552 - protein, 99 aa, Oryza sativa
  Clone ID: PAT_MRT4530_69773C.1.pep
MVRGSHHLIPAGVGPPALVKARLPFPGIIGAQKSSPIKCPRISPAAPGRTHKGGPHGSLMEEFILRQALSSKQGAFIFYSTPGHQKVRAGPILSPRRWR

SEQ ID NO: 171553 - protein, 416 aa, Oryza sativa
  unsure (1)..(416): unsure at all Xaa locations
  Clone ID: PAT_MRT4530_69774C.1.pep
MVRGSHPLIPAGVGPPALVKVRLPFPGVIGAQKSSPIKCPRISPVAPGRTHKGXPHGSLVEEFILXHLARQVGGAFVIFEVLSSAGVVSVAPPLRGKVQHPQECRATLGRGQGPPHPHQVSLATRSLWRVFGMSKGPPKLQPCLTEKYDDGADPSKSLXFCTAIIEAAGDGDRVMANVFXMALKGQARGWPMSLGGLLQLALVPPADYGARPGSTDRPFKLQRLALVPPAGYGTRPGSTXTGIAGSRVFXLSQSCESNRPCRRKRDWKEATERKEQTECVAWGHGLKISSQPKVWASESPSGWGEKGAWVLVPAKKEXRSGHTYHQTRKVASTLTTWGRFWSGLTPGATVGDXGPGGISALNRSMTSRMTDGTQDVRRTIACVTRRAARHIPSNNDDERFSSSYPSRSRSSRSGQS

SEQ ID NO: 171554 - protein, 575 aa, Oryza sativa
  Clone ID: PAT_MRT4530_69775C.1.pep
MVNGEPLWHGVRHGGGGGDARKQHHHHHQLSHGFGAKDASASSPWSSSDGLWTDGLVCAFEFVRGGGGAHGFVTPANLCRSKCCSLLQSKDLAVQDRRRSLAAKIGDNGDEPRPPTVAPAESLWAPIGWRRITQLVGMVGGDAAAWHDDGQSMSLMEHDGGGDEQCDDITVADVAAPYWQRAAGPTWWCHVAAGHPAVDAWLAAARWLHPAICVALRDESVLISEKMKHLLYEVPVRVAGGLLFELLGQSVGDPARDEEDIPIVLRAWQAQNFLITALHVKGSAPNVNVIGVTEVQELLSACGSTGTAPKNIQEVIAHLASRLARWDDRLWRKYVFGAADEIELKFVNSVFRRKQEDLKLLCMIFNQDIRRLATQVIRVKWSLHAREEIIFELLKYLGGSTTKSLLEAIKKDARQMIEEQEAVRGRLFTIQDVMQSTLRAWSQEKSLRITHNLTIFGGCGLVLSIIAGLFGINVDGIPGAENTPYAFALFSALLFLVGLLLIIVGIVYFGLQKPISDEQVQVRKLELQELVSMFQHEAETHARVKEGVLRTDLPPRAADLICDDNGDSRLLVCDC

SEQ ID NO: 171555 - protein, 145 aa, Oryza sativa
  unsure (1)..(145): unsure at all Xaa locations
  Clone ID: PAT_MRT4530_69776C.1.pep
MAANIRVGALKPQPTWEGAASSGVSRHPRQGARLPASPPGKLGYQVFVASLRNVRGPPKLQPCLTEKYDDGADPSESLQICTAIIEAAGGDDRVMANVFPMALRGQAWGWPMNLLPXSIHSWEDSCNFELRVPSKPGTPCAGSSV

SEQ ID NO: 171556 - protein, 127 aa, Oryza sativa
  Clone ID: PAT_MRT4530_69777C.1.pep
MASSGAGRDERWILAGATALVTGRSKGIGRAIVEELVGFGSTVHTCARSEAELSRCQEELTAKGLAVSFSVCDVSVRTDREELVSRVRELFGGKLNILVSLIISCHHDFQRSNGICKIRGAVHIAPT

SEQ ID NO: 171557 - protein, 424 aa, Oryza sativa
  unsure (1)..(424): unsure at all Xaa locations
  Clone ID: PAT_MRT4530_69778C.1.pep
MGPKMSGAPSRVSGDVQPDISHQIMMVRGSHPLIPAGVGPPALVKARLPFPGVIGAQKSSPIKCPRISPAAPGRTHKGGPHGSLVEEFILRHLARQVGDTFVIFEVLSSAGVVSVAPPLLGKAQYPQECRATPGRGQGPPHPHQVSLAXQVFVASLRNVRGPPKLQPCLTEKYDDGTDPFESLQICTTIIEAAWGDDRVKASFFPIXLQGQARGSLMNLPLASRLALVPLAGYGARPGSTNRPFKLQRLALVSPAGYDTRPXAQLWTGIAGSRVFXLSHSCESNCPYRRKRDWKEATERKEQTECVAWGHRLKISSQPKVRASESPSGWDEKGTWVLVPAKKEXEIGPTYHQTRKVASTLTTWGRFWSGLTPGATVDDMGPGACSALNRSVTGQMTDGTXSAPVRCSCVRRRAAXHVPSNSDGE

SEQ ID NO: 171558 - protein, 129 aa, Oryza sativa
  Clone ID: PAT_MRT4530_69779C.1.pep
MASQEFVDTDIMPFPRRNRKPTMDKQFSRFTESVKPRVVPSQRTLPTKKPAIPAPPSFKTMAEKILREFAAPSADNVPVGPQVNLGDTNFDLKSSLITMAQTNPFCGKPNEDASEHLQQFLEICSTYTD

SEQ ID NO: 171559 - protein, 77 aa, Oryza sativa
  Clone ID: PAT_MRT4530_6977C.1.pep
KHFKTNLKKKVIEVFDNLKDTRRLSQPRQTVSIRVSCCQPIRILFVFQLQKTYKQELEKEKKELDNKKEIIIIMKQN

SEQ ID NO: 171560 - protein, 351 aa, Oryza sativa
  Clone ID: PAT_MRT4530_69780C.1.pep
MKLRRIPMPITRRVIKTMALTKNSCVPDYLIQGNGTVYTIDSCYKNGGPQILFDIVDIPYNYNAIFGRGSLTKFEAASHHNYLKLKMPGPVGVIVVKGSQPSAVTVTRFGREVHTVEVEEQEKTKPVPKPTPHGNVVQRQLDSSDLAKVISLGSDLSEQEVEGILAVLKKNIDIFAWGPDDVGGVSPDLIMHRLAVKPEAKPKLRKMSSDRQEAAKAEVNKLLKAGVIQEIDHPDWLANPVLVRKSNAKWRICVDFTDLNKVCAKDDFPLPRIDQLVDSTDGCEFMSFLDAYSGYHHIHMNPTDIPKTAFITPFDTFCHLRMPFGLRNAGATFARLVQKVLGLQLGQNVEA

SEQ ID NO: 171561 - protein, 60 aa, Oryza sativa
  Clone ID: PAT_MRT4530_69781C.1.pep
VALTYCSIVLGTLGFITVIGINQICVFCWFCSWLCTQEILDYKINMMDQCFQLLLPVYIL

SEQ ID NO: 171562 - protein, 189 aa, Oryza sativa
  Clone ID: PAT_MRT4530_69782C.1.pep
MGTRVHGTGYYGLLIDDIEIDSFETGDDGVGAVDDGGGAGVVKAETARGRRRAGRGGGDADAVGRGRTEAAPAATQWARANGGGAGRRRGGDGGGAGAVEAGGAVLEPGGAAREGGVGSAAVRSTAGDGGAGGVGGVGTAGGCRSMPQGRGSPAAAPTRGGFTCHGVDLLGRQHILLLSIRAANLQQNT

SEQ ID NO: 171563 - protein, 142 aa, Oryza sativa
  Clone ID: PAT_MRT4530_69783C.1.pep
RRRRGPPPPPAPSSHAEPELLFSLAHGEMASLARRGRRIWPVGRQSPDPPAAAATTPPPCSPRRLSFSTSTAAVRSSPPPLPTASPAPPPALASLSPSGSSHGGPDLGGAATTPPPGRGLVPSHPTPPREKKPRRRCPNGRH

SEQ ID NO: 171564 - protein, 84 aa, Oryza sativa
  Clone ID: PAT_MRT4530_69784C.1.pep
MAIDAVELPRPPTPTSRLFSIYRHASRPRRVGGAVEVMLDRQVANDIFSYDAEVHPACLSPLTTFLSATSPFFLPLAALPSAAA

SEQ ID NO: 171565 - protein, 127 aa, Oryza sativa
  Clone ID: PAT_MRT4530_69785C.1.pep
MKEQSPEKRNHQRSRGEPDQVEALNRWSPEPRPTNWADAGAESPRDTGDSMRRGAGEGGREEERGVSVPRRAGGCRGELGSGEERRGEGREGGYRYRRESRRGGVGIGFGTSSPGQTQGGEARQEAV

SEQ ID NO: 171566 - protein, 179 aa, Oryza sativa
  Clone ID: PAT_MRT4530_69786C.1.pep
MLRSALRRGGAAVRHAASSSSAAEAAADGSPGALLRRKVAERERARRRPRDPSRDEFFVATPESLAWLDSASLPMVLTAAAIALFTKLLMMEHDAADQERGERKIKNSHPDQGKVRMLTREEWDEIQEVRPRTPFESKLARPHARIRTGEPVRLEDVKDWATDMIMDAFTRAEESAKKK

SEQ ID NO: 171567 - protein, 137 aa, Oryza sativa
  Clone ID: PAT_MRT4530_69787C.1.pep
MAMVRPRRRDHGTGREGPRRALLRPHAATGGPWAVLLFSAPPPACGGLRLDRSLSRRFVAERRRDPLVRSCAVWVRPTGRRFQARVGPALSREEACLGWARPGQAGSDNPAALPPPVQDKPYPMVPVLEMLLFLVLP

SEQ ID NO: 171568 - protein, 75 aa, Oryza sativa
  Clone ID: PAT_MRT4530_69788C.1.pep
KTLEDSFDSGRETIFKFPPEPNFFFPEALAFFGFWATQGNHFTGTPPTIYAPQKKIKNPNNSPLNNSRLIKKPPP

SEQ ID NO: 171569 - protein, 1720 aa, Oryza sativa
  Clone ID: PAT_MRT4530_69789C.1.pep
MAATPDRANADLRRRLAVDAPPPPPQIAKDKQGLDTEMPLSPQWLMKVGENKEPSLLGVRSDGSKIPGNDEDTSFSVKRKDVFRASVLDGETGCRERWRDDEREPNSAPRWNRWRETDKEHGDTRKLERWSDDSSKYSVDGRRPPQERWSDSGNKEGNYDQRRDNKWSARRGPNDKESENWRDRWGDSGKDGDAAREKGFSHYIAHGKDGNSHEKDAERDDNISRSWKSSYPVGRGRGDSSHHPSQNTQKSSATYGYGRGKPDNEIASFPGSRGKFTSGSTNTASSGSSRPFHLGLLSDRPGGTSGDRTAFRYSRMKLLDIYRTSHVTDFKMPLGGCEELSAFMQEETLEPLALSAPTTDEAAILKAIDKGDIINSGVHQASKDGPVGKNGREDQQGGMEDVKGETAASLRVSVKSFSHAKGCHCWFIIGFPGNTDLPARADSLRPETSAYVVPQRSRLIGEHRPGPTADYIQQMPFALDQESKVAVITGVDGFATPTYPNPESLSLYYKDPQGQVQGPFSGADIIGWFEAGYFGIDLLVRVANAPPDAPFLLLGDVMPHLRAKARPPPGFAATKPSDMLMPETLSTGNFVSSSNTHAGSASVGAFDSGLSRKDGAVEAQNRFLESLMSNSVRDPSAEMLAMTAGMTEYGSSGIGNITVSGGETGNSMTYLLVQKRLLERQKSLQNPGSFWSGDSIPAAQVQNKDIEASALHTKLHPPMADPPRQALQSQNVDLLAMLHSAEKPQAPASNSGLPAWSNYPEAKNLDPRGHGVDLTQGSLNMHGASVQSSQQATTAIQQQNFMPLNMSQIAHLGPEKLRAEISQDPQLLTRLQHQYLLSQLQLQPQLPVTPQPQPQPQLSMLDKMMLLKQQQQQQMQQQMQQQQQMQQQMQQQQKQRLQLLQLEQQQQQQLLLQQQHLLSQVIPHGHSSQQPDDLYGSQRTSLPTGDSSNLGLQKMKEVLEADRVLTAHGTQEGQQPSDPSIMNKKGMEGVGPSQSSVPSLLPHEIFGGVPSKDRYSHPQKLEDKVNVNTQLKASIVNPMLTEVANRREDDSDQQEVRSHERGIGIGKTGIMSENILGSGSSEVIGAAPSAPKEFPEAPFDPKPETLSSHISNQVQDLKISSENILGGSEPTVATEVKASDTQDTKKSEKKKKQKKKQAGADVAKGATKTVTSQQPRQETLVGSDQGGAKHDLQDDAEELFWGSPIQVESSSKSADPPLGLESSLVLPAKSFSEDYDTNKGEWEPNAAAVNQRGWKPTQGPRPKSLLEIQAEEQLRAQRGLAMENAKPAVSAASVPSIPWNGMLTTSDQQLMAPDAPAFDDTDFIEAKDSKKSKKKATKAKGSAVKAPAPVVSFDSSTVSVPTEKGKPSKQSHQEKEILPAPPSGPSFGDFVPWKSDQASAVPAPAWSSESAKVQRPLSLRDIQREQERRSAVAQQQPPSPTPAKVSINQRNHANVPSWQASGSSPSKAVAPVQMSSNASSRSKSNAEDDLFWGPSEHAKQDKKQSEFPTLSSQTRSSSIKDQSPMNRQKSQASRLPLSTAPTANHAGKGKAEAANRQTEAMDFRDWCESEWARLTGTNDTSFLEFCIKQPTVEAEMLLRENLGSFDRNGEFIDKFLNYKAFLSTDVIEMAFQLPARAVRGDGAGRANHASAAKGASSTETELDGGKKKGKKGKKVSAAVLGFNVVSNRIMMGEIQNVEDLGTAYDGTVVHTFVAHKELSS

SEQ ID NO: 171570 - protein, 66 aa, Oryza sativa
  Clone ID: PAT_MRT4530_6978C.1.pep
ITRLTCSWLLVSLSLYLLLHDVAYLQIYTSQRNTSMVGGSISNFNSTLRKDKITYRANATIDRLLA

SEQ ID NO: 171571 - protein, 145 aa, Oryza sativa
  unsure (1)..(145): unsure at all Xaa locations
  Clone ID: PAT_MRT4530_69790C.1.pep
VGLLEITGEGAVFCRRIGRRRARRRMHRRRSRLVIGASRQPPVPDPWRGEGDRAPDPCRDGRGPPVVAHSPIRRPRAPVAAGEGRGGQAVLAPDPWXGEGGRPPDPCGDGRRXRRIHAGTAAARRIPRLHRCAAVAVGHCCRREA

SEQ ID NO: 171572 - protein, 55 aa, Oryza sativa
  Clone ID: PAT_MRT4530_69791C.1.pep
RPGGCLTFIDFKACLISFFLLKHYRRALGIDHLTESTIDPPQIEAYALDHHFFCL

SEQ ID NO: 171573 - protein, 267 aa, Oryza sativa
  Clone ID: PAT_MRT4530_69792C.1.pep
MRRRAAAGCGGGGEARRRWELALLERGKAAAEEARRRRGDEGGELHRAQDACNSGRVRGEVMPVVTTLPVIRPAALRHHHHHPPPPPELQLLPASTTAPLAAAFSSNSTTTGSSSHEQHATTMTTTKLQLFIGPAVVVVAASDGGATAAAAGGEEKEQREEVRRALEKVDAARERAREEAAAAERALEDASRRLASLEQRELPLLCRTPLPLAASSPDARRRPPRRSPPPPHPAAARLLRRRRLASLEQRELPPPPPLAAPRLPLCA

SEQ ID NO: 171574 - protein, 39 aa, Oryza sativa
  Clone ID: PAT_MRT4530_69793C.1.pep
SFFFLPNDLKLAVNLKTDSSREIFFKTYGYHKYWTSYII

SEQ ID NO: 171575 - protein, 82 aa, Oryza sativa
  unsure (1)..(82): unsure at all Xaa locations
  Clone ID: PAT_MRT4530_69794C.1.pep
GRVGGRVGGRVGLEAAKLFSKPLDLRSLVTPLTLQGRGRESPRRSKNCKKKSSCRYQKLLPELKTEERRVELERXVKLCAPR

SEQ ID NO: 171576 - protein, 50 aa, Oryza sativa
  Clone ID: PAT_MRT4530_69795C.1.pep
MEDETIFSFFPDGLCLMILDDDMKDLFGIRNFCGSFNFFDTILFLNVLVA

SEQ ID NO: 171577 - protein, 61 aa, Oryza sativa
  Clone ID: PAT_MRT4530_69796C.1.pep
MASSTLPRPRRWPDMEQKGDEGDRRFVRLSPLHQTRKRPALSSLRPPVLHDPAAVAAARHG

SEQ ID NO: 171578 - protein, 512 aa, Oryza sativa
  Clone ID: PAT_MRT4530_69797C.1.pep
MRPTAAAATAAFASPVVAVPSRAAPLAARRRLRRARRFAVRSVASPPTVPKPAAPPSKTGKWQWTFEDKPINIYYEEHEHETAENVKNILMIPTISDVSTVEEWRVVAKDIVARKGELGYRATIVDWPGLGYSDRPSLNYNADVMENFLVQLINSPNSPVANTDGEVVVVGGGHAATIAVRAAGKGLIRPSGIAAVAPTWAGPLPIVFGRGSDMETRYGLLRGTLRAPAIGWMMYNVLVSNEKSIQSQYKSHVYANPENVTPNIVESRYELTKRKGARFVPAAFLTGLLDPVQTREEFLQLFAKLDGDAPVLVASTVNAPKRSKAEMEALRGAKGVTKFVEVPGALLPQEEFPSPVAEELYSFLKESFSSVAVPTILSLVFHAKVFEIAKRRPAAPCMVVVGEGTTLSCFVIPKAVVLANEPDARSSELDRTMMTAWGEMQVPHTHVLHCECPKAIHNTSHSRSALRSICHCRVHPHRLIHSTGSSSVHPTSFCAAESLLARLVSVCVTKKG

SEQ ID NO: 171579 - protein, 95 aa, Oryza sativa
  Clone ID: PAT_MRT4530_69799C.1.pep
MPRIPLIKFPKRNLKIPSPPPPAAQPADQHASLLSRLGVKSEAPSSSGEIKNYRFRSDVPSPPSYTAVGGPASLLPKRKPLSEEEIEAIMQGGIY

SEQ ID NO: 171580 - protein, 279 aa, Oryza sativa
  Clone ID: PAT_MRT4530_6979C.1.pep
MGFTDGYLATEKVHVGGASFPGVGVGCSTENGVGNSSSGIVGVGRSPLSLVSQVGVGRFSYCPRSDADAGDSPILVGSLAKVTGGNVQSTPLLENPEMPSSSYYYVNLTGITVGATDLPVTSTTFGFTRGAGAGLVGGTIVDSGTTLTYLVKEGYAMVKRAFLSQMATANLTTTVNGTRFGFDLCFDATAAGGGSGVPVPTLVLRFAGGAEYAVRRRSYVGVVAVDSQGRAAVECLLVLPASEKLSISIIGNVMQMDLHVLYDLDGGMFSFAPADCANV

SEQ ID NO: 171581 - protein, 66 aa, Oryza sativa
  Clone ID: PAT_MRT4530_697C.1.pep
RRGSLWAGLGRDKIQTTRDRHKLSPLWEGSFIISEVTRPGSYRLKREDGTLVDNSWNIEHLRRFYA

SEQ ID NO: 171582 - protein, 92 aa, Oryza sativa
  unsure (1)..(92): unsure at all Xaa locations
  Clone ID: PAT_MRT4530_69800C.1.pep
PLGRSRALPFLGAGSLVGGPGRGTFFPPGVCCGHFPPPXFIGRLSGMPVRPPGPGRASRGGPGAPSKVTGTGNYPRNHPHANQKKNKTPPPP

SEQ ID NO: 171583 - protein, 379 aa, Oryza sativa
  Clone ID: PAT_MRT4530_69801C.1.pep
MAGASPSARAEVVVPPEWAAATATAAAASSEPAPPVVVVCGPKNAGKSTFSRLLLNSLLPRYGRVGYLDTDVGQPEFSPPGCLSFHVVDEALTDLLNPTLRECERCCFFGDISSKRDPETYLNCLFHLYDYFVEKYRSGASEPLPLIVNTPGWVKGAGFDMLVEMLRYICPTIVVQIRISAQSKNLPDGMFWLDCGQTGPNMINIDAPFHDALNRSLLIQKDSYGMRERRLIEYFKQCFPSDISLTTNKELAYGLTSLPPYEVSISDVMVIHLHCQVPPSEVWHSLNATIVGLAISCGTIEAGRSIPWCAGLGIIRGIDVQRGILYVITPVPLEHLQRVDLLLQGLIEIPKSLLQVRGCVSPYMPTNVLHRISERDINT

SEQ ID NO: 171584 - protein, 117 aa, Oryza sativa
  Clone ID: PAT_MRT4530_69802C.1.pep
MASAAPLPPTPPPSQQQQPQPQGKEQQQQMAVAMNARRLVMIGDRLRTHFRGGGGTVLEPPDLAHLVYAFARGIDFALSSGDVPTVASEIPSILKKVYLVGKDQFLQSSGMVLMISC

SEQ ID NO: 171585 - protein, 150 aa, Oryza sativa
  Clone ID: PAT_MRT4530_69803C.1.pep
MAMAQRGLGLLRRSLGLGPLSTQRALSSTSPAASAEGGAAAAAAAEVAKESKGRKKKKNLFDVVQFLPSWGVGYKVAKTTWRDVSYQITKINLYKDGRHGKAWGIRYKAGVQAAEAPTKISGVNKRGWKYIKESQKKLQDTPKVETPVTA

SEQ ID NO: 171586 - protein, 62 aa, Oryza sativa
  Clone ID: PAT_MRT4530_69804C.1.pep
PCTCDKSIRHKFSMDLATKQDQINTELTCNSARRSPTASPRRADDPGAASPGGGSPRPDAAP

SEQ ID NO: 171587 - protein, 64 aa, Oryza sativa
  Clone ID: PAT_MRT4530_69805C.1.pep
MEATNRPGLIDPAGLKTGRRDQESYSTLSEEQCRSQIVRARLTKNIEAMDEGLHARGRYTRGFR

SEQ ID NO: 171588 - protein, 78 aa, Oryza sativa
  Clone ID: PAT_MRT4530_69806C.1.pep
FDPKYFQSKPTSWFMQMIGKPKHTKQTTEVTTVDGVISYADLTSMKHVESAEIDPGGGRTRAAARESAGPEGSSRIGR

SEQ ID NO: 171589 - protein, 81 aa, Oryza sativa
  Clone ID: PAT_MRT4530_69807C.1.pep
HGRSSCLTVHSGQRNDHSIRGLSVVNAAAPILGCKYKEFLDMCVGYRPRRAYNLLGGCFTRHPCMIYLDQIDSNVDSGNCN

SEQ ID NO: 171590 - protein, 128 aa, Oryza sativa
  Clone ID: PAT_MRT4530_69808C.1.pep
MSQEVVNPKAYPLADAQLTMTILDLVQQASNYKQLKKGANEATKTLNRGISEFVVMAADTEPLEILLHLPLLAEDKNVPYVFVPSKQALGRACGVTRPVIACSVTSNEGSQLKTPIQNLKDAIEKLLI

SEQ ID NO: 171591 - protein, 37 aa, Oryza sativa
  Clone ID: PAT_MRT4530_69809C.1.pep
FFFFLLDTGCLNYAQIRGVHSFNYKNLPVSALLELHT

SEQ ID NO: 171592 - protein, 77 aa, Oryza sativa
  Clone ID: PAT_MRT4530_6980C.1.pep
AVPAHGLHHRPKHGPPAVGLCQGRHGPDPRRAGPCLGRAKISCHGPGRRASSLMAIYSGDGRMARRGRGWRPDLGHG

SEQ ID NO: 171593 - protein, 156 aa, Oryza sativa
  Clone ID: PAT_MRT4530_69810C.1.pep
MDQIREHQKDDPEIQIFKERKVRGKAADITEDLEGILWYGNRIVVPQSGNLREVILKEAHDSAYSLHPSNTKMYHDLKDLYWWPNMKQHIAEYVALCHVCQQVKAEYQKPTGLLQPLQIPEWKWDETEMDFITGLPKTSSRYDSIWVIIDRLTKTA

SEQ ID NO: 171594 - protein, 102 aa, Oryza sativa
  Clone ID: PAT_MRT4530_69811C.1.pep
MAPGPSSDPHRARPLQPSPTISGSGSFTKFINASYKSECLELYEMMDEYCRIGRRHITSSKNQGIKDLPVNICEYAFSYIYETVQTHPEDLADNVFHCWSKS

SEQ ID NO: 171595 - protein, 65 aa, Oryza sativa
  Clone ID: PAT_MRT4530_69812C.1.pep
LPCVVGAAVSSCAGQAGCLGAARSESRASFLSRGLVMSRVCVCGPLYRLCLTKFFRTRGRAGNSG

SEQ ID NO: 171596 - protein, 41 aa, Oryza sativa
  Clone ID: PAT_MRT4530_69813C.1.pep
SSSYLLMLSPIRASAVAASGVGRRKRQSLYNCRVCEEDEQE

SEQ ID NO: 171597 - protein, 142 aa, Oryza sativa
  unsure (1)..(142): unsure at all Xaa locations
  Clone ID: PAT_MRT4530_69814C.1.pep
LXFFXFRDGXGXTAXTXCXPEKKGHQPXAAKXVTVSXAXGXEXHXXXREAEKHXEXAAPGXXSXXNGSXPXXVPXTTXXFPAXSPXHXPXXXXVXXXIXXXIHQWRAQEIXRDNXRVXXRLXXXSFVSISXXHPCXVVXTVA

SEQ ID NO: 171598 - protein, 144 aa, Oryza sativa
  unsure (1)..(144): unsure at all Xaa locations
  Clone ID: PAT_MRT4530_69815C.1.pep
TAVERWCISLKVGFWEISIVVLLTTKFDNLSIGDKDXSKRNPSSISYRKQSKNRLDSKSATTRSAESESERESRYSRFRQYDSYGQKSAAKTYGILEFVRDKSRVXQGHILIKSTVTPSNLKAXIFWTCTGVKQISQASCFYIN

SEQ ID NO: 171599 - protein, 51 aa, Oryza sativa
  Clone ID: PAT_MRT4530_69816C.1.pep
VTEVMGEIKNPWYNERIQKLIIPVNCLPVVHSVSDLNILILFSSLSLSLAI

SEQ ID NO: 171600 - protein, 37 aa, Oryza sativa
  Clone ID: PAT_MRT4530_69817C.1.pep
RGNPISLHSDFLARVLKVLDRVDSVVNELVYHVTIGN

SEQ ID NO: 171601 - protein, 406 aa, Oryza sativa
  Clone ID: PAT_MRT4530_69818C.1.pep
MGRAHATAVCFASPRHATRAPLAASAAGASSPARVSTTIITGDEGRGGSCRDAFRDRFKVLKNHAMQEDINPCFFYAVTGYFDYRAENRPRHKESAASSILGEIPKPLRYTHLVGGQQDRDSLKRQTADCSMSLGESSSIPKIARSILGEIPKPLRYTHQYNWADLAVVYEEAIFFVLQAYNEEVIHLSMRYDMLWTCSAGNHALDDAFRLAHQICAQKNCKCPIILFLKIMILKLGFTGSLTVPNVLVGMQTLPVEKKAGSSCSPAMNSKGEEDSSKLEEPKASKTPEYRIGSLIVPNVLNETQTLPVEKKAGSSCSHALNSKGKEESSGRLGKEPQASRANNPVLLSTPKSRSQGIKHKPQTGEKAASSRCSTAFNSKRGEDSSGCSSVSVPIGAMMINVNLLD

SEQ ID NO: 171602 - protein, 73 aa, Oryza sativa
  Clone ID: PAT_MRT4530_69819C.1.pep
MASAERRIRMWWRTARRPKHLWGRRSMLYMGHSRIYTDHYYDPIELQGSRRHCWRLFVMAGDEGLALAGFGMG

SEQ ID NO: 171603 - protein, 755 aa, Oryza sativa
  Clone ID: PAT_MRT4530_6981C.1.pep
MAELGELEGKLRDVGEKLQSPPDDVDALLKLIHEAEIYILKVEQAPSESMISAITPAMKALIKKELLDNSSYEVKLSVVSCISEITRITAPDTPYDDDVMKDVFSIMVGSFEKLDDMENPLFRRIVAILETVAKVRLCVVMLDLECEDLILQMFHNFFTTVKPNHPENVTNCMTTIMILVIEEDDEVEIPIAECLLKHAKSELKETSAASFELAEKVIGACSEKLKPVFLQLLKGTSLNEYDNIIATICEDSSDVKEDMDADPSGKDVVDDGKLSERTISDELPQEPAKLEQDVTQTTAIGSGATPVDNGTESAAANPKELSNPDSEKKDGVKQSAKVANGASAETSERVDGSPAMVKSKRGRPPGLKSLEKKAAGKKVLGLKKVEETTDSTGKLSKQSSKDDSKSSTRKASGAGSSKKQQKISLKQKDETDSKEDTAKDLSLKEMVSPKSVSKGSAKTKGSQGQDNNGSKRKRSQEDEQETPRSRKNKGLDASLVGARIQVWWPDDKKFYKGIVDSFDTASKRHKIAYDDGDVEVLLLRDEKWEFVSEEQDKTPDVASEISPKPRGRGRKGRGSSVQLKEGNAETPKSGGGDLPKKRGRPKGSSNGTPKSNISATSSKSKGKAARKDDNETPKVGSDLKKEAEEGSEDKATKSTEKTKDDLPEDGSNKSASKPKEASSGGKDLKGESKPSEGRAKPGRKPKVAGAAVAGEESKANVSAEKEKQKEAEGEAAAEVEQGGSAGGASTGGKKRRRKA

SEQ ID NO: 171604 - protein, 111 aa, Oryza sativa
  Clone ID: PAT_MRT4530_69820C.1.pep
MTNMKMISPIKADEDVGGGKDNDTNQSRVGIAEEAWFDEDDGVVDPVNSSVVVNDNDEYVLHCFGDDDCVKILRRCKDAIPTRDAGGKVIIINIVVGSGSQRDIFCNSPKI

SEQ ID NO: 171605 - protein, 582 aa, Oryza sativa
  Clone ID: PAT_MRT4530_69821C.1.pep
MAVRYEKKAMCALLLSLIMVALSVAAAGDGDAPPSTPVSPTTACNDTTDPSFCRTVLPPRGSSDLYTYGRFSVARSLDSARRFAGLVGRYLARHRGLSPAAVGALRDCQLMSELNVDFLSAAGATLRSAADALPDPQADDVHTLLSAILTNQQTCLDGLQAASSSWSERGGGGLAAPIANGTKLYSLSLSLFTRAWVPTAKGSKHHGGGKKPHQGHGKKQPPAAAASMRRGLFDAADGEMARRVAMEGPEATVAVNGVVTVDQGGGGNYTTVGDAVAAAPSNLDGSTGHYVIYVAGGVYEENVVVPKHKRYIMMVGDGVGQTVITGNRSVVDGWTTFNSATFAVVGQGFVAMNMTFRNTAGPSKHQAVALRSGADLSAFYGCSFEAYQDTLYAHSLRQFYRRCDVYGTVDYVFGNAAVVFQSCAFLSRLPLPGQCNTVTAQGRSDPNQNTGTSIQGCSLLAAPDLAAAGDGGRTLTYLGRPWKNFSRTVVMESYVGGLVDPAGWMPWSGDFALDTLFYAEYNNSGPGADTSRRVAWPGYHVLGAGADAGNFTVTSMVLGDNWLPQTGVPFTSGFLTSDPPIS

SEQ ID NO: 171606 - protein, 66 aa, Oryza sativa
  Clone ID: PAT_MRT4530_69822C.1.pep
RVVPRRRRPVVPGMISQHRPGCQRRRRSPGCRARLYGTTPGQHSQHTWFLCSPNVWGGHGLTVLSN

SEQ ID NO: 171607 - protein, 75 aa, Oryza sativa
  Clone ID: PAT_MRT4530_69823C.1.pep
ALFFPWWALSGSCKVVSSGGLWPPPRSLFGAPGTRRGAPYCAPFAGGCFPPPRVLVVFNPRPCVFIRLVLVSLWV

SEQ ID NO: 171608 - protein, 608 aa, Oryza sativa
  Clone ID: PAT_MRT4530_69824C.1.pep
MARRRRERRQLARLCDLVACALLPHLVSKAIRGWEEEEEEEEEEDDDEGCELDQEIISCSAEVHSCSLPANQHFDDGFSCLANIISILVGFFGFCSSYVKHSAGNILIVISDSLMKFEVVWIQFVELVWIAIHTVSTCAHSALPSLIDSISSFRKDSICYCSVMESLSHDIIISSTNITSFVELLQLRCLDINGHMVASLFRVLHTILKFLKHTDNELKEDFICISAHHILMVDWDLYYQLNVGEPLNLVKDSTFSLSDDLKQLGFLSSSLLQLLCSLLEQSDLEDNNGQDIYAKLVGVIPKLVAILPEHQDAPKSLSQYLKHKFLMIMMRLKPYIQKDCSYIVCCLKLLRQHFQDLLHEPIMQHIAKPENCLEGSPFLLSTVGLEISDWFQRCFLDKIFGFKSSTDNALCFLQLYMEEDDMLFNVLLQLLDAPLISSKIDSMENRWASELIGGKLFSSIFDPVHVFHLLLLLLHYDHLVLVDYLISKDVGVHCAQYLLRCLRLVTQCWHSFTDDSIYEAKIEKLNFKRQKTFNDANSSSGSSIEGPKLGSACHKKSKNKHKLFLNAKACLLSLKRTLEDLHRKGLFPYNPKPLLKSLARFEELCEQD

SEQ ID NO: 171609 - protein, 724 aa, Oryza sativa
  Clone ID: PAT_MRT4530_69825C.1.pep
RFLLPHPSEAAAAAVVGMGALAAATSSAIWLVEDDILLKNAVETGASLEALAKGAVCFSRKFTLKEIQDRWNSLLYDPEISTQASARMVEYENDLSTSNPLKAKVINAKQKDLSFQKRKIDSVKNQYYAMRKRVRNEPCSTVDLGFLIDPCSCTMNGGQCVCGGLDKHSQGHHVVHNTEPGVSTMNCFGQQDGSYNGGQTMFVGMNGHSFPAKHAETDSMVKGGDIANSVPYGYSDVSQIYEQDAYTRKDPDTNEGNNVSLKGITDFQGSMQFQNLGSSNQCGSKVTESKTIVIADHCGVEHVHFPVNSSSRMQEPGSLQVIGQPEGSQTPVGSIWTEVDERGTFTLDDDKKIKTDNSDPLALQPNLDGGICAAGLDHAAITEGDFMDFPYFSNSEDLDLLNGENFLNIPHETNQEDLDDPDHVKNLLHPDEANICYDQTDPDHVKHNVDVSGIISVPTSLEVPYPGRFVECVLNTEDPEIPCNDDVIFPGESPLQCSATDFGQNSEHNTCLVSPATSPASNVEHSNVSDKALIKREDMTNTEPSSQPMNLSPPTSEQKEGSTAPSKGCVPLGAEPSEGPSTAGTLVHCHVDTNDANSCASNLPSISAAVFAEGSPCHLEQQNNFDDSLSFPLPNSVEVPDHMNYNSHDNQPELEDGAPLQNCIPPHELPDLGLQDPITTVPVSNQVEECSDNENDVPNYYDLEALILDQDLIPWVQDSEQHPG

SEQ ID NO: 171610 - protein, 124 aa, Oryza sativa
  unsure (1)..(124): unsure at all Xaa locations
  Clone ID: PAT_MRT4530_69826C.1.pep
TFSLYPSSSQSRREAAVAFLSSXSKRSVAVEQGTRCGDEAQAHPQPSLPRRPPASPSSRSASPPLLLSSSATACKGFRRRPPPQPWQCSRPRSSSTPPPQPQPSQPRHAAAAAAALAAPLRRRS

SEQ ID NO: 171611 - protein, 306 aa, Oryza sativa
  unsure (1)..(306): unsure at all Xaa locations
  Clone ID: PAT_MRT4530_69827C.1.pep
DTLASWLADFGFNIDIIEVAGSRNKYNLLATLGEGQGGLLLAGHTDTVPFDQGKWQSDPFVLTEKAGKXXXXXXXXXXXXXXXXVEVLASLDLKKLNKPLRILATADEETTMLGARTFAKHTHIXXXXXXXXXXXXXXXXXXXXXHLGQAVRITGKSGHSSDPAKGINAIDLMHQATGYLINMRNQLRDRYHNDLFQVPYPTMNFGNIHGGDAINRICACCELQFDLRPLPNLVIADLYAMVNQNLQPLLEQYGDLIEIRHLHDAIPGYECPPSSQVVQIVEKLLGEKCDAVNYCTEAPFIQHLCA

SEQ ID NO: 171612 - protein, 257 aa, Oryza sativa
  Clone ID: PAT_MRT4530_69828C.1.pep
MEASMVESVELHKQKAFMARFKAKVDELSAAVDHILNKASVGAVSSLGATTYTDAQQVFDEMPSNKEPTITTVLHFTVSDVLYLVTTELCSSEQKVAIPTKCSTSTLATSAMPLTDLVEAADQVFQEISCMLVDSKAHKLDEMDMKVFYSSEEFITIIPITHIIDGIAGKVQNPTAEMKVCNVFTRRINRQNSIKAGSVSCFPNGPQDCCNPHHDQLPIPFAKFQNPRAKHFPHIPARLHIESAFKNTPTEVSPEFD

SEQ ID NO: 171613 - protein, 158 aa, Oryza sativa
  Clone ID: PAT_MRT4530_69829C.1.pep
MLGVAIAGRVVPAAGGWLAASSASASWGKWVVEGWCDYDILLPRKRAAAPCPPASGGGGFGSSLSLSASSVTMDWQLLSGAMAQRIPGAVRGGDALPSTRSGGGEVRRRWWRTSWRGRVRRRGGGRPGLASARSSGVEAAAARRGQEGRRAGPCLRQI

SEQ ID NO: 171614 - protein, 94 aa, Oryza sativa
  Clone ID: PAT_MRT4530_6982C.1.pep
TPNSITRPIRLLYYRLSLSLGEKPRVTRPRQRVPRALRNFPRSTPHAALRCFFSLNLSSPQAHLSTCLTWWSPRNLRGSSPGGGNSCLATCYMP

SEQ ID NO: 171615 - protein, 212 aa, Oryza sativa
  Clone ID: PAT_MRT4530_69830C.1.pep
SCSAMHDCDGGDSVDVCGRHEEVFSESMNDIGGSVEPESIGGIELAFNSRQQRYDYNWSSTSGVEIHPLPLRFVENNYTSGLCPVWWSSHYPMCVNFCQQEGSSAIFDLTEYVFEEEDYPVVDYVLVFHAAKSTTQLDSLRFATSTSASAMPSPSSFLLISSSASSAPSLLLVVPLLDSHAPLGRMHRIMLNATTTSRQPPTVHLALSPRRR

SEQ ID NO: 171616 - protein, 56 aa, Oryza sativa
  unsure (1)..(56): unsure at all Xaa locations
  Clone ID: PAT_MRT4530_69831C.1.pep
KDAVTLSEGDGYYPGKGMPPDDSGXPPCPSCAPLAVGSDRDHSCSGCLGASNSGGA

SEQ ID NO: 171617 - protein, 91 aa, Oryza sativa
  Clone ID: PAT_MRT4530_69832C.1.pep
YLCLGLISLFFVFFLFSLFFFYYFFYSSLLLLFLFLLLFFYLFLFSINYFIILSYFLSFLFFFFSFNFFIFFFFFFLIFLFIFFSYSFFYF

SEQ ID NO: 171618 - protein, 63 aa, Oryza sativa
  Clone ID: PAT_MRT4530_69833C.1.pep
PHGVGLGWCSGAFFLRSMAPPFFWCGVSPFTVIPGLGLLGRWCPGLMEDLWAGVLSVDLIFEF

SEQ ID NO: 171619 - protein, 62 aa, Oryza sativa
  Clone ID: PAT_MRT4530_69834C.1.pep
MLAARAWAKCTPIRCAGIPPREQEERRGGVRRHRRRRAGAGPSDGRLLLCFVRVRGVGNIAT

SEQ ID NO: 171620 - protein, 176 aa, Oryza sativa
  Clone ID: PAT_MRT4530_69835C.1.pep
MAPSKVSLAAVLAVAISLAMAATTTTSAQNTPQDYVNLHNSARRADGVGPVSWDPKVASFAQSYAAKRAGDCRLQHSGGPYGENIFWGSAGRAWSAADAVASWVGEKKNYHYDTNTCDPGKVCGHYTQVVWRKSVRIGCARVVCAANRGVFITCNYDPPGNFNGERPFLTLDAAAK

SEQ ID NO: 171621 - protein, 69 aa, Oryza sativa
  Clone ID: PAT_MRT4530_69836C.1.pep
PPNVNAFLENSNQEALDHRGNGRQMRLYIRERIGMNMIVMKVGDWERSNSVKPSSSVGSNQKVGSATSF

SEQ ID NO: 171622 - protein, 75 aa, Oryza sativa
  Clone ID: PAT_MRT4530_69837C.1.pep
MAPSSRLPCRSTAAAPSLPLPLSAPTTEASEAKPCDGGVSPVTTITVSVPVQAQLPGVLVSEVIPGSAVTGQPRR

SEQ ID NO: 171623 - protein, 82 aa, Oryza sativa
  Clone ID: PAT_MRT4530_69838C.1.pep
MSPNSSRAHPHLAAGETRGEKRQPPAGSCSPNRAAAGGERWRECVLRVKSFWRKLYDGWALVRGRISRPERDSGPRAACGPF

SEQ ID NO: 171624 - protein, 56 aa, Oryza sativa
  Clone ID: PAT_MRT4530_69839C.1.pep
MIPSCRLLWTLRYEILHPFHNIRLCSIGYIHIDANESRHTYVSRFINIYMNMANAK

SEQ ID NO: 171625 - protein, 277 aa, Oryza sativa
  Clone ID: PAT_MRT4530_6983C.1.pep
MTKLLLWSEGVPPPSCWRSNKAAGPTGIVHGDGPPHGRRGHPMANTTHALHVIAVAQVGRANREKNSRGSTILRLAYSSDIAVATTFPAPVWSSCCSNDKHGNDAEPQAQCLRGRRSDKDRDRDVETEIETTSWVNDEDIPATLDVNKGDGLRHKSHEENEDDVNQVDGLRLSKNDPAYHGQLRATVLGRYNKSFTPEDIITMPRRMGYVEDDKGYVKEESAHAQRAAVYANKKMIYTAKAQFPRLVRPIQSWDGCMAYMVRVQEASDRYEFGNSKD

SEQ ID NO: 171626 - protein, 41 aa, Oryza sativa
  Clone ID: PAT_MRT4530_69840C.1.pep
GLKLKLNSTKGHALKKINSFVCISSCAHFIFSLILISFFSN

SEQ ID NO: 171627 - protein, 123 aa, Oryza sativa
  unsure (1)..(123): unsure at all Xaa locations
  Clone ID: PAT_MRT4530_69841C.1.pep
AAASSAVLLLPNSRAPAALSRRRAPVPRRGFVVGFEGRSRRGAAGTVRACFNPPGDERILREALKXAFMGGVFAGLLRLDLNEDPLKEWITRTVEASGVAEDSRTDESSEGSQNDAPQQIEIE

SEQ ID NO: 171628 - protein, 50 aa, Oryza sativa
  Clone ID: PAT_MRT4530_69842C.1.pep
PWITPSSNTTHYRESWYACRYRSGIPGSTHACRFIMRQNPLRCGLRIKNN

SEQ ID NO: 171629 - protein, 219 aa, Oryza sativa
  Clone ID: PAT_MRT4530_69843C.1.pep
VVLQHTFVTDANSIAESHYGFSVVDANSLEFLFNNAPEAAKWLKDNSLLSFEEKYHSDRSSWLALYPVNFLFSGSLKFPSENEEIRKHYQHFPQMVIQKTSSNNGHRRMHLELSLGSLSEIWTSVLNITGPLSNWSFSDMTLSDPQSFSGGPPSYICRLSGESHENWSFWLEANSSEPLRIDVAVLDQYLLDRTRKLKSLFPSWADITAFTTFFSTYHL

SEQ ID NO: 171630 - protein, 56 aa, Oryza sativa; identical to SEQ ID NO: 171624
  Clone ID: PAT_MRT4530_69844C.1.pep

SEQ ID NO: 171631 - protein, 127 aa, Oryza sativa
  Clone ID: PAT_MRT4530_69845C.1.pep
MAAAASSAVLLLPNSRAPAALSRRRAPVPRRGFVVGFEGRSRRGAAGTVRACFNPPGDERILREALKEPVAFMGGVFAGLLRLDLNEDPLKEWITRTVEASGVAEDSRTDESSEGSQNDAPQQIEIE

SEQ ID NO: 171632 - protein, 52 aa, Oryza sativa
  Clone ID: PAT_MRT4530_69846C.1.pep
LSRLTTPEQTVHSSDHQFGSSPACADASLRRVHPRSMLKSYCSVAHKRKKEW

SEQ ID NO: 171633 - protein, 227 aa, Oryza sativa
  Clone ID: PAT_MRT4530_69847C.1.pep
MASSMAPAAAMAILLLALLMPATLCSRSGPPSSKHGHGGHAKRAPPPASPVVPVAPQAAALVRATCNSTAYYDVCVSALAADPSSTTADVRGLSAIAVSVAAANASGAAQAAAALANGTAPLAAAAAGDGTVQALLRACAGKYGDARDALAAAKESMGQQDYDLATVHVSAGAEYPQVCKALFRRQRPGAYPAELAAREEALNKLCSVALDIIALLTSSPASNNNNS

SEQ ID NO: 171634 - protein, 180 aa, Oryza sativa
  Clone ID: PAT_MRT4530_69848C.1.pep
MSVFLFLFLFFLLLLPPVIFLLSFFPCNNREREGALGLQWPGISDVGGNLCSRTTRIWGGWFPAEGDEELAGTASRRASLRLQRRWLWWLLWGGGEGKNGKNGFAGGRGSQWCKDLARGTIEEEIDRWRRRPDLGEREEEELKARMGKRAGVCRLFIGGGRRFMKVGSPVEDEEGTATAA

SEQ ID NO: 171635 - protein, 118 aa, Oryza sativa
  Clone ID: PAT_MRT4530_69849C.1.pep
GDLLERSLDGGEGGVVESPIVVNSRRHIGLVGRVKACVDGLTSDVAVGIDGVQRFLLEVLLVVHQHLLVISSAAVSVVGVAGHDIGRRPCHDGAGSVAATAASSPTTGSARFARSIVY

SEQ ID NO: 171636 - protein, 178 aa, Oryza sativa
  Clone ID: PAT_MRT4530_6984C.1.pep
MDRFYYYHRLQRLFPSHLSRVKKLLVWVRDGYSIWKARAALHHYNANHPGAEYDLVKPLMAACVIFRGKLWHHVSFLAHRRDQLVAPPVEYFFAELRDGCSDDDSIVEACTMIENPQSCSGNKCSFCPEQYQIAHPSEQELLCGKEEHAKDFIRLMNMSPMPFTCSTETPEIGIVIEQ

SEQ ID NO: 171637 - protein, 65 aa, Oryza sativa
  Clone ID: PAT_MRT4530_69850C.1.pep
FLYKFIYFNLFILLLYFFFFYLYFFFLAAQKLHLRRLKTVCTVAFAHASAHASAHASAHASAHAS

SEQ ID NO: 171638 - protein, 78 aa, Oryza sativa
  Clone ID: PAT_MRT4530_69851C.1.pep
RVLTSGEPYSSSLCGPLQPRERRSSSILGQVVPHSVLKKDHVTPVLTPQMRQKHESVSSAVNTECTLDGMLHRELLPE

SEQ ID NO: 171639 - protein, 483 aa, Oryza sativa
  Clone ID: PAT_MRT4530_69852C.1.pep
MAASGWWCGLSLCAKPKQVASESVHGAQLALQRLTAARRCGGGGDAACVDVEAGKPCKCGEEHTEAAAAGRVAAVEAVHHGKPTSSFAHSVINMVGMLIGLGQLSTPYALENGGWASVFLLVGLGVMCAYTAHLIGKCLDDDPASKTYQDIGERAFGGKGRVVASAFIYLEIFFALVSYTISLSDNLPLVFAGAASHLHLPWVRLTATQLLTVAAVLVALPSLWLRDLSTISFLSFAGIVMSLLIFGTVVCAAAFGGVGLGGYIPALRLERIPAVSGLYMFSYAGHIVFPNIHAAMKDPSAFTRVSVASFAVVTALYTALAFVGASMFGPSVSSQITLSMPPGLAVTRIALWATVLTPVTKYALEFAPFAIQLERHLPAAMSPRARTLVRGGVGSAALLLILALALSVPYFQYVLSLTGSLVSVAISIIFPCAFYLKIRWGRVSRPAVALNAAMIAAGVVLAVVGTASSATSLVQSIQKGHAA

SEQ ID NO: 171640 - protein, 133 aa, Oryza sativa
  unsure (1)..(133): unsure at all Xaa locations
  Clone ID: PAT_MRT4530_69853C.1.pep
XXXXXXXTXXXXXXSXFXXTXCXXXXPYXXXRXXXDXXXXFXVAXXVXXXVQVXSXXXXXXFXXXXXHIRLXXXXGXXDXNXRRXXXVXXXXXXXXFLXXXXXXXYXXXXXCXHWLXSXCXXXXXYXXXXXIX

SEQ ID NO: 171641 - protein, 502 aa, Oryza sativa
  Clone ID: PAT_MRT4530_69854C.1.pep
MAALTPYHASPQPSCDRLRTAGSDCPYHHDAGFADLATRLKGLRQPPFDVAEAMPNGNGMRRHCGEAGRFPSLASSKRRGDSESLESTDGLDATTANLGSPFITNDTDPSDDIANRFGAEVPNLSAKKEELIEEDVEGGEGVNDMADVEVREENDPVREEVHVEENVPLREEVHAEDNVPLREEVNVEENVPVREEGDVEDGREVGDDVELPEEEANAKNVSMGLRELARLKFYTREECEEAMIRSGLNPGWLEYDTEDELDESASDSDDDRPVRKMSEHERTVFAKLVGRNPEITQFEDLTRMEHFPGLEDFYEEKHRAPQIASGERLKTLRVRGHTAHILFDDRYVPYLRRAKLLAFVTMAQRPVPLYNAAALTALVDRWRPETHTFHLPCGELTVTLEDVAMILGLPIRGVTELVAPHRETAQAPLCRFGRGLREEGGHLTLGPDVPEGARPRGRLRLPQASGHDTPGPISPTVAPGVMPEQFPFPREAVRCDATPKAW

SEQ ID NO: 171642 - protein, 694 aa, Oryza sativa
  Clone ID: PAT_MRT4530_69855C.1.pep
MADVEVREEVNVEENVPVREEGDVEDGREVGDDVELPEEEANAKNVSMGLRELARLKFYTREECEEAMIRSGLNPGWLEYDTEDELDESASDSDDDRASANPEITQFEDLTRSGLAIADGDPQYDGAFEPMCDEPRKGLEFRSMDDLKIWLQSYSIRVHRPYHVKESNASVKYTVACLDRHCKWQINARKSGGDRWRVTRVGEDHTCCSAEVTGKHLQLTSRFIGNRLQAFVRAEPTLSPAAIVEAVEQIWHYRPTYGKAWRAKQVAMKVIWGDWDEAYVRLPTLMRAIKAKNPTMHFRVEAHPEKSRMVDRVQRRVFGRAYWIFGQSIEAFKHLRPVLAIDGTFLTGKYQGTLLTAIGVDAGLHLVPLAFALVEKENTSNWEWFINMLRNKLIGPNREVCIISDRHPGILNSIIHIMPHHLTIHHRWCMRHFCANFYTAGATTDQMKDLERICQINEKALFLDEIKRLMGVVGERPKKWLEDHMPLKVKWARAFDTNGRRHSIMTSNMAESFNNVLRGIRKLPVTAIVAYTFSKCNSWFVDRHKEATVDILCGKKWPTKVKDMLEEQQRRTLERDETTRLRQRCRKLAARLGYRSTDVVEHAHAHQEGDEEGEVGDEEGEQDKEAEEGDEEEEGDEDREEEADELGPSQLEDAPSSQPDISQPGPSRPRRRRAPSRDWRYTPDVPRPRTRGRR

SEQ ID NO: 171643 - protein, 175 aa, Oryza sativa
  unsure (1)..(175): unsure at all Xaa locations
  Clone ID: PAT_MRT4530_69856C.1.pep
LTPYQAFFLGXHFFAGADLLWHAKGPTKCKFFLWFAFQQRCWTADLLQKCGIDSHSACPFCAQELKTMNHILLYCVFTHQVXLWVLSPPSWTALXPNGSXLQYRWPSSKACLPGHLCASFDSLVLLVSWQLWKEHNYRVFDSALSLVSVVLESILSEGRLWSLAGVASFGDLLGV

SEQ ID NO: 171644 - protein, 1140 aa, Oryza sativa
  Clone ID: PAT_MRT4530_69857C.1.pep
MTVRQLVFFAKPTFEELMSRIKHELDWNDESVGMQGRYDVGGGVMSHKFMLDLNGEIEWQTYIDIVLGSHFKSLEVFAWKKDGRIGKKELIESPISCHELSERCSRKEELIEEDVEGGEGVNDMADVEVREENDPVREEVHAEENVPLREEVHAEDNVPLREEVNVEENVPVREEGDVEDGREVGDDVELPEEEANGKNVSMGLRELARLKFYTREECEEAMIRSGLNPGWLEYDTEDELDESASDSDDDRPVRKMSEHERTVFAKLVGRNPEITQFEDLTRSGLAIADGDPQYDAFRPMCDEPKKGLEFRSMDDLKIWLQSYSIRVHRPYHVKESNASINARKSGGDRWRVTRVGEDHTCCSAEVTGKHLQLTSRFIGNRLQAFVRAEPTLSPAAIVEAVEQIWHYRPTYGKAWRAKQVAMKVIWGDWDEAYVRLPTLMRAIKAKNPTMHFRVEAHPEKSRMVDGVQRRVFGRAYWIFGQSIEAFKHLRPVLAIDGTFLTGKYQGTLLTAIGVDAGLHLVPLAFALVEKENTSNWEWMEHFPGLEDFYEEKHRAPQIASGERLKTLRVRGHTAHILFDDWYVPYLRRAKLLAFVTMAQRPVPLYNAAALTALVDRWRPETHTFHLPCGELTVTLEDVTMILGLPIRGQAVTGDTASGNWRERVEEYLGLEPPVAPDGQRQTKTSGVPLSWLRANFGQCPAEADEATVQRYCRAYVLYIFGSILFPDSGGDMASWMWLPLLADWDEAGTFSWGSAALAWLYRQLCDACRRQGGDANLAGCVWLLQVWMWMRLPVGRPMWRTHQAWPHQDADRRPTVAHLWESVPSPVVGRRNLAYYHYTNEMDYLQPEHVVWMPYQAQEVLELELNPMCHIEDALKTLRCPLICFYAVEFQMCHRVMRQFGRLQTIPHRFSTSIDLHKVDRRKNKKVTDWAYYHQDHITQWEKFEENGVPDQGQHNGTEFDLYLAWLHRTYRLVLRPAWTLADIADDPEDVEEQNEYDTRTRLGTTVETGPVRDRVARELLRTVNDAGVALGTAPGSEGEGGTLRNALQRLRQQCRKLAARLGCRSTDVVEHAHAHQEGDEEGEVGDEEGEQDKEAEEGDEEEEGDEDREEEADELGPSQLEDAPESSQPDISQPGPSRP

SEQ ID NO: 171645 - protein, 115 aa, Oryza sativa
  unsure (1)..(115): unsure at all Xaa locations
  Clone ID: PAT_MRT4530_69858C.1.pep
MALRSQPASHPEGSKRPRPTSAPGGLALSVPRSAPLWLALRSQPASHPAGLLVWALGVAAKSHXLSARWAGAECPTVSAIMAGAEVQARKPSRSLAGLGLGGCGQVPPQRQSGWR

SEQ ID NO: 171646 - protein, 141 aa, Oryza sativa
  Clone ID: PAT_MRT4530_69859C.1.pep
MTSLSITVMTLNLHEGEQPSESPNSWERRRDICVSVITSYSPTILCTQQGLRWQLDYLQQCLPGYEQFGISRKGSEDNTDEYCTIFYEKEKVELTEGGTFWLSESPSVPGSVSWGATAPCIATWAISFGAMLLSAFYSIIL

SEQ ID NO: 171647 - protein, 457 aa, Oryza sativa
  unsure (1)..(457): unsure at all Xaa locations
  Clone ID: PAT_MRT4530_6985C.1.pep
MSWQRVGALLLGXSVSPACPGGSGRRXGIRSVLLSMARMGWKLCHVFRLYTVVMFNREKGKNVSRHASSNSSFQLHPPLASRELTRVHPWSIPSMLLGSQLPLVGSQDQNQYVFDRAFATQVNELPMPEEDVPFCQDCREQGHYALNCPWVYTKEAPSFGLAGQASLNQPPRTKSSLQPSVQSREPNEENPLNPGNCFPPSLSYHVGSRTKHAKGKKSKNQKRKAPMRTEEEVRKMTITSTEWPPAGITIPRRQRGNTFRGARQLTQHLLSHGGRVSDSEGSDQVSSDYEYESPRRLGEEEMELKACTRCGEIGHIASMCLTLCPHCEEDHPPGECPTRKVTCFLCEGTNHVPKDCQLSVLLTKTAEIQRTTLRLSHQLVSSNSNLDDIIHSTNAPPAAPDSAINHSNNTFSTNHSLHXQPQQXIVVDGRSCFSPRREVGNLYEVDSKDMNYAKFWN

SEQ ID NO: 171648 - protein, 1209 aa, Oryza sativa
  unsure (1)..(1209): unsure at all Xaa locations
  Clone ID: PAT_MRT4530_69860C.1.pep
MMDRLVRLHYGGCVVDESTHGSQFEGMTVRQLVFFAKPTFEELMSRIKHELDWNDESVGMQGRYDVGGGVMSHKFMLDLNGEIEWQTYIDIVLGSHFKSLEVFAWKKYGRIGKKELIDLNESPLIESPISCHELSERCSRKEELIEEDVEGGEGVNDMADVEVREENDPVREEVHAEENVPLREEVHAEDNVPLREEVNVEENVPVREEGDVEDGREVGDDVELPEEEANAKNVSMGLRELARLKFYTREECEEAMIRSGLNPGWLEYDTEDELDESASDSDDDRPVRKMSEHERTVFAKLVGRNPEITQFEDLTRSGLAIADGDPQYDGAFEPMCDEPRKGLEFRSMDDLKIWLQSYSIRVHRPYHVKESNASVKYTVACLDRHCKWQINARKSGGDRWRVTRVGEDHTCCSAEVTGKHLQLTSRFIGNRLQAFVRAEPTLSPAAIVEAVEQIWHYRPTYGKAWRAKQVAMKVIWGDWDEAYVRLPTLMRAIKAKNPTMHFRVEAHPEKSRMVDGVQRRVFGRAYWIFGQSIEAFKHLRPRLKTLRVRGHTAHILFDDRYVPYLRRAKLLAFVTMAQRPVPLYNAAALTALVDRWRPETHTFHLPCGELTVTLEDVAMILGLPIRGQAVTGDTASGNWRERVEEYLGLEPPVAPDGQRQTKTSGVPLSWLRANFGQCPAEADEATVQRYCRAYVLYIFGSILFPDSGGDMASWMWLPLLADWDEAGTFSWGSAALAWLYRQLCDACRRQGGDANLAGCVWLLQVWMWMMLPVGRPMWRTHQAWPHQDADRRPTVAHLWESVPSPVVGRRNLAYYHYTNEMDYLQPEHVVWMPYQAQEVLELELNPMCHIEDALKTLRCPLICFYAVEFQMCHRVMRQFGRLQTIPHRFSTSIDLHKVDRRKNKKVTDWAYYHQDHITQWEKFEENGVPDQGQHNGTEFDLYLAWLHRTYRLVLRPAWTLADIADDPEDVEEQNEYDTRTRLGTTVETGPVRDRVARELLRTVNDAGVALGTAPGSEGEGGTLRXNALQRLRQRCRKLAARLGCXGDEEGEVGDEEGEQDKEAEEGDEEEEGDEDREEEADELGPSQLEDAPESSQPDISQPGPSRPRRRRAPSQDWRYTPDVPRPRTRAPVHLALRSQPNHPEGLLGWATAETAKSNLSARWAGAEFPTVSAIMAGAEVPARKPSSRLAGLGLGGCGQVPPQRQVGWR

SEQ ID NO: 171649 - protein, 94 aa, Oryza sativa
  unsure (1)..(94): unsure at all Xaa locations
  Clone ID: PAT_MRT4530_69861C.1.pep
LXARRETVHVGGKHLLLLLLLAVSXHXVSHTSSXSSAQFRLSLSLSLSLSLSLSLSLSLSLVKREVRTGGREETELNWIVSGWRRGPRXXXQRP

SEQ ID NO: 171650 - protein, 648 aa, Oryza sativa
  Clone ID: PAT_MRT4530_69862C.1.pep
MMDRLVQLHYGGCVVDESTHGSQFEGMTVRQLVFFAKPTFEELMSRIKHELDWNDESVGMQGRYDVGGGVMSHKFMLDLNGEIEWQTYIDIVLGSHFKSLEVFAWKKDGRIGKKELIESPISCHELSERCSRKEELIEEDVEGGEGVNDMADVEVREENDPVREEVHAEENVPLREEVHAEDNVPLREEVNVEENVPVREEGDVEDGREVGDDVELPEEEANAKNVSMGLRELARLKFYTREECEEAMIRSGLNPGWLEYDTEDELDESASDSDDDRPVRKMSEHERTVFAKLVGRNPEITQFEDLTRSGLAIADGDPQYDGAFEPMCDEPRKGLEFRSMDDLKIWLQSYSIRVHRPYHVKESNASVKYLAWLHRTYRLVLRPAWTLADIADDPEDVEEQNEYDTRTRLGTTVETGPVRDRVARELLQTVNDAGVALGTAPGSEGEGGTLRNALQRLRQRCRKLAARLGCRSTDVVEHAHAHQEGDEEGEVGDEEGEQDKEAEEGDEEEEGDEDREEEADELGPSQLEDAPESSQPDISQPGPSRPRRRRAPSQDWRYTPDVPRPRTRAPVHLALRSQPSHPEGLLGWATAETAKSHLSARWAGAEFPTVSAIMAGAEVPARKPSIRLAGLGLGGCGQVPPQRQVGWR

SEQ ID NO: 171651 - protein, 614 aa, Oryza sativa
  Clone ID: PAT_MRT4530_69863C.1.pep
MGLALTLCHRGGQADPLADVAATSAPTASALRCPTSAPTYFEELMSRIKHELDWNDESVGMQGRYDVGGGVMSHKFMLDLNGEIEWQTYIDIVLGSHFKSLEVFAWKKDGRIGKKELIELNESPLIESPISCHELSERCSRKEELIEEDVEGGEGVNDMADVEVREENDPVREEVHAEENVPLREEVHAEDNVPLREEVNVEENVPVKKEGDVEDGREVGDDVELPEEEANAKNVSMGLRELARLKFYTREECEEAMIRSGLNPGWLEYDTKDELDESASDSDDDRPVRKMSEHERTVFAKLVGRNPEITQFEDLTRSGLAIADGDPQYDGAFEPMCDEPRKGLEFRSMDDLKIWLQSYSIRVPRPYHVKESNASVKMEHFPGLEDFYEEKHRAPQIASGERLKTLRVKGHTAHILFDDRYVPYLRRAKLLAFVTMAQRPVPLYNAAALTALLDRWRPETHTFHLPCGELTVTLEDVAMILGLPIRGQARERVEEYLGLEPPVAPDGQRQTKTSGVPLSWLRANFGQCPAEADEATVQRYCRAYVLYIFGSILFPDSGGDMASWMWLPLLADWDEAGTFRWGSAALAWLYRQLCDACRRQGGDANLAGCVWLLQ

SEQ ID NO: 171652 - protein, 141 aa, Oryza sativa
  Clone ID: PAT_MRT4530_69864C.1.pep
YNSVPRRRRLLIPRACRLLCPRSGSATALRRPPAPAPSSRAAGSSLARCQPPCPQRRGPPVRRSLVSRRRHPPMPPPSSARPLVSHRRLPTAGPRAPLSSTGRPPRSTWSRHAAPRRLPPRLTSMLPALAASAASELPAAA

SEQ ID NO: 171653 - protein, 188 aa, Oryza sativa
  Clone ID: PAT_MRT4530_69865C.1.pep
MSELAARLGCRSTDVVEHAHAHQEGDEEGEVGDEEGEQDKEAEEGDEEEEGDEDREEEADELGPSQLEDAPESSQPDISQPGPSRPRRRRAPSQDWRYTPDVPRPRTRAPVHLALRSQPSHPEGLLGWATAETAKSHLSARWAGAEFPTVSAIMAGAEVPARKPSSRLAGLGLGGCGQVPPQRQVGWR

SEQ ID NO: 171654 - protein, 132 aa, Oryza sativa
  Clone ID: PAT_MRT4530_69866C.1.pep
GPPGSEGELPEKPPLQRGLWGKRVGPLDGRGPPRPLCPLPPPNPPGFTPRGFKRNFFSLLGAPKVFVPSPFQQALRKIKGEKPFFGGPKPPFFLAINFGKENYKGGLALFFFKKKKKKKKKKKKKKKKKKTK

SEQ ID NO: 171655 - protein, 146 aa, Oryza sativa
  Clone ID: PAT_MRT4530_69867C.1.pep
QRQCRGPSPAIQKACWAGPRPKRPSPTSAPGGLALSVARSAPLWLALRSKPASHPEALLVWALGVAAKSHLSASPVGAEVAATSAGDRPGRHGGTMSAPVPLALTRPTSAPMCLALRRRPARRYRSSKPSSASSGSLTLSVSSMEN

SEQ ID NO: 171656 - protein, 82 aa, Oryza sativa
  unsure (1)..(82): unsure at all Xaa locations
  Clone ID: PAT_MRT4530_69868C.1.pep
SAPFWLALRSQPASHPEGLLGWTTAETAKSHLSASQPGAEFPTVSAIMAGAEVPARKPSRRLAGLGXGGCGQVQPQRQCGWH

SEQ ID NO: 171657 - protein, 81 aa, Oryza sativa
  Clone ID: PAT_MRT4530_69869C.1.pep
KSRFQRSYTLLADQSLVTQYAYRSLRQTPLHHQPLISLRAGMYQSVSSIPSKVLHSKQVLEWQFTHGRSVQPYSPIGTFFN

SEQ ID NO: 171658 - protein, 94 aa, Oryza sativa
  unsure (1)..(94): unsure at all Xaa locations
  Clone ID: PAT_MRT4530_6986C.1.pep
RXRRRLPSPATRSRXRRRRRGRLAGLEPSQVAAARPIDPEGDLGRRFRGPAVDHPRGPGKGGRDGAGRALRRLLSLPDSPRYERGLPVARWGRG

SEQ ID NO: 171659 - protein, 107 aa, Oryza sativa
  unsure (1)..(107): unsure at all Xaa locations
  Clone ID: PAT_MRT4530_69870C.1.pep
SGSPAPGIQGIRTASRTPAAPAPARRPAPRRRPPARRRPAARTAARRRPRGARPAXRSRRPRRRRPPPPTAPPAPRRTPRTPAPLPLPRRPRARTPATTRRRRPRPL

SEQ ID NO: 171660 - protein, 112 aa, Oryza sativa
  Clone ID: PAT_MRT4530_69871C.1.pep
MAFWSRRNLHHPHYPDRRSRLMRLSSGRLQRQFSPSLQDADAFSYLIFVPRLQLAKEQNKMSLLRSPEFCYDCCISAKTMCAAGPKPIVGVAAGVVATAAIGTKQRALVDLA

SEQ ID NO: 171661 - protein, 103 aa, Oryza sativa
  Clone ID: PAT_MRT4530_69872C.1.pep
MPPPRADAPLLGSHAPLPGGPAPPRRGLERRIAARGRRAVAWEPRAAVGSPRATTARPGAPHRRGLGVSRRHQGSPCHRLGAAPPPGAPTPPPIGPPHRPRRP

SEQ ID NO: 171662 - protein, 50 aa, Oryza sativa
  Clone ID: PAT_MRT4530_69873C.1.pep
AHAHDFIQHGTKVRPMMLVQNMKIKLIVLGIIIALILIIIQSVCHGFKRK

SEQ ID NO: 171663 - protein, 69 aa, Oryza sativa
  unsure (1)..(69): unsure at all Xaa locations
  Clone ID: PAT_MRT4530_69874C.1.pep
MPTLDARXRLPXAGLSPXTTSFPXSTPKPGSLSFALRPPSASLXSSASXPXAAAPXXVVVGSXNADIYV

SEQ ID NO: 171664 - protein, 149 aa, Oryza sativa
  unsure (1)..(149): unsure at all Xaa locations
  Clone ID: PAT_MRT4530_69875C.1.pep
QHPPPPSSPPPRTPAGKPPSPCRRQAIAAVVEANGNSEKKKKRKTDEGEGCKSCSCKKSKCLKLYCVCFASGSHCSESCGCDPCYNKSIHGVPRSTPALPLKAVQTLETGQDSVEQLIRSPMDFGRRKCTGRKSGXLKKYCDCYQGGAG

SEQ ID NO: 171665 - protein, 166 aa, Oryza sativa
  unsure (1)..(166): unsure at all Xaa locations
  Clone ID: PAT_MRT4530_69876C.1.pep
EDSARDNSSVEYARQPPPEICWDGMLSXVSNGSNCNPADFKAYCPSKVSXKVLNVIKXMPSIIELDILPRMDEWPKSFEINPPVYEDIGLFFFSTELDRNGKNQSXVMETXCNFVXRAYINNIKLLIYSSEVLPPDSXWIDGESYLWGVFVDPKKHKSMPFGSISA

SEQ ID NO: 171666 - protein, 411 aa, Oryza sativa
  Clone ID: PAT_MRT4530_69877C.1.pep
MSPQIPQPPPPPHRAPTTTTHPDALVIAPPPPPPPPPPPPAPAPALLAPAENASAEAAFAVPPAAIAAVVEANGNSEKKKKSVAFVFWSSISCFWRKTDEGEGCKSCSCKKSKCLKLYCVCFASGSHCSESCGCDPCYNKSIHGVPRSTPALPLKAVQTLETGQDSVEQLIRSPMDFGRRKCTCKKSGCLKKYCDCYQGGAGCSINCKCDDCKNPYGRKVGVILDGKNILAGPTPNERNGTEADSSDDEEDDYYMNRPLSPVSPSPVSRESSFQQETLVGVEVQTMNGHLYPKPLTQVRPESWQLTRRPTEEVRGEAWHYLRRPSEDGTSDVMEGHADPKFQRDNKQLENHVDRYSIPRCIEVMNAMADLSPIEKSLAPDVFLDPSNREIFLSLTVDIRTMWLKRKMKSLV

SEQ ID NO: 171667 - protein, 179 aa, Oryza sativa
  unsure (1)..(179): unsure at all Xaa locations
  Clone ID: PAT_MRT4530_69878C.1.pep
MAGDEEEGGGGAPVVGGEGGRAAELPHLRAHLTATTASGGDGGRGGATRPKDGRRRRRLNARGGGATVHGRGRERGQMEEDDEGKLYKALDXRDRTPNERNRLGKNPNSVLGIKSKRTRFGXNPQRFAPILGGKGRGEREEQNPSKTRRNRSRIEADLRGERRRQSGGSGGSAGGRGWI

SEQ ID NO: 171668 - protein, 138 aa, Oryza sativa
  Clone ID: PAT_MRT4530_69879C.1.pep
MIGPAPSPAAAAAAAVSPSCYASPAASSVRRRGVVGVVRCAPDSGRGGDGGGGGGKGKLRVGSPIVIVEAPVMLKTAASVPSLRHNAGQVKAGDVGRVMARKPKDVWAVRLAIGTYLLDGKYFKTLDVDDDDTASPDE

SEQ ID NO: 171669 - protein, 496 aa, Oryza sativa
  unsure (1)..(496): unsure at all Xaa locations
  Clone ID: PAT_MRT4530_6987C.1.pep
MDEVGGRWTFSRTNEGYTSCGPVVEMSWHRVGALLXGGSVLPACPGGSGRRXGIGSVLLSMARMGWKLCHVFRLYTVVMFNREKGKNVSGHASSNSSFQLNPPLASRELTRAHPWSIPSMLLSSQLPLVGSQDQNQYVFDRAFATQVNELPMPEEHVPFCHDCREQGHYALNCPWVYVKEAPSFGLAGQTSLNQPPRTKSSLQPSVQSEEPNEDNPLNPRKCFPPSLSHHVGSRTKQAKGKKSKNQKRKAPMRTEEEVRKMTITSTEWPPAGITIPRRQRGNTFRGARQLTQHLLSHGGRVSDSEGSDQVSSDVEDESPRHLGEEEMESKACTRCGEIGHVASRCLTLCPHCEEDHPPGECPTRKVTCFLCEGTNHVPKDCQLSVLLTKTAEIQRTTLRLSHQLVSSNSNLDDIIHSTNAPPAAPDSAINHSNNTFSTNHSLHRQPQQRIVIDRRSCVSPRPTPGRAKGNQPQEGDTKQKTVIRFNQQSEGSFPCE

SEQ ID NO: 171670 - protein, 117 aa, Oryza sativa
  Clone ID: PAT_MRT4530_69880C.1.pep
METDCMPNFPHLKELTLSNINIVDGERGGAARGGRSGVAGGECGRGSTRWEEQCCRWGERRGTTGSPSRQQHGPRTAARVVDGAEEALGLGGEVSPQEWLDRPVWAMEAPERLHVFC

SEQ ID NO: 171671 - protein, 68 aa, Oryza sativa
  Clone ID: PAT_MRT4530_69881C.1.pep
MGMGRTSSSNERSHVVQGTINSRRSDAPGPSADTCYASPGRGLTGRDGLHGHTGGAGGYGASLENASH

SEQ ID NO: 171672 - protein, 79 aa, Oryza sativa
  Clone ID: PAT_MRT4530_69882C.1.pep
AIKYLDITYTGIGTFWCPSHLVKSYDTTTVRLSRWGSGNYVKFIFLWMQMRVSPCMSQLCTMQLRTVNYRREELLKYRT

SEQ ID NO: 171673 - protein, 127 aa, Oryza sativa
  unsure (1)..(127): unsure at all Xaa locations
  Clone ID: PAT_MRT4530_69883C.1.pep
GLGGFPGIXKXXGXGPXDGSGXGVNXXKXXGXWXGXGXQRGKFXXXKIXWGXVXXISRGXGRLXTIKICRXVGMGDKGEAQKDPXVVKGELEXXIRCFHMGXFVSQPRPGRQANTCHLLFSCGPGEI

SEQ ID NO: 171674 - protein, 1076 aa, Oryza sativa
  unsure (1)..(1076): unsure at all Xaa locations
  Clone ID: PAT_MRT4530_69884C.1.pep
MSSPGRSGFSPGLAQLLSSRDEAKVSSQKSHLVSYHDEIGHQDIERTLEHIFDLPHKSVVRPPGPIDVGFVRSVLRNQARKFDLGGKDSRKYDDGVLIVDKGAGQTKVVLDDSSICGKFKSIWGPLLVESSASFSSARANTCVWNGKWMYEVTLETSGVQQLGWATLSCPFTDQKGVGDSDDSYAFDGRRVTKWNNDPEQYGQMWAVGDVIGCCINLDAGEISFYRNGNFLGVAFDGIRKVGPRKGYYPAISLSEGERCHLNFGSHPFRYPVDGFNPIKDFGILHQRDSSCIPDVFRLLEVQNLEKSESAYFEKLRRVKKFAPLRELFRPISEGICAEFFGAAEGSQGCSEYITWGSFITLLTDVFRVREPHDFLCLDQVLELFLQFPGCSSLLQELIVALSCMCKAAPLVLTECPFSGPYPFLALACHILRHKDVMHLWWKSEDFAFSFEGFLTMKIPNKQDLQYLVPSVWWPGSSEDEVSMTLSMTTLSDAIKXSFTFGTVNPKRRKMDHADCLIHFCSIWRRRQLGASEFFPSAFLEDCIAMVVKSERLIFSLXKDQVIVKTKKDSITGLQKEASAQGGKPVPPKEGFTESNTRWFILEGPLVFFPRISLNKSLTIFLKKKKKITVGLRFKENAKYIPSTSKGPCKSMHEKSAHIASECSAFYFVSQQSQSISLLEETDRQIREKSCMEQVRRLKEARNSYHEELVDCVRHCVWYRATVFSSWKQRGMYATCMWVVELLLVLSDSSSIFHYIPEFYVESLHGLASFVTLVVKHFDDPRIYKEFMFNVLLRETCIHEEELFLSFLNRLFNTLSWTMTESSMSIREMQEKRRVADLQQRKCSVIFDISCSLARILEFCAREIPHAFLMGPDMNLRRLAELVVFILNHIILAADAEFFDMTLRRPGQHQEKTNCTMILAPLVGIILNLMESSSTSGHRELNDVITVFTSMDCPATIHFGLQYLLSYNWSNVLRGDASLAKLAQLEEFSHYFMHITMSADGNEEQGFSTASNEEDNCCICYNSDSDTTFEPCHHRSCYGCITRHLLNSQRCFFCNAVVTSVTRIADSRIESRSPLAP

SEQ ID NO: 171675 - protein, 26 aa, Oryza sativa
  Clone ID: PAT_MRT4530_69885C.1.pep
HPDTLGLSGKNKREYEGMSRLKNVSI

SEQ ID NO: 171676 - protein, 69 aa, Oryza sativa
  Clone ID: PAT_MRT4530_69886C.1.pep
IFKGKAGNKRWFKGAKKFFKKKTSSLKVERLLKFLFKFFFNPQGIKIKSIEFVSQKNSVHACVWGGVFF

SEQ ID NO: 171677 - protein, 88 aa, Oryza sativa
  Clone ID: PAT_MRT4530_69887C.1.pep
MEIGVWLFACLFNLVMCCTDIGIICQSLATWSCLASHEVWLLKSSYPLPGPLSVFYEHKVNYICPQFLLVCEIRFPGKKNEEATSKIF

SEQ ID NO: 171678 - protein, 217 aa, Oryza sativa
  unsure (1)..(217): unsure at all Xaa locations
  Clone ID: PAT_MRT4530_69888C.1.pep
MKGGESVPSWVELLLSTQFFTTCSSHLISPRNECNFFCIDCQTPQASFCYYCRLSHHSSHHVIQIRRSSYHDVVKVSELEDILDISDVQTYVINSSRVVYLTERPQLRSCGVSNTKLSPSQTYKCEICSRTLLDDFRFCSLGCNFAAIKRDNEKNVAQNGIASNANEVKIGTNNGSTNAGSANEISSDANNYRNEIPSSTRVIRHRRKGIPRRXTFF

SEQ ID NO: 171679 - protein, 75 aa, Oryza sativa
  Clone ID: PAT_MRT4530_69889C.1.pep
FFFFFFFRAVTAKLLLPLNSTKQCHFIHLLLCFWHVMHWALHHITHSLFTMPSSHGRTFQQHTHTEHTHPNTGVP

SEQ ID NO: 171680 - protein, 58 aa, Oryza sativa
  Clone ID: PAT_MRT4530_6988C.1.pep
MEGEGWSTASGNHGRRRRKWWCSPAREEKHAPAAGLTGETTDGVAHKLANPAATTTLA

SEQ ID NO: 171681 - protein, 339 aa, Oryza sativa
  unsure (1)..(339): unsure at all Xaa locations
  Clone ID: PAT_MRT4530_69890C.1.pep
PEKTKKCTAAHTPTTPNHKSWRRVAPDWPLLNXNRNNRDRPKPYPYKQHKMPSAVANLXYLXDAATRGRNLERACAKSLGGFGKGMPRXRLQGEKRWKHRRRRPSRSQESRDWAFAWQQPLRGETARQXLRRGMTLERHRLSVRPRPGWVFTRXHHLPIYPWLPAATSSVXGATSTVTESNLARRRATGHRRRSPAVDPATGHFRRRHPRQMPPPHGTTPPPTSFLPDPAGTHKSGRFHRSKCRAXPLPLRGERSEAPPPPSLRSRSFADGHSGGGXQRRREGEVGDGSQVASRVARGGWRREGXRSSNLTEIHGWMSTQPNIYEKTLKKLYVNSNSTS

SEQ ID NO: 171682 - protein, 193 aa, Oryza sativa
  unsure (1)..(193): unsure at all Xaa locations
  Clone ID: PAT_MRT4530_69891C.1.pep
MARLGRSAWLLAAALLLYAAAAQPDCANATFQAGRTYRRCDTLPVLGASLHWTYHPANGTADVAFRAPQSSGGGWVAWGINTQGAGMVGSSXFIALQINATGAGAGGVSRRTTVLESLSPSLRNGTLRFNVPXRSAAEYSAGDVXTYATVALPGNSTTQNMVWPGXPVRGGAIAMHPTTGANLRSTKKHDFTS

SEQ ID NO: 171683 - protein, 1598 aa, Oryza sativa
  Clone ID: PAT_MRT4530_69892C.1.pep
MDRLVRLHYGGCVVDESTHGSQFEGMTVRQLVFFAKPTFEELMSRIKHELDWNDESVGMQGRYDVGGGVMSHKFMLDLNGEIEWQTYIDIVLGSHFKSLEVFAWKKDGRIGKKELIDLNESPLIESPISCHELSERCSRKEELIEEDVEGGEGVNDMADVEVREENDPVREEVHAEENVPLREEVHAEDNVPLREEVNVEENVPVREEGDVEDGREVGDDVELPEEEANAKNECEEAMIRTGLNPGWLEYDTEDELDESASDSDDDRSVRKMSEHERTVFAKLVGRNPEITQFEDLTRSGLAIADGDPQYDGAFEPMCDEPRKGLEFRSMDDLKIWLQSYSIRVHRPYHVKESNASVKYTVACLDRHCKWQINVRKSGGDRWRVTRVGEDHTCCSAEVTGKHLQLTSRFIGNRLQAFVRAEPTLSPAAIVEAVEQIWHYRPTYGKAWRAKQVAMKVIWGDWDEAKEPSMHFRVEAHPEKSRMVDGVQRRVFGRAYWIFGQSIEAFKHLRPVLAIDGTFLTGKYQGTLLTAIGVDAGLHLVPLAFALVEKENTSNWEWFINMLRNKLIGPNREVCIISDRHPGILNSIIHIMPHHLTIHHRWCMRHFCANFYTAGATTDQMKDLERICQINEKALFLDEIKRLMGVVGERPKKWLEDHMPLKVKWARAFDTNGRRHSIMTSNMAESFNNVLRGIRKLPVTAIVAYTFSKCNSWFVDRHKEATVDILCGKKWPTKVKDMLEEQQRRTLGQRAACFDFPSMKYEVSEQGGVTAAGVQWGGRHYVVVARDNTCSCQFPQLHHLPCSHMITVCMLRGLDVEVAPRMCYEASNKAVQDSYSPRFEPYLDPSQWPSYDGEFFVPDLSLKNNTRGRRRTRRMEHFPGLEDFYEEKHRAPQIASGERLKTLRVRGHTAHILFDDRYVPYLRRAKLLAFVTMAQRPVPLYNAAALTALVDRWRPETHTFHLPCGELTVTLEDVAMILGLPIRGQAVTGDTASGNWRERVEEYLGLEPPVAPDGQRQTKTSGVPLSWLRANFGQCPAEADEATVQRYCRAYVLYIFGSILFPDSGGDMASWMWLPLLADWDEAGTFSWGSAALAWLYRQLCDACRRQGGDANLAGCVWLLQVWMWMRLPVGRPMWRTHQAWPHQDADRRPTVAHLWESVPSPVVGRRNLAYYHYTNEMDYLQPEHVVWMPYQAQEVLELELNPMCHIEDALKTLRCPLICFYAVEFQMCHRVMRQFGRLQTIPHRFSTSIDLHKVDRRKNKKVTDWAYYHQDHITQWEKFEENGVPDQGQHNGTEFDLYLAWLHRTYRLVLRPAWTLADIADDPEDVEEQNEYDTRTRLGTTVETGPVRDRVARELLRTVNDAGVALGTAPGSEGEGGTLRNALQRLRQRCRKLAARLGCRSTDVVEHAHAHQEGDEEGEVGDEEGEQDKEAEEGDEEEEGDEDREEEADELGPSQLEDAPESSQPDILQPGPSRPRRRRAPSQDWRYTPDVPRPRTRVLLKFSRAGTFPQSAPFWLALRSQPASHPEGLLGWAKAETAKSHLSARLAGAEFPTVSAILASAEVPARKPSRRLASLGQGRNGQVPPQRQSQDQRHFGWR

SEQ ID NO: 171684 - protein, 1603 aa, Oryza sativa
  Clone ID: PAT_MRT4530_69893C.1.pep
MTVRQLVFFAKPTFEELMSRIKHELDWNDESVGMQGRYDVGGGVMSHKFMLDLNGEIEWQTYIDIVLGSHFKSLEVFAWKKDGRIGKKELIDLNESPLIESPISCHELSERCSRKEELIEEDVEGGEGVNDMADVEVREENDPVREEVHAEENVPLREEVHAEDNVPLREEVNVEENVPVREEGDVEDGREVGDDVELPEEEANAKNVSMGLRELARLKFYTREECEEAMIRSGLNPGWLEYDTEDELDESASDSDDDRPVRKMSEHERTVFAKLVGRNPEITQFEDLTRSGLAIADGDPQYDGAFEPMCDEPRKGLEFRSMDDLKIWLQSYSIRVHRPYHVKESNASVKYTVACLDRHCKWQINVRKSGGDRWRVTRVGEDHTCCSAEVTGKHLQLTSRFIGNRLQAFVRAEPTLSPAAIVEAVEQIWHYRPTYGKAWRAKQVAMKVIWGDWDEAYVRLPTLMRAIKAKNPTMHFRVEAHPEKSRMVDGVQRRVFGRAYWIFGQSIEAFKHLRPVLAIDGTFLTGKYQGTLLTAIGVDAGLHLVPLAFALVEKENTSNWEWFINMLRNKLIGPNREVCIISDRHPGILNSIIHIMPHHLTIHHRWCMRHFCANFYTAGATTDQMKDLERICQINEKALFLDEIKRLMGVVGERPKKWLEDHMPLKVKWARAFDTNGRRHSIMTSNMAESFNNVLRGIRKLPVTAIVAYTFSKCNSWFVDRHKEATVDILCGKKWPTKVKDMLEEQQRRTLGQRAACFDFPSMKYEVSEQGGVTAAGVQWGGRHYVVVARDNTCSCQFPQLHHLPCSHMITVCMLRGLDVEVAPRMCYEASNKAVQDSYSPRFEPYLDPSQWPSYDGEFFVPDLSLKNNTRGRRRTRRMEHFPGLEDFYEEKHRAPQIASGERLKTLRVRGHTAHILFDDRYVPYLRRAKLLAFVTMAQRPVPLYNAAALTALVDRWRPETHTFHLPCGELTVTLEDVAMILGLPIRGQAVTGDTASGNWRERVEEYLGLEPPVAPDGQRQTKTSGVPLSWLRANFGQCPAEADEATVQRYCRAYVLYIFGSILFPDSGGDMASWMWLPLLADWDEAGTFSWGSAALAWLYRQLCDACRRQGGDANLAGCVWLLQVWMWMRLPVGRPMWRTHQAWPHQDADRRPTVAHLWESVPSPVVGRRNLAYYHYTNEMDYLQPEHVVWMPYQAQEVLELELNPMCHIEDALKTLRCPLICFYAVEFQMCHRVMRQFGRLQTIPHRFSTSIDLHKVDRRKNKKVTDWAYYHQDHITQWEKFEENGVPDQGQHNGTEFDLYLAWLHRTYRLVLRPAWTLADIADDPEDVEEQNEYDTRTRLGTTVETGPVRDRVARELLRTVNDAGVALGTAPGSEGEGGTLRNALQRLRQRCRKLAARLGCRSTDVVEHAHAHQEGDEEGEVGDEEGEQDKEAEEGDEEEEGDEDREEEADELGPSQLEDAPESSQPDILQPGPSRPRRRRAPSQDWRYTPDVPRPRTRVLLKFSRAGTFPQSAPFWLALRSQPASHPEGLLGWAKAETAKSHLSARLAGAEFPTVSAILASAEVPARKPSRRLASLGQGRNGQVPPQRQSQDQRHFGWR

SEQ ID NO: 171685 - protein, 823 aa, Oryza sativa
  unsure (1)..(823): unsure at all Xaa locations
  Clone ID: PAT_MRT4530_69894C.1.pep
MSPAAASPDDRIRSYEDFARVHAYLLAASGIPPSLHQRLYRKLADEVFDGGEAFSVEPCEGGRQRRLVLAAEWTLGRESDVFVVDHAWSFRLSDALKQLREVRGLAERMAALMFVDLDERTELEGADEQDNGDGGSLXEFLGGSRERRESNGVEGKWLCNLVRTCGGWNSVGMPIGLALTSKMLKLCLAASLWTSLKMYRRCNHHNKVAVTPKFNTIHAHVPDVQIYKSPFPMKAGEWALSFCVVIPAADYHCSXAESIPLENIASLDLSDRCIHKLPVVFSPRKLSSLLSLNIRGNPLDQMSSDDLLKLISGFTQLQELEVDIPGSLGNSAISILECLPNLSLLNGINVASIIESGKHIIDSALKPRLPEWSPQESLPERVIGAMWLYLMTYRLADEEKIDETPVWYVMDELGSAMRHSDDANFRIAPFLFMPDGKLASAISYTILWPVHDVHTGEECTRDFLFGVGEDKQRSARLTAWFHTPENYFIQARNLVCKLVEFRKYKEQLQSSSICPSRKVTPVTKSIRPSDGHALRVFTDIPQVEEFLTRPEFVLTSDPKEADIIWAWGSPEWLQPTYNLETHLSPLIGDYCVRKRDGMDNLWIMKPWNMARTIDTTVTGDLSAIIRLMETGPKICQKYIECPALFQGRKFDLRYIVFVRSICPLEIFLSDVFWVRLXNNQYTLEKTSFFEYETHFTVMNYIGRMNHMNTPEFVKEFEKEHQVKWLEIHGRIRDMIRCVFESATAVHPEMQNPFSRAIYGVDVMLDNKFNPKILEVTYCPDCTRACKYDTQALVGSQGVIRGTEFFNTVFGCLFLDELKDVSPL

SEQ ID NO: 171686 - protein, 1800 aa, Oryza sativa
  unsure (1)..(1800): unsure at all Xaa locations
  Clone ID: PAT_MRT4530_69895C.1.pep
MPLEIEGQAMARSSVWKKKKRAKPMPDKGWKRKGKGSKKKKAKLHDVDDEVVVAADAAGSKYEEAATHPPGTETTVTMELDLIDHYLVGELVAYMTGALLCPILHLKSMNCPFVDPRHLAPVEKDVEFSANILKQHRLTNGPVELQMDPITTSDDHDHHDDDELIDMRGWINWRTPEEMRKRMMDRLVRLHYGGCVVDESTHGSQFEGMTVRQLVFFAKPTFEELMSRIKHELDWNDESVGMQGRYDVGGGVMSHKFMLDLNGEIEWQTYIDIVLGSHFKSLEVFAWKKDGRIGKKELIELNESPLIESPISCHELSERCSRKEELIEEDVEGGEGVNDMADVEVREENDPVREEVHAEENVPLREEVHAEDNVPLREEVNVEENVPVREEGDVEDGREVGDDVELPEEEANAKNVSMGLRELARLKFYTREECEEAMIRSGLNPGWLEYDTEDELDESASDSDDDRPVRKMSEHERTVFAKLVGRNPEITQFEDLTRSGLAIADGDPQYDGAFEPMCDEPRKGLEFRSMDDLKIWLQSYSIRVHRPYHVKESNASVKYTVACLDRHCKWQINARKSGGDRWRVTRVGEDHTCCSAEVTGKHLQLTSRFIGNRLQAFVRAEPTLSPTAIVEAVEQIWHYRPTYGKAWRAKQVAMKVIWGDWDEAYVRLPTLMRAIKAKNPTMHFRVEAHPEKSRMVDGVQRRVFGRAYWIFGQSIEAFKHLRPVLAIDGTFLTGKYQGTLLTAIGVDAGLHLVPLAFALVEKENTSNWEWFINMLRNKLIGPNREVCIISDRHPGILNSIIHIMPHHLTIHHRWCMRHFCANFYTAGATTDQMKDLERICQINEKALFLDEIKRLMGVVGERPKKWLEDHMPLKVKWARAFDTNGRRHSIMTSNMDESFNNVLRGIRKLPVTAIVAYTFSKCNSWFVDRHKEATVDILCGKKWPTKVKDILEEQQRRTLGQRAACFDFPSMKYEVSEQGGVTAAGVQWGGRHYVVVARDNTCSCQFPQLHHLPCSHMITVCKLRGLDVEVAPRMCYEASNKAVQDSYSPRFEPYLDPSQWPSYDGEFFVPDLSLKNNTRGRRRTRRFKNDMDKAYKGSANRRMEHFPGLEDFYEEKHRAPQIASGERLKTLRVRGHTAHILFDDRYVPYLRRAKLLAFVTMAQRPVPLYNAAALTALVDRWRPETHTFHLPCGELTVTLEDVAMILGLPIRGQAVTGDTASGNWRERVEEYLGLEPPVAPDGQRQTKTSGVPLSWLRANFGQCPAEADEAIVQRYCRAYVLYIFGSILFPDSGGNMASWMWLPLLADWDEAGTFSWGSAALAWLYRQLCDACRRQGGDANLAGCVWLLQVWMWMRLPVGRPMWRTHQAWPHQDADRRPTVAHLWESVPSPVVGRRNLAYYHYTNEMDYLQPEHVVWMPYQAQEVLELELNPMCHIEDALKTLRCPLICFYAVEFQMWHRVMRQFGRLQTIPHRFSTSIDLHKVDRRKNKKVTDWAYYHQDHITQWEKFEENGVPDQGQHNGTEFDLYLAWLHRTYRLVLRPAWTLADIADDPEDVEEQNEYDTRTRLGTTVETGPVRDRVARELLRTVNDAGVALGTAPGSEGEGGTLRNALQRLRQRCRKLAARLGCRSTDVVEHAHAHQEGDEEGEVGDEEGEQDKEAEEGDEEEEGDEDREEEADELGPSQLEDAPESSQPDISQPGPSRPRRRRAPSQDWRYTPDVPRPRTRXSQPSHPEGLLGWATAETAAKSHLSARWAGAECPTVSAIMAGAEVPARKPSSRLAGLGLGGCGQVPPQRQVCWR

SEQ ID NO: 171687 - protein, 75 aa, Oryza sativa
  Clone ID: PAT_MRT4530_69896C.1.pep
SAPVHLALRSQPSHPEGLLRCATALSARWAGAECPTVSAIMAGAEVQARKPSRSLAGLGLGGCGQVPPQRQSGWR

SEQ ID NO: 171688 - protein, 419 aa, Oryza sativa
  Clone ID: PAT_MRT4530_69897C.1.pep
MGANCCIAAKERPQPCVTPIEVSAFRNVRHSPSWSFRWDNRTHIEDIMEMPALFSNHSSGSIRPETKSGSIAPTDGFSNGGSPSDMFNKLKCHKSDRKRESSKIARSDLRAGRSTTSNSSPEAKLSRKSLDTVSVASDSKMSISVPSTPPAISRADPSSSSRGHSLPTDADSMRKARRSPGYQLYRQVSDSKIPSLRSLNEGASPEGRPSSSMLSVCSNDLSAVGSHGESSDGWSMRTFSEMVASSQRERWSVDSELLGSVSSKMTRSNASNNPTTHSPDQEVCKLCLKLLKERSTWNAQELAVVAVLLCGHVYHADCLDSLTAEADKYDPPCPVCTHGEKCTVKLFGKLESKTKNKIPKNVIVDVNLDGSSKHQKEKIPLEEELYSQARASMRELKSSRIGANDMTWLLNDLRIEGFS

SEQ ID NO: 171689 - protein, 69 aa, Oryza sativa
  Clone ID: PAT_MRT4530_69898C.1.pep
YSVYRVDSAFSHSTLRRSKPVRGPRKAYRRLCIEPYGAGLPQSATCHAPEDSSVDRCPRGRSQGDLDAI

SEQ ID NO: 171690 - protein, 150 aa, Oryza sativa
  unsure (1)..(150): unsure at all Xaa locations
  Clone ID: PAT_MRT4530_69899C.1.pep
DGGGEPCPGVGSGFCSLSHSRRRCWWCSASGSSGKVKRIMKTPYQLEVLKRTYXLGLTDKQLQMWFCHRRLKDRKPPPKRQQLEEEVHVPVMAPPPVLSPPLPHRELTMAPGGMYGEQLLPSSSRRGTGRASAILDMSDLQCLPLLTSHG

SEQ ID NO: 171691 - protein, 84 aa, Oryza sativa
  Clone ID: PAT_MRT4530_6989C.1.pep
MATEKKRTGDPCWIAPATVPQSARNRLRATSDGGRKADGGQQEELIEQCHCLPFSSLRVPLPSILLDTVESSTIVIEVNGYGGR

SEQ ID NO: 171692 - protein, 899 aa, Oryza sativa
  Clone ID: PAT_MRT4530_698C.1.pep
MPTKGQFSRERNVKATLGRDGRQRGNSQDQSVQVPKEKIAVVGGNIDGKFEDRIRVVKNEKFRRQREPRSADAGGSLKGSKPWPGRKATTVDELVKHMSNVPSYLQRKETSGHLQDKALNVGVLEWGLLARWSHQQKHEFSSSHGASPSNTSRSLIFSSPSQSSASPSSKSLESNQSPTLNDHQHCSMEFQQSDLEDKYHGKARYSPSPNSAVLNLLPVHGKHFPENTGKYGDLNLRNISPLSDPLLTATGSSMRHEMVDDEETTRNIEEAVHHCSRRLFTDDDNIGQSFFTSHNNDSACGDFQQSSGVTGEVFETLVSSAVMEMERNASLSPVGFSKDIGQHHEFPRIPYSCPLPIMDSSEELGTSRTGTQGDSVGAAVTIGENRNQKQISRGASERTPRISAKFSDMDASPHRHLVSGLNRVNRCSSLKDGPCPRQPEASTSVDKINGDKSSGNKGSRRSPLRRMLDPILKPRQSSTSGPIQPSFVPKCHLPGHIDKQSLSLGGSALQNVQRRSVDSVVNSNCRTETNTNQPPQVLNSERYLQQDIDSTTTRHALLQLAWKNGLPFFMLSCGSDILVATVRRKGISDNNDLESTYTLFGVEEPKKRGGAWIKAGNKNKKDQLVYNIVGEMRVSHRKSRCYQAEKNHLHREFVLVGSEQLPSSEESGDSHVSREFAAFISAVSQQEPETSRHSSSQHSSRSMSTPTDCSCPLGNFHPNTRDDSCASSSVLAVLPNGFHGTSTSGQPLPLIERWKSGGACDCGGWDEGCMLSVLSDDARENKGDKSTQANQTTDGSQRFDLFVQGRSREDKHAFSMVSFREGLYTVEFRSSIALLQAFAMCIVMLHGRRPTRTQAGVHASQEHASLADHKLNKIMAASQGRAQASYVPHRPPLSPVGRA

SEQ ID NO: 171693 - protein, 1184 aa, Oryza sativa
  Clone ID: PAT_MRT4530_69900C.1.pep
MNWIGIGQIWHYRPTYGKAWRAKQVAMKVIWGDWDEAYVRLPTLMRAIKAKNPTMHFRVEAHPEKSRMVDGVQRRVFGRAYWIFGQSIEAFKHLRPVLAIDGTFLTGKYQGTLLTAIGVDAGLHLVPLAFALVEKENTSNWEWFINMLRNKLIGPNREVCIISDRHPGILNSIIHIMPHHLTIHHRWCMRHFCANFYTAGATTDQMKDLERICQINEKALFLDEIKRLMGVVGERPKKWLEDHMPLKVKWARAFDTNGRRHSIMTSNMAESFNNVLRGIRKLPVTAIVAYTFSKCNSWFVDRHKEATVDILCGKKWPTKVKDMLEEQQRRTLGQRAACFDFPSMKYEVSEQGGVTAAGVQWGGRHYVVVARDNTCSCQFPQLHHLPCSHMITVCKLRGLDVEVAPRMCYEASNKAVQDSYSPRFEPYLDPSQWPSYDGEFFVPDLSLKNNTRGRRRTRRFKNDMDKAYKGSANRRMEHFPGLEDFYEEKHRAPQIASGERLKTLRVRGHTAHILFDDRYVPYLRRAKLLAFVTMAQRPVPLYNAAALTALVDRWRPETHTFHLPCGELTVTLEDVAMILGLPIRGQAVTGDTASGNWRERVEEYLGLEPPVAPDGQRQTKTSGVPLSWLRANFGQCPAEADEATVQRYCRAYVLYIFGSILFPDSGGDMASWMWLPLLADWDEAGTFSWGSAALAWLYRQLCDACRRQGGDANLAGCVWLLQVWMWMRLPVGRPMWRTHQAWPHQDADRRPTVAHLWESVPSPVVGRRNLAYYHYTNEMDYLQPEHVVWMPYQAQEVLELELNPMCHIEDALKTLRCPLICFYAVEFQMCHRVMRQFGRLQTIPHRFSTSIDLHKVDRRKNKKVTDWAYYHQDHITQWEKFEENGVPDQGQHNGTEFDLYLAWLHRTYRLVLRPAWTLADIADDPEDVEEQNEYDTRTRLGTTVETGPVRDRVARELLRTVNDAGVALGTAPGSEGEGGTLRNALQRLRQRCRKLAARLGCRSTDVVEHAHAHQEGDEEGEVGDEEGEQDKEAEEGDEEEEGDEDREEEADELGPSQLEDAPESSQPDISQPGPSRPRRRRAPSQDWRYTPDVPRPRTRVLLKFSRAHLALRSQPSHPEGLLGWATAETAKSHLSARWAGAEFPIVSAIMAGAEVPARKPSSRLAGLGLGGCGQVPPQRQVGWR

SEQ ID NO: 171694 - protein, 540 aa, Oryza sativa
  Clone ID: PAT_MRT4530_69901C.1.pep
MALTVGHSAPAHLALRWDLAATPKAQTSKPAGWLAGWDLSASHNGADRGTLSASPPGAEDLSASHNGANCGKLSASPPGAEVGLGRFEPSGWLAGWDLSAIHNGADCGKLSASPPGAEVGHLSAEAVGAETRIPLLHPPSAHRLPSPPPIVRGASPPIPATRCAAAPPLHLRATALALTFARPVAAPPPPRGRGAPPLSRERDLVFGASAIPSWRTLGFVEYIPSGKKQGGMVLVVPEGSYAVRLGNEASIRQRLAGAARGARYALTFSAARTCAQAERLNVSASGQWAVLPMQTMYSSNGWDSYAWTWDAAANVFDVVIHNPGVTEDPACGSLIDSVAIRTLNPPRRTNSVRPGVAENLVKNGDFEEGPYIIPGTRWGVLIPSMVVDEHSPLPGWMVESLKAVKYIDSDHFAVPRGRRAVELLAGRESAIAQVIRTVPGRQYALSFTVGDASNGCEGSLVVEAYAGRESTRVAHESAGRGGAAKRAVLPFRAAAARTRVVFFSSFYSTRSDDMSSLCGPVIDDVAVVSVRARRPAAKRG

SEQ ID NO: 171695 - protein, 73 aa, Oryza sativa
  unsure (1)..(73): unsure at all Xaa locations
  Clone ID: PAT_MRT4530_69902C.1.pep
PTRPKASYLVYVYVSWHNKVLLEFESXQKKKKKKKKKKNNQNKKIQTHKHKHATAYLFYRPTKIQFTAPPFTT

SEQ ID NO: 171696 - protein, 821 aa, Oryza sativa
  Clone ID: PAT_MRT4530_69903C.1.pep
MASKLPDLGGGGVEDGGGKKWPGFVQFFFVLSVVLCVLLYAPRFIVLTPTYGLDFFPQPPPNVTTSPARVVGDHNAGEVVVLDNQLRSPCSSLAGDTICCDRSDFNTDVCFMAGDVRTDPSSLSLLLFPKQPPAANATVEERIRPYTRKWEALIMSRVEEVRLRMAPPEEEPGHRCDVRHDAPLLVMTAGGYTGNLFHAFSDGFVPAWLTVQHLRRRVVLGVLSYNPWWAGTYGEIISGLSDYHVVDLLHDKRTHCFPGAIVGTRFHGILSVDPARLRDNKTIVDFHDLLAGVYETAGDTVVVDDVTQPAPRRPRLGIVSRRGTRVIENQAAVARLARSVGFDVDILETANGLPLPASYASVSACDVLVGVHGADLTKLLFLRPGAALVQIAPLGVAPIARGCYAEASARMGLHYEQYDAEGHESSLSRKYGLRDVVVSDPEAAKRDKGWGFVARVYLGGQNVTLDLSRFRHTLTRLHARALRAYYHYTNEMDYLQPEHVVWRPYEAQEVVELDINPMCHIEDTLQTLRCPLICFYAVEFQLCNRIMRQFGRLQTIPHRFSTSIDLHKVDRRKNKKVTDWTYYHQDHITQWEKFDENGVPDQGQHNRTKFDAYLAWLHRNYRLVLRPAWTLADIADDPEDVEEQNEYDTRTRLGTTVETGPVRDRVARELLRTVNDAGVALGTAPGSEGEGGTLRNALQRLRQRCRKLAARLGCRSTDVVEHAHAHQEGDEEGEVGDEEGEQDKEAEEGDEEEEGDEDREEEADELGPSQLEDAPESSQPDISQPGPSRPRRRRAPSQDWRYTPDVPRPRTRAPLWLALRS

SEQ ID NO: 171697 - protein, 49 aa, Oryza sativa
  Clone ID: PAT_MRT4530_69904C.1.pep
SSQSKRTQAHSQGIKEREREREREIYLKLNQLITKTELPLLTLTHQGTN

SEQ ID NO: 171698 - protein, 1708 aa, Oryza sativa
  unsure (1)..(1708): unsure at all Xaa locations
  Clone ID: PAT_MRT4530_69905C.1.pep
MTVRQLVFFAKPTFEELMSRIKHELDWNDESVGMQGRYDVGGGVMSHKFMLDLNGEIEWQTYIDIVLGSHFKSLEVFAWKKDGRIGKKELIDPNESPLIESPISCHELSERCSRKEELIEEDVEGGEGVNDMADVEVREENDPVREEVHAEENVPLREEVHAEDNVPLREEVNVEENVPVREEGDVEDGREVGDDVELPKEEANAKNVSMGLRELARLKFYTREECEEGMIRSGLNPGWLEYDTEDELDESASDSDDDRPVRKMSEHERTVFAKLVGRNPEITQFEDLTRSGLAIADGDPQYDGAFEPMCDEPRKGLEFRSMDDLKIWLQSYSIRVHRPYHVKESNASVKYTVACLDRHCKWQINARKSGGDRWRVTRVGEDHTCCSAEVTGKHLQLTSRFIGNRLQAFVRAEPTLSPAAIVEAVEQIWHYRPTYGKAWRAKQVAMKVIWGDWDEAYVRLPTLMRAIKAKNPTMHFRVEAHPEKSRMVDGVQRRVFGRAYWIFGQSIEAFKHLRPVLAIDGTFLTGKYQGTLLTAIGVDAGLHLVPLAFALVEKENTSNWEWFINMLRNKLIGPNREVCIISDRHPGILNSIIHIMPHHLTIHHRWCMRHFCANFYTAGATTDQMKDLERICQINEKALFLDEIKRLMGVVGERPKKWLEDHMPLKVKWARAFDTNGRRHSIMTSNMAESFNNVLRGIRKLPVTAIVAYTFSKCNSWFVDRHKEATVDILCGKKWPTKVKDMLEEQQRRTLGQRAACFDFPSMKYEVSEQGGVTAAGVQWGGRHYVVVARDNTCSCQFPQLHHLPCSHMITVCKLRGLDVEVAPRMCYEASNKAVQDSYSPRFEPYLDPSQWPSYDGELFVPDLSLKNNTRGRRRTRRFKNDMDKAYKSSANRRSQKPNNTNSEPVMQNRCSLCHELGHKKTRCPKRDKSKDRPKKRRRTGGGGEGSTQVGLDDIHLLSWMEHFPGLEDFYEEKHRAPQIASGERLKTLRVRGHTAHILFDDRYVPYLRRAKLLAFVTMAQRPVPLYNAAALTALVDRWRPETHTFHLPCGELTVTLEDVAMILGLPXRGQAVTGDTASGNWRERVEEYRXTASGVPLSWLRANFGQCPAEADEATVQRYCRAYVLYIFGSILFPDSGGDMASWMWLPLLADWDEAGTFSWGSAALAWLYRQLCDACRRQGGDANLAGCVWLLQVWMWMRLPVGRPMWRTHQAWPHQDADRRPTVAHLWESVPSPVVGRRNLAYYHYTNEMDYLQPEHVVWMPYQAQEVLELELNPMCHIEDALKTLRCPLICFYAVEFQMCHRVMRQFGRLQTIPHRFSTSIDLHKVDRRKNKKVTDWAYYHQDHITQWEKFEENGVPDQGQHNGTEFDLYLAWLHRTYRLVLRPAWTLADIADDPEDVEEHNEYDTRTRLGTTVETGPVCDRVARELLRTVNDAGVALGTAPGSEGEGGTLRNALQRLRQRCRKLAARLGCRSTDVVEHAHAHQEGDEEGEVGDEEGEQDKEAEEGDEEEEGDEDREEEADELGPSQLEDAPESSQPDISQPGPSRPRRRRAPSQDWRYTPDVPRPRTRAPVHLAXGPSPAIQKACWAGPRPKRPSPTSAPGWPQAIQKACWAGPRPKRPSPTSAPXWTGAEFPTPASHPEGLLGWAKAETAKSHLSARWTGAEFPTVSAILAGADVPARKPSRRLAGLGXGGCGQVPPQRQSGWR

SEQ ID NO: 171699 - protein, 1602 aa, Oryza sativa
  unsure (1)..(1602): unsure at all Xaa locations
  Clone ID: PAT_MRT4530_69906C.1.pep
MADVEVREENDPVREEVHAEENVPLREEVHAEDNVPLREEANVEENVPVREEGDVEDGREVGDDVELPEEEANAKNVSMGLRELARLKFYTREECEEAMIRSGLNPAWLEYDTEDELDESASDSDDDRPVRKMSEHERTVFAKLVGRNPEITQFEDLTRSGLAIADGDTQYDGAFEPMCDEPRKGLEFRSMDDLKIWLQSYSIRVHRPYHVKESNASVKYTVACLDRHCKWQINARKSGGDRWRVTRVGEDHTCCSAEVTGKHLQLTSRFIGNRLQAFVRAEPTLSPAAIVEAVEQIWHYRPTYGKAWRAKQVAMKVIWGDWDEAYVRLPTLMRAIKAKNPTMHFRIEAHPEKSRMVDGVQRRVFGRAYWIFGQSIEAFKHLRPVLAIDGTFLTGKYQGTLLTAIGVDAGLHLVPLAFALVEKENTSNWEWFINMLRNKLIGPNREVCIISDRHPGILNSIIHIMPHHLTIHHRWCMRHFCANFYTAGATTDQMKDLERICQINEKALFLDEIKRLMGVVGERPKKWLEDHMPLKVKWARAFDTNGRRHSIMTSNMAESFNNVLRGIRKLPVTAIVAYTFSKCNSWFVDRHKEATVDILCGKKWPTKVKDILEEQQRRTLGQRAACFDFPSMKYEVSEQGGVTAAGVQWGGRHYVVVARDNTCSCQFPQLHHLPCSHMITVCKLRGLDVEVAPRMCYEASNKAVQDSYSPRFEPYLDPSQWPSYDGEFFVPDLSLKNNTRGRRRTRRFKNDMDKAYKGSANRRMEHFPGLEDFYEEKHRAPQIASGEHLKTLRVRGHTAHILFDDRYVPYLRRAKLLAFVTMAQRPVPLYNAAALTALVDRWRPETHTFHLPCGELTVTLEDVAMILGLPIRGQAVTGDTASGNWRERVEEYLGLEPPVAPDGQRQTKTSGVPLSWLRANFGQCPAEADEATVQRYCRAXMRQFGRLQTIPHRFSTXVDRRKNKKVTDWAYYHQDHITQWEKFEENGVPDQGQHNRTEFDLYLAWLHRTYRLVLRPAWTLADIADDPEDVEEQNKYDTRTRLGTTVETGPVRDRVARELLRTVNDAGVALGTAPGSEGEGGTLRNALQRLRQRCRKLAARLGCRSTDVVEHAHAHQEGDEEGEVGDEEGEQDKEAEEGDEEEEGDEDREEEADELGPSQLEDAPESSQPDISQPGPSRPRRRRAPSQDWRYTPDVPRPRTRDKTLPEDREGSERVQRISKRYVLVEGTLYRRAANGILLKCIPQEQGVELLADIHEGECGAHSASRTLVGKAFRQGFYWPTALNDAVDLVRRCRACQFHAKQIHQPAQALQIIPLSWPFAVWGLDILGPFKRAPGGFEYLYVAIDKFTKWPEAYPVVKIDKHSALKFIKGITARFGVPNRIITDNGTQFTSELFGDYCEDMGIKLCFASPAHPRSNGQVERANAEILKGLKTKTFNILKKHGDSWIEELPAVLWANRTTPSRATGETPFFLVYCAEAVLPSELTLRSPRATMYCEADQDQLRRDDLDYLEERRRRAALRAARYQQSLRRYHQRHVRARSLCVDDLVLRRVQTRAGLSKLSPMWEGPYRVIGVPRPGSVRLATGDGTELPNPWNIEHLRRFYP

SEQ ID NO: 171700 - protein, 59 aa, Oryza sativa
  Clone ID: PAT_MRT4530_69907C.1.pep
KKKKKKKRKERKKKKKKKKKKKKKKKKKKKKKTKKKKKKKKKKKKTAKRATQNKKNRHN

SEQ ID NO: 171701 - protein, 120 aa, Oryza sativa
  unsure (1)..(120): unsure at all Xaa locations
  Clone ID: PAT_MRT4530_69908C.1.pep
MVYLRVYRCFLYTLRKFIAXTETESTDARSPTRTEPGXYCIVWGPMSPSSIWRPIDPRYKRDPREDLRHRISPPTQPPQLTKSEPTEAKSPGDLVEPTRLRSHPYQRIPIPSISGLRISP

SEQ ID NO: 171702 - protein, 229 aa, Oryza sativa
  unsure (1)..(229): unsure at all Xaa locations
  Clone ID: PAT_MRT4530_69909C.1.pep
MAATASSFLARRLLLTRRVLSSPLRPFSTTDSSSSSSSSSSSDDSRAGSDAGPDPEQQQPPPAGQDQQAAARPRAGDTRPLENGLDPGIYKAIMVGKVGQEPIQKRLRSGRTVVLFSLGSXTGGIRNNRRPLDREEPHQYAERCSVQWHRVCIYPERLGRPXSLALKHVKTGSVLYLEGNLETKVFSDPITGLVRRIREIAVRSNGRLLFLGNDCNAPKLGEAKGVGYF

SEQ ID NO: 171703 - protein, 158 aa, Oryza sativa
  unsure (1)..(158): unsure at all Xaa locations
  Clone ID: PAT_MRT4530_6990C.1.pep
EQLYSPKRGKTRPERKKTSPGISGSIDVAGKDYGXIRTDPRKRERGNWGKRERESRGMIPLSLMRAGTAGCGAIRGGGGARARARRRARREKENDRWVPPVSESGGRARLSAARARAGSRWAGGGKREREGGNGPSRPKKGGGGGKDFFXGFLFIKPF

SEQ ID NO: 171704 - protein, 1474 aa, Oryza sativa
  unsure (1)..(1474): unsure at all Xaa locations
  Clone ID: PAT_MRT4530_69910C.1.pep
MSDGKQGSEPPSTKQAPGQPSEVDTGNIIPVTLDKLTPEQRQELEQVMSNVKNKYLDSFNQTCSRAVIQKYKLKVVSTDEPETSSSKDGKAKGAKGDKGDGGDAGDKGEGPKEDETKEQKTLEFNNFQDRVDYAVHQALINQSGVLVNTLTNMIKSVVDGTIAEHQDKGPVFLPEGIFTPYRNLVTGNQQHASNVPPGHPTASASAPGPGASSSAQRQMVNLYLLTREQPRHAGQNINWLTQEQIAAMFGPHQPVIEPIQPTPIRQQMQGVPQQKPWADMIVDVMKEQLGFKPKDTGNLYWHPYPECFERVPLSGRYKVPDFSKFSGQDNVSTYEHASAVDALRVRLFPLSLSGSAFMWFSSLPYNSIHSWADLEKQFHSYFYSGNHEMKLSDLAAVRQRHDEIVQDYIQRFKDMRNRCYNLALTDSQLADLTFQGLIAPIKEKFSSQDFESLSHLAQKAEELGKRKYCKWHNFGSHATNDCKAFRHQIQLAIEGGKIKFDDSKKPMKVDGHPFPINMVHTYGRTADEGKHQSSQLNSARIINKYQRRHDNKQEKYFEENDGESEEKGPEDEEQGTFLGGTTRDQPLAEENKMESPNYYVEGVVEGSNFYTKDTVDDLDGKLGQDFMSADDLEEVDIGPRDRPRPTFISKNLSAEFRTKLIELLKKYGDCFAWEYYEMSGLSRSIVEPWLPIKPGYKPLQQPPRRCKADMYDAIKAEITRLYDVGFIQPCRYAEWVSNIVPVIKKNGKLRVCIDFRDLNKATPKDEYPMLIADQLVDAASEHSIISFMDGNAGYNQIFMAEEDIHKTAFRCPGAIGLNEWVVMTFGLKSAGVIYQWAMNYIFHDLIGLLVEVYIDDVVVKSKEVEDHIADLRKIFERNKKYGLKMNPTNCAFGVSAGQFLGFLVHERGIEVTQRSTNATKKIQPPEDKTQLQSLIRKLRHYLLSNECTIVCKADVIKYMLSAPVLKERVGKWIYALTEFDLRYESPKVVKGQAIADFIVEHRDDSIGSVEIGPWTLFFDGSVCTHGCGISLVIISPWGASFEFAYTIKTYATSNQAEYEAVFKGLQLLKEVEADAVEIMGGSLLVISQLAGEYGCKNDALMIYNEKCQELMNNFWLNVEANDLAQGTSGYKPMRKDIEVEVATIAADDWRYDVYQYLQNPSQSASRKLRYKALRYTLLDDELYYRTIDGVLLKCLSADQAKVVMGEVHEDCQKFRAIQRAPASAMNPIIKPWPFRGWGIDMIGQINPPSSKGHKFILVETDYFTKWVEAVPLKKVDSGDAIQFVKEYIIYRFGIPQTITTDQGSIFVSDEFVQFAYSMGIKLLNSSPYYAQANGQAEASNKSLIKLIKRKISDFPRQWHTRLDEALWSYRMACHGSIQVPPYKLVYGPEAVLPWKTTIGSRKIDLQDKLTADEYYNIMVDETEDLVQSRLRALEKVARDKEHVARHYNKKVVPKSFSEXGELVWKLILPIGTRD

SEQ ID NO: 171705 - protein, 351 aa, Oryza sativa
  unsure (1)..(351): unsure at all Xaa locations
  Clone ID: PAT_MRT4530_69911C.1.pep
MRSCASSLCGISRVAWRRHAVAGGALSQHHHHQQRHLVLRPPAPPPIGLALERFFSASSRRSAKRSAAAAKQSSQPPPPPSMDGGEPFYVVRKGDVIGIYKSLSDCQAQVSNSVCDPSVTVYKGYSLRKETEEYLAARGLRNPLYSINAADARDELFDDLVPCPFQQPDGTGTSTLKRPLVMETGPTXKIPKSPNKRHYLIVLFHEFLXFDGVSKRNPVKAGAGAVIRRLDGTVIVQLLEGMGHASXNAAEYCELILRLRYSSKKGFVYIRAQRDSNLVCKLVSDAXPVRHDTMPDLCKRVKEIKGRSHTFLNNQVLREFNTDADAQANLAVELPGEKLLKEFTLQAVPVT

SEQ ID NO: 171706 - protein, 127 aa, Oryza sativa
  unsure (1)..(127): unsure at all Xaa locations
  Clone ID: PAT_MRT4530_69912C.1.pep
GVRVTDKAYILSYDLWNMRIWHTFTYADCSHWNPLQIMENISTSXVNSKVLLGILLGNXDDPRYKRDPXEGCKVLNLIANTPTIVYEAGVLGTKSLGDLVEYLDYDLILVPTYPKTQIIRSMSITRR

SEQ ID NO: 171707 - protein, 78 aa, Oryza sativa
  Clone ID: PAT_MRT4530_69913C.1.pep
LLVIFYKLLHKYTLPIQISPYLQYSHKHPRKTHEYLHLYSPLTYIYYTCFTHTHSSAKTRIVLNLPILSKRKPSPCQN

SEQ ID NO: 171708 - protein, 65 aa, Oryza sativa
  unsure (1)..(65): unsure at all Xaa locations
  Clone ID: PAT_MRT4530_69914C.1.pep
PKKGAIPPKPVPTPKISQPFVPKPANLQPFLTPXSNHGPPHKKNPPPKPPFKKTPXPFPPPPPSP

SEQ ID NO: 171709 - protein, 432 aa, Oryza sativa
  Clone ID: PAT_MRT4530_69915C.1.pep
MAAYENDICGGGPLKSSVCENIFLQSELLRGGGYQREAEGTWVGDVSPQSSQIRWRRRRKAAAVQRWRLPAGGRGVVPYSCTAGDKPLPQQQWRPTKFGDQPPQPSLGWSPNLNLPYPLPPTQPTVVSLPAPRSGGPALPLLPHHHHVRSKVAFRFPNDQGFEGGTNGGVFVEQAHHPSASAVLGALERHTTLLLYSNRLVGSLPPSLGGLAALRMLHISDTSVMSSPSLVVLSRLANLTVFELASCNLNNTILRSLGRLTKERGGRGDWKDDRRHRRDQWLRQQCPRDAPSSPTAAFEMSEIIQARPGQAATRGADSCNGGAHRAPNSKRNYGEGAKVTMVPVAKAKEVTTMTLIGGDGVAWQAARKEGTMAGRLSEEEVMGQMWRGMVACPLVHEGGGWRWRKKPSSSSPHGGWWRLRPVTELELTHEGK

SEQ ID NO: 171710 - protein, 408 aa, Oryza sativa
  unsure (1)..(408): unsure at all Xaa locations
  Clone ID: PAT_MRT4530_69916C.1.pep
RAARRLGPLRRGYQKVQVLFVTDCFPXPNLFPCKNLVKHEGNAWLYSPDLKALREKLRLPVGSCELAVPLKAKVRLYSVDRRREAYATILHSASEYVCGAISAAQSIRQAGSTRDLVILVDDTISDHHRKGLEAAGWKVRVIPRIRNPKAERDAYNEWNYSKFRLWQLTDYDKIIFIDADLLILRNVDFLFAMPEITATGNNATLFNSGVMVIEPSNCTFQLLMDHINEITSYNGGDQGYLNEIFTWWHRIPKHMNFLKHFWEGDDDSAKAKKTELFGADPPILYVLHYLGMKPWLCFRDYDCNWNIPLMREFASDVAHARWWKVHDNMPEKLQSYCLLRSKLKAGLEWERRQAEKANLEDGHWRRNITDPRLTICYEKFCYWESMLLHWGEKNPTNNNPVPATISSS

SEQ ID NO: 171711 - protein, 110 aa, Oryza sativa
  unsure (1)..(110): unsure at all Xaa locations
  Clone ID: PAT_MRT4530_69917C.1.pep
GLVSTHGYXNMYTWSHCKLSHRSIQLLSAHRHPLFQGFYLSTGETCHLMQGCIGSVRSPVKGQVLHFAGPRDCISYIDVVQGYITSPSWITLDRLIYLPTYLSYILVNLD

SEQ ID NO: 171712 - protein, 465 aa, Oryza sativa
  Clone ID: PAT_MRT4530_69918C.1.pep
MEVATMLTLTLLAYSAAMLARLLVARSRRRRCYLLDYVCYKATDDRKLPTDLCGEIIQRNKLLGLEEYKFLLKVIVNSGIGEETYGPRNIIGGGDARPDRLAEGMEEMDETFHAVLDELFARSSAAGGGGVRPADVDLLVVNVSMFSPAPSLSARVVRRYNLREDVKVYNLTGMGCSATLIALDLVNNFLRTHANKVALVMTSESIAPNWYAGNKRSFMLGNCLFRSGGCAYFLTNDPRHRRHAKLRLRHLVRTHTGASDDAYSCALQMEDDAGRPGFHLGKDLPRAAVHAFVKNLRLLAPRVLPLPELLRLAFATFLSSGRRSGGKKTSPSQQPLTIRMKAGVDHFCVHTGGAAVIDGVGKGLTLTEHDLEPSRMTLHRFGNTSASSVWYVLGYMEAKRRLRPGDRVLMLTFGAGFKCNSCVWTVEKPVSDAGVWKDCIDHYPPKELANPFMEKYGFVKDMMNL

SEQ ID NO: 171713 - protein, 227 aa, Oryza sativa
  Clone ID: PAT_MRT4530_69919C.1.pep
MVSVGHRSHGEAAAGGVTAGGGRRERRAEQRGGGWKRSVGGAAGGATAGGGRRVKQRGGGRKRSIGGAAGGATAGGGRRAKQRGGGWSRRRSGNLVHHLLLLHLYRTPPHPLRHLLRIRQDFIPRPTSSSSGQRVVESGVDVSDGFSLNPPPSSATDKLGQRLVAIFSFPSFRRAGEESWRRLEREERRTAAGERSAARSASLSLPLSSATKRWGWKRWGPTIFLFD

SEQ ID NO: 171714 - protein, 240 aa, Oryza sativa
  unsure (1)..(240): unsure at all Xaa locations
  Clone ID: PAT_MRT4530_6991C.1.pep
LLFLQLQVPSNPHDLLQHALKQSTEVLSGVERLRHRHHCLAWELLLQVPANLHGKRRLPETTEPHDGEHLETNVGLIVVTRQPIRFHQIGQTLHLVADAQELARVFSAWPVDFVTHAPLADGEGTGVKVLDVDGEALPRANRDEPPPGEAERTGARRGEADAEQEEVDAVLGVVGELAHLLHPLPDEVDDGTLVRLGEHAEEGIHDGHIVPEVHDLTADAAEXPELVTHQLPNLPHNGFP

SEQ ID NO: 171715 - protein, 742 aa, Oryza sativa
  Clone ID: PAT_MRT4530_69920C.1.pep
MDSRAGGDVSPGPALGDNWRQRGPVTLASIAVYCSFHHHPPPPLRSPAPRRPRRPRRPPQQRTNIATSAITDLLRPRRPPRQLAQLPRHLRSHLPPRPPSPTPSSRQWQAMGTTSFVFFTIILVVRVLHHHPPLHRLVLRSGCIPTGRPSSRNNKFGPFGFGFIQRQKLGTWNSPFQGAVGDTMKKLSQNYAVGEPLDLARSPDLASPLFIGSTLVSLSPCKPDTSDLNGIYNNSVHDERGGEKKGWLMEGNKSVVAHAKAERGNDGGSWRRAVVVVRRVMVSGCWCRSSTYIISPTPSIFPFPSLGGVNERREISRLFVSCQDESRLNRGGAAISIWRAEQGTGGDPAFESNQGLWNSGYYSQLFGIGGVMVTVAILWLSTGYFGGIGAPFAPYFWPYLGQLPKKKERKRPVRVYMDGCFDLMHYGHANALRQAKLLGDQLVVGVVSDEEIVANKGPPVLSMEERLTLVSGLKWVDEVIPNAPYEITEEFMNTLFNKYNIDYIIHGDDPCLLPDGTDAYALAKKVGRYKQIKRTEGVSSTDIVVYCDLNVGTVFFFHPGRILLTFKQKEAGSMETTTDANQNTGATCDKVKSQLSNFLPTSRRIMQFSNGQAPSPGARVVYIDGAFDLFHAGHVEILRSARQLGDFLLVGVHDDQAIRDRRGYRPIMHLHERTLSVLACRYVDEVIIGAPWEVSRDMVGIDSYAVPKSMGIFQTITSTKPITTVSVATRIIDNHEAYKVHF

SEQ ID NO: 171716 - protein, 266 aa, Oryza sativa
  Clone ID: PAT_MRT4530_69921C.1.pep
MKKHPIPKITPSALIALHRVAIVPFVSLPLAIHPPPRKFCGMLMTTAISKEAIAQFSTDQYKNLNSPSPHTTVVQASVVIVLERASERWVQGHRSVGSGSVPRRLVLTNGVAAAVIITITDLFSQVGFLYLLTRDIRNVFINIAPRRLMLTNGVAAAAIITVTDLSSQTNRNAQIEDKYKYAVTGNGNQQRGRWRRTARKAAASAEGDDARAEGSSAHGREGRKEERGSSPASMAAGPEDEGGGDGLAMRRGGRAASTPKERAERG

SEQ ID NO: 171717 - protein, 53 aa, Oryza sativa
  unsure (1)..(53): unsure at all Xaa locations
  Clone ID: PAT_MRT4530_69922C.1.pep
YVFQSALYMXVVSLFICIYMXFGNVIYIFIRYGKLFLLPKKKKKKKKKKKKKK

SEQ ID NO: 171718 - protein, 483 aa, Oryza sativa
  unsure (1)..(483): unsure at all Xaa locations
  Clone ID: PAT_MRT4530_69923C.1.pep
RGGGLQERREISRLFVSCQDESRLNRGGAAISIWRAEQGTGGDPDIIPRXNTPACQMMMGLLAFESNQGLWNSGYYSQLFGIGGVMVTVAILWLSTGYFGGIGAPFAPYFWPYLGQLPKKKERKRPVRVYMDGCFDLMHYGHANALRQAKLLGDQLVVGVVSDEEIVANKGPPVLSMEERLTLVSGLKWVDEVIPNAPYEITEEFMNTLFNKYNIDYIIHGDDPCLLPDGTDAYALAKKVGRYKQIKRTEGVSSTDIVGRILLTFKQKEAGQKEXTTDANQNTGATXHIKMKAQLSXFLPIRRIMQFSPANGQLQAVCQKSRQIDGAFDLFHAGHVEILRSARQLGDFLLVGVHDDQAIRDRRGYRPIMHLHERTLSVLACRYVDEVIIGAPWEVSRDMITTFNISLVVHGTVTEGSSVVGIDPYAVPKSMGIFQTITSPKPITTVSVATRIIDNHEAYKKRNLKKKASEDRYYTQKKFVSGD

SEQ ID NO: 171719 - protein, 375 aa, Oryza sativa
  unsure (1)..(375): unsure at all Xaa locations
  Clone ID: PAT_MRT4530_69924C.1.pep
MHKRKKPLPPHQDAVPAETANKQPESFVPIEHNDQMPEENLEEDNIIATRKSKRQMTAKSFGDDYIVYLVNETSRTIEEAYSSPDADYWMEAVHNKMDFIMPNXTWEIVEHPXCKPVGCKWVFKKRFTPDGRVEKYKARLVAKGYIQKEGDDFFDTYSLVVYLTTIRVLLALVASHGLLIHEMDVKTIFLNGELEEEIYMDQPDGYVLEGKERMMCKLLKSSYDLNQEPKQWHEKFHRTLTSVGFVVNEANKCMYCHYGRGEGVILCLYVDDILIFGXNVIEEVKDXLSKSFEMKDLGVVDVILNIKLLTDDGGVTLVXSHYMDNVLSRFGCSDCKPAPTPYDPNVLLRQNKLLGNWEERPLTGLICLMYFYPQD

SEQ ID NO: 171720 - protein, 95 aa, Oryza sativa
  unsure (1)..(95): unsure at all Xaa locations
  Clone ID: PAT_MRT4530_69925C.1.pep
VEXLTSSXAEXVMISSQXSSTSWXXXHXXXRQRTXXXXTSVXGXPPTXPSRKXXYPXXXCVAXRRRRRXXGRTGRMXGDGHGXEXXSSPVSXRVG

SEQ ID NO: 171721 - protein, 155 aa, Oryza sativa
  Clone ID: PAT_MRT4530_69926C.1.pep
IIHYLFDHYSCMQHTRVILLLEASQLSLSGRGKMLTAGAQPGHRRSWPVCSPGTYAVIPLCVSPIALSTPCLVPCSTHPPAYTRHTHSLLGLGCFSSLTSRMGAGTPVTSDCWQTASSRRPGGELGEPSRRELRSTLPDASRLSALPWPAVLNYL

SEQ ID NO: 171722 - protein, 44 aa, Oryza sativa
  Clone ID: PAT_MRT4530_69927C.1.pep
SLMLGSNEDIYPSLRHGGGWGGHGHWGGGWGYGHHGPHGHHGWG

SEQ ID NO: 171723 - protein, 94 aa, Oryza sativa
  unsure (1)..(94): unsure at all Xaa locations
  Clone ID: PAT_MRT4530_69928C.1.pep
KLXPHMRAYLNSLPLYPSPFFFFFYKLTHATVLINNIHPKFSSYIHTLTPFIIIHLIYLLSYIPLFISLTIYSTKSITFLHTHIYTFPPPYLHN

SEQ ID NO: 171724 - protein, 88 aa, Oryza sativa
  Clone ID: PAT_MRT4530_69929C.1.pep
MGRHEARFLTASRLHLHSVFPPAVQSGSCSYHCHKPFRLTELLAHVMGSPEAFHYWKLQSTENPSPNRSQANGDQPNRPIIGIQTKPK

SEQ ID NO: 171725 - protein, 1289 aa, Oryza sativa
  unsure (1)..(1289): unsure at all Xaa locations
  Clone ID: PAT_MRT4530_6992C.1.pep
IQAPLRGQGDTHHSRVYPSTDDPHTMQIPELRHQTSTVARQVGGLGAQGSTTMSSSFVDNNVNTNLNQGFPASTMLVWTQVGEIVFPVYTTMPISAGSSMTGNENAVVTTQDDSMSKDPPAEAENGTSTTSELEKDSNAAKPCRSDKDHEPTRMTSEATRSXCPIHKTRKHTLQACWVFLNIRAEIRACKERGIQRISPTRDVYCPIHKTKNHDLSSCKVFLSAMKTPSPKVQQSHIPIRDKDKEQGATPISDRFVGVIDINPHEPSFLHLLEDYGSSTTSAPREVLAIDDVGTSARTNAEAENQVTTPAQHIRAVNAILRETPYDPVLNDDLARWIERLRESVANLGNAFEEAAAAARPEQPPTGDANGENPEQRESPHRATPPPRGTGDLRDHLNGCREARRTRDNENRSRHRVSSRRHNNEERPPSNHDHDDREQRAPGDTGRGRRHNDDDGGDRRRDNSGRRRQDSREPGRRPRTCAPEPSDPSSSSSSSXSSSDRHPRRTYDRRQPTAPSAGCRAFVRSLRDVXWPERFRPGAIEKYDGSTDPEEFLQVYSTVLYAAGADNKTLANYLPTALKGSARSWLMHXPPYSISSWADLWQQFVANFQGTYKRHAIEDDLHALTQNPGESLRDYVRRFNECRNTIPEITDASVIHAFKSGVRDRYTTQELATRRITTTRRLFEIVDRCAHADDALRRKNDKPKTGGDKKPAKDAPESSKKKNRKSGKSKAQAEVLAAEYANPPKRPDPQGSDAKKAWCPIHKMDRHSLEDCLVFKKSLEKHMAFEKGKRVRVVEKDAEAAAQELDSAYPDSDLHVSHIFXAPQRRYPIVVEPTIRNIKVARVLIDGGSSINLLFASALDAMRIPRSELTPTDQPFHGITPQSLSKPLGKITLPVTFGQANNFXTEQITFDVAEFDTAXNAIIGRTALAKFMAVSHYAYQVLKMPGPKGTITIQGNAKLLVQCDKRSLDMVEQTPSLPATTEPPKKVSKTNKTPKPDGVIKIVPLSSANPDKTELALITFLRDNADLFAWQPSDMPGVPREVIEHKLMVRPDAKPVKQKLRRFAPDRKXAIREELNKLLKAGFIREVLHPEWLANPVMVRKANGKWRMCVDFTDLNKACPKDHFPLPRIDQLVDSTAGCELLSFLDAYSGYHQISMAKEDEEKTAFITPFGVFCYVKMPFGLITAGNXTFQRTVQGALSDQLGNNVEAYVDDIVVKTKTNDSLIDDLRETFDNHRRYRLMLNPEKCTFGVPSGKLLGFLVSGRGIEANPEKIKAIENMNSLGSRLEFSCL

SEQ ID NO: 171726 - protein, 98 aa, Oryza sativa
  Clone ID: PAT_MRT4530_69930C.1.pep
MHTLAGVKPKSQLAKIKLGINGFGRLVRLDARVALQSDHHQLATCNHPSITTDYMTYMFKYGTVHCQWQHHEGMVKDFKTLLLPQKEVTAFRCMNPVA

SEQ ID NO: 171727 - protein, 161 aa, Oryza sativa
  unsure (1)..(161): unsure at all Xaa locations
  Clone ID: PAT_MRT4530_69931C.1.pep
PPPLPPLLPPALPRRRPPPPPGPXGVPVLGALPLVGLAPHADQASLVRKYGPVXVYLKMGACGVVVVSXAVRGEGVLVGRRRQPPAVPSSSRRRRPFQPTTQTREKGMREREGGGRSGPAADHSLDRRRPSXHLPAAAACPPPPLVXLSPLQTGEKKRKRE

SEQ ID NO: 171728 - protein, 118 aa, Oryza sativa
  Clone ID: PAT_MRT4530_69932C.1.pep
GGSRNPLSKLDEAIEEEEDDIEEEESNAEKLGYPKAINKWLPNISKLSTSLNGVRLGDKIQCQLPAAPKIMDPVKFFEGNSNHSGSQVGNWRSANEQLPTSASFVKLADMGSETWALF

SEQ ID NO: 171729 - protein, 115 aa, Oryza sativa
  unsure (1)..(115): unsure at all Xaa locations
  Clone ID: PAT_MRT4530_69933C.1.pep
YNCVASLPKICNGVDIMFMQMIALCHASRYRVVFDNVSMVLRLLNIIIWGYMLRDNRVGPLMVTAQYGYSSTLVYSPKLIXYSSVFISGWTAMTGCRKKLGNQGWSLEIPGRHRG

SEQ ID NO: 171730 - protein, 120 aa, Oryza sativa
  unsure (1)..(120): unsure at all Xaa locations
  Clone ID: PAT_MRT4530_69934C.1.pep
PHGAVAAPPRRALRRLPLPPPPPLPPLLPPALPRRRPPPPPGPPGVPVLGALPLVGLAPHADLASLARKYGPVMXYLKMGACGVVVVSLAGCCAAWRRRQPPAAPSSSRRRRPFQPTTQT

SEQ ID NO: 171731 - protein, 106 aa, Oryza sativa
  Clone ID: PAT_MRT4530_69935C.1.pep
CSKQLHSLLILSIIISKTQYKYHCSSSFRQSFHVIHEPQYTYAPHDHIYFVYTRILSTLCAKEPLDSDWVVCGGKVMHNIRKQLGKSFLLLQAQQYDGTILECDEA

SEQ ID NO: 171732 - protein, 1080 aa, Oryza sativa
  Clone ID: PAT_MRT4530_69936C.1.pep
MAAGAPPPESGPPPPGPPGAMRVARRLAVEVVDARDLVPKDGLGTSSAFAVVDFDGQRKRTRTVPRDLSPQWHERLEFAVHDPAAMHAEALDVSLYHDRRFNPSGGGGGGGGKNHFLGRVRIYGSQFSRRGEEGIVYFPLEKRSLLSWIRGEVGLKIYYYDEAPPPPEDRPPEGGGGDNAPPPEVPPEAPRDLPDIPAPTEAAVEVQQPPVHPPVIIVEEAPPPMHHPMMPPMHGPHGPMMPPAVHGPHGPMAPPMHQHQHPQPQPEPEPEPEPDGGEAGYPPEVRKTRMATERVRIARHLSGGLGPEYYATSPRVISGRFVSTGDAVEPVQSSYDLVEPMRYLFVRVVKVRGIRACEGPYVKIQAGPHTLRSRPGRDVSGTGNPEWNQVFAINHAKPEPTLEISVWDGGAPSPIEAFLGGVCFDLSDVPVRDQPDGPLAPQWYRLEGGEPGMVTGDIMVAVWIGTQADEAFPEAWNTDAPYAAYTRSKVYQSPKLWYLRASVIEAQDLRVPAPPPGLPFDVRVKIQVGFQSARTRRSVASRSSGSAFAWEEDLMFVVSEPLDESLVVLVEDRSMIKEPALLGHATIPVNSVEQRLHERQLVASRWFSLEGGTSDIGIGPGGGPPGFYSGRLHLRLCLEGGYHVLDEAAHVCSDYRPTAKQLWRPPVGVLELGIIGACGLLPMKTKGGAKGSTDAYCVAKYGKKWVRTRTVTDSLNPRWNEQYTWQVYDPCTVLTVAVFDNWRMFAFAGAGDEQRQDYRIGKVRVRVSTLESNRAYTASYPLLVLLRSGLKKMGEVQLAVRFTSPAHLPDTWATYTSPLLPRMHYLRPIGVAQQEALRAAAVRVVAAWLERSEPPLGREVVRHMLDVDAHTWSVRRAKANWFRIMGVLAWAVGLARWLDSVQRWRSPPTTVLVHVLYLVLVWYPELAVPTASLYVFLIGVWYYRFRPRGPAGMDARLSQADTVEADDLEEEFDAVPPPEVLRARYERLRTLAGRVQRVMGDVAAQGERVQALVSWRDPRASRIFVGVCLAVAVALYAMPSKMVAVAGGFYYLRHPMFRDPMPPAAVNFFRRLPSLSDRML

SEQ ID NO: 171733 - protein, 838 aa, Oryza sativa
  unsure (1)..(838): unsure at all Xaa locations
  Clone ID: PAT_MRT4530_69937C.1.pep
MAPPPPSPPPPSPPPAPAPPSSRWDTPVPQWVILWRVPRVYPADVPSKGSEFSLALAAPPRISSLSLAAPPHLSSAYLTAAPPQISAHGRFLSGDLGPFAPFVLAADASGVILVHAYSARVLFDHSGSGSNSGSGSGSGGPFVAGDKGGSRIGPCLYVIDTFSAAADFLPDRNTNPGLTNFALVVHNHEGVVARSYSVMELVLEADSNKAQLWEFSSASGVCAEGEEELSMTLLPDGLHAEEVETLSSVCVSEGKITYVAVSGHPGGLPSEGNVLVWICTVTPMSVIWDTICHALGLQRGAPPVISVLDRQDASVLYFFMQQHLVGFHLTRRLCTSVILCNCNCNRTREEDKEQHIVYAGITTAAEAALELFEARMDSIQDGPPAHVVVPPVHVVTRCAPSPFGTNADAMECGSTCTLLRNAHRGSWQCIKVRNPFHNIVSYDDRVVLAEKSRWMKLTWAILGGVQMPAFMGCESVEIEVGFSTAPAENYGGGGGGLQASVEQATSEAWNLRASVIEAHDLRVPAPSPGLPFDVRVKIKIGFQSARTQRSVASTSSGSAFAWEWEEDLMFVVSEPLDESLIVLVKDRTMIKEPARRGARPTSALLPAKEAAHVCSEYRPTAKQQWKPPVGVLELGIIGACGLLSTKTKGGAKYSTDAYCVAKYGKKWVRKRTVTDSPTXLNPRWNEQCTWQVYDPCTVLTVXVFADDGDERQDYRIRKMHYLRPIGVAQQETLRAATVRLVAARLERSETPLGREVVRHMLDVDAHTWSVRRAKGNWFRILGVLTWAVGLARWRSSSTTVLVHVLYQSTSSSSALAAAKKLLSGRVSIEELCGGDDEE

SEQ ID NO: 171734 - protein, 41 aa, Oryza sativa
  Clone ID: PAT_MRT4530_69938C.1.pep
QNEQVFKFISQRDDNLHVHLTHYFTLLKLLLYYSRVRLKLI

SEQ ID NO: 171735 - protein, 230 aa, Oryza sativa
  Clone ID: PAT_MRT4530_69939C.1.pep
MTAADRSSAATAERESDVASSNPARRKGGERRKWTEEGYKACTHCMDETESAYLKHYRKVVYMGHRQFLAANHPVRKKGKHYEHTMDHRTKPKHCSGKTVFAYVAGEVKRQLKPQSPEKKIPIDPSVKNFFKGMSTTNKEALKISDYDRTLQKAYHKKSKPVPQLGEQPNQEVEPLVTDEDFGITDFISDTGLTVDQLIGAAPIPKAEVAYNFELGKLLVTPEELQSLPT

SEQ ID NO: 171736 - protein, 322 aa, Oryza sativa
  unsure (1)..(322): unsure at all Xaa locations
  Clone ID: PAT_MRT4530_6993C.1.pep
MESAVASYAEGVGKAIVGKIGQLVSDEFRLLSGVRGEIVYLRDDVAIMNALLRMLSEADEGTVVHFVREWMKQVRELAYDAEDCIDLFLLRISFAPPRAGALGLAWRRLVTIGPRQRLAVDIQNLHARALAISERRVRYEVDGPGTAPPPCGSSLPPPRXTMSSAAHTLRLHPANEYPSKFLGIGDQVQRLSDLVKSNRLTSDNNEPDVSLKVFSIVGFGGLGKTTLAMEVCRNLEEEFPCQAMVSVSQAFDSRKDLSGLLKRMLQQIVRVRRDLQLQEEKPLANIDDGDADWLAMKLREHLADRRYGRTLALLICPATLVW

SEQ ID NO: 171737 - protein, 341 aa, Oryza sativa
  Clone ID: PAT_MRT4530_69940C.1.pep
MADRDEEQILYDTIAEGSSQYWNEEKGNEDPNQYLNEEGNVERDAEGNEEGNDEEEASGSHPSAGQKRARGQRSAAKKIEGRHIITEVDEDGRPSALAEAAKNFSFKGDLYKKYILKGQTPNFDTFPKLRDHWDEFVAYKTGQQGEAMMARNKENAAKKKYHHHLGLGGYSVAMPKWEEMEASLIERGIEPATAKWPDRSKFWYYAHGGTLNPVDGSLVFNDQIREAASRLTDAVVVSSQGTFRPDREKDELSLALQTPEHPGRTRGKGVIPWKIGFKEDIHTNGDSKDPMTRVYDTGFIDPRKINTEMIDKYEKDTEDNLVHLLTQQHFRTYILLPYNTE

SEQ ID NO: 171738 - protein, 1310 aa, Oryza sativa
  Clone ID: PAT_MRT4530_69941C.1.pep
MDRQWMYADRRSKEFIDGVHYFLRVAEANRQKGFICCPCNKCKNRKEYSASRTIHFHLFESGFMPSYNCWTSHGEQGVEMEEDEVEDDNIPDFAQYAGFEGNKTGEEERDADGCEQGHKKLDTTLEFLQWKAKNGVSDKAFGDLLKLVKNILPEVNKLPETTYEAKKIVCPLGLEVQKIHACPNDCILYRGEEYENLEACPICKALRYKIRRDDPGEVDGQLTKKRIPVKRKYIMMPIIIQGPKQPGNDIDVYLRPLVEDLKLLWKKEGVPVWDEDKQKEFNLRALLFVTINDWSHQLGLKIRGYIFPMADRDEEQILYDTIAERSSQYWNEEEGNEDPNQYLNEEGNVERDAEGSEEGNDEEEASGSHPSAGQKRALGQRGAAKKIEGRHIITEVDEDGRPSASAEAAKNFVRHSGWVVRDNVPVSTVYWHRTRARRDNDSFVPDSEKEMLWTTMLETFTLPAGTENIVKQWTLKKMAEQFQSFKGDLYKKYILKGLTPNFDVFPKLRDHWDEFVAYKTGRQGQAMMARNKENAAKKKYHHHLGSGGYSVAMPKWEEMEASLIERGIEPATTKWPDRSKFWYYAHGGTLNLVDGSLVFSDQIHEAASRLTDAVVASCQGTFRPDREKDELLLALQTPEHPGRTRGKCVIPWKIGFKEDIHTYRSRMRSKRDTEAKIADLEYRVSSYELSMQEEVARKVDERMAAHRSQDPQPYIHPAMVSPSGNRSSCVSTGQVGSQSMDAMQTQDETTCPVDEITQRTPCELHIPFKNLSIKVASGMAIPTDPSGTYHYRPILAGYSSVEVELVEAAYEDLELDYPGGDGETHLRDTSHAIILWRKQYIILPGRQAASRAPSPPAPPPPPAAPSPPAPLAPPPPPCSPAPPKTRSRQAPLLARTRATKKAKVDATKDKEPPYDCSQEELDAYVAGEVKRQLKPWSPEKKIPIDPSVKNFFKGMSTTNKEALQISDYDRTLQRAYHKKSKPVPQLGEQPNQEVEPLVTGEDFGITEFISDTGLTVDQLVGGAPIPKAEVAYKFELGKPLVKPKQLQSLPTQMYKFHEWYMEMSAKGREMFGARIRNPDFLQGEDVLWIHFKDLFDLYQLDALDVSLLSAWILMEIQRARRRRVYDTGFIDPRKINTEMIDKYEKDTEDNLVHLLTQQHFKTYILLPYNTEVTVYDSMNKEEKIFDKVFKLIDRAWDRFRQLVRGTWKEKLGRRFDFPCAKQDQGTNLCGYYVCEYAHCLSNQICTTRELDRIHMRDNLPHKDFITAVQEQLMGFINEEVLNLDGEFYYDGSTIHNVGPSSSDITPASKS

SEQ ID NO: 171739 - protein, 29 aa, Oryza sativa
  Clone ID: PAT_MRT4530_69942C.1.pep
ELVTSNFRFNPCVVTISPFLVFCPSYSEL

SEQ ID NO: 171740 - protein, 1122 aa, Oryza sativa
  Clone ID: PAT_MRT4530_69943C.1.pep
MDLLPVVIRGILPDNVRATITKLCAFMKAISQKVINPDILEALQNDVVQCLVSFELIFPPSFFNIMTHLLCHLVKEIGILGPVYLHNMFPFDRYMGVLKKYVRNRARPEASIAKGYGTEEVIEFCVEFIDDLRPIRVPESRHEGRLRGKGTLGRKAIMTVDNNLLCKARFTVLQQSSLVAPYIEEHLALVRARNIDMKSTNQNSVVRIDAMGHDGTTGTYYGTIEDIWELDDGPLKVPLFRCQWVRLTGGGVTIDDSGMTTVDLNKVKEGKKGKGPDEPKRHVVLPGKRKIVGVEDKTDEDYDQFDGQQPFIVTIDPSILLSNEDTPYSRSDHKEGTIVRRKWLIAILYDTIAEGSSQYCNEEEGNEDPNQYLNEEGNVERDAEGNEEGNEEEEASGSHLSAGQKRARGQRGAAKKIEGRHIITEVDEDSRPSAPAEAAKNFVRHSGWVVRDNVPVSTVYWCRTRARGDNDSFVPDSEKEMLWTTMLETFTLPAEQFQSFKGDLYKKYILKGLTPNFDVFPKLRDHWDEFVAYKTGQQGQAMMARKKENAAKKKYHHHLGSRMRSKRDTEAKIADLEYRVSSYELSMQEEVARKVDERMDTHRSQDPQPYIPPAMVASGMAIPTDPFRTYHCRPIPAGYSRVEVELVEAAYEDLELDYPGGDGETHLRDTTHAIILWRKRYIILPGRQAASRAPSPPAPPSPPAPSPPVPPPRPPAPSPPASQPPPPAPSPPAPPPPPPPPPPPCPPAPPKTRSRQALPPARTRATKKAKVDVTKNKEPPYDCSQEELDAYVAGEVKRQLKPRSPEKKIPIDPSVKNFCKGMSATNKEALQISDYDRTLQRAYHKKSKPVPQLGEQPNQEVEPLVTGEDFGITEFISDTGLTVDQLIRGAPIPKAEVAYKFELGKPLVKPEQLQSLPTQMYKFHERYMEMSAKGREMFGARIRNLDFLQGEDILWIHFKDLFDLYQLDALDVSLLSAWILMEIQRARRRRVYDTGFIDPRKINTEMIDKYEKDTEDNLVHLLMQQHFKTYILPPYNTEVTVYDSMNKEEKIFDKVFKLIDRAWDQFRQLVRGTWKEKLGRRFHFPCAKQDQGTNLCGYYVCEFAHCLSNQICTTRELDDFSN

SEQ ID NO: 171741 - protein, 1941 aa, Oryza sativa
  unsure (1)..(1941): unsure at all Xaa locations
  Clone ID: PAT_MRT4530_69944C.1.pep
MEEDDDTVAVDGGGRHRLRQRHCFRPCCRNICFRSMLKRRLAHGERGGRHGDVYDSEAVTTGTATSIFGSVAGYGSYRGRSDLMDRQWMYADWRYKEFIDGVHYFLRVAEANRHKGFICCPCNKCKNQKEYSASRTIHFHLFESGFMPSYNCWTSHGEQGVEMEEDEVEDDNISDFTQYAGFEGNQTGERKGMLMDAKEDCGSEKGAHKLDKMLEDHRTSLYPCCEQGHKKLDTTLEFLQWKAKNGISDKAFGDLLKLVKNILPEGNKLPETTYEAKKIVCPLRLEVQKIHACPNDCILYRDEEYENVEACPVCKALRYRIRRDDPGEVDGQLTKKRIPAKLRRLFRNKGNARMMRWHAEERQQDGMLRHPTDGSQWRNIDRKFKDFGKDARNIRFGLSTDGLNPFGEMSSGPKQPGNDIDVYLRPLVEDLKLLWKKEGVPVWDEDKQEEFNLRALLFVTINDWPALSNLSGQSNKGYKACTHCMDETESTYLKHCRKVVYMGHRRFLAANHPVWKKGKHFEHTADHRTKPKHRSGKTVFAMVKDLKVVFGKGPGSQPIESEDGHAAMWKKNSIFWELPYWEFLDVRHAIDVMHLTKNLCVNLLGFLGVYGKSKDTLEAHIGILDLVYLHNMFPFERYMGVLKKYVRNRARPEASIAMGYGTEKVIQFCVEFIEVLRPIGVPESRHKGRLRGKGTLGRKAIMTVDNNLFRKAYFTVLQQSSLVAPYIEEHLALVRARNIGKSDAWITRHHIDTFSAWLRHLMGNETINQQLAFLARGPSGSIATFQGYEINGYTFYTRAQDMKSTNQNNDVRIDAMGHDGTTSTXYGAIEDIWELDYGPLKXGMTMVDFNKVGYSDEPFVLANDVTQVFNVKDMSSKAKKGKGPDEPKRHVVLPGKRKIVGVEDKTDEDYDQFDGQPPFTVTIDPSILLSNEDTPYSRSDHKEGTIVRRKEDVVVVPQVEVMADRDEEQILYDTIAEGSSQYWNEEEGNEDPNQYLNEKGNVERDVEGNEEEEASGSHPSAGQKRARGQRGDAKKIEGRHIITEVDEDGRPSAPAEAAKNFVRHSGWVVRDNVPVSTVYWRRTRARRDNDSFVPESEKEMMWTTMLETFTLPAGMENIVKQWTLKKMAEQFQSFKGDFYKKYILKGLTPNFDVFPKLRDHWDEFVAYKTGQQGQAMMVRNKENTAKKKYHHHLGSSGYSVAMPKWEEMEARLIERGIEPATAKWPDRSKFWYYAHGGTLNPVDGSLVFSDQIREAASRLTDAVEASSQGTFRLDREKDELSRMWSKRDTETKIADLEFRVSSYELSMQEEVARKVDERMAAHRSQDPQRYIPPTMVSPSGNRSSCASTGQVGSQSMDAMQTQDETTCPVDEITQRTQCELHIPFKNLSIKVASGMVIPTDILGTYHCRPIPAGYSRVEVELVEAAYEDLELDYPGGDGEMHLRDTSHAIILWCKQYIILPRRQEASRAPSPPAPPSPPTPSPPVPPPRPPAPSPPPPPPAPCPPASPAPLPPPCPPAPPKTRSCQAPPPARTRATKKAKVDATKNKEPPYDCSQEELDTYVAGEVKRKFKPRSPEKKIPIDPSVKNFFKGMSTTNKEALKISDYDRTLQKAYHKKSKPVPQLGEQPNQEVEPLMTSEDFGITDFISDTGLTVDQLIGGAPIPKAEVAYKFELGKPLVTPEQLQSLPTQMYKFHERYMEMSAKGREMFGARIRNPDFLQREDVLWIHFKDVFDLYHLDALDVSLLSAWILMEIQRVRRRGVYDTGFIDPRKINTEMIDKYEKDTEDNLVHLLTQQQFKTYILLPYNTEFHWVMLFFDLDACKVTVYDSMNKEKKIFDKVFQLIDRAWDRFRQLVRGTWKEKLGWRFHFPCAKQDQGTDLCGYYVCEYAHCLSNQIYTTRELDHIYMRDNLPHKDFITVVQEQLMGFINEEVLNPDGEFYYDG

SEQ ID NO: 171742 - protein, 1552 aa, Oryza sativa
  unsure (1)..(1552): unsure at all Xaa locations
  Clone ID: PAT_MRT4530_69945C.1.pep
MYADRRSKEFIVGMHYFLRVAEANKHKGFICYPCNKCKNQKEYSAFRTIHFHLFKSELMPSDNCWTSHGEQGVEMKENEVEDDNNPDFAXYAGFEGNQTGEEDRDANDNDVADDLGQMLQDAKEDCESEKGPHKLDKMLKDHITSLYLGCEQGHKKLDTTVEFLQXKKKNGVSDKAFGDLLKLVKNILPEGNKLPETTYEAKKIVCPLGLEVQKIHACPNDCILYRGEEYENLEACPVCQALRYKIRQDDLGEVDGQLTKKRIPAKDGILRHPADGSQWRNIDRKFKDFGKDARNIRFGLSTDSMNPFGEMSSGHSTWPVTICIYNLPPWLCMKRKYIMMPIIIQSPKQPGNDIDVYLRPLVEDLKLLWKKEGVPVWDEDKQEEFNLRALLFVTINDWPALSNLSGQSNKRYNACTHCMDETEIRLVYMGHHRFLAANHPVRKKGKHFEHKADHRTKPKHRSGKTVFAMVKDLKVVFGKGPGSPPIESEDGVYGKSKDTLEARNDLKHMEQRGDLHPEPKEKGSHYLSPASYTLSKAEKESMFECLESIKMADRDEEQILYNTIAEGSSQYWNEKEGNEDPNQYLNEEGNVERDAEGNDEEEASGCHPSAGQKRARGQRGAAKNIEGRHIITEVDEDGRPSAPAEAVKNFVRHSGWVVRDNVPVSTVYWHRTRARRDNDSFVPDSEKEMLWTTMLETFTLPTEQFQSFKGDLYKKYILKGLTPNFDVFPKLRDHWDEFVAYKTGQQGQAMMAKNKENAAKKKYHHHLGSGGYSVAIPKWEEMEASLIERGIEPATAKWPDRSKFWYYTHGGTLNPVDGSLVFSDQIHKAVSRLTDAVVASSQGTFRLDREKDELSLALQTPEHPGRTRGKGVIPWKIGFKEDIHTYRSQMRSKGDTEAKIADLEYRVSSYELSMQEEVARKVDERMAAHRSQDPQPYIHPGMVSPSGNRSSCASMGQVGSQSMDIMQTQDETTCPVDEITQRTPCELHIPFKNLSIKVASGMAIPTDPSGTYHFRPIPAGYSRVEVELVEAVYEDLELDYPGGDGETHLRDTSHAIILWRKRYIILPRRQVASRAPSPPAPPSPPVPLPRPPAPSPPAPPPPPPAPSPPAPLAPPLLHLHRVYLHLPRQGLAKLHRLPAQGQRRSQEELDAYVAGEVKRQLKPRSPEKKIPIDPNVKNFFKGMSTTNKEALQISDYDRTLQRAYHKKSKPIPRLGEQPNQEVEPLVNGEDFGIMEFISDTSLTVDQLIRGAPILKAEVPYKFELGKPLVKPEQLQSLPTQMYKFHEWYMEMSAKGREMFEARIRNPDFLQGEDVLWIHFKDLFDLYQLDAQDVSLLSAWILMEIQRARRRRVYDTGFIDPQKINTEMIDKYEKDTEDNLVHLLAQQHFKTYILLPYNTEVTVYDSMNKEEKIFDKLFKLIDRAWDRFRQLVRGTWKEKLGRRFHFPCTKQDQGTNLCGYYVCEYAHCLSNQICTTRELDEEWHPALHWIACNGDNLCFPGDPATSQPALTLCSTDTHPKTFFAHPLMSRKQELRDNRPVNYTRWRSSADGGD

SEQ ID NO: 171743 - protein, 1758 aa, Oryza sativa
  unsure (1)..(1758): unsure at all Xaa locations
  Clone ID: PAT_MRT4530_69946C.1.pep
MEEDGVEDDNIPDFAQYAGFEGNQTGEEDRDTDDNDVADDLGQMLQDAKEDCESEKGAHKLDKMLEDHRTLLYPGCEQGHKKLDTTLEFLQWKAKNGVSDKAFGDLLKLVKNILLEGNKLPETTYEAKKIVCPLELEVQKIHACPNDCILYRGEEYEKLEACPVCKVLRYKIRRDDLAEVDGQLTKKRILAKVMWYFPIIPWLRRLFRNKGDARMMRWHTEERQQDGMLRHPADGSQWRNIDRKFKDFGKDAQNIRFGLSTDGMNPFGEMSIGHSTWPVTMCIYNLPPWLCMKKKYITMLIIIQGPKQPGNDIDVYLRPLVEDLKLLWKKEESAYLKHCRKVVYMGHRRFLAANHPVWKKGKHFEHKADHRTKAKRRSGKTVFAMVKDLKVVFGKGPGSQPIESEDGVYGKSKDTLEARNDLKHMEQRGDLHPEPKKKGSHYLSPASYTLSKAEKESMFECLESIKVLSGYSMNIKRIISTKEKKFTNLKSHDCHVLMTQLLPVIIRGILPDNVRATITKLCAFMNAISQKVIDSDRLEALQNDVVQCLVSFELIFPLSFFNIMTHLLCHLVKGIDILGPVYLHNMFPFERYMGVLKKYVRNRARPEASITKGYGTEEVIEFCVEFIEDLHPIGVPEPRHEGRLRGKGTLGRKAIMTVDNNLFRKAHFTVLQQSSLVAPYIEEHLALVRARNIGKSDAWITRHHIDTFPAWLRQHLMGNETINQQLAFLGYEINGYTFYTRAQDMKSTNQNSVVRIDAMGHDGTTGTYYGAIEDIWELDYGPLKVPLFRCQWVRLTGGGVTIGDSGMTTVDLNKVGYSDEAFVLANDVTHVFYVTDMSSKGKKGKGHDEPKRHVVLPGKRKIVGVEDKTDEDYDQFDGQPPFTVTIEPSILLSNEDTPYSRSDHKEGTIVRRKKDIVVVVPQAEVILYYTIAEGSSQYWNEEEGNEDPNQYLNDPGNVERDAEGNEEGNVERDAEGNDEGIEEEASGNHLSAAQKRARGQRGAAKEIEDRHIISEVDEDGRPSAPAEADKNFIRHSDWVVRDNVPVSKVYWRRTRARGDNDSFVPESEKEMLWTTMLETFTLPAGTENIVKQWTLKKMAEQFQSFKGDLYKKYILKGLTPNFNVFPKLRDHWDEFVAYKTGQQGQAMMVKNKENAAKKKYHHHLGSGGYSVAMPKWEEMEARLIERGIEPATAKWPDISKFWYYAHGRTLNPVDGSLVFSDQIREAARRLTDAVEASSQGTFRPDREKDELSLALQIPEHPGRTRGKGMIPWKIGFKEDIHTYRSRMRSKRDTEAKITDLEYRVSSYELSMQEEVARKVDERMAAHRSQDPQPYIPPAMVSPSGNRSSYTSTGQVGSQSMDAMQTQDETTCPVDEITQRTPCELHIPFKNLSIKVASEMAIPTDISGTYHCRPIPAGYSRVKVELVEAAYEDLELDYLGGSXDTSHAIILWRKRXRSRQAPPPARTRATKKAKVDATKNKEPLYDCSQEELDANVAGEVKRQLKPRSPEKKIPIDPSVKKFFKGMSTTNKEALKLSDYDRTLRKAYYKKSKPVPQLGEQPNQEVKPLVTGEEFGITDFISDTGLTVDQLIGDAPIPKAEVAYKFELGKPLVTPEQLQSLPTQMYKFHERYMEMSANGREMFGARIRNPNFLQGEYVLWIHFKDVFDLYHLDALDVSLLSSWILVTVYDSMNKEEKIFDKVFQLIDRAWDRFRQLVRGTWKEKLGRRFHFPCAKQDQGTNLCGYYICEYVHCLERADEA

SEQ ID NO: 171744 - protein, 72 aa, Oryza sativa
  Clone ID: PAT_MRT4530_69947C.1.pep
HQHLQCAFWQVEAHFEGRGVGNCSAEDGPETKKEHEKFNPVGGGPLKCHLGNYPQNVFKKSLSRGANTKGQG

SEQ ID NO: 171745 - protein, 188 aa, Oryza sativa
  unsure (1)..(188): unsure at all Xaa locations
  Clone ID: PAT_MRT4530_69948C.1.pep
MPKWEEMEASLLERGIEPSTAKWPPPMVSPSGNRSSCASTGQVVSHSMDAMQTHDDTTCPVDEITQRTPCELHIXHCRPIPAGYSRVEVELVEAVYEDLELDYPGGDGETHHLLRLHRLLLXPSPPAPPPPPPAPSPPAPPPPPPPHAPSPPAPPPPPPPPPPCPPAPPKTRSRQAPPRERHRGQSRP

SEQ ID NO: 171746 - protein, 139 aa, Oryza sativa
  Clone ID: PAT_MRT4530_69949C.1.pep
LVQVHGIINNQILHLDIHKLPQSIESSRPRFGAHGREKPSWTKVAMWLGVLRSPHRCCRWSVLRNTSPVTAPPVGHQADSRRPLVPPSTAATGRAPRRSLLRRLQVECTPTVEHGAASPEVAAAAACETRAHLGSIPRA

SEQ ID NO: 171747 - protein, 315 aa, Oryza sativa
  unsure (1)..(315): unsure at all Xaa locations
  Clone ID: PAT_MRT4530_6994C.1.pep
FPSFSDRPLSPRPYLNPPRASLARFRPLPHRLSAGIELATSLSLSAVAAELRSAAVVAPDSLPPRRRLLRHRRTAVDPVHPLAGSADRRNAVDPVDPSRAAAFLRSGCLGXAVAPPCLWPLSLGLPCLFPPSLPLSRPPLRRAYGRRRRPXGRGHRLPPAAPSGRLRAHRVAAAWGPAVSRPRPRVRLTRGAHGAGRCEPGCARSTVDPPRPYKDRSSGLCCKALPYFHMSSGANEGYTSCVSVVEMSWHRTGVLLLGAQSCLPVPGVPAVGGVGSMYTSDQSITYSNSCALGYGQAEQCTQVSGEITPRDSLPL

SEQ ID NO: 171748 - protein, 1352 aa, Oryza sativa
  unsure (1)..(1352): unsure at all Xaa locations
  Clone ID: PAT_MRT4530_69950C.1.pep
MSSGHSTWPVTMCIYNLHPWLCMKRKYIMMLIIIQGPKQPGNDINVYLRPLVEDLKLLWKKEGVPVWDEDKQEEFNLRSLLFVTINYWPALSNLSGQSNKGGKTVFAMVKDLKVVFGKGPGSQPIESEDGHAAMWKKNSIFWDLTYWEFLDVCHAIDVMLLTKNLCVNLLVFLGVYGKSKDTLEARNDLKHMEQCGDLHPEPKDKGSHYFSPASYTLSKAEKENNVRATITKLCAFMNAISQKVIDLDRLEALQNDVVQCLVSFELIFPPSFFNIMTHLLCHLVKEIGILRPVYLHNMFPFERYMGVLKKYVRNRARLEAIIAKGKSIMTVDNNLFRKAHFMVLQQSSLVAPYVEEHLALVRARNIDAIGHDGTTGMYYGAIEDIWELDYRPLKDMSSKGKKGKGPDEPKPHVVLPGKRKIVEVEDKTDEDYDQFDGQPPFTVTIDPSILLSNEDTPYSPSDHKEETIVRRNYVWSTVTANGIPCSDAAVISLSSSSPSTPPPHWEGSSQYWNEEEGNEDPNQYLNEEGNVESDAEGTEEGNKEAEASGSQSSAGQKRARGQRGAAKKIEGRHIITEVDEDDRPSAPAEAAKNFVRHSGWVVKDNVPVSKVYWRRTRARGDYDSFVPESEKDTMWITMLETFTLPAGTENIVKQWTLKKMVEQFQSFKGDLYKKYILKGLTPNFDVFPKLRDHWDEFVAYKTGQQGQAMMDRNKENAAKKYHHLLGSDGYSVTMLKWEEMEAGLIERGVEPATAKWLDRSKFWYYAHGGTLNPVDGSLTPEHPGRTRGKGVVPWKIGFKEDIHTYKSRMRSKRDTEAKIADLEYRVSSYELSMQEEVARKVDERMAAHRCHDAQPYIPPVMVSPSGNRSSCASTGQVGSQSMDAVQTQDETTCPIDEITQRTPCELHIPFKNLSIKVTSGMTIPTDPSGTYHCRLIPAGYSRVEVELVEAAYEELELDYPGGDXAPAPSPPQAPASTSPQAPLPCPPAPSKSRTHQAPPLARTRATKKAKVDAAKNKEPPYDCTQEELDAYVAAEVKRQLKPRSPEKKIPVDPSAKKFFRSMSAPVKEAIKLTDYERTLKKAYYGKYKQVPQLGEQPNQEVELLVIGQEIGIKEFISDTGLTRAQLIKGTPIPKAEVRHHYELGKPLVKPEQLQSLLTQMYKFHQWYMEMSASGREIIGARIKISDFLQGEDVLWINFKDIYELYQLDALDVSILSAWILMEIQRARRRGVFDTRFIDPRKVNIEMVTKYPQATEDNLVYLLKEQHFKTFILLPYNTALVFTVFRKKFVPIHIDVIHMRDNLTHKEFIAAVQEQLIGFINEQVLDPEGEFYYNGNTIDKSLASEITTTTSKS

SEQ ID NO: 171749 - protein, 450 aa, Oryza sativa
  Clone ID: PAT_MRT4530_69951C.1.pep
MRGQNLASCFNFRSSPFRLTVGERELKLEEDKNQLSKGLDPWTSNPTASASTLHYLLQEKERAQQAHEQLQIYQQQQGFGSFLQHRIRQPASRGPGGGGGGGDGGGSSGESTPVEALATAFGAGRIVRSAAGRKDRHSKVCTARGLRDRRVRLAAHTAIRFYDVQDRLGYDRPSKAVDWLMRNAKAAIDELPDRAEAPPPPAAASTEQPEATEQATSTSYGFGNTTGGTMTSAASAAAGSFLPHSLGADRVSDSVKSLFPSSSTASGAASAGHDEYRGSPPDLLSRTTSNQQPQELCLTLQSNQHQIFSHVSSNHHGMISSAGVPGWPDHSQRMQAWHAPENSTGDGRGGGNGDGYMFAMPSRQGLDQSQLFSHGEPLQSSGRGWASARAWLDPLAVAAIHHQPSTMAAGQVGFGHLVGGAGGGGGFMGFLAPAAQRLEGEEEHGSEVIR

SEQ ID NO: 171750 - protein, 124 aa, Oryza sativa
  unsure (1)..(124): unsure at all Xaa locations
  Clone ID: PAT_MRT4530_69952C.1.pep
HPAMVSPSDNRSSCASTGQVGSQSMDAMQTHDETTCPVDEITQRTPCELHIXHCRPIPAGYSRVEVELVEAAYEDLELDYPGEDGETHXSPPAPPSPPAPSPPVPPPRPPAPSPPAPLPPPAAP

SEQ ID NO: 171751 - protein, 76 aa, Oryza sativa
  Clone ID: PAT_MRT4530_69953C.1.pep
YIVHFHDQLNIDNKKFQSNKQKRKKKKLLYSQHSQFLCLKQLWVFSIAPEWNICNLSVHARNHSRLILHQNVENVR

SEQ ID NO: 171752 - protein, 499 aa, Oryza sativa
  Clone ID: PAT_MRT4530_69954C.1.pep
MEEAGDEEGEQGLRLGGVGDGADGEEEVARGVVAPQVLELSSSSSGEEGGSWEEEESQGSVEVTRGGGGDREARVSESRDSAEVNGGEAESQSLPGCPICMNAWTADGAHRVSCIPCGHVYGRSCLERWLLQCRKKPATCPQCGRRFKLNNIINLYAPEISVPNNDLEKQVLSLREKNESLEKQNQELVQEINEHKRQIILQQNFINESSLKRKNEFFLDGARVMGIDASSQIILTSGRAPGIGAEHVLTKAPGWSCSGDQNSPNHIYAGLQNGMLLTFDIRQTVAPLHSMMGLSTHPVHTIHSVVDGGGSRKVISASSIGPCIWDVDGSRNRPDLLNGMENHGVCISLACNPPSSDLLVASFRPKVELSDDGTSQAGKSQSPTPSASGKLGCHALIRRTSNTSFARDQICRGNVSGLRMSKSAIIPFTGRSNQQHLFAYGDESLRGVRTWRLPSLQTFADLRPHRQPILDLRFAESSSTGERYLGCLSEDRLQVFRVR

SEQ ID NO: 171753 - protein, 66 aa, Oryza sativa
  Clone ID: PAT_MRT4530_69955C.1.pep
NPMTLTHTLQVPNHKLKSLRRRLSEINHTNCNALTDTSPVRKPEPLAPSTNMTPPPHRQMPYQTLA

SEQ ID NO: 171754 - protein, 150 aa, Oryza sativa
  Clone ID: PAT_MRT4530_69956C.1.pep
PQILRTPVKDWQRGTSAKNVVCNGNLRSMKHFSPSMTTIETPDMSIAFKDKFKKISETLARNSLIENGITSTIGENITKLVFNGSTRMQTDGMDLQRGFQTERTSSFSFQPTIRRRWRRSISKLSAPGWRTTSPAPAGGVEHIRRRCHKK

SEQ ID NO: 171755 - protein, 104 aa, Oryza sativa
  Clone ID: PAT_MRT4530_69957C.1.pep
THLHDHHHKLITKLLCSILQVPGTDPRASPFSRRCRRRWRRSISKLSAPGWRTTSPAPAGGVEHIRRRCHRAAIPDASRDGVLAAAPPRCERRPPPPPRKPSPR

SEQ ID NO: 171756 - protein, 48 aa, Oryza sativa
  Clone ID: PAT_MRT4530_69958C.1.pep
YSTGGIVSDISIPTCVSNDPVYSRFLFSIIPFNFPVTPQFYNGYCFLV

SEQ ID NO: 171757 - protein, 149 aa, Oryza sativa
  Clone ID: PAT_MRT4530_69959C.1.pep
MDVLSSLVDWVAQEGWLQPLAFRQTQQRCSFFADNVVLFSRPTADDLSVITQVLDIFGHASGLVTNMQKSSITPIRCNEDELKVISNMLPCEVKDFPCSYLGLPLNIKKPSKAKLQAPVDKVADYLPMWKASLMNKAGRLILVRVVLSA

SEQ ID NO: 171758 - protein, 89 aa, Oryza sativa
  Clone ID: PAT_MRT4530_6995C.1.pep
MGDSSGAFLITQHQVVLKEHKGRSSYNAWKTNPDPWFTTCQKESLLPHFRRCCSTSISYLKRRTRRLNHTGEMIRLFTPSHASSYQTYL

SEQ ID NO: 171759 - protein, 59 aa, Oryza sativa
  Clone ID: PAT_MRT4530_69960C.1.pep
DHSCAHSSVLMEIVLGRLTTTATARYGVINVLIYRLSLSDQYKDKVRPYMVVLYIISSE

SEQ ID NO: 171760 - protein, 95 aa, Oryza sativa
  Clone ID: PAT_MRT4530_69961C.1.pep
GGETKRALLIPFIPHFGGIKRGHSVFFFPKNACFNEGSFGRSLFVQILEKNWLFYILGPVRLFFFWGGKTPCNLIGLTKAKRGFYRREPWGFLFS

SEQ ID NO: 171761 - protein, 86 aa, Oryza sativa
  Clone ID: PAT_MRT4530_69962C.1.pep
MVLSNDIDLLNPPAELEKHKHKKKRLVQSPNSFFMDVKCQGCFNITTVFSHSQTVVVCPGCQTVLCQPTGGKARLTEGCSFRRKGD

SEQ ID NO: 171762 - protein, 220 aa, Oryza sativa
  unsure (1)..(220): unsure at all Xaa locations
  Clone ID: PAT_MRT4530_69963C.1.pep
RIPNTHYIRAGRFLTDQTIPLLFISCCWWLIAFGLVISYPKSASLWSKSITAKFIFGFCTLIPFFIAILALRFNNYAFNQFQGAYLLLYVCLLVWCADSGAYFFGRAFGKRKLAAKVSPSKSWEGALGGLITSCVMALLFIKLTPNNIFGREFETLPFIIVSVATVAVSSLGDLAESMFKRQANIKDXNNLIPSPCRILDHIYSLTATIPFFATLFFFVL

SEQ ID NO: 171763 - protein, 57 aa, Oryza sativa
  Clone ID: PAT_MRT4530_69964C.1.pep
YYFINQNYIILLCFILQLNAIDSQFFIKKKKKKKKKKKKKKKKKKKKKKKKKKRGAV

SEQ ID NO: 171764 - protein, 387 aa, Oryza sativa
  Clone ID: PAT_MRT4530_69965C.1.pep
MAGGGGGEGKVACAAWIRRREEKEKATRVFAAYGRAGSPPAVEVLGFDSKECSLSEPLARAELGEEPGDAPRGITVHPSGDELVCATAKGCRLFKLIFEEFTVRLISRDAPPLESVGPQKCLAFSTDGSKFAIGGEDGHLRIFHWPSMNVLLDEPKAHKSFRDMDISLDSEFLVSTSTDGSARIWKIDEGVPLVNLTRSADEKIECCRFSRDGMKPFLFCTVAKGNKVVTVVWNISDWSRIGYKRLLGKPISTLSVSMDGKYLALGSHDGDFCAVDVKKMDVSHWSKKVHLGSPVSSIEFCPTERAVISTSHQWGAELTKLNVPADWKEWQVWLILLSLFLVSAILFYMFYERSDSFWNFPMGQHQPAKPWSVMKESPPVPEDQNPW

SEQ ID NO: 171765 - protein, 70 aa, Oryza sativa
  Clone ID: PAT_MRT4530_69966C.1.pep
MSTLLSLLSFILVMVVGVGEGRKLLSAKKMTMMVPDRTADVMAYWKTVHPNSPIPSAILNLLTQPSGGWE

SEQ ID NO: 171766 - protein, 211 aa, Oryza sativa
  Clone ID: PAT_MRT4530_69967C.1.pep
MAAAPSGTAAARHGRRRARHRRPPWPLPRAAPPPPATGSDGKGGGDEKGRMGSEEGRRKERRGGGVRSVKRKWNGSVKCLGSTSCNCSLVPEYDYIDYFLFIMVGGDQNRNNNGPSLNGIYQSLERNFSAGGNRKGKRSRVDKEDEEIEFEESEDGEEEVEFDDASSGAEDDNGHDVSIDGLNANNDDNGDELMGTSTRVEEDIEASGRSG

SEQ ID NO: 171767 - protein, 130 aa, Oryza sativa
  Clone ID: PAT_MRT4530_69968C.1.pep
LTSRTSPSDTAWSCSLRIPTQSSTYTKNVCKGHTISQTQHGVCPKGCYSQRITLCDHLCTRNLSLATLLREDKQRLQSKCAAQHCSFVHPNMFAATYGHLAHLPQHGSGVIAPFATNVQHLLPRQAGSKQ

SEQ ID NO: 171768 - protein, 652 aa, Oryza sativa
  unsure (1)..(652): unsure at all Xaa locations
  Clone ID: PAT_MRT4530_69969C.1.pep
LADRDEEQILYDTIVEGSSQYWNEEEGNEDPNQYLNEEGNMERDAEGNVERDAEGNEEEASGSHPSAGQKRARGQREAAKNFVRHSGWVVRDNVPVSKVYWHRTRARGDNDSFVPESKKEMLWTTMLETFTLPAGTENVVKPWTRKKMAKQFQSFKGDLYKKYILKGLTPNFDVFPKLRDHWDEFVAYKTGQQGQAMMVKNKENAAKKKYHHHLGSSVDGSLVFSDQIREAASRLMDAVEASSQGTFRPDREKDELSLALQTPEHPGRTRGKCMIPWKIGFKEDIHTYRSWMRSKRDTEAKIANLEYRVSSYELSMQEEVARKVDECMAAHRSQDPQPYIPPPMVSPSGNRSSCASTGQVASGMAIPTDILGTYHCRPILAGYSRVEVELVEAAYEDLELDYPGGDGEVKRQLKPRSPEKKIPIDPSMKKFFKGMFTTNKEALKLSDYDRTLRKAYYKKSKPVPQLGEQPNQEVKPLVTGEDFGITDFISDTGLTVVQLVGGAPIPKAEVAYKFELGKPLVRPEQLQSLPTQMYKFRERHMEMSAKGREMFGARIRNPDFLQGEDVLWIHFKDVFDLYHLDALDVSLLSTWILMXDSKGPTAGGLRYWVHRPSENQHRNDRQVRERHKGQSRPSPNAAAFQDVHTTAVQHRV

SEQ ID NO: 171769 - protein, 378 aa, Oryza sativa
  unsure (1)..(378): unsure at all Xaa locations
  Clone ID: PAT_MRT4530_6996C.1.pep
MSRVSTSWGFVYSRVNKPRGGGARTGSTGVGPTQQPHGPRWTGCTRXLTPAGAVGPTRQPHLRARAADGRAPRGSHSARPRTAKPAQPAGGGXPAPLWSPAAAIGTVAERXEREGGKEAAVHGSPXVDGDDEKGGRSEGRRRRGSGRRGRRRSGGRRPKRRGGRGRRGCGEAEGGGAEVGGGPGRRRRRTGARRRRRRERATARARFRRGGKAARGGNGRRRCREGLNRAGSREGGRGREETGAGGPAAINGAGEICGGXIRPFERERERENGGKRERGSRGVISLSLLHAETAGGGGIRGGSGARARTRRRERREEGDDRWAPPVSEGGGRARPSAARARGEAGWAAGRXEGDGTSRPKREREGKXLFRVFLFIKSF

SEQ ID NO: 171770 - protein, 300 aa, Oryza sativa
  Clone ID: PAT_MRT4530_69970C.1.pep
MVEIPAIDLRLAGGGGGAEETARLRDACARLGCFRVSGHGVPPGLQAEMKAAVRALFDLPDDAKRRNADIIPGSGYVPPGTANPLYEAFGLCDAAAPADVDAFCARLDAPPHVRETVKAYAERMHSLIVDVAGKVAASLGLHGASFQDWPCQFRMNRYNYTQDSVGSPGVQVHTDSGFLTVLQEDECVGGLEVLDPAAGEFVPVDPLPGSFVVNVGDVGQAWSNGRLHNVKHRVQCVAAVPRVSIAMFLLAPKDDTVSAPGELVDGEHPRRYREFKYDDYRRLRLSTGERAGEALARLAA

SEQ ID NO: 171771 - protein, 107 aa, Oryza sativa
  unsure (1)..(107): unsure at all Xaa locations
  Clone ID: PAT_MRT4530_69971C.1.pep
MLPPPPPSLLCTRSCTTSSPPPPPLPXSSSPSPSPSTSDSCPSTISVPTPPSLSSSSSSSTSLSSSSAAAVGAEDVPASHPPPPKPPYPVAPWDIELPRPLTPALWD

SEQ ID NO: 171772 - protein, 168 aa, Oryza sativa
  unsure (1)..(168): unsure at all Xaa locations
  Clone ID: PAT_MRT4530_69972C.1.pep
MADRDEEQILYDTIAEGSSQYWNEEEGNEDPNQYLNEEGNVERDAEGNEEGNVERNAEGNEEEASGSHPSAGQKRARRQRGAAKKIEGRHIITEVDADGRPSAPAEATKNFXKEMLWTTMLKTFTLPAGTENIGLTPNFDVFPKLRDHWDEFVAYKTGQQGQAMMVKN

SEQ ID NO: 171773 - protein, 971 aa, Oryza sativa
  unsure (1)..(971): unsure at all Xaa locations
  Clone ID: PAT_MRT4530_69973C.1.pep
FRKAHFTVLQQSSLVAPYIEEHLALVRARNIGKSDAWITRHHIDTFSAWLRQHLMGNETINQQPAFLARGPSGSITTIQGYEINGYTFYTRAXDLKSTNQNSPVRIDAMGHDGTTGTYYSTIEDIWELDYGPLKVGYSDEPFVLANDVTQVFYVKDMSSKGKRGKGPDEPKHHMVLPRKRKIVGVEDKTDEDYDQFDGQPPFTVTIDPSILLSNDDIPYSRSDHKKETIVRRKNTYVMKFEIQXLLSLVPVLNPNRMADRDEEHILYDTIAEGSSQYWNEEEGNEDPNQYLNEERNMERDAEGNXEGNEEEEASGSHPSAGQKRARGQRGAMKKIEEAAKNFVCHSGWVVRDNVPVSMVYWRRTRARGGNDSFVSESEKEMLWTTMLETFTLPAGTENIVKQWTLKKMAKQFQSFKGDLYKKYILKGLIPNFDVFPKLRDYWDEFVAXKTGQQGQAMMVRNKENATKKKYHHHLGXGGYSIAMPKWEEMEARLIERGIEPATAKWPDRSKFWYYTHGGTLNPVDGSLVFSDQIRGKGVIPWKIGFKEDIHTYRSRMRSKRDTEVKIANLQNRVSSYELSMQEEVARKMDECMAAHRSQDPQPYIPPAMVASGMAIPTNISGTYHCRPIPAGYSRVEVELVEAAYKDLELDYLGGDGETHLXNTSHAIILWRKRYIILLGRQATSRAPSPLAPPSPPAPSPPVPPPSPPAKSPPAHPPPPPAPSPPAPPPPPPPPCPRLQXEELDAYVAGEVKRQLKPRSPEKMIPIDPSVKNFFKGMSATNKEALQISDYDRTLQRAYHKKSKLVPQLGEQPNQEVEPLVTGEDFGITEFISDTGLTVDQLIRGAPIPKAEVAYKFELGKPLVRPEQLQSLPTQMYKFHKRYMEMSAKGREMFGARIRNPDFLQGEDVLWIHFKDLFDLYHLDALDISLRSAWILFHCVLLFFDLDAYRVTVYDSMNKEEKIFDKVFQVID

SEQ ID NO: 171774 - protein, 1008 aa, Oryza sativa
  Clone ID: PAT_MRT4530_69974C.1.pep
MADRDEEQILYDTIASGSSQYWNEEEGNEDPNQYLNEEGNAERDAEGNEEGNVERDAEGNEEKASGSHPSAGQKRARGQRGAAKKIEGRHIITEVDADGRPSAPAQAAKNFVRHSGWVVRDNVPVSKVYWHRTRARGGDDSFVPESEKEMLWTTMLETFTLPAGTENIVKQWTLKKMAEQFQTFKGDLYRKYILKGQTPNFDVFPKLRDHLDEFVAYKTGQQGVAMPKWEEMEASLLERGIEPATAKWPDRSKFWYYAHGGTLNPVDGSLVFSDQIREAANRLTDAVEASSQGTFRPDREKDELSLALQTPEHPGRTRGKGVIPWKIGFKEDIHTYRSRMRSKRDTEAKIADLEYRVSSYELSMQEKVARKVDERMAVHRSHDPQPYIPPPMVNPSGNRSSCASTGQVVSHSMDAMQTQDETTCPVDEITHWTPCELHIPLKNLSIKVASGMAIPTDISGTYHCRPIPARYSRVEVELVKAVYEDLELDYPGGDGETHLRDTSHAIILWRKRYIILPGRQAASRAPSPPAPPSPPAPTPPAPPPPPPAPSPLAPLPPPPAPSPPPPPPPPPPPPPCPPAPPKTRSRQAPPPASKRATKKAKVDTTKNKEPLYGCSQEELDAYVAGEVKRQLKPRSPEKKIPIDLSVKNFFKGMSTANKEALKLSDCDRTLRKAYYKKSKPVPQLGEQPHQVVEPLVTSEDFGITDFISDTGLTMAQLVGAAPIPKAEVAYKFELGKPLVRPEQLQSLLTQMYKFHERYMEMSANGREMFGARIRNPDFLQGEDVLWIHFKDVFDLYHRDALDVSLLSAWILMEIQRARRRGVYDTGFIDPRKINTEMLDKYEKDTEDNLVHLLTQQHFKTFILLPYNTEVTVYDSMNKEEKVFYKVFQLIDRAWDRFRQLVRGTWKEKLGQRFHFPCAKQDMGTNLCGYYVCEYAHCLSNQRYTTRELDRIHMREKLPHKDFITAVQEQLMGFINEEVLNPDGEFHYDGSTIRNVGPSSSDVTQVSKS

SEQ ID NO: 171775 - protein, 98 aa, Oryza sativa
  Clone ID: PAT_MRT4530_69975C.1.pep
LNFGLPPKGLPFFFFLGVFKNLRGFSGAASWVFFHPLPFIIFGVEKWWFFVWGPRGFCKGAFKCLFFSRFLTLAFYPFPFWSSRWKGGGATKSKSKKK

SEQ ID NO: 171776 - protein, 850 aa, Oryza sativa
  Clone ID: PAT_MRT4530_69976C.1.pep
MDISEANEGYASCGSVIEMSRQMKTTRQLKCGMVGLGWLGTSWNPGRVASSVQIIVGLGSRQAIFPVATQTFKGDLYKKYILKGLTPNFDVFPKLRDHWDEFVAYKTGQQGQAMMVKNKENAAKKKYHHHLGSGGYSVAMPKWEEMEAGLIERGIEPATAKWPDRSKFWYYAHGRTLNPVDGSLVFSDQIREAASRLTDAVEASSQGTFRPDREKDELSLALQTPEHPGRTRGKGVIPWKMGFKEDIHTYRSRMRSKRDTEAKIADLEYRVSSYELSLQEEVARKVDERMAAHRSHDPQPYIHPPMVSPSGNRSSCASTGQVASGMAIPTDISGTYHCRPIPARYSRVEVELVKAVYEDLELDYPGGDGETHLRDTSHAIILWRKRYIILPGRQAASRAPSPPAPPSPPAPTPPAPPPPPPAPSPLAPLPPPPAPSPPPPPPPPPPPPPCPPAPPKTRSRQAPPPASKRATKKAKVDTTKNKEPLYGCSQEELDAYVAGEVKRQLKPRSPEKKIPIDLSVKNFFKGMSTANKEALKLSDCDRTLRKAYYKKSKPVPQLGEQPHQVVEPLVTSEDFGITDFISDTGLTMAQLVGAAPIPKAEVAYKFELGEDVLWIHFKDVFDLYHRDTLDVSLLSAWILMEIQRARRRGVYDTGFIDPRKINTEMLDKYEKDTEDNLVHLLTQQHFKTFILLPYNTEFHWVLFFFNLDAYRVTVYDSINKEEKVFYKVFQLIDRAWDRFRQLVRGTWKEKLGRRFHFPCAKQDKGTNLCGYYVCEYAHCLSNQIYTTRELDRIHMREKLPHKDFITAVQEQLMGFINEEVLNPDGEFYYDGSTIRNVGPSSSDVTQASKS

SEQ ID NO: 171777 - protein, 48 aa, Oryza sativa
  Clone ID: PAT_MRT4530_69977C.1.pep
MTNEVAGNEEREDEADNEGPVVGMRRRMTSRRGDEAADDEGAQQRGRQ

SEQ ID NO: 171778 - protein, 93 aa, Oryza sativa
  Clone ID: PAT_MRT4530_69978C.1.pep
KEILEGGPFLKQGLRLGELYIPPLNVCQAPPLKRIRAPNFQVMSQPALLKEFVENNQPAKVVQFNPAKEYAPGLEDPLILTIKGISAGIQNPG

SEQ ID NO: 171779 - protein, 950 aa, Oryza sativa
  unsure (1)..(950): unsure at all Xaa locations
  Clone ID: PAT_MRT4530_69979C.1.pep
MADRDEEQILYDTIAEGSSQYWNEEEGNEDPNQYLNEEGNVERDAEGSEEGNDEEASGSHPSYGQKRARGQRGAAKKIEGRHIITEVNEDGRPSAPAEAAKNFVRHSGWVVRDNVPVSXFVPDSEKEMLXTTMLETFTLPAGTENIVKQWTLKKMAXQFQSFKGDLYKKYILKGQTPNFDTFPKLRDHWDEFIAYKTGQQGQAMMERNKENAAKKKYHHHLGSGGYSVAMPKWEEMEASLIERGIKPATAKWPDRSKFWYYAHGGTLNSVDGSLVFSDQIREAASRLTDAVVASSQGTFRPDREKDELSLALQTPEHPGQTRGKGVIPRKIGFKEDIHTYRSWMRSKRDTEANIADLEYRVSSYELSMQEEVARKVASGMAIPTDPSGTYHCRPIPAGYSRVEVELVEAAYEDLKLDYPGGDGETHLRDTSHAIILWRKWYIILPGRQAASRVPSPPAPPSPPSPPAPSPSVPPPRPPAPSPPAPPPPPPAPSPPAPPPPPPPPLPCPPAPPKTRSRQAPPPARTRATKKVKVDATKNKEPPYDCSQEELDTYVAGEVKRQLKPRSPKKKIPIDLSVKKFFQGMSTANKDALKLSDYDRTLRKAYYKKSKPVPQLGEQPNQEVKSLVTGEDFGITDFISDTGLTVDQLVGAAPIPKAEVAYKFELGKPLVRPEQLQSLPTQMYKFHERYMEMSANGREVFGARIRNSNFLQGENVLWIHFKDVFDLYHLDALDVSLLSAWILMEIQRARRRGVYDTGFIDPRKINTEMIDNYEKDTEDNLVHLLTQQHFKTFILLPYNTEVTVYDSMNKEEKVFDQVFQLIDRAWDRFRQLCAKQDQGTNLCGYYVCEYAHCLSNQIYTTRELDRIHMRENLPHKDFITAVQEQLMGFINEEVLNPDVAVAVAGVLRIGMLPSGHLPLRCHACSANLNELFLPNTIIFSTILGRSTLGFN

SEQ ID NO: 171780 - protein, 418 aa, Oryza sativa
  unsure (1)..(418): unsure at all Xaa locations
  Clone ID: PAT_MRT4530_6997C.1.pep
LPWVGPTRRSSRSNGRRTRRKGLVEAIGNTPLIRFNSLSDATGCEVGLQILGKAEFLNPGGSVSGSSXVKIIVEAQETGDLLCGGSVADPSAXRIAISLAIVALTYGCNCLLLITGKAAFEKVVSHLSFKIVIKYXSEVIAALGATVRRVCPASSTHRDHLVKFGRRWALDVNTSEAAQRESRYKETNGSAHVNTRIMHSKITASKGESNKALTGGFFADQFENMANYRAHYEWTGPEIWQQSKGTLHAFVAAAGTGGTIAGVSRYLKEKNTNIKCFLMDPPGSGLFNKVTRGVMYTKEEAEGKRLKNPFDTITEGIGINRVTKNFMMAELDGAYRGTDREAVEMSRFLLKNDGLFVGSSSAMNCVGAVRVAQDLGPGHTIVTILCDSGMRHLSKFFNDQYLANHGLTPTATGLEFLD

SEQ ID NO: 171781 - protein, 868 aa, Oryza sativa
  Clone ID: PAT_MRT4530_69980C.1.pep
MADRDEEQILYDTIAEGSSQYWNEEEGNEDPNQYLNDEGNVQRDAEGNEEEASGSQPSTGQKRARGQRGAAKKIEGRHIITEVDEDGRPSAPAEAAKNFVRHSGWVVRDNVPVSTVYWRRTRARGDDDSFVPDSEKEMLWTTMLETFTLPAGTENLVKQWTLKKMAEQFQSFKGDLYKKYILKGLTPNFDVFPKLRNHWDEFVAYKTGQQGQAMMARNTENAAKKKYHHHLGSGGYSVAKLKWEKMEASLLERGIEPATANWPDRSKFWSRMRSKRDTEVKIADLEYRVSSYELSMQEEVARKVDERMAAHRSQDPQPYIHPAMVSPSGNRSSCASTGQVGSQSMDAMQTQDETSCPVDESTQRTPCELHILFKNLSIKVCSPIPTGYSRVEVELVEAAYEDLELDYPGGDGETHLRDTSHAIILWRKRYIILSGRQAAFRAPSTPAPPPPPPAPSPPAPPPPPAAPSPSAPPPPPAAPSPPAPPSPLPPPCPPAPPKTKSRQAPPPARTRATKKAKVDDIKNKELPYDCSQEELDAYVAGEVKRQLKPRSPEKKIPIDPSVKNFFKAMSKTNKEALQISDYDRTLQRAYHKKSKPVPQLGEQPNQEVEPLVTGEDFDITDFIADTGLSVDQLVGAAPIPKAEVAYKFELGKPLVKPEQLESLPTQMYKFHERYMEMSANGREMFGARIRNPDFLQGDDILWIHFKDLFDLYQLDALDVSLLSAWILVTVYDSMNKEEKIFDNVFKLIDRAWDRFHQLVRGTWKEKLGRRFHFPCAKQEQGTNLCGYYVCEYAHCLSNQICTTRELDRIHMRDNLPHKDFITAVQEQLMGFINKEILNPDGEFYYDGSIIHNVGPSSSDITPASKSKS

SEQ ID NO: 171782 - protein, 126 aa, Oryza sativa
  Clone ID: PAT_MRT4530_69981C.1.pep
MEIQRARRWGVYDTGFIDPRKINTEMLDKVTVYDSMNNEEKVLDKVFQLIDRAWDRFRQLVRGTWKEKLGQRFHFPCAKQDKGTNLCGYYVCEYAHCLSNQIYTKRELDHIHMREKLPHKDFITAV

SEQ ID NO: 171783 - protein, 91 aa, Oryza sativa
  unsure (1)..(91): unsure at all Xaa locations
  Clone ID: PAT_MRT4530_69982C.1.pep
WRGGWQEAEEEVKFTDRQCHREVQDTPLDACRQVLDRQLTARERLQPMFRRPVPLCLRMRCYHHLPLFFLXCRRAALRHMVRRYDQSMPDP

SEQ ID NO: 171784 - protein, 701 aa, Oryza sativa
  Clone ID: PAT_MRT4530_69983C.1.pep
MPATASGGARPEEAAASASPPSPTASYCMGTRPEELTARLAAAAGGRPVGGGGRGRGGGGGGGEEEGEHERVRTLREIKNQIIGNRTKKLQYLRLGAVPAVVAALAGPGASPAALVQAAAAVGSFACGVDDGVRAVLAAGAVAHLTRLLAHPDEKVVDASARALRMIYQSKLAPKFDVNNNEKNMEFLLTLLNSENENVTELAANIISHSCDSTTEQLALCAAGVPQRLVNHFGGSMNLRDACLDSLTAIIRNNWEVASRFALLDHGKALRSIVALIHDRSPRTRLLACLCLIALSHASPCHFQDRQIKTKLILVLLELIEEPGHVGDDAPLALTTLIKDSVELQKQALSTNAVQKLSNHLIANSLESRRAVTILLALAELCSKLEESRSQLMSVQASTLILDALKHASVDIRVAACSCLKNISRSSKVLSAGKLSCDTFIAPLVQLLYDSSMSVQVAALGAICNIAVNLTPRKSILLQSGAVSQLVHLSKSMDPTLRLKAVWALRNIMFLLNPKDKDFILKELTLSTLSSLICDSEHFVQEQTLALVHNLVDGYVNSFNYVIGEDGMILNAISRQLNNAPAPGVCIQGMFVLANVAAGGELNKEAVMNILVPRRADRVKQSFIVNFLLSKDKQLRVATLWCVLNLIYPKCEASSVRVVRLQNAGVISQVKGMINDPCLDCKLRVRMVLEHCLDNADDGFM

SEQ ID NO: 171785 - protein, 720 aa, Oryza sativa
  unsure (1)..(720): unsure at all Xaa locations
  Clone ID: PAT_MRT4530_69984C.1.pep
MTYELSKYFFYEQMADRDEEQILYDTIAEGSSQYWNEEEGNEDPNQYLNEEGNVERDAEGNEEGNVERHVEGNEEEASGSHPSAGQKRARGQRGVAKKIEGRHIITEVDEDGRPSAPAEAAKNYVRHSGWVXKEMLWTTMLEXVTLPAGTENIVKQWTLKKMAEQFQSFXGDLYKKYILKGLTPNFNVFPKLRDHWDEFVAYKAGQQGQAMMVKNKENAAKKKYHHHLGSGGYSVAMLKWEEMEARLIERGIEPATAKWPDRSKFWYYAHGGTLNPVDGSLVFSNQIREAASRLTDAVEASSQGTFRPDREKDELSLALQTPEHPGRTRGKGVIPWKIGFKEDIHTYRSRMRSKRDTEAKIADLEYRVSSYELNMQEEVARKVASGMAIPMDISGTYHCRPIPAGYSRVEVELVEAAYEDPELDYPGGDGETYLRDTSHAIILWRKRYIILPGRQAASRAPSPXAPPSPPAPSPPVPPPCPPTPSPPAPPTPPPPPPPPPPCPPAPPKTRSRQAPPLARTRATKKAKVDATKNKEPPXVKRQLKPWSPKKKIPIDPSVKKFFKGMSTTNKEVLKLSDYDRTLRKAYYKKSKPVPQLGEQPNQEVEPLVTGEDFGITDFISDTSLTVDQLVGSAPIPKAEVAYKFELGKPLVRPEQLQSPLTQMYKFHERYMEMSAKGREMFGARIRNPDFLQGEDVLWIHFKDVFDLYHLDALDVSLLSA

SEQ ID NO: 171786 - protein, 57 aa, Oryza sativa
  Clone ID: PAT_MRT4530_69985C.1.pep
CQFFAPAFYMTPSRTEIIWPKMVRFWHPQSFAYPSAELAVLSVVVKSSPLLLLAFPK

SEQ ID NO: 171787 - protein, 395 aa, Oryza sativa
  Clone ID: PAT_MRT4530_69986C.1.pep
MNYNFGGNVFDQEVGVGGEGGGGGEGSGCPWARPCDGCRAAPSVVYCRADAAYLCASCDARVHAANRVASRHERVRVCEACERAPAALACRADAAALCVACDVQVHSANPLPAITIPATSVLAEAVVATATVLGDKDEEVDSWLLLSKDSDNNNNNNNNNDNDNNDNNNSNSSNNGMYFGEVDEYFDLVGYNSYYDNRIENNQDRQYGMHEQQEQQQQQQEMQKEFAEKEGSECVVPSQITMLSEQQHSGYGVVGADQAASMTAGVSAYTDSISNSISFSSMEAGIVPDSTVIDMPNSRILTPAGAINLFSGPSLQMSLHFSSMDREARVLRYREKKKARKFEKTIRYETRKAYAEARPRIKGRFAKRSDVQIEVDQMFSTAALSDGSYGTVPWF

SEQ ID NO: 171788 - protein, 680 aa, Oryza sativa
  Clone ID: PAT_MRT4530_69987C.1.pep
MAEQFQTFKGDLYQKYILKGQTPNFDVFLKLWDHWDEFVAYKTGQQGQAMMERNKENAAKKKYHHHLVSGGYSVAMPKWEEMEASLLEKGIEPATAKGPDRSKFWYYAHEKDELSLALQTPEHLGRTRGKGVIPWKMGFKEDIHTYKSRMRSKRDTEAKIADLEYRVSSYELSMQEEVARKVDERMAAHRSHDPQPYIPPPMVSPSGNHSSCASMGQVALGMAIPTDISGTYHCRPIPAGYSRVKVELVEAVYEDLELDYPGGDGETHLRDTSHTIILWRKRSRQAPPPASTRATKKAKVDTTKNKEPPYGCSQEELDAYVAGEVKRQLKSRSLEKKIHIDPSMKNFFKGMSTTNKEALKLSDYDRTLRKAYYKKSKPVPQLGEQPHQVVGGAPIPKAEVAYKFELSKPLVRPEQLQSLPTQMYKFHARYMEMSANGREMFGARIRNPDFLQGEDVLWIHFKDVFDLYHRDALDVSLLSAWILMEIQRARQRGFYDTGFIVPRKINTEMLDKYEKDTEDNLVHLLTQQHFKTFILLPYNTEVTVYDSMNKKEKVFDKVFQLIDRAWDRFRQLVRGTWKEKLGRRFHFLCAKQDKGTNLCGYYVCEYAHCLSNQIYTTRELDRIHMREKLPHKDFIMAVQEQLMGFINEEVLNPDDEFYYDGSIIRNVCPSSSNVTQASKS

SEQ ID NO: 171789 - protein, 68 aa, Oryza sativa
  Clone ID: PAT_MRT4530_69988C.1.pep
SPLHMRIKYLSVSLGPIFSCYNYAQQHVVWCGDLVLSLHLFISGPLMCWGLRSFLVWGFAFAENELEE

SEQ ID NO: 171790 - protein, 175 aa, Oryza sativa
  Clone ID: PAT_MRT4530_69989C.1.pep
ITCVQHMTREFTLQQNYTSENDSAESSLKSRAVKLLSTIISMPRMQGQHQRRIYDPICHLRTGSPWFDDVLASFIAFICAFAALPAADLSNSSCLRCAASAALARASFDSASSASARRSRSAPPPPKHAHCPIPSSSAVSAQLLLRSSSSSSGCLLRIRFDRVVAVDDFVFLCKR

SEQ ID NO: 171791 - protein, 39 aa, Oryza sativa
  unsure (1)..(39): unsure at all Xaa locations
  Clone ID: PAT_MRT4530_6998C.1.pep
SQYTHNFIIQLVIYKKDVPLPFLSPPIXKCFHLFMGCLD

SEQ ID NO: 171792 - protein, 76 aa, Oryza sativa
  Clone ID: PAT_MRT4530_69990C.1.pep
HATKDTVGSGPHRDEARCALHTAQTRGKVAISPFSFPSSSLRCGPYGGIRSISQPSPRGGANARGIHTLCPRLPLR

SEQ ID NO: 171793 - protein, 65 aa, Oryza sativa
  Clone ID: PAT_MRT4530_69991C.1.pep
KVLETGDDLGEVTETVDYFVQASTIAAGNLFGRYTTANISVIYINYVNSSLALSAVEQIDFASVL

SEQ ID NO: 171794 - protein, 173 aa, Oryza sativa
  Clone ID: PAT_MRT4530_69992C.1.pep
MLRRGAVVVDRDGEVVVATKIRKRCALSSSGASDPLRKLRLKKRGVVVLGRRGVGGGGGVVLSPWSSRKMSESSWNGRRCHGGAAAAAADDGTRSAASARKLVGALRQLSSPDDEDAARRSSAHRRCVSVEFSKRSRTRSKASEADGQRSWHNGHGHWFPDMLSNGSTMENSI

SEQ ID NO: 171795 - protein, 71 aa, Oryza sativa
  Clone ID: PAT_MRT4530_69993C.1.pep
RQCAPWNSISCSKYSLMLALLVSPNIRSRSRWLSMCPRCVESTIGLAALHAKLLLVIPVLGSVHLHIDIVG

SEQ ID NO: 171796 - protein, 85 aa, Oryza sativa
  Clone ID: PAT_MRT4530_69994C.1.pep
IEDTSVVAAAAAQIEDRAVAQTEDNPGGGEWKKVLTTTAEAPGWWLEEEAPTKAMCLGTAMPKPHDDTALAAAAKQNHTHDDAAA

SEQ ID NO: 171797 - protein, 55 aa, Oryza sativa
  Clone ID: PAT_MRT4530_69995C.1.pep
FIPCLSSPLIVYSRDTASHCFWFLCRLQVCVRSTYLSNSLGPGQYVCGQCDPTNV

SEQ ID NO: 171798 - protein, 224 aa, Oryza sativa
  unsure (1)..(224): unsure at all Xaa locations
  Clone ID: PAT_MRT4530_69996C.1.pep
MPIISDEESRMVKDSXSIDCVGINHYTSFYMKDPGPWNLTPXERNGVPIGAQENSYWLYIVPWGINKAVTYVKETYGNPMMILSENVTNSAILLELSLFLLIIILLTMKSSIKQGLLYDQCYALAGMDQPGNFNITQGEHDTARIRYYRDYITELKKVIDDGAKVIGYFAWSLLDNFEWRLGYTSRFGIVYVELWTIVYKTLKSYPQXTQAFWFKNMLSRKKRN

SEQ ID NO: 171799 - protein, 678 aa, Oryza sativa
  unsure (1)..(678): unsure at all Xaa locations
  Clone ID: PAT_MRT4530_69997C.1.pep
MADHDEEHILYDTIASGSSQCWNEEDGNEDPNQYLNKEGNAERDAEGNEEGNGERDAEGNEEEASGSHPSARQKRAREQRDAAKKIEGRHIITEVDADGRPSAPAQAAKNFVRHSGTENIVKQWTLKKMAERFQTFKGDLYRKYILKGQTPNFDVFPKLRDHWDKFVAYKTGQQGQAMMERNKENAAKKKYHHHLGSSGYSVAMPKWEEMEASLLERGIEPATAKWPDRSKFWYYAHGGTLNPVDGSLVFSDQIREAVNRLTDIVEAYSQGTSRMRSKRDTEAKIADLEYRVSSYELSMQEEVARKVDERMAAHRSHDPQPYIPPPMVSPSGNRSSCASTGQVVSHSMDAMQTQDETTCPVDEITQRTPCELHIPFKNLSIKVASGMAIPTDISGTYHCRPIPAGYSRVEVELVEAVYEDLELDYPGGDGEVKRQLKPRSPEKKIPIDPSVKNFFKGMSTVNKEALKLSDYDRTLRKAYYKMSKPVPQLGEQPHQVVEPLVSGKDFGITDFISDTGQTMAQLVGGAPIPKAEVAYKFELGKPLARPEQLQSLPTQMYKLHERYMEMRANGREMFGARIRNPDFLQGEDVLWIHFKDVCDLYHRDALDVSLLSAWILMXDSKGPTAGGLRYWVHRPSENQHRNARQVRERHRGQSRPSPNATAFQDVHTIAVQHRSHYV

SEQ ID NO: 171800 - protein, 713 aa, Oryza sativa
  Clone ID: PAT_MRT4530_69998C.1.pep
MEASLIERGIEPAIAKWPDRSKFWYYAHGGTLNPVDGSLVFSDQIREAASRLMDVVVASSQGTFQPDIEKDELSLALQTPEHPGRTRGTCVIPWKIGFKEDIHTYRSRMRSKRDTEAKIADLEYRVSSYELSMQEEVARKVDERMAAHRSQDSHPYIHPAMVSPLGNRSSCASTGQVGSQSMDAMQTQDETTCPVDEITQRTPCELHIPFKNLSIKVASGMAIPTDPSGTYHCRPIPAGYSRVEVELVEAAYEDLKLDYPGGDGETHLRDTSHAIILWRKRYIILPGRQAASRAPSPPAPPSPPTPSPPVPPPRHPAPSPPAPPPLPAAPSPPAPPPPPCPPAPPKTRSRQAPPPACTRATKKAKVDATKNKEPSYDCSQEELDSYVVGEVKRQLKAQSPKKKIPIDPSVKNFFKGMSTTNKEALQISDYDRTLQRAYHKKSKPVPQLGEQPNQEVEPLVTGEDFGITEFISDTGLTVDQLVGGAPIPKAEVAYKFELGKPLVKPEQLQSLPTQMYKFHERYMEMSAKGREMFGARIRNPDFLQGEYVLWIHFKDLFDPYQLDALDVSLLSAWILMEIQRARWWRVYDIGFIDPRKINTEMIDKYEKDTDDNLVHLLMQQHFKTYILLPYNTEVTVYDSMNKEEKIFDKVFKLIVRAWDRFRQLVRGTWKEKLGRRFHFPCANQDQGTNLCGYYVCEYAHCLSNQICTTRELD

SEQ ID NO: 171801 - protein, 338 aa, Oryza sativa
  Clone ID: PAT_MRT4530_69999C.1.pep
NLEAIQILKKTGGSLKDSFLDEGFILDKKIGLGQPKRIENAKILVANTAMDTDKVKIYGARVRVDSMAKVAEIEAAEKQKMREKVQKIIGHGINCFVNRQLIYNFPEELFADAGILAIEHADFEGIERLALVTGGDIASTFDNPESVKLGHCKVIEEIMIGEDRLIHFSGVEMGQACTIVLRGASEHVLDEPERSLHDALCVLSQTVNDTRVLYGGGWPEMVMAKEVDGLARKTPGKKSHAIEAFSRALQSIPTIIADNAGLDSADLISQLRAEHHKEQSTAGIDVISGGVGDMEKLGISESFKAKQAVLMSATEAAEMILRVDEIVTCAPRRREDRM

SEQ ID NO: 171802 - protein, 434 aa, Oryza sativa
  unsure (1)..(434): unsure at all Xaa locations
  Clone ID: PAT_MRT4530_6999C.1.pep
MEMDEVGGRWTFSRTNEGYTSCGPVVEMSWHRVGALLLGXSVLPACPEGSGRRXGIGSVLLSMARMGWKLCHVFHPYTVVMFNREKGKNVSGYASSNSSFQLNLPLASRELTRAHPWSIPSMLLSSQLPLVGSQDQNQYVFDRAFATQVNELPMPEEDVPFCHDCREQGHYALNCPWVYVKEAPSLGLAGQTSLNQPPHTKSSLQPSVQSRELNGENPLNPGKCFPPSLSYHVGSHTKQAKGKKSKNQKRKAPMRTEEEVRKMTITSTEWPPAGITIPRRQRGNTFRGARQLTQHLLSHGGRVSDSEGSDQVSSDDEDESPRHLGEEEMESKACTRCGEIGHVASMCLTLCTHCEEDHPPGECPTRKVTCFLCEXTNHSLHRQPQQRIVIDRRSCVSPRPTPGRAKGNQPQEGDTKQKTVIRFNQQSEGSFPCE

SEQ ID NO: 171803 - protein, 442 aa, Oryza sativa
  Clone ID: PAT_MRT4530_699C.1.pep
MFAGLASDGGSKVRMLLTCVDALPDGSSHDMTRSEEGISYAIDLGGTSFRVLKVELGAGSTIINRKVEHQPIPENLTKGTSDDLFNFIASALKNFIEREGGEVEGRALGFTFSFPVRQTSISSGTLIRWTKEFSIEEAVGKDVAQCLNEALARNGLNMKVNVLVNNTVGTLALGHYYDDDTVAAVIIGAGTNACYIERNDAIIKSLGRVTNSERTVVNVEWGSFRPPQIELTPYDICFNNETWNYYDQGFEKMISGVYLGEIARLVFQKMAEESDIFGTAVDGLSTPFVLSTPNLAAIREDDSPDLREVGKILEEHLKLPDVPLKTRKLVARVSDIITRRAARLAAAAIVAILQKIGCDGTLCGSTQVRTMRGVRRRTVVAIEGGLFEGYSVFREYLNEALVEILGEEIAATVSLRVMEEGSGTGAALLAAAYSSARQKNSE

SEQ ID NO: 171804 - protein, 95 aa, Oryza sativa
  unsure (1)..(95): unsure at all Xaa locations
  Clone ID: PAT_MRT4530_69C.1.pep
WRLRWGGCWQRLRWRWRRGMAASDGXPRAWETTTSGRRDIVWWRGRRPAWRREAQPMATEAGSARETRAAEMEAGLAREARPMEGGRIGARDASG

SEQ ID NO: 171805 - protein, 1343 aa, Oryza sativa
  Clone ID: PAT_MRT4530_6C.1.pep
MSVSHETSMAIKGLCRIFSGKRGWPQSSRISISSASGVNMPMIMGVRMVFVMVLHCLLGYSLEVMEEPSKDNGQSSCVVDPELEPMMLDDAREGVSHTLDDANGHSSMDVDRGCHSMDTTRSSLGDDGKGKRDSYAQIPVDMSIPSLEKFCKEASRSFFDEIGLISHQINSYNEFVSHGLQELFDSLGEVTVEPSYDPSNRGPGGWRHAIIKFGRVQLEEPVFWSHGCDIDEQSLKLKPRHARLQNMTYSSKMKVEVHFQVYSMEKSDKAKTGNDKFGYKRNIINETYYINIGRLPVMVMSNLCWLHKLKESDCQFDSGGYFLIKGMEKDELQGCGGKLYSRNLCLNGKLETPTQKVFIAQEQKCLTRIWVEDRPCWMVSFLSPIRRRRIYIKLIDSANNEDASGGKIISISFLYANMPIWLMFFALGISSDKDIFDVINMEDCDACVINTITATIKESDELCEGFRKSDKARQYVDELIKNSKFPPAEPFDDYIAKYLFPSISGNRNKALFLGYMVKCLLMAFTGKRKCDNKDDFRNKRLDLAGELLGRELRAHIRHAERLMVKALQRDLNSERELQEFDHYLDASIITNGLNRAFSTGSWCHPYKRNERCAGIVATLRRTNPLQMISDLRKTRQRVAYAGKAGDARYPNPSYWGKLCFMSTPDGENCGLVKNLAVTATVSSRVAPPLIDRFISCGMNKLHEIPTEEVPRMDKIFLNGDWVGSCSDPASFVLRLRCMRRSGLIDPQVEIKRDKHQREVRVFSDAGRILRPLLVVENLNKIRRPKGSSYSFQWLMQQEIIEFIGVEEEEDIRSAWGIRNLFESEEEAPMVKMNKAEDVFNVKRKIGGEVSGYTHCELDLSFLLGLSCGIIPFANHNFARRVLYQSEKHSQQAIGYSTTNPHIRVDTLSHQLYYPQRPLFKTVIADCIGRSEYTFGRKDDFARPEYFNGQNAIVAVNVHQGFNQEDSVVMNRASLERGMFRTEHFRNYKAEVENKGGPGGNKRLKMKDKIDFGKMQSKRGRVDNLDDDGLPYVGASLQSGDIVIGKVSESGEDHSIKLKHTEKGMVQRVLLSANDEGKNFAVVTLRQVRSPCLGDKFSSMHGQKGVVGFLESQENFPFTYQGIVPDIVINPHAFPTRQTPGQLLEAALGKGIALGGTMRYATPFTTASFDVITDQLHKAGFSRWGAESVLNGRTGERMHSLIFMGPTFYQRLIHMAEDKVKFRNTGPVHPLTRQPVADRKRFGGVKFGEMERDCLLAHGAAANLHERLFMLSDFSQMHVCQTCERVANVIMRPVPGGKKIRGPYCGFCRSSENIVRINVPYGAKLLYQELFSMGICLRFETEVC

SEQ ID NO: 171806 - protein, 1262 aa, Oryza sativa
  Clone ID: PAT_MRT4530_70000C.1.pep
MADRDEEQILYDTIASGSSQYWNEEEGNEDPNLYLNEEGNAERDAEGNEEGNKRARGQRGAAKKIEGRHIITEVDTDGRPSAPVQAAKNFVRHNGWVVRDNVPVSKVCWCRTRACGGDDSFVPESEKEMLWTTMLETFTLPVSTENIVKQWTLKKMAEQFQTFKGDLYRKYILKGQTPNFDVFPKLRDHWDEFVAYKIGQQGQAMMERNKENAAKKKYHHYLGDRIREAANRLTDAVEASSQGTFRPDKEKDELSLALQTPEHPGRTRGKGVIPWKMGFKEDIHTYRSRMRSKRDTEAKIADLEYRVLSYELSMQEEVARKVDERMAAHRSHDPQPYIPPPMVSPSGNRSSCASTGQVVSHSMDAMQTQDETTCPVDEITQRTPCELHIPFKNLSIKVASGMVIPTDISGTYHCRPIPAGYSRVEVELVEAVYEDLELDYLGGDGETHLRDTSHAIILWRKRYIILPGQQAASRAPSPPAPPSATSSCTISSGSSASSCTISSGSSATSSCTISSGSSASSASSSTVSACTSQDKLVGGAPIPKAEVAYKFELGKPLVRPEQLQSQPIQMYKFHEWYMKMSANGREMFGARIRNPDFLQGEDVLWIHFKDVFDLYHRDALDVSLLSAWILMVIQRARRRGVYNTGFIDPRKINTEMLDKYEKDTEDNLVHLLTQQHFKTFILLPYNTEVTVYDSMNKEEKVFDKVLLFFSAIFRKRCRSRVLSVLLWLAYLSADSVAVYLLGRLTLLVGDAPGHQLVLFWAPFLLLHLGGQETITAFSMEECALWKRHLLNLAVQVSLAIYVVGKQWRGDKQLVAPTVLMFITGTTKVEWSGQLQQFNMIDMGIQETTRGRLERMMRCVDIIIDGGCSTEPAVKVSAEVKKLLVDKILAQLISDTDPESELDLTRFHGQWAQRWVEKRVQVHDFSESNPAHRALVKSKIQDSSFLTSASLWHLVTDICLDQGYTSVDEATARTCRELSNYVMHLIVNYEGLGTVDERQIFVLTASRMVEFFVDGPKDTRNRPGFFQKVAGRWELIATVWVEMLCYITMNCGACSLHAKQLCDAAQGGRSTVDRDHTSGPPPVHGIDGPDRPQRRSDGAGKAARHGSVSKPTGSHGGRWRHARSPAGRQRVWDRGKEGGEELLTVSTAAGAKNEHGSDDRRCGGTDGRRRHPRRRWRGVRRGDDDHGGLNCRPEMEGREKLTGSRGERRSGGIPATRGGGRESSCGGEANGGGGLARRRLQQWRRAAEDGDKRRSSGVTARAR

SEQ ID NO: 171807 - protein, 107 aa, Oryza sativa
  Clone ID: PAT_MRT4530_70001C.1.pep
MPPRTSCIGGSIAKVQRRCMAGGVEQGMEREIGDGGWPGHHQKPNRVGSHGYGNWRWRSRSQLKGSGALTRAPKPKPRMNPKKEHGVPLKRTTHPPTTADVMTRLAM

SEQ ID NO: 171808 - protein, 544 aa, Oryza sativa
  Clone ID: PAT_MRT4530_70002C.1.pep
FAPSFRLDRGQFAAKRASPSVRPAGRAARGGEVGWRVRWADFDGGGAEQVLKYSGFAVAKRKTLAAQPAVAAILGVAGLSGPQRSVTEGICGGSGGRCWTALSRRLTPHGSRTQRHSPYVWKKSNQSDAKAALMQPAKVSLLVDMLNEGAVDTKINCVRLIRILMEEKGFRPDTVASLSLLVGVMRLVRDKRHPDGVAAGLELLNSICAVHKPARSLIVSIGAVPQLVELLPELPTECVEPALDILDALAAVPEGRIALKDCPRTITNAVRLLMRVSEACTRRALSMLWVVCRMAPEECAPAALDAGLGAKLLLVIQSGCGPELKQQASELLKLCTMNCTSTVFISKCKLTKTIHIQNAAYTQLIQWQAGGMYMQIDEDFGQLNKHSRLGGAAIYSGSPAVRRWHWLVYTPTLVVGLVAAAGHLSVTVRWALHDRGDEVGASGWLPPSGSGSGSGAWGGFIDLQSGNRSNETSEAFAASLASGSRPVCVRPKWPHLTGKTDHITRRRHASISPQLFSALVSRTPDARCFSQNSTNAFNFTLFMV

SEQ ID NO: 171809 - protein, 979 aa, Oryza sativa
  Clone ID: PAT_MRT4530_70003C.1.pep
MPPPWPAAAAPPRRRAPTPPDPHAAAVARRRTPMPPDPHAAASAPMADRDEEQILYDTIASGSSQYWNEEEENEDPNQYLNEEGNAERDAEGNEEGNVERDAEGNEEEASGSHPSAGQKRARGQRGAAKKIEGRHIITEVDADGRPSAPAQTAKNFVRHSGWVVRDNVPVSKVYWRRTSARGDDDSFVPESEKEMLWTTMLETFTLPSGIENIVKQWTLKKMAEQFQTFKGDLYRKYILKGQTPNFDVFPKLRDHWDEFVAYKTGQQGQAMMERNKENAAKKKYHHHLGSGGYSVAMPKWKEMEASLLERGIEPATAKWPDRSKFWYYAHGGTLSPVDGSLVFSDQIREAANRLTDAVEASSQGTFRPDREKDELSLALQTPEHPGRTRGKGVIPWKMGFKEDIHTYRSRMRSKRDTEAKIADLEYRVSSYELSMQEEVARKVDERMAAHRSHDPQPYIPPPMVSPSGNRSSCASTGQVVSHSMDAMQTQDETTCPVDEITHRTPCELHIPFKNLLIKVASGMAIPTDISGTYHCRPIPAGYSRVEVELVEAVYEDLELDYPGGDGETHLRDTSHAIILWRKRSRQAPPPASTRATKKAKVETTKNKEPPYGCSQEELDTYVAGEVKRQLKPRSPEKKIPIDPSVKNFFKGMSIANKEALKLSDYDRTLRKAYYKKSKLVPQLGEQPHQVTGEDFGITDFISDTGLTMAQLVGGAPIPKAEVAYKFELGKPLVRPEQLQSLPTQMYKFHERYMEMSANGREIFGARIRNPDFLQGEDVLWIHFNDVFDLYHRDALDVSLLSAWILMEIQRARRRRVYNTGFIDPRKINTEMLDKYEKDTEDNLVHLLTQQHYKTFILLPYNTEAWDRFRQLVRGTWKEKLGRRFHFPCAKQDKGTNLCGYYVCEFAHCLSNQIYTTRELDHIHMREKLPHKDFIMAVQEQLMGFINEEVLNPDGEFYYDGSTIRNVGPSSSDVTQASKS

SEQ ID NO: 171810 - protein, 275 aa, Oryza sativa
  unsure (1)..(275): unsure at all Xaa locations
  Clone ID: PAT_MRT4530_70004C.1.pep
VRTSCSFCLFWVKKVISSTKKKKKESWLQEGCIRSFAPNSCAKFPPRVRRRRTVAEALTGRQWIKDIRGALGIQPXSRISKALGQYSSKSAYKALXFGRLAFLSTPIWKSLAPPRCRFFLWLVAMNRCWTADRLRSRGLPHPDRCVLCDQQVETIAHISVACPESRQLWWWTLQAIRSPNCLPVNEPSFHNWLCESRMKIGERHRRGFDTVVTLVAWTIWKERNNRIFNQQQRSWTEVAKAMAEEAMLWKSANHGIPAVWPLRGRENFFFIKWIM

SEQ ID NO: 171811 - protein, 944 aa, Oryza sativa
  Clone ID: PAT_MRT4530_70005C.1.pep
MADRDEEHILYDTIAEGSSQYWNEEEGNEDPNQYLNEEGNVERDAEGNDAEEASGSQPSAGQKRAREQRGAAKKIEGRHIITEVDEDGRPSAPAEAAKNFVRHSGWVVRDNVPVSTVYWRRTRARGDDDSFVPDSEKEMLWTTMLETFTLPAGTDNLVKQWTLKKMAEQFQSFKGDLYKKYILKGLTPNFDVFPKLRDHWDEFIAYKTGQQGQAMMARNKENAAKKKYHHHLGSGGYSVAKPKWKEMEASLLERVVASSQGTFRPDREKDELSLALQTPEHPGRTRGKGVIPWKIGFKEDIHTYRSRMRSKRDTEAKIADLEYRVSSYELSMQEEVARKVDERMAVHRSQDPQPYIHPAMVSPLGNRSSCASTGQVGSQSMDTMQTQDETSCPVDEITQRIPCELHIPFKNLSIKVASEMAVPTDPSGTYHCRPIPAGYSRVEVELVEALYEDLELDYPGGDDETHLRDTSHAIILWRKRYIILPGRQAAFRAPSPPAPPSPPAPSPPPPPAAPSPSAPPPPPAAPSPPSPPPPPAPPCPSAPPKTRSRQAPPPARTRARKKAKVDTTKNKEPPYDCSQEELDAYVAGEVKRQLKPRSPEKKIPIDPSVKKFFKGMSKTNKEALQISDYDRTLQRAYHKKSKPVPQLGEQPNKEVEPLVTGEDFGITDFIADTGLSVDQLVGAALIPKAEVAYKFELGKPLVKPEQLESQPTQMYKFHERYMEMSANGREMFGARIRNPDFLQGDDVLWIHFKDLFDLYQLDALDVSLLSAWILMEIQRARRRRVYNTGFIDPQKINSEMINKVTVYDSMNKEEKIFDKVFKLIDRAWDRFRQLVRGTWKEKLGRRFHFPCGKQEQGTNLCGYYVCEYAHCLSNQICTTRELDRIHMRDNLPHKDFITAVQEQLMGFINEEVLNPDGEFYYDGSTIHNVGPSSSDITPASKSKS

SEQ ID NO: 171812 - protein, 928 aa, Oryza sativa
  unsure (1)..(928): unsure at all Xaa locations
  Clone ID: PAT_MRT4530_70007C.1.pep
MADRDEEQILYDTIAERSSQYWNEEEGNEDPNQYLNEEGNVERDAEGSEEGNDEEEASGSHPSAGQKRALGQRGAAKKIEGRHIITEVDEDGRPSASAEAAKNFVRHSGWVVRDNVPVSTFARTQERDAGTTMLETFTLPAGTENIVKQWTLKKMAEQFQSFKGDLYKKYILKGLTPNFDVFPKLRDHWDEFVAYKTGRQGQAMMARNKENAAKKKYHHHLGSGGYSVAMPKWEEMEASLIERGIEPATTKWPDRSKFWYYAHGGTLNLVDGSLVFSDQIHEAASRLTDAVVASCQGTFRPDREKDELLLALQTPEHPGRTRGKCVIPWKIGFKEDIHTYRSRMRSKRDTEAKIADLEYRVSSYELSMQEKVARKVDERMAAHRSQDPQPYIHPAMVSPSGNRSSCVSTGQVGSQSMDAMQTQDETTCPVDEITQRTPCELHIPFKNLSIKVASGMAIPTDPSGTYHYRPILAGYSSVEVELVEAAYEDLELDYPGGDAPPPPPCSPAPPKTRSRQAPLLARTRATKKAKVDATKDKEPPYDCSQEELDAYVAGEVKRQLKPWSPEKKIPIDPSVKNFFKGMSTTNKEALQISDYDRTLQRAYHKKSKPVPQLGEQPNQEVEPLVTGEDFGITEFISDTGLTVDQLVGGAPIPKAEVAYKFELGKPLVKTKQLQSLPTQMYKFHEWYMEMSAKGREMFGARIRNPDFLQGEDVLWIHFKDLFDLYQLDALDXEIQRARRRGXYDTGFIDPRKINTEMIDKYEKDTEDNLVHLLTQQHFKTYILLPYNTEVTVYDSMNKEEKIFDKVFKLIDRAWDRFRQLVRGTWKEKLGRRFDFPCAKQDQGTNLCGYYVCEYAHCLSNQICTTRELDRIHMRDNLPHKDFITAVQEQLMGFINEEVLNLDGEFYYDGSTIHNVGPSSSDITPASKS

SEQ ID NO: 171813 - protein, 212 aa, Oryza sativa
  unsure (1)..(212): unsure at all Xaa locations
  Clone ID: PAT_MRT4530_70008C.1.pep
IIPGSQKETNFVAASTVCXLRDGQTILFWEDSWLQEGCIRSIAPNIYDKIPPRVRWRRTVVEALTVAINRCWTADRLRSRGLPHPDRCVLCDQYEESIDHILVACPESRQLWWWTLQAIRSPNCLLVNEPSFHNWLCESRMKIGERHRRGFDTVVTLMAWTIWKERNNQIFNQQQRSWTEVAKAMAEEAMLWKSANHGIPAVWPLRGRGSQI

SEQ ID NO: 171814 - protein, 749 aa, Oryza sativa
  Clone ID: PAT_MRT4530_70009C.1.pep
MADRDEEQILYDTIAEGSSQYWNEEEGNEDPNQYLNEERNVERDAEGNEEGNKEGNVERDAEGNEEEASGSHPSAGQKRARGQRGATKKIKGRHIITEVDEDGRPSAPAEAAKNFVHHIGWVVRDNVPVSKVYWRKTRARGDDDSFVPESEKEMLWTTMLETFTLPAGTENIVKQWTLKKMAEQFQSFKGDLYKKYILKGLTLNFDVFPKLRDHWDEFIAYKTGQQGQAMMDRNKENTAKKKYHHHLGSGGYSVAMPKWEEMEASIIERGIEQATAKWPYRSKFWYYAHEKDELSLALQTPEHPGQTRGKGVVPWKIGFKEDIHTYRSRMRSKRDTEAKIADLEYRVSSYEARGGGKEGNRSSCASTGQVGSQSMDAMQTQDETTCPVDEITQRTPCELHIPFKNLSIKVALEMAIPTDPSGTYHCRPVPAGYSRVEVELVEAAYEDLELDYPGGDGETHLRDTSHAIILWRKRYIILPRRQAASRAPSPPAPPSPPPPPPAPSPSAPPAPPPPLCPPAPLKTRSRQAPPPARTRATKKAKVDATKNKESPYDCSQEELNAYVAGEVKRQLKPRSPEKKIPVDPSVKNLFKKMSTTNKEMYKFHERYMEMSAKGREMFGARIRNSDFLQGEDVLWIHFKDVFELYPLDTLDVSLLSALILMEIKRARRWGVYDTGFIDPRKINAEMIDKYEKDIEDNLVHLLTQQHFKTFILLPYNTEFHWVLLLFDLDACRVNVYNSMNKEEKTFDKD

SEQ ID NO: 171815 - protein, 181 aa, Oryza sativa
  Clone ID: PAT_MRT4530_7000C.1.pep
DCSKVQTVFQHQKACNCLCSCMFSFTRARGQSQIIEALGATVERVRPVSITHRDHFVNIARRRALEANKSAAAQRESRYKETNGSAHVNTRIMHSKITASKGESNKALTNCSANSEIQYNGKCDHDSDSKGGFFADQFENMANYRAHYEWTGPEIWQQSKGTLHAFVAAAGTGGTIAGVSR

SEQ ID NO: 171816 - protein, 78 aa, Oryza sativa
  Clone ID: PAT_MRT4530_70010C.1.pep
MGSTSSAKMFRDGRNQGRPKRPIDAEGKVVAAAWVRLTCIGNVRKRDTHRHYLPVSRIRVGSLLTSVELLAQRDENDR

SEQ ID NO: 171817 - protein, 264 aa, Oryza sativa
  unsure (1)..(264): unsure at all Xaa locations
  Clone ID: PAT_MRT4530_70011C.1.pep
MTTEASTNLHFCSAESAIHLAFGERLPLNDTLDHCSWLTVKWHQQQLDHKPSEQLGHLPWWTWLQWTSSSKPWQGLAIPGSQKERNFVAASTVYQLRDGQTILFWEDSWLQEGCIRSFAPNIYDKIPPCVRRRRTVAEALTGRQWIKDIRGALGIQPILEYLKLWSLVQMVDLDPTTPDSIIWKWESSGQYSSKSAYKALFLGRVTFLSTPIWKSLAPPXAASSCGWSQXIDAGPLTVCAVEGCHTRIAVFFAISRRKALITSW

SEQ ID NO: 171818 - protein, 1320 aa, Oryza sativa
  unsure (1)..(1320): unsure at all Xaa locations
  Clone ID: PAT_MRT4530_70012C.1.pep
MNAISQKVIDPDRLKALQNDVVQCLVSFELIFPPSFFNIMTHLLCHLVKEIGILGPLYLHNMFPFERYMGVLKKYVRNRASPEASIAKGYGTEEVIEFCVEFIEDLRPIGVPESRHEGRLRGKGTLGRKAIMTVDNNLFRKAHFTVLQQSSLVAPYIEEHLALVRARNIGKSDAWITRHHIDTFSTWLRQHLMGNETINQQLXFLARRPFGSIATFQGYEINGYTFYTRAQDMKSTNQNSAVRIDAMGHDGTTGTYYSAIEDIWELDYGPLKVGYSDEPFVLANDVTQVFYVKDMSSKGKKGKGPDEPKRHVVLPGKRKIVGVEDKTDEDYDQFDGXPPFTVTIDPSILLSNEDTPYSCSDHKEGTIVRRKNTYAMKFKTQLLLSLVPVPNSNRMADRDEEQILYDTIVEGSSQYWNEGEGNEDPNQYLNEEGNVERDAEGNEEGNDEEEASGSHPSAGQKRARGQRGAAKKIEEAAKNFVRHSGWVVRDNVPVSMVYWRRTRARGDNDSFVXDSEKEMLXTTMLETFTLPAGTENIMKQWTLKKMAKQFQSFKGDLYKKYILKGLTPSFDVFPKLRDHWDEFVAYKTGQQGQVMMARNKENAAKKKYHHHLGSGGYSVAMPKWEEMEASLLERGIEPATANWLERSKFWYYAHGGTLNPVDGSLVFSDQIREAASRLTDAVVASSQGTFRPDRERFRPDREKDELSLALXTPEHPRRTRGKGVIPWKIGFKEDIHTYRSRMRSKRDTEAKIADLEYRVSSYELSMQEEVARKVDERMAAHRSXDPQPYIHHVKVASGMAIPTDPSGTYHCRPIPAGYSRVEVELVEAAYEDLELNYPGGDGETHLRDTSHAIILWRKRYIILPGXQAASRAPSPPAPPSPPAPSLPVPPPRPPEPSHPAPPPPPAAPFPPTPPPPPPPPCRLAPPKTRSRQAPPPAHTRATKKAKVDATKNKEPPYDCSQEELDAYVAGEVKRQLKPRSPEKKIPIDPSVKNFFKGMSTTNKEALQISDYDRTLQRAYHKKSKPVPQLGEQPNQEVEPLVTGEDFGITEFIADTGLTVDQLVRGAPIPKAEVAYKFELGKPLVKPEQLQSLPTQMYKFHERYMEMSAKGREMFGARIRNPDFLQGEDVLWIHFKDLFDLYQLDALDVSLLSAWILMEIRRARRRRVYDTGFIDPRKINTEMIDKYEKDTEDNLVHLLTQQHFKTYILLPYNREVTVYDSMNKEEKIFDKVFKLIDRAWDRFRXLVRGTWKXKLGRRFHFPRIHMRDNLPHKDFITAVQEQPMGFFNEEVLNPDGEFYYDESTIHNVGPSSSDIAPASKS

SEQ ID NO: 171819 - protein, 884 aa, Oryza sativa
  unsure (1)..(884): unsure at all Xaa locations
  Clone ID: PAT_MRT4530_70013C.1.pep
MAEQFQTFKGDLYQKYILKGQTPNFDVFLKLWDHWDEFVAYKTGQQGQAMMERNKENAAKKKYHHHLVSGGYSVAMPKWEEMEASLLEKGIEPATAKGPDRSKFWYYAHGGMLNPVDGSLTPEHLGRTRGKGVIPWKMGFKEDIHTYKSRMRSKRDTEAKIADLEYRVSSYELSMQEEVARKVDERMAAHRSHDPQPYIPPPMVSPSGNHSSCASMGQVVSHSMDAMQTQDETTCPVDEITQRTPCELHIPFKNLSIKVALGMAIPTDISGTYHCRPIPAGYSRVKVELVEAVYEDLELDYPGGDGSSASXAPSPPAPPPPPPAPSPPPPPPPPPXQEELDAYVAGEVKRQLKSRSLEKKIHIDPSMKNFFKGMSTTNKEALKLSDYDRTLRKAYYKKSKPVPQLGEQPHQVVEPLVTGEDFGITDFISDTGLTIAQPEQLQSLPTQMYKFHARYMEMSANGREMFGARIRNPDFLQGEDVLWIHFKDVFDLYHRDALDVSLLSAWILMEIQRARQRGFYDTGFIVPRKINTEMLDKYEKDTEDNLVHLLTQQHFKTFILLPYNTEVTVYDSMNKKEKVFDKVFQLIDSLAGGCVADNVESSSMENSSSKAAGVERPNLTGEERPNVPRARRAPQRRRRQSSRTFAVLQQVRMFQVVVALVLFSLEPFMLLKQERCISGSSYLENIPRIGMYNDSMIAEFIEKDVILKNRNPFPAYGKMKLRNKHDEKYNIGHHTGAIEAIHVDHTYDARSDIEPPSFNLGITQDIEEVNMVACTPGHDISNVAEDSDKEQELNFLARTPDQPISKSVDASDKSGEAGDDQWNPEDHLPSFKDDSLIPYVVPSCHLECMKLAFPDWGEDIPNWVSKFPSVIPALNNKFQFMLPI

SEQ ID NO: 171820 - protein, 1348 aa, Oryza sativa
  Clone ID: PAT_MRT4530_70014C.1.pep
MEEDEVEDDNILDIAQYAGFEGNQTGEEERDADGNNVADDLGQMLQDAKEDCECEKGAHKLDKMLEDHRTSLYPSNKAMCFHERNFAEEIGILGPVYLHNMFPFERYMGVLKKYVRNRACLEASIAKGYGTEVVIEFCVEFIEDLRPIGVPESRHEGRLQGKGTLGRKAIMTVDNNLFRKAHFTVLQQSSLVAPYIEEHLALVRARNIGKSDAWITRHHIDTFSTWLRQHLMGNETINQQLAFLARGPSSSIATFQGYEINGYTFYTRAQDMKSTNHNSVVRIDAMGHDGTTGTYYGAIDDIWELDYGPLKVGYSDEPFVLANDVTQVFYIKDMSSKRKKGKGPDEPKRHVVLPGKRKIIGVEDKTDEDYDQFDGQPPFTVTIDPSILLSNEDTPYSRSDHKEGTIVRRKNTYAMKFKTQLLLSLVPIPNPNRMADREEEQILYDTIAEGSSQYWNEEEGNEDPNQYLNEEGNVERDAEGNEEGNNEEEASGSHPSAGQKRARGQRGAAKKIEEAAKNFVRHSSWVVRDNVPVSTVYWRRTRARGDNDSFVPDSEKEMLWTTMLETFILPASTENIVKQWTLKKMAEQFQSFKGDLYKKYILKGLTPNFDVFPKLRDHWDEFVVYKTGQQGQAMMVRNKDNAAKKKYHHHLGSGGYSVAMPKWEEMEASLIERGIEPATAKWPDRSKFWYYAHGGTLNPVDGSLVFSDQIREAASRLTDAVVASSQGTFRPDREKDELSLALQTPEHPGLTRGKGVIPWKIGFKEDIHTYRSQMRGKRDTEAKIADLEYRVSSYELSMQEEVARKVDERMAAHRSQESQPYIHPAMVASGMAIPTDPSGTYHCRPYSRVEVELVEAAYEDLELDYPGGDGKTHLRDTSHAIILWRKRYIILPGRQAASRALYPPAPPSPPPPSPPVPPPRPPAPSPPAPPPPPAAPSPPAPSPPPPPPCPSTPPKIRSRHAAPPARTRATKKAKVGATKNKEPPYDCSQEELDAYVVGEVKRQLKLRSPEKKIPIDPRVKNFFKGMSTTNKEALQISDYDRTLQRAYHKKSKPVTQLGEQPNQEVEPLVTGEDFGIMEFISDTGLTVDQLVGGAPIPKAEVAYKFELGKPLVKPEQLQSLPTQMYKFHERYMEMSTKGREMFGARIRNPDFLQGEDVLWIHFKDLFDLYQLDALDVSLLSAWILMEIQRARRRRVYDTGFIDPRKINTEMIDKYEKDTEDNLVHLLTQQHFKTYILLPYNTEVTMYGSMNKEEKIFDKVFKLIDRAWDRFRQLVRGTWKEKLGRRFHFPRIHMRDNLPHKDFITAVQKQLMGFINEEVLNPDGEFYYDGSTIHNVGTSSPDITPASKS

SEQ ID NO: 171821 - protein, 347 aa, Oryza sativa
  Clone ID: PAT_MRT4530_70015C.1.pep
MGYKVFSSRSPAPPRTNSGERGLAAGSGGGGGGMDRWTGVLNVPLSRGGPPFRVAASLVLTPAKTLAVPCANAILFTGDRVRGSGDPAIERLSDAAYLARLLAGKLTGEANAWVVDAACFAGSFAVYRDLVPSVDAVGDPERNFALTFFFVNIQSMVTKATMKGSSGNQSPTTSLLKYCPPKTVILGFSKGGVVVNQLVTELACLASESAKISDDVSGSSPPLLTRNLLVPISATEFLSSASEFHYVDVGLNHAGAYITDHAVIKEIANYLMHTSKNLCFVLHGTPRQWSDPNRSWIQMEKEVMLRLLQDEAQRCEGRLVLSQKRYFDGKPRSLLMHFEILEVMDIG

SEQ ID NO: 171822 - protein, 52 aa, Oryza sativa
  Clone ID: PAT_MRT4530_70016C.1.pep
HYSLRRSQLLQLSVVSSRLGSKSHNLSNLLSLVFPLRELRHCLVLWPNTMLG

SEQ ID NO: 171823 - protein, 630 aa, Oryza sativa
  Clone ID: PAT_MRT4530_70017C.1.pep
MDSDAAPSVTPGAVAFVLENASPDAATGVPVPEIVLQVVDLKPIGTRFTFLASDGKDKIKTMLLTQLAPEVRSGNIQNLGVIRVLDYTCNTIGEKQEKVLIITKLEVVFKALDSEIKCEAEKQEEKPAILLSPKEESVVLSKPTNAPPLPPVVLKPKQEVKSASQIVNEQRGNAAPAARLAMTRRVHPLISLNPYQGNWIIKVRVTSKGNLRTYKNARGEGCVFNVELTDVDGTQIQATMFNEAAKKFYPMFELGKVYYISKGSLRVANKQFKTVHNDYEMTLNENAVVEEAEGETFIPQIQYNFVKIDQLGPYVGGRELVDVIGVVQSVSPTLSVRRKIDNETIPKRDIVVADDSSKTVTISLWNDLATTTGQELLDMVDSAPIIAIKSLKVSDFQGLSLSTVGRSTIVVNPDLPEAEQLRAWYDSEGKGTSMASIGSDMGASRVGGARSMYSDRVFLSHITSDPNLGQDKPVFFSLNAYISLIKPDQTMWYRACKTCNKKVTEAIGSGYWCEGCQKNDAECSLRYIMVIKVSDPTGEAWLSLFNDQAERIVGCSADELDRIRKEEGDDSYLLKLKEATWVPHLFRVSVTQNEYMNEKRQRITVRSEAPVDHAAEAKYMLEEIAKLTGC

SEQ ID NO: 171824 - protein, 87 aa, Oryza sativa
  Clone ID: PAT_MRT4530_70018C.1.pep
LTVQAGKYRARLGIRLCLYLKALISLVQTGSSGVMQASEVGGTIVEDRVEAGVGDVMQGCGELGGRTVVNVESGLTGVRQEVEGSGI

SEQ ID NO: 171825 - protein, 84 aa, Oryza sativa
  unsure (1)..(84): unsure at all Xaa locations
  Clone ID: PAT_MRT4530_70019C.1.pep
FSLISLPLSFXQTSYRCPLYLSIIPXSLYLYIILLHYLSIFSSPHTTHPQFPIRPHYTTDHLSDDSHPKSYGHTPLHNTFQPTT

SEQ ID NO: 171826 - protein, 424 aa, Oryza sativa
  Clone ID: PAT_MRT4530_7001C.1.pep
MRRATILVLLIALSSVIAPLPLEALNVRGHLLKSKTFLSPAFFLHPGSVSNKFYYDVPFPRGHLALKSFNAEVVDENGVPVPLHDTYLHHWVVEPYYALKNSDSADAQKLPKGIIARNSGVCKKTLGQYYGLGSETRHTATWVPDPYGIEIGNPEKPPEGYEEKWLINVHAIDTRGAIDKLGCTECKCDLYNMTIDEYGRKLPKDYIGGLYCCYDETQCKVKEGFNGELRKLFLRYTVTWLDWSDAVVPVKIYIFDVTDTSPPDEKSGTACKVEYQVEECSPENRAKNECIDVKVTKEVIPCGGDIVFGVAHQHSGGIGASLHGQDGRLLCASIPSYGKGEEAGNEDNYIVGMSTCYPKPGSVKVSDGEVLTVVSNYSSDRQHTGVMGLLYILVAEQEQPAPKPALCFSFPVPWCLPTWLTSNL

SEQ ID NO: 171827 - protein, 59 aa, Oryza sativa
  Clone ID: PAT_MRT4530_70020C.1.pep
LSDIDAHAFFLRYEMSDKFISSYYLQSCQILVEQKSAVHNLHIYGTVHFEQCLYMKVLS

SEQ ID NO: 171828 - protein, 103 aa, Oryza sativa
  unsure (1)..(103): unsure at all Xaa locations
  Clone ID: PAT_MRT4530_70021C.1.pep
MSSTLHKMTSKRKIAINLHHRRTPPYPVRAATWSTIVSFPHLLVLSMSPTWSSRWLLLLALVNTSLLVKVLPSVXRRGSKQCLLLICRRPLPSIATVSSSSSS

SEQ ID NO: 171829 - protein, 74 aa, Oryza sativa
  Clone ID: PAT_MRT4530_70022C.1.pep
MPDLVPPGRGEARSAAAASLGGRIRRGDKAAAAAGDKAAAGGATPRPGLPPHHLPRGDEGAVGEVEREDAAVRA

SEQ ID NO: 171830 - protein, 91 aa, Oryza sativa
  Clone ID: PAT_MRT4530_70023C.1.pep
IHASLSSAQFLEPTHTIPLNLMVRDAYILVPFKPSFTLSRRRLCRYMCRLSGSRTVPRVLPVLAVLSFFHHFSLLSLSPFFLLFFHGCQLF

SEQ ID NO: 171831 - protein, 97 aa, Oryza sativa
  Clone ID: PAT_MRT4530_70024C.1.pep
MPWQHELNHLAGEGVPPRVAVAGPPPTPPPSSPPPIPSHVPPSLTPEYIPELLISGEFVDVELGAGGSTQQNDGAAGFCSKLGRAIMQVLLSCGCGL

SEQ ID NO: 171832 - protein, 120 aa, Oryza sativa
  unsure (1)..(120): unsure at all Xaa locations
  Clone ID: PAT_MRT4530_70025C.1.pep
PPLAEGFFSPPQGPSPKEGPPPRSPGIIFFLGGHSEGGPTQTLNRITQGPNPGPVLFLXRRALQNTSPKMWGGHPENLKRAQNPFFLRPKANSLGQLGKYPNDGGAPEAKEGMFVKKYVF

SEQ ID NO: 171833 - protein, 49 aa, Oryza sativa
  Clone ID: PAT_MRT4530_70026C.1.pep
MEVRPMVALRAALVGGVAAFAKIGAAMKAAGGAKAHRFYEADHNGVYNG

SEQ ID NO: 171834 - protein, 53 aa, Oryza sativa
  Clone ID: PAT_MRT4530_70027C.1.pep
NYSSILTIHSEVIDGQLGTLVVESFVVDIPDGNTKDDICYFIENVLRTLRMLV

SEQ ID NO: 171835 - protein, 53 aa, Oryza sativa
  Clone ID: PAT_MRT4530_70028C.1.pep
RMRTVLLRARHGRGWNNMRLTEAIDARNRRVLKTSISHLACYTIHLIKPCDSF

SEQ ID NO: 171836 - protein, 1256 aa, Oryza sativa
  Clone ID: PAT_MRT4530_70029C.1.pep
MVKDSKTPVYNGWPKQPGNDIDVYFKPLVEDLHTLWTEGVQMWDTYKQEHFTCRAILLGTITDYPALGNTSGQMVKGMKACVWFLRRDHPHHQNKKAFDGTVEIDGRPIFRTGSEILAEVKIHIERRARGIVEHTWQDEGHFASTERSWKTWTSGKSCILKTEEMAATTYLRHATLLVLQKKRLLPVAIRGILLEKIRDPIIKLCQFFKAINQKVIDPASLGMLQEDTILNLCQLDMLFPLSFFDIMVHLIVHLVEQVKILGTAYLDSMWAFERFMGIIKKYVRNRSIPEGSIIEGYATEEVVEFCIDYMDLQPIGVPVPRHEGRMLGKGILGHRRIVAPNRQTIRHAHFAVLRQSALVAPYMDMHLDVLRRDNPRKGAAWLAKMHKLQFGKWLMEYLTTADIDGAHFSLSRWPSNTIHMYQGYDMNGYTFYTKSQDNKSINQNSGVRIDAYDDESIWELDYGALKVPLFQCKWVKIPRGLKIDKHGTIIVDLNDVGYEDEPFVLAKSVKQIFYVKDPSLMKPHHVVLEDKQSIVGMEISSTKMTTINPMSHRHPQLMSRLKTRQALKRMTKASAAVKRGSGVRRQGGGGGSNDGPMPSRCKVGVEVGTEHKEFASSRSEGEHHASPSTFLNLNQEHSEGGEEECWRKLKLSFTFPEGQEELAKKGALSKMGTLFREWWTDLNVDFVQCNRTPDFEKPMYQKLADYWDEFEGSTIGSGELVALGPHQQELKEKITEAISLARQGKFVPVREKDEITVALGTKEHPGRMRGVGSVPWKEGFPDDTHMYRARSRRPTREEEAGRMRLEVAYQSNITQEIARNVAHPICAGQTIHGVPLPADHSRVEVEDVPSQYRCYVLQFPLEEGVDTLSAALHNLIVWPKRYIVITNDGAGDPSADDSSLSNGRGHSSPRQRSPSLPPRQKTPNQPQPSQKSPSTGPIRKKTPTPSASQMSGSSSMERLPHSKSKLVPNPTTSLPKKVSGSITSLLGPKKPEERKIPIPKKVIEHFIKCAQPRLPPKPISDFRRTLEKSEMQSRSRELFLDKKASDEAAFCKSVDLKSLDDIDNLDKAEVVLSSNMDDPWRCSYQCRSLDRKIAFLDPAVVNFNNQLSKEKEIDDYLFNALVKQNGYDHILLPYLSHHHWILFVINIDDSKICVYDSLRKGTDNYQTIMNALNRAYVKYRRSKRTYGRCAIDATSFRIFENQYIYRQPALTNLCGMYVMWYMLCFVESGHLLPRNAEKLGLETSEMLPHVFTALTD

SEQ ID NO: 171837 - protein, 384 aa, Oryza sativa
  Clone ID: PAT_MRT4530_7002C.1.pep
MAKSGLLPLTILLLAVATALHGADRVTAVPSLEGLEAAGEGLAEPIKKVVGGAVATGVESVGRKRPAMKDFAAGVKAGRKFHKGFKSGAAAWAMRYLGDQLPPSSLSLQAWAAYRDRDDGSNWSPSSFEAICNESEMIAHLQSLFWSSSDADPCFGSSSFSLISSEGYDTMTTEFVNSSTNVCFDYQDDSFVSAEETTIGNKRKVQMDTENELMTNRSKEVRTKMSVDISTMLEEAIQYVKFLHLQIKVEGLGAQGSTTMTSSFVDNSVNTNLNQGVPTSTMLVWTQIGEIVFPVYTTVPILAGPSMAGNENTVATTQGDSMSKDPPAEAEIGTSTTSEPEKDPSAAKPCLSDKNHESTRMTSEVIRSWCPIHRPSTSGPSTQY

SEQ ID NO: 171838 - protein, 41 aa, Oryza sativa
  Clone ID: PAT_MRT4530_70030C.1.pep
SSGRTGQPATGGTTAVRPAGARWSDRWRQQARRAASAVRPV

SEQ ID NO: 171839 - protein, 455 aa, Oryza sativa
  Clone ID: PAT_MRT4530_70031C.1.pep
MATSPEIERPAADLEDMNTYPLDIMDLEWITIADRDSVEYFRGVTALVATSTSTNLVDAPEYIWCPCHDCKKDRQLPAQRVHSHILTRGFMDNFLSEENQGEGSAGNCHGHDADVGYEEEEDQTCVDHGEPNLDQMLRDGERFDTDDREYHKFTTMVKDSKTPIYNGLMPGMQGSGSTCASTSSGETPLFKKKSVFWDLPYWEDLDIRHAIDVMHVMHVEKNVCQGVLGVLLNTPGKMKDTSQARKDLKDMGIRKELHPQDRGNDRYYLSPACYTLSAAEKTSMLECMWGVKVPSGYCANIKRLVSMKDKRLVGMKSHDCHVLMTQLLPVAIRGILLEKVQDPIIKLCQFFNAINQKVIDPASLGKLQEDAILNFCQLEMLFPLSFFDIMVHLIVHLVEQVKILGPAYLHSMWAFERFMGIIKKYVRNRSRPEGSIVEGYCHTLKFPLFLALKIG

SEQ ID NO: 171840 - protein, 206 aa, Oryza sativa
  Clone ID: PAT_MRT4530_70032C.1.pep
MKASSVALLAAVMAVAAVASTAVAKDYTVGGSYGWDTYVDYDKWAAGKTFIVGDTINQQWRAAFKYEPYHNVVEVPAETDYDGCVSTNPVSVHSGGNTTFELAAAGTRYFICSIPRHCLNGTMHVKVTTVPYSASAAAAAAADAGPSPAPLPSPPADEQQHRSNSASSPAAGPSSSAASTPRHRKQPAVAVAGLALAALVAMAATI

SEQ ID NO: 171841 - protein, 247 aa, Oryza sativa
  Clone ID: PAT_MRT4530_70033C.1.pep
GFMDNFLGEEEQGEGSAGNCHGHDADVGYKEEDQTCVDHGEPNLDQMLRDGERFDTDDKEYHKFTTMVKDSKTPIYNGCKAEHSKLQVVLSLLHLKASNGWSDKSFTELLELLKEILPTDNVLPESTYQAKKVICPLGLDIQKIHACLNDCILYRGEFAYLEQCPGKYIMMPLLIQGPTQPGNDIDVYFKPLVEDLHTLWTEGMRMWDAYKREHFICRAILLGKITDYPALGNTSGQTVKGMKAMCK

SEQ ID NO: 171842 - protein, 228 aa, Oryza sativa
  Clone ID: PAT_MRT4530_70034C.1.pep
MHQNIFGVHAMIVRKTDNFQLSGSIHISLQGVLWTISLARRIKVREVLATVMGMMRIFGVMPGMQGSGSTCASTSSGETPLFKKKSVFWDLPYWEDLDIRHAIDVMHVMHVEKNVCQGVLGVLLNTPGKMKDTSQARKDLKDMGIRKELHPQDRGNDRYYLSPACYTLSAAEKTSMLECMWGVKVPSGYCANIKRLVSMKDKRLVGMKSHDCHVLMTQLLPVAIRVSF

SEQ ID NO: 171843 - protein, 777 aa, Oryza sativa
  Clone ID: PAT_MRT4530_70035C.1.pep
MAAPAPKQEELQPHAVKDQLPAISYCLTSPPPWPEAILLGFQHYLVMLGTTVIIPTALVPQMGGGNEEKARVIQTLLFVAGINTLIQSFLGTRLPAVIGGSYTFVAPTISIILAGRYNGIADPHEKFVRIMRGTQGALIVASTLQIIMGFSGLWRIVVRLLSPLSAAPLVALVGFGLYELGFPSVAKCVEIGLPQIILLVALSQYIPKLVPLLGTAFERFAIIMSVALVWLYAFFLTVGGAYKNAAPKTQFHCRTDRSGLVGGAPWISVPYPFQWGAPTFDAGEAFAMMAASFVALVESTGAFIAVSRYASATPCPPSVMSRGIGWQGVGILLGGLFGTANGSSVSVENAGLLGLTRVGSRRVVQISAGFMIFFSILGKFGAVFASIPGPIIAAIYCLLFAYVGMAGVGFLQFCNLNSFRTKFIVGFSVFMGLSVPQYFNEYTSVAGYGPFNDMINVVFSSKAFVGGAVAYLLDNTLQRHDSTARKDRGHHFWDRFRSFRTDPRSEEFYSLPFNLNKKSGPFQLETASCSLQVQGESRTRPRQGGGGEGWWWSAMAHRVDNEYDYLFKIVLIGDSGVGKSNILSRFTRNEFCLESKSTIGVEFATRTLQIHRYRATEIEGQTIKAQIWDTAGQERYRAITSAYYRGAVGALLVYDITKKQTFENIQRWLRELRDHADSNIVIMMVGNKSDLNHLRSVPEEDGQALAEKEGLSFLETSALEALNVEKAFQTILKDIHQIISKKALAAQEAAGSGPPTQGTTINVTDSAVNTKRGCCSS

SEQ ID NO: 171844 - protein, 33 aa, Oryza sativa
  Clone ID: PAT_MRT4530_70036C.1.pep
INTTLKDINKSLKTTNLDHYQRYEHHNISQTFH

SEQ ID NO: 171845 - protein, 484 aa, Oryza sativa
  unsure (1)..(484): unsure at all Xaa locations
  Clone ID: PAT_MRT4530_70037C.1.pep
MGIRKELHPHDRGNGRYYLPPACYTLSAAEKTSMLECLRGVKVPSGYCANIKRLVSMKEKRLVGMKSHDCHVLMTQLLPVAIRGILLEKVQDPIIKLCQFFNAINQKVIDPASLGKLQEDAILNFCQLEMLFPLSFFDIMVHLIVHLVEQVKILGPAYLHSMWAFERFMGIIKKYVRNRSRPEGSIVEGYAIEEVVEFCIDYMDLQPIGVPVPRHEGRMLGKGTLGHRRIFTPDRQTIRHAHFAVLRQSALVSPYVHMHLDVLRRDNPRKGAAWLAKMHKLQFGKWLMEYLTTADIDGALFSLSRGPSNTIHMYQGYDMNGYTFYTKAQDNKSTNQNSGVRIDTYDDGGNKQTYYGFIQSIWELDYGALKVPLFQCKWVKIPRGLKIDKHGTIIVDLNDVGYEDEPFVLAKSVKXIFYIKDPSLMRPCHVVLKGKRSIVGMENIIDEDDYDQPDEPPLPTIDIETENEATAEENDQARHGATAR

SEQ ID NO: 171846 - protein, 226 aa, Oryza sativa
  unsure (1)..(226): unsure at all Xaa locations
  Clone ID: PAT_MRT4530_70038C.1.pep
IDLEWITTAXDRDSVEYFRGVTALVAAATSTNSVDAPEYIWCPCHDCKKDKQLPAQRVHSHLLTRGFMENFLSEEEQGERSDGNCHGHDADVGCEEEEDQTCVDQMLRDGERFDTDDREYHKFTTRVKDSKTPVYNGCKTEHSKLQVVLSLLHLKARYLEDEKPLKSYAYPMLENSPERGVFPATTACGLGAGEVTARVEGVGGAGQQCPSCAVDKCKEVLSRCHD

SEQ ID NO: 171847 - protein, 540 aa, Oryza sativa
  Clone ID: PAT_MRT4530_70039C.1.pep
MDLEWITTADRDSVEYFRGVTALVAAATNTNSVDAPEYIWCPCHDCKKDRQLPAKRVHLHLLTRGFMDNFLGEEEQGEGSAGNCHGHDADVGYEEEEDQTCVDHGEPNLDQMLRDGERFDTDDKEYHKFTTMVKDSKTPIYNGCKAEHSKLQVVLSLLHLKASNGWSDKSFTELLELLKEILPTDNVLPESTYQAKKVICPLGLDIQKIHACLNDCILYRGEFAYLEQCPVCKASRYKCGDGDDEGGNKKRVQVKVVWYFPIIPRLERMYANKKHAKLMRWHHEERKKDGMIRHPADGSQWRKIDRKYQKEFSHDIGNIYLKGKYIMMPLLIQGPTQPGNDIDVYFKPLVEDLHTLWTEGMRMWDAYKREHFICRAILLGKITDYPALGNTSGQTVKGMKACVRCMAQTGGKWLNHCRKTMYMRHRRFLRQDHPYHRNKNAFDGTVEMDGCPIFRTGSEILAEVKDLRVVFGKGSGSTCASTSSGETPLFKKKSVSWDLPYWEDLDIRHAIDVMHVEKNVCEGVLGVSLNTPGKMKDVTS

SEQ ID NO: 171848 - protein, 161 aa, Oryza sativa
  unsure (1)..(161): unsure at all Xaa locations
  Clone ID: PAT_MRT4530_7003C.1.pep
SAPPAPSTTTSTRRRIPPRRRRRRRPPSSTPLTAPSALDPXPSAPSSPTSAPPAPSTTTSASRRIPPRRRRPPSSTTTTPATPPMAPSTLPPXTTTMTAMPPTAPSAPXIRTPPAPSSATSAPPAPSTTTSARCRIPLLLATTSDDARRRLLSSPPPLAAS

SEQ ID NO: 171849 - protein, 897 aa, Oryza sativa
  unsure (1)..(897): unsure at all Xaa locations
  Clone ID: PAT_MRT4530_70040C.1.pep
MADRDEEQILYDTIAEGSSQYXNEGEGNEDPNQYLNEEGNVERNAEGNEEGNDEEEASGSHPSVGXKRAHGQRGAAKKIEEAAKNFVRHSGWVVRDNVPVSTVYWRRTRAYGDNDSFVPDSEKEMLWTTMLETFTLPAGTENIVKQWTLKKMAEQFQSFKXDHWDEFVAYKTGQQGQAMMARNKDNAAKKKYHHHLGSGGYSVAMPKWEEMEASLIERGIEPATTKWPDRSKFWYYAHGETLNLVDGSLVFSDQIREAASRLTYAVVASSQGTFRPDREKDELSLALQTPEHPGQTRGKGVIPWKIGFKEDIHTYRSRMRSKRDTEAKIADLEYRVSSYELNMQEEVARKVDERMAAHRSQDPQPYIHPAMVASGMAIPTDPSGTYHCRPIPAGYSRVEVELVEAAYEDLELDYPGGDGETHLRDTSHTIILWRKRYIILPGRQAASRAPSPTAPPSPPAPSPPVPPPRPPAPSPPAIPPPPAAPSPPAPPPPPPPPCPPAPPKTRSRQAPPPARTRATKKAKVDATKNKEPPYDCSQEELDANVAGEVKRQLKPRSPKKKIPIDPSVKNFFKGMSTTNKEALQISDYDRTLQRAYHKKSKPVPQFGEQPNQEVEPLVTGEDFGIMEFISDTGLTVDQLVGGAPIPKAEVAYKFELGKPLVKPEQLXSLPTQMYKFHERYMEMSAKGREMFGARIRNPDFLQGEDVLXIHFKDLFDLYQLDTLDVSLLSAWILMEIQRARRRRFYDTGFIDPRKINTEMIDKYKKDTEDNLVHLLTQQHFKTYILLPYNTEVTVYDSMNKEEKIFDKVFKLIDRAWDRFRQLVRRTWKEKLGWRFHFPRIHMRDNLPHKDFITAVQEQLMGFINEEVLNPDGEFYYDGSTIHNVGPSSSDITPVSKS

SEQ ID NO: 171850 - protein, 34 aa, Oryza sativa
  Clone ID: PAT_MRT4530_70041C.1.pep
WPAKPARQEERRPAARTVGGAVAGCYRAAGARGT

SEQ ID NO: 171851 - protein, 85 aa, Oryza sativa
  unsure (1)..(85): unsure at all Xaa locations
  Clone ID: PAT_MRT4530_70042C.1.pep
LPFGEVLQLSSNIIERKPKGFAIAKVLAWMKEKRPSVRNAWMIKEVDWGPNQNLXQVHCYLTTSLLVHRRQEMKFYTFWIRIRTS

SEQ ID NO: 171852 - protein, 1061 aa, Oryza sativa
  Clone ID: PAT_MRT4530_70043C.1.pep
MTTVDLNKVGYSDEPFVLANDVTQVFYVKDMSSKGKNGKGPDEPKRHVVLPGKRKIVGVEDKTDEDYDQFDGQPPFTVTVDPSILLSNEDTPYLRSDHKEGTIVRRKEDVVVVVPQTEVMADRDEEQILYDTIASGSSQYWNEEEGNEDPNQYLNEEGNAERDAEGNEEGNVERDAEGNEEEASGKKEMLWTTMLETFTLPAGTENIVKQWTLKKMAEQFQTCKGDLYRKYILKGQTRNFDVFPKLRDHWDEFVAYKTGQQGQAMMERNKENAAKKKYHHHLGSGGYSVAMPKWEEMEASLLERGIDPATAKWPDRSKFWYYAHGGTLSPVDGSLVFSDQIREAVNRLTDAVEASSQDTFRPDREKDELSLALQTPEHPGRTRGKGVIPWKMGFKEDIHTYRSRMRSKRDTEAKIADLEYRVSSYELSMQEEVARKVDERMAADRSHDPQPYIPPPMVSPSGNRSSCASTGQVVSHSMDAMQTQDETTCPVDEITHWTPCELHIPFKNLSIKVASGMAIPTDISGTYHCRPIPAVYSRVEVELVEAVYEDLELDYQGGDGETHLRDTSHAIILWRKRYIILPRRQAESRAPSPPAPPSPPAPSPPAPPPPPPPPPPCPPAPPKTRSRQAPPPASTRATKKAKVDTTKNKEPPYGCSQEELDAYVAGEVKRQLKPRSPEKKIPIDPSVKNFFKGMSTANKEALKLSDYDRTLRKAYYKKSKPVPQLGEQPHQVVEPLVTGEDFGITDFISDTGLTMAQLVGRAPIPKAEVAYKFELGKPFVSPEQLQSLPTQMYKFYERYIEMSANGREMFGARIRNPDFLQGEDVLWIHFKDVFDLYHRDALDVSLLSAWILMEIQRARRRRVYDTGFIDPRKINTEMLDKYEKDTEDNLVHLLTQQHYKTFILLPYNTEFYWVLFFFDLDACRVTVYDSMNKEEKVFDKVFQLIDRAWDRFRQLCAKQDKGTNLCGYYICEFSHCLSNQIYTTRELDRIHMREKLPHKDFIMAVQEQLMGFINEEVLNPDGEFYYGRDWTNFGNAGPSFFEGDSMSRESICGDGPGVGLG

SEQ ID NO: 171853 - protein, 1858 aa, Oryza sativa
  Clone ID: PAT_MRT4530_70044C.1.pep
MANKTLREFAAPSADNVAIGPQVNIGDVDFDLKSSLITIAQANPFCGEPNEGSNADLQQFLEICSTYNIKGVNPDTVRLRLFPFSLLGRAKQWFYVMRTSTPTIHPHFHNYNFMLLVHLVLAGSRLLAGTNTLVVGLIVHPSRFTTTSGVGVTIAKAQHPRIVVVGSPTSLHPIDLSLSSKDRDTLEHIRWYQSPSCSFFFDSLHSPPIAPPVRLTLDRDSATKASIHLLQRFVQVRRLPSPPVWHDENWLVRDRTQGLEEDVCITNEKLGHVERTQIDSNTKLTTLEASVATVNTSLDGIVWRLDEMARASHHGSEMDDHDYVGDSEDDADQRRHRFNRRGVAHRRPRREVRNNDDSFGKIKFTIPAFDGKYDPDAYLSWELVVDQKFACHDVPEDKRVRAATSEFTDFASVWWCEYRRTHINALPPTWDDLKQIMRARFVPSYYARDMLNKLQQLKHGGTSVEEYYQALQMGRTPWTARSGAAPTDRSSVSTSTSAPSNSNSNKAWPTPSTARSRASEVAEKPTKSASSVASTGRTRDVQCHRCKGFRHMQRDCPSKHVLVVKADGEYSSASDFDEDTLTLLVANNIASEDEKHIGADVADQYESLIVQRVLSAQMGKAEQNQRHNLFQTKCVVHKRSCCTIIDGASCRNLVSTEMVTKLALQMKPHPHPYYIQWFNNSGRIKVTQLVRLNFAIGSYCDFVDCDVVPMHACSLLLGRPWQYDKDTLHHGRTNQYSFMHNGKKIVLHPLTPEAVFENNVARAEKEKNVEHAKSENQIVAKEQVHHNLKGSQSNRRKDSVIKLNGPCLLTTKSDIVNLDTSDIVCYAFICKDALFSFENIPLSFPPAVTNLLQEYEDVFPKDVPPGLPPVRGIEHQNDLIPGASLPNRAPYQTNPEETKEIQRQVQDLLDKGNGIEVDQAKVEAIQSWPIPKTISQEAHGGGLMGHFGAKKMVDILAEVVRLHGVSNTIVSDRDTKFLSHFWRTLWAKLGTKLLFSTICHPQTDGQTEVVNRTLSTMVRAVLKKNIKMWEECLPHIEFAYNRSLHSTTKMCPFQIVYGLLPRAPIDLMPLPSSEKMNFDAKLLFSTTCHPQTDGQTELVNRTLSTMVRAVSKKNIKMWEECLPHIEFAYNRSLHSTTKMCPFQIVYGLLPRAPIDLMPLPSSEKMNFDAKQHAELMLKLHETTKENIERMNAKYKFAGDKGRRELNFEPGDLVWLHLRKERFPDLRKSKLTPRADGRFKVLAKINENAYKLDLLADYGVSLTINVADLKPYLGAEDELESRTIQMQEREDDEDINTNGTSTLPQVQLHGPITRDHARQLNYQEQWRLSNGERNRTGWIRTAAQHKLLTAATTSCELRFGRARTNTLVLGLIVHPSRFTTASRVRVTIVKAQHPWIVVVGSPMSLRPIDLSLSSKDRDILEHITMQTVLLSIPRTNALRHSSQNSSRWAKTNALRGRILSFQQTRDESIPEAWERLQELTPMSHDHLDAEAGGAFFSKTVQGAVDLIEKMVSNMGWSEERHQTRQRGMHTVKETELLAAKLDLLMKRLDDHEKWPQGTIKALDSHVTCEVCGGTGHSGNDCPETREEAIYMGNNNNGYRPQGGHGWNQPRPYYQGGNNNGNFSNQPSLRDLIFAQAKTTDALSRKLAANDKVLENINVKLDGFASAFQNQLSFNKMIETQLAQLASLVPANETGRIPGQPYSSIENVKAVMTRGGKSTRDPPYPNHAGTNGISKEVPSNDSADKEVPLEKTVPQEYCDTRLLLFPQRSRKPSVDEQFARFVEVIQKIHINVPLLDAMQVPTYAHYLNNILNNKRPLPTMEVVKPTEQCSNVILHKLPGKYDPQSDYPKISDSLMLDQTV

SEQ ID NO: 171854 - protein, 1002 aa, Oryza sativa
  unsure (1)..(1002): unsure at all Xaa locations
  Clone ID: PAT_MRT4530_70045C.1.pep
MADRDEEQILYDTIAEGSSQYWNEGEGNEDPNQYLNEERNVERDAEGNEEGNDEEEASGSLPSAGQKRARGQRGAAKKIEGQHIITEVXKNFVRHSGWVVRDNVPVSMVYWHKTRAHGDNDSFVPDSEKEMLWTTMLETFTLPAGTENIVKQWTLXENSXQFQSFKGDLYKKYILKGLTPNFDVFPKLRDHWDEFVAYKTGQQGQAMMARNKDNAAKKKYHHHLGSGGYSVAMPNWEEMEASLIERGIKPATAKWPDRSKFWYYAHGGTLNPVDGSLVFSDQIREAASRLTDAVVDSSQGTFRPDRKKDELSLALXTPEHPGRTXGKGVIPWKIGFKEDIHTYRSRMRSKRDTEAKIANLEYRVSSYELSMQEEVARKVDERMAAHRSQDPQPYIHPAMVSPSGNRSSCASTGQVGSQSMDAMQTQDETTCPVDEITQRTPCELYIPLKNLSIKVASGMAIPTDPFGTYHCRPIPAGYSRVEVELVEAAYEDLELDYPGGDGETHLRDTSHAIILWRKRYIILPGLQAASRAPSPPAPPSSPAPSPPVPPPRPPAPSPPAPPPPPTAPSPLAPPPPPCPPAPPKTRSRQAPPPACTRATKKAKVDATKNKEPSYDCSQEELDAYVAGEVKRQLKPRSPEKNIPIDPSVKNFFKGMSTTNEALQISDYDQTLQRAYHKKSKPVPQLGEQPNQEVGPLVTGEDFGITEFISDTGLTVDQLVGGAPIPKAEVAYKFELGKPLVKPEQLQSLPTQMYKFHERYMEMSAKGREMFGARIRNPDFLQWEDLWIHFKDLFDLYQLDALDISLLRAWILMEIQRARRRRVYDTGFIDPWKINTEMIDKYEKDTEDNLIHLLTQXHFKTYILLPYNTEFHWVLLFFDLDACRAMYDSMNKEEKIFDKVFKLIDMAWDRFRQLVRGTWKEKLGRRFHFPRIHMRDNLPHKDFITAVQEQLMGFINEEVLNPDGEFYYDGSTIHNVGPSSFRGFPSHRPPSAVCHPHASYRRR

SEQ ID NO: 171855 - protein, 80 aa, Oryza sativa
  Clone ID: PAT_MRT4530_70046C.1.pep
KKPNLVKAFRWGGKIFIYGELYFFGNRDKKYNPQGLGAFPFLGNWDKTKFLGVLGGLIKKGFPQGDWGAPEPFPPRGGVW

SEQ ID NO: 171856 - protein, 43 aa, Oryza sativa
  Clone ID: PAT_MRT4530_70047C.1.pep
FSSVSHTSKAALPFCIVSHDLKKLSTRNSSRLPDDHQFNTTNT

SEQ ID NO: 171857 - protein, 1338 aa, Oryza sativa
  unsure (1)..(1338): unsure at all Xaa locations
  Clone ID: PAT_MRT4530_70048C.1.pep
MEEDEVEDDNIPDLAQYAGFEGNQTGKEESDADGNSVADDLGQMLQDAKEDCESEKVAHKLDKMLEDHRTSLYLENKAMCFHERNFVEEIGILDPVYLHNMFPFERYMGVLKKYVRNRARPEASIAKGYGTEEVIEFCVEFIEDLRPIGVPKSRHEGRLRGKGTLGRKAIMTVDNNLFCKAHFTVLQQSSLVAPYIEEHLALVRARNIGKSDAWITQYHIDTFSAWLRQHLMGNETINQQPAFLARGPSSSIATFQGYEINGYTFYTRAQDMKSTSQNSAVRIDAMGHDGTTGTYYGAIEDIWELDYGPLKVGYSDEPFVLANDVTQVFYVKDMSSKGRKGKGPDEPKRHVVLPGKRKIIGVEYKTDEDYDQFDGQPPFTVTIDPSILLSNEDTLYSRSDHKEGTIVRRKNTNIMKFKIQXLLSLVPVLNPNRMADRDEEQILYDTIAEGSCQYWNEEEGNEDPNQYLNKEGNVERDAEGNEEGNEEEASGSHPSAGQKRARGQRGSAKKIDEAAKNFVRHSSCVVRDNVPASTVYWRRTRAHGDNDNFVPESEKEMLWTTMLETFTLPAGTENIVKXWTLKKMVEQFQSFKGDLYKKYILKGLTPNFDVFPKLRDHWDEFVAYKTGQQGQAMMARNKENAAKKKYHHHLGSGGYSVAMPKWEEMEARLIERGIEPATAKWPDRSKFWYYAHGGTLNPIDGSLVFSDKIREAASRLTDAVEASSQGTFRPDREKDELSLALQSPEHLGRTXGKGVIPWKIGFKEDIHTYRSRQRSKRDTEAKIVDLEYRVSSYELSMQEEVAFSYSHHVKVTSGMAIPTDISGTYHCRPIPAGYSRVEVELVEATYEDLELDYPGGDGETHLRDTNHAIILWRKRYNILPRRQATSRAPSPPAPPSPPASYLPVPPPRPPAPSPPSPPPPPPAPSPPAPXPPPPPPPPCPPALPKTRSRQALPPARTRATKKAKVDATTNKEPPYDCSQEELDAYMVGEVKRQLKPRSPEKKIPIDPSVKNFFKGMSIANKEAFKISDYDRTLQKAYHKKSKPVLQLGEQTNQEVEPLVTGENFGITDFISDTGLTMDQLIGAAPIPKAKVAYKFELGKPLVSPEXLQSLPTQMYKFHEWYMEMSAKGREMFGVRIRNPDFLQGEDVLWLHFKDVFDLYHLDALDVSLLSAWILMEIQRARRRGVYDTGFIDPRKINTEMIDKYEKDTEDNLVHLLTQQHFKTFILLPYNTEVTVYDSMNKEEKIFDKVFQLIDRAWDRFRQLVRMTWKEKLGRRFHFPHIDMKDNLPYKDFITAVQEQLMGFINEEVLNPDGVFYYDGSTIHNVGPSSSDIMPASKS

SEQ ID NO: 171858 - protein, 371 aa, Oryza sativa
  Clone ID: PAT_MRT4530_70049C.1.pep
MPLPLAPASPHPPGRDHADVAAEGFGSLAALVAAGGGGSDAALALKLCKAADVMHKAVGAPSKMDRQWMYADRRYKEFIDGVHYFLRVAEANRHKGFICCPCNKCKNQKEYSASRTIHFYLFESGFMPSYNCWTSHGEQGVEMEKDEVEDDNIPDFAQYVGFEGSQTGEEERDADGNDVADDLGQMLQDAKEDCESEKGAHKLDKMGHKKLDTTLEFLQWKAKNGVSDKAFGDLLKLVKNILPEENKLPETAYEAKKIVCPLGLEVQKIHACPTDCILYRGEEYENLEACPVCKALRYKIRRDDPGEVDGQLTKKRIPANVMWKYIMMPIIIQGPKQPGNDIDVYLRPLVEDLKLLWKKEGVPVWNEDKQE

SEQ ID NO: 171859 - protein, 588 aa, Oryza sativa
  unsure (1)..(588): unsure at all Xaa locations
  Clone ID: PAT_MRT4530_7004C.1.pep
MPYSVSTVIVVEREKVQQPVYYVSEALHDAKTRYPQIQKLLYAVIMTSRKLRHYFQAHRVTVVSSFPLAIKSQVLADFVADWTMPDNKSDNQINNETCTMAFHGALNSQGVGAGFILTSPSGDQFKHTIHLNFRATNDTAEYEGLLAGIRAATTLGVKRLIVKGDSELVANQXREPLEPGTFLDXLTKPSVKEVSCEIDPAAPDISSEATEAERAVADIENTDDWRTPLIKFINSEELPEDDAEAEKITXRHLLLDIHEGTCGSHAXTALKDTCDMVQRCEAYQFHSKHTKLPTHALQTIPLTWPFLCWGLDILGPFPRGQGGYRFLFVAIDKFTKWIEAVPTGEIKADNAIKFIKGIFCRYGLLHRIITDNGSQFISADFQDYCIGLGVKICFASVSRPQSNGQVERANGIVLQGIKTRVYDRLMSYDKKWVEELPSVLWVVRTTPTMSNKETPFFLVYGSEAMLPSELRHQSTRVQRYSYGDQEEQRNDDVNLLEENRKQVAVRVASYQQALRXHEKRIRARMLSIGDYVLRRVQSQAGRNKLSPKWEGPYTIRQVLWPGAFKIADGDGRELANSWNIDQLRNFFV

SEQ ID NO: 171860 - protein, 127 aa, Oryza sativa
  unsure (1)..(127): unsure at all Xaa locations
  Clone ID: PAT_MRT4530_70050C.1.pep
MRKCHTAGPLRRIPNTAFPXETAFPHTADKKLPMGNLHTYHLVTASSSAKTRNHTSSGYSHKNKCLYGRLTXMAYEVKSSIDXGNLPNYNSTQLDSRLTHIPYPVMITXVHYHRTQSLEKFIFREYL

SEQ ID NO: 171861 - protein, 773 aa, Oryza sativa
  Clone ID: PAT_MRT4530_70051C.1.pep
MADRDEEQILYETIAEGSSQYWNEEGNVERDAEGNDAEEANGSQPSAGQKRARGQRGAAKKIEGRHIITEVDEDGRPSAPAEAARNFVRHSGWVVRDNVPVSTSFKGDLYKKYILKGLTPNFDVFPKLRDHWDEFVAYKTGQQGQEMMARNKENAAKKKYHHHLGSGGYSVAKPKWEEMEASLLEGGIEPATAKWPDRSKFWYYAHGGTLNPVDGSLVFSDQICEAASRLTDAVVASSQGTFRPDREKDELSRMRSKRDTEAKIADLEYRVLSYELSMQEEVARKVDERMAAHRSQDPQPYIHPVMVSTSGNRSSCASTGQVASGMAIPTDPSGTYHCRPIPAGYSRVEVELVEAAYEDLELDYPGGDGETHLRDTSHAIILWRKREVKRQLKPRSTEKKIPIDPSVKNFFKGMSKTNKEALQISDYDRTLQRAYHKKSKPVPQLGEQPNQEVEPLVTGEDFGITDFIADTSLSVDQLVGGAPIPKAEVAYKFELGKPLVKPEQLESLPTQMYKFHERYMEMSSNSREMFGARIRNPDFLQGDGVTNRDSKRFLHQSRAHNCITKGKRKPGLGPINTGTTWELGRNPKTHRSRLAPGRTPRQQDPLHLLQQLGGDYLYRARPVGISHVGRPPSFHDKAFRKPTQVYHMPTRGVPDQQQVRSQTILCQEAQGSSPTPPRRIHMSLGIKAPPISNLLSQGRPIPPMWSYLSYVRMKFPRKRSLSARAGNRTPGSRCSKVACLARDLELDPRNPRTAGLRAPELHAKRNNSTNGEN

SEQ ID NO: 171862 - protein, 38 aa, Oryza sativa
  Clone ID: PAT_MRT4530_70052C.1.pep
MGVEPDSYAVGGVESDGGYNGPTSVISDSDNSYSNFEA

SEQ ID NO: 171863 - protein, 1099 aa, Oryza sativa
  Clone ID: PAT_MRT4530_70053C.1.pep
MADRDEEQILYDTIASGSSQYWNEEEGNEDPNQYLNEEGNAERDAEGNEEGNVERDAVGNEEEASGSHPSAGQKRARGQRGAAKKIEGRHIITEVDADDRPSAPAQAAKNFVRHSGWVVRDNVPVSKVYWRKTRARGGDDSFVPESEKEMLWTTMLKTFTLPAEQFQTFKGDLYRKYILKGQTPNFDVFPKLRDHWDEFVAYKTGQQGQAMMERNKENAAKKKYHHHLGSGGYSVAMPKWEEMEASLLERGIEPATAKWPDRSKFWYYAHGGTLNLVDGSLVFSDQIREAANRLTDAVEASSQGTFRPDREKDELSLALQTPEHPGRTRGKGVIPWKMGFKEDIHTYRSRMRSKRDTEAKIADIEYRVSSYELSMQEEVARKVDECMTAHRSHDPQPYIPPPMVSPSGNRSSCASTGQVVSHSMDAMQTQDETTYLVDEITHRTPCELHIPFKNLSIKVASGMAIPTDISGTYHCRPIPAGYSRVEVELVEAVYEDLELDYPGGDGETHLRDTSHAIILWRKRYIILLGRQAASRAPSPPAPPSPPAPSPLAPPPPPPAPSPLAPPPPPPPPPPCLPAPPKTRSRQAPPPASTRATKKAKVETTKNKEPPYGCTQEELDAYVAGEVKRQLKPQSPEKKIPIDPSVKNFFKGMSTANKEALKLSDYDRTLRKAYYKKSKPVPQLGEQPHQVIGEDFGITDFISDTGLTMAQLVGGAPIPKAEVAYKFELGKPLVRPEQLMEIQRARRRRVYDTGFIDPRKINTEMLDKYEKDTEDNLIHLLTQQHYKTFILLPYNTEVTMYDSMNKEEKVFDKVFQLIDRAWDRFRQLVREAWKEKLGRRFHFPCAKQDKGTNLCGYYVCEFAHCLSNQIYTTRELDRIHMREKLPHKDFIMAVQEQLMGFINEEVLNPDGEFYYDGSTIRNVGPSSSDGMDKALSLSSHARAATTCALGGGRGGCGRRRAGEAAAAAGRRRRRLRAGEAEAAAGTRGRGGGGGSGEGARGGGSGGRGRGGGVGSGEGARGGGSGRGGGGCGRAPMAASGCPRPVPAATHRQRPGNAAPAAAPDGRLPAAEDEQLALDDVAGIYELARCFGWISPLVTLS

SEQ ID NO: 171864 - protein, 1605 aa, Oryza sativa
  unsure (1)..(1605): unsure at all Xaa locations
  Clone ID: PAT_MRT4530_70054C.1.pep
MANKTLREFAAPSADNVAIGPQVNIGDVDFDLKSSLITIAQANPFCGEPNEGSNADLQQFLEICSTYNIKGVNPDTVRLRLFPFSLLGRAKQWFYVMRTSTPTIHPHFHNYNFMLLVHLVLAGSRLLAGTNTLVVGLIVHPSRFTTTSGVGVTIAKAQHPRIVVVGSPTSLHPIDLSLSSKDRDTLEHIRWYQSPSCSFFFDSLHSPPIAPPVRLTLDRDSATKASIHLLQRFVQVRRLPSPPVWHDENWLVRDRTQGLEEDVCITNEKLGHVERTQIDSNTKLTTLEASVATVNTSLDGIVWRLDEMARASHHGSEMDDHDYVGDSEDDADQRRHRFNRRGVAHRRPRREVRNNDDSFGKIKFTIPAFDGKYDPDAYLSWELVVDQKFACHDVPEDKRVRAATSEFTDFASVWWCEYRRTHINALPPTWDDLKQIMRARFVPSYYARDMLNKLQQLKHGGTSVEEYYQALQMGRTPWTARSGAAPTDRSSVSTSTSAPSNSNSNKAWPTPSTARSRASEVAEKPTKSASSVASTGRTRDVQCHRCKGFRHMQRDCPSKHVLVVKADGEYSSASDFDEDTLTLLVANNIASEDEKHIGADVADQYESLIVQRVLSAQMGKAEQNQRHNLFQTKCVVHKRSWCTIIDGATGTKNLGILYDTNAEGSSQYWNEEEGNEDPNQYLNEEGNVESDAEGNEEGNDEEESTGSHPSAGQKRAHGQRGAAKKIEGRHIVTEVDEDGRPSALAEAAKNFVHHSSWVVRDNVPVSTVYWRRTRARRDNDSFVPDSEKEMLWTTMLETFTLPAGTKNIVKQWTLKKIAEQFQSFKGDLYKKYILKGLTPNFDVFQKLRDHWDEFVAYKTGQQGQAMMARNKENAAKKKYHHHLGSGGYSVAMPKWEEMEASLIERGIEPATAKWPDRSKFWYYAHGGTLKPVDGSLVFSDQIRDAASRLTDAVEASSQGTFRPDREKEELSLALQIPEHPGRTRGKGVIPWKIGFKEDIHTYRSRMRSKRDTEAKIADLEYRVSSYELSMQEKMARKVASGMAIPTDPSGTYHCRPIPAGYSRVEVELVEAAYKDLELDYPGGDGETHLRDTRHAIILWCKRYIILPGRQAASHAPSPLAPPSPPAPSPPVPPPRPPAPSPPAPLPPPPPPPPPCLPAPPKTRSRQAPPPARTRATKKAKVDATKNKEPPYDCSQEELDAYVAGEVKRQLEPRSPEKKIPIDPSVKNYFKGMSATNKDALKISDYDRTLQKAHHKKSKLVPQLGEQPNQEVEPLVTGKDFGITDFISDTGLTVDQLIGGAPIPKAEVAYKFELGKPLVTPKQLXSLLTLMYKFHERYMEMSAKGREMFGARIRNPDFLQGEDVLWIHFKDLFDLYHLDALNVSLLSAWILMEIQRARRRRVYVTGFIDPRKINTEMIDKYEKDIEDNLVHLLTQQHFKTYILLPYNTEFHWVLLFFDLDACRVTVYDSMNKEEKIFDKVFQLIDRAWDRFRQLVCRTWKEKLGRRFHFPCAKQDQGTNLCGYYVCEYARCLSNQICTTRELDRIHMRDNLPHKDFITAVQEQLMGFINEEVQNPNGEFYYDGSTIHNVGPSSSDITPASKLRLRQ

SEQ ID NO: 171865 - protein, 1448 aa, Oryza sativa
  Clone ID: PAT_MRT4530_70055C.1.pep
MSMRGSNQAIILNAKLKNLRRGLKAWSKRLSNLNTQISNSNEVLTTLDDLEEQRPLALQEWNFRIILKEHILKLLNYKNEFWKKRCTIRWVKFGDENTKFFQASATDSHRRNKISHLSLDDGSIVTTHAEKEQILYMAYKNRMGTRGSMDMILNLSDMVRRMEGLECLSEIPSTEELDRIIKNMPTDRAPGPDGFNGLFLNKCWSIIKQDFYELAFQFFTNNVSLENLNHSFITLIPKKPTPETANDFRPIALQSSALKFITKILANRLQEVILKLIHDNQYGFIRSRTIQDCLAWSFEYIHQCHQSRKEMIILKIDFEKAFDLVEHEAILQILQAKGFNSTWLIPLFQAITSVTVGTGDSALFRKDNWSNHNLENEFPVLISYGRNEDVTVQGFLSATDIGQNFHLPLSNQAIQEWGNLNNRLQSLQIVTESDKWSYRYMGVLKKYVCNRARPEASIAKGYGKEEVIEFCVEYIEDLRPIRVPESRHEGRLRGKGTLGRKAIMTVDNNLFRKAHFTVLQQSSLVAPYIEEHLALVRTRNIGKSDAWITRHHIDTFPAWLRQHLMGNETINQQLAFLARGPSGSIATFQRYEINAYTFYTRAQDMKSMNQNSVVHIDAMGHDGTTGTYYGAIKDIWELDYGPLKVPLFRYQWVRLTGGGVTIDDSGMTTVDLNKVGYSDEPFVLANDVTQVFYVKDMSSKRKKGKRPDKPKRHVVLPGKRKIVGVEDKTDEDYDQFDGQPPFTIRDFVVVPQAEVVANPRRNLRRQMVDRDDEQILYHTIAEGSSQYWNEEEGNEDPNQYLNEEGNVERDAEGNEDEEASGSQPSARQKRAHGQRGAAKKIEGWHIITEVYWRRTRARGDYDSFVPESEKEMLWTTMLEMFTLPAGTENIVKQWTLKKMAEQFQSFKGDLYKKYILKGLTLNFDVFPKLRDHWDEFIAYKTGQQGQAMMDRNKENTAKKKYHHHLGSGGYSVAMPKWEEMEASIIERGIEQATAKWPYRSKFWYYAHGGTLNPVDGSLIEKDELSLALQTPEHPGQTRGKGVVPWKIGFKEDIHTYRSRMRSKRDTEAKIADLEYRVSSYEARGGGKEGNRSSCASTGQVGSQSMDAMQTQDETTCPVDEITQRTPCELHIPFKNLSIKVALEMAIPTDPSGTYHCRPVPAGYSRVEVELVEAAYEDLELDYPGGDGETHLRDTSHAIILWRKRYIILPRRQAASRAPSPPAPPSPPPPPPAPSPSAPPAPPPPLCPPAPLKTRSRQAPPPARTRATKKAKVDATKNKESPYDCSQEELNAYVAGEVKRQLKPRSPEKKIPVDPSVKNLFKKMSTTNKEMYKFHERYMEMSAKGREMFGARIRNSDFLQGEDVLWIHFKDVFELYPLDTLDVSLLSALILMEIKRARRWGVYDTGFIDPRKINAEMIDKYEKDIEDNLVHLLTQQHFKTFILLPYNTE

SEQ ID NO: 171866 - protein, 134 aa, Oryza sativa
  unsure (1)..(134): unsure at all Xaa locations
  Clone ID: PAT_MRT4530_70056C.1.pep
FGLXDSLXDXXXXXQXGTXXXSVLXCXHXQCLLSXDTXSAPPGDQPGSRGVXXXTXPPWDLTXRXPXRGSXXSRXRSXTRXXSRCPTGXXXXISXTXKXPHXRTXPXIXSXXXXAXXXXXXSXSDXXYXXXXGR

SEQ ID NO: 171867 - protein, 231 aa, Oryza sativa
  Clone ID: PAT_MRT4530_70057C.1.pep
MGTLPQLSCPGAHAQYGVVELEPLPVDPSNETLASSYVPPLTQVYSRRPRVMEPYVDASPIAPPRYNLRDRNLVTICPEDRYGRYAYVATILAEPSSHQDVDIHQEWQHVMAEELAALERTVSAAGFSASAYDPALFVHTSPRGRTILFLYVDDMIITGDNADFIALVKARLNAQFSDDLLDRASLTDQRTVDTPMELNLHLSATTEAELRAIAQQMLLGYIGYLRILVFL

SEQ ID NO: 171868 - protein, 100 aa, Oryza sativa
  Clone ID: PAT_MRT4530_70058C.1.pep
MMVVTVGMVGNTLQPSLGANPHRPAAILHQTMPGGFGRTPWFGRTRGRPNLAQIRQVASSVVLLRRLVNFGPIHRVNSEFLTHSYISLVLDIVRLIYRLS

SEQ ID NO: 171869 - protein, 127 aa, Oryza sativa
  Clone ID: PAT_MRT4530_70059C.1.pep
PSQGRRRRIRQREGRERGFLQPQGGGGDGDGGRIQWRDGWRPGKARRGPGLSVARMVFSFLRLLLPPDRAGAAGETRRARQGRPRATRRRPGKGAARLRRSPAGCHGAGRRGGEWHSMATMAGHVWL

SEQ ID NO: 171870 - protein, 70 aa, Oryza sativa
  Clone ID: PAT_MRT4530_7005C.1.pep
MAYIRHGHSKFVTRKDSIKIIYAFVRNLIMDTRNLLHIAIYNINYIRDLFTEKYFNDKSVPGIGHIIYSP

SEQ ID NO: 171871 - protein, 102 aa, Oryza sativa
  Clone ID: PAT_MRT4530_70060C.1.pep
MENTKAAPLVSSSPFSVLSLPAAVDPRPTLRAPPLLHPGLSVAPSCRTRSSGTLEWTPVKTLALMAKVVVIDDGWSHSVSAFQKWAVLAENLAGSYFVAATS

SEQ ID NO: 171872 - protein, 84 aa, Oryza sativa
  Clone ID: PAT_MRT4530_70061C.1.pep
FKSSSLLIWLSSIKWHNKDNGLGRIHKSESSGWHSMLILLCRLIDTEMFVLGDHPLAHTPIIPIFFQKCLISVLLARCREILSL

SEQ ID NO: 171873 - protein, 76 aa, Oryza sativa
  Clone ID: PAT_MRT4530_70062C.1.pep
IFYLLGAHTSKKETDQNEEELGCEWQNRYLIPALSGKDIEIGINPADRAVPPKIKPSNSKKMKKKNIQRRMGAAQE

SEQ ID NO: 171874 - protein, 112 aa, Oryza sativa
  unsure (1)..(112): unsure at all Xaa locations
  Clone ID: PAT_MRT4530_70063C.1.pep
MQICHRKLLKLDIIIADIRRPTLAQANLPPASLHSRLSSWSNCHPSSSPPPLVGREEEAPDPLPAAPXPRVTDVESSHHRCXSSLRHSQGMAAADPPSRGSMAPDSLLRPSP

SEQ ID NO: 171875 - protein, 270 aa, Oryza sativa
  unsure (1)..(270): unsure at all Xaa locations
  Clone ID: PAT_MRT4530_70064C.1.pep
GLPVQVPRVSCELFSMAVKTCIGDGQSTLCWMDRWLEGKTVSEIAPNLTKLIAKNTVRRCTVVQALDNKKWVTDINGPLMVQVLVEFLXIWDLVKGVILQVRVPDQHVWKLSNSXIYTSKSAYEAIFVGTVRFAPWRRIWKSWAPLEFKLFIWLAINNSCWTADRLDKXGLQHPPTCPLCDXQETINHILITFVFSRQVWCLVLKRLGYSSFPTQVTARSTNWWSITVRGLPTNEKKWLNSLIILVAWXIWKHMNNCVFNGTTPCLADVL

SEQ ID NO: 171876 - protein, 290 aa, Oryza sativa
  Clone ID: PAT_MRT4530_70065C.1.pep
MAAGGGGRRLQQESTVAPRPTTEARWRPVREEAQGGESGSRDASSPLLPLPRPALPWMTSLVNVRDAISAKLVAQWLSRRSSRPEVATGLARRSGLRARRRSTGHRSAPTGRRGGGHPMSIPRATLTDIQNLSSVLVRWLSRSASASSSLPPLLPAVMQVRLLGGASIIVLSISLGCVLAWSRAAPPPDDGSCSGEMAVPSLEPYGHLTFSKIVSGGFVGTVSRAVCPRHACPILPPPGSSPPLLNPDSMMSYCAVADSVKFRGPKLSVKHGYMPFVKKKIGIENIELNQ

SEQ ID NO: 171877 - protein, 279 aa, Oryza sativa
  unsure (1)..(279): unsure at all Xaa locations
  Clone ID: PAT_MRT4530_70066C.1.pep
WAHLSISLSLFFFDSNAKVLPGGARRSTSLYYGLLDLFREARWGPFDGDQLHLAASMAGNAAGDGTAVRAAPDGGCCVAHGSASAIGGIGVWDCTTGEQADFFYEPPGCALGDADKLQXLDGTSTLMAATMFPRTDTSFIILLDFRDKKNVAWSWSDVGTPASLEDKNVLHAIAMEDGRCARPLSPAAVPRAATLRRRARHRVGRLSPSLQRRXAPCSAAGRLTQVCHHACSREERKKRKRKDVGPTPPRRRLAMAEPSRLGPAAVAHSHLCSAARKKK

SEQ ID NO: 171878 - protein, 77 aa, Oryza sativa
  Clone ID: PAT_MRT4530_70067C.1.pep
ASLSTFFACGHIVGAHPSICLFYRLACSDLVPSSGLCTQELLNLFPLHFSLSSISDDEQPITMEIIYFFYKVLMCCT

SEQ ID NO: 171879 - protein, 295 aa, Oryza sativa
  Clone ID: PAT_MRT4530_70068C.1.pep
MRVKAKFATGHSKIVVFAVRHPKIVYLLVDTVKKCNAKVLPGGARRSTSLYYGLLDRFREARWGPFDGDQLQLAASMAGNAAGDGTAVRAAPDGGCCVAHGSAVRVVHPVTMIIRPQSAIGGIGVWDCTTGEQADFFYEPPGCALGDADKLQWLDGTSTLMAATMFPRTDTSFIILLDFRDKKNVAWSWSDVGTPASLEDKNVLHAIAMEDGRAAAPCSAAGRLTQVCHHACSREERKKRKRKDVGPTPPRRRLAMAEPSRLGPAAVAHSHLCSAARKKKGKKDRERGRTVSRVS

SEQ ID NO: 171880 - protein, 1092 aa, Oryza sativa
  Clone ID: PAT_MRT4530_70069C.1.pep
MASSSSAVSNPLFGFQISEKLGEQNHALWSAQIERKKGEKGDKVMVVTNPAYQEWFATDQQVLGFLFSSLSCDVLTQVATSKTARDAWRAIESMFMSQTRARSLNIKLSLCTTQKDDEYEPAISGLVTRVEPVTVAELYSILLNYENRGSNNQQRVDNRPVCQVCYKMGHVASECWHCFDDSYVPDERHVAAATHAAYGVDTNWYLDTGATDHITGELDKLAVRERYKGNNQIHAANGAVFDKFHEFQNLVERLFDRKIIAVQTDWGDWYIPSHFLSLCLMNLMKKTQEKLMPQGETYALEIEPPTSSAPTRPHTRLSSGIWKEKKGRNVNDCKWVYKIKRKADGTLDRYKGRLVAKGFKQRYGIDYEDTFSPVVKAVTIRTVLSIVVSRGWSLRQLDVQNAFLHGVLEEEVYMRQPPGYEKSSLPNYVCKLDKALYGLKQAPRAWYSRLSTKLQELGFKASKADTSLFFYSKGGVTMFLLIHVDDIIVASYVPSAVPALLQDLGKEFALKDLGELHYFLGIEVKKMTNGILLSQEKYATYVIRKVGMNDCKPVTTPLSTSEKLSVNEGSLLGPNDATQHRSVVGALQYLTLTRPDISFPVNKTLLKESEIQAPAAAKILCDNIGAKYMSSNLVVHVSTKHIEVDYHFVRERVARKLLEIEYISTKDQIADGFTKALAILLVKVASQRLYRSPKIFIFWDGGSIRTLKDCGLCCETPEDRVFARGHCKKVAWWQTSVRRPAEEQGAAALERGREMADAMASTFLSSSNAGVPTSDHDQATFFLSRKSSRMMKEVSHVCPWWQHGRRHERARAVEPLELVGVAERAARRLVEEVGLLAGGAVPDADAVLVEPALAAREDLAPAVEGERPGGVGPDVAIVRDAEAVAQVAGERGEGRHAAVAPAGAGPLPRGDEERGLVEVGRVVDRRVVEVHGPALLHHPVVHAHGAAVRDAAAAVGRGADGRPVARGAPGHGRRQPQPVPVERPPPRGADAVEETVVERLAAEHPVGDVGRHVEPPRAEQVEQHREALRVTVDEVLVRATLAVAVPAAAVVPGGVDHGAEHGVPAGAGERGGHRLEHPASDVEPHAAPLPLH

SEQ ID NO: 171881 - protein, 128 aa, Oryza sativa
  unsure (1)..(128): unsure at all Xaa locations
  Clone ID: PAT_MRT4530_7006C.1.pep
WISAGRRARRRGAWSPRSGRWGSSPPTPPPRPRPPSPPPPPLQRSRRLLLPPPRRRPRRRRRRRPPRGPPRRPSSPRAXLPRHDPAPAPRRPPXPQARXPPRRPPPSWATTSPGRGRLLPPSSVAGFS

SEQ ID NO: 171882 - protein, 514 aa, Oryza sativa
  unsure (1)..(514): unsure at all Xaa locations
  Clone ID: PAT_MRT4530_70070C.1.pep
AVDRRFVSPFPSPLSGAAPPYLWPPPATIGARARRLPPAAPPWPPSGAPSGCRVGPGIPPAMVSPSGNRSSCASTGQVGSQSMDSMQTQDETTCPVDEITXRTPCELHISFKNLSVKITSHHVKVASGMAIPTDPSGTYHCRPIPAGYSRVEVELVEDAYEDLELDYPGGDGETHLRDSSHAIILWRKRYIIHPGRQAASRAPSPPAPPSPPLPPPAPSPLAPPSPPPVPSPPAPPAPPPPPPPPCPPAPPKTRSRQAPPPARTRATKKAKVDATKNKEPLYNCSQEELDAYVAAKVKRQFKPRSLEKKIPIDPSVKNFFKKMSTTNKEALKLSDYDRTLKKAYYKKSKPVPQLGEQPNQELIRGAPIPKTEVAYKFELGKPLVTPEQLQSLPTQMYKFHEWYMEMNAKGREMFGARIRNSDFLQGENVLWIHFKDVFELYHLNALNVSLLSAWILMKIQKTRRRGVCDTGFIDPQKINVEMIDKYEKDTEDNLVHLLTQQHFKTFIVLPYNTE

SEQ ID NO: 171883 - protein, 105 aa, Oryza sativa
  Clone ID: PAT_MRT4530_70071C.1.pep
MTYPRITVLRIRIRIPVSRSTLSSAATRVKPVDAELCHFFKDDAARPGGCRHRRSARRTMPLLGPEERRAGAGGGRRGAGTGEGRKGEPAGKSGIWGWRIWGFGR

SEQ ID NO: 171884 - protein, 858 aa, Oryza sativa
  Clone ID: PAT_MRT4530_70072C.1.pep
MADRDEEQILYNTIAEGSNQYWNEEEGNEDPSQYLIEEGNVERDAETNEEGNEEEEASGSHPSAGQKRARGQQGAAKKIEGRHIITEVDEDGRPSAPAEAAKNFVRHNGWVVRDNVPVSTVYWHRTRARRDNDSFVPESEKEMLWTTMLETFTLPTGTENTVKQLTQKKMAEQFQSFKGDLYKKYILKGLTPNFDVFPKLRDHWDEFVAYKIGQQGQAMMARNKENAAKKKYHHHLGSGGYSVAMPKWEEMEAGLIERGIEPATAKWSDRSKFWYYLHGGTLNLVDGSLGTFRPDREKDELSLTLQTPEHPGRTRGKGMIPWKIGFKEDIHTYRSRMRSKKDTEAKIADLEYRVSSYELSMQEEVARKVDEHMAAHRSQDPQPYIPPAMVRPSGNRSSCASTGQVGSQSMDAMQTQDETTCPVDEITQRTPCELHIPFKNLSIKVASGMTIPTDISGTYHCRPISAGYLRVEVELVEAAYEDLELDYPGGDANKQKMKLSDYDRTLKKAYYKKSKLVPQLGEQPNQEVEPLVTGEEFGITEFISDTGLTMDQLIGSASIPKAEVAYKFELGKPLVTPEQLQSLPTQMYKFNERYMEMSAKGREMFGVRIRNPDFLQGEDVLWLHFKDVFDLYHLDALDVSLLSAWILMEIQRARRRGVYDTGFIDPRKINTEMIDKYEKDTEDNLVHLLTQQHFKTFILLPYNTEFHWVLLFFDLDACRVTVYDSMNKEEKIFDKVFQPIDRAWDRFRQLVRGTWKEKLGRRFHFPCAKQDKGTNLCGYYVCEYANCLSNQICTRQELDRIHMRNNLPHKDFITAVQEQLMGLINEEVLNPDGEFYYDRSTIHNVGPSSSDITPASKS

SEQ ID NO: 171885 - protein, 478 aa, Oryza sativa
  Clone ID: PAT_MRT4530_70073C.1.pep
MNTAAPGILPTSRNAPVRKVAECDVLSAKQESVPVAVPAKQEVHSPKQESIPKFNTGSSRVSQLISVQQANDSSPNSKVSADANIGSFDLAKFSKKNALPCDICMRSETVLNRIFVCSSCKAAVHLDCYRSVTNPTGPWKCELCQEMPSDVVAGSQSDCDGSKPCLLQCDLCHGTSGAFRKTIKGRCIHAFCAEWLLESTFTRGQYNAVDGMESLPKDKDTCAICHRNVGSCLKCSTVDCQITFHPTCARDAGFYMDTKTIGSTLEHKAYCGKHGIEQRKADLLQLHGPGEVKNMKQMRVDLEVLRLICERVVKREKLKKDLVVCGHDTLAARRNSIAYSTRTSYCGSGPGASSESATTSVNNSYSGLMQRTDDVAVDSIISRKPTVRFSLNNSDADRNTADSSTSSISYKQKLDDRESLADKNLPKKPATAMQISEEGETKSSDKKNQRPPKSIVYTRRSALSKKRQLSQNVEGPGG

SEQ ID NO: 171886 - protein, 673 aa, Oryza sativa
  unsure (1)..(673): unsure at all Xaa locations
  Clone ID: PAT_MRT4530_70074C.1.pep
LADRDEEQILYDTIVEGSSQYWNEEEGNEDPNQYLNEEGNMERDAEGNVERDAEGNEEEASGSHPSAGQKRARGQRGAAKKIEGRHIITEKAAKNFVRHSGWVVRDNVPVSKVYWHRTRALGDNDSFVPESKKEMLWTTMLETFTLPAGTENVVKPWTRKKMAKQFQSFKGDLYKKYILKGLTPNFDVFPKLRDHWDEFVAYKTGQQGQAMMVKNKENAAKKKYHHHLGSSVDGSLVFSDQIREAASRLMDAVEASSQGTFRPDREKDELSLALQTPEHSGRTRGKCMIPWKIGFKEDIHTYRSWMRSKRDTEAKIANLEYRVSSYELSMQEEVARKVDECMAAHRSQDPQPYIPPPMVSPSGNRSSCASTGQVASGMAIPTDILGTYHCRPILAGYSRVEVELVEAAYEDLELDYPGGDGEVKRQLKPRSPEKKIPIDPSMKKFFKGMFTTNKEALKLSDYDRTLRKAYYKKSKPVPQLGEQPNQEVKPLVTGEDFGITDFISDTGLTVVQLVGGAPIPKAEVAYKFELGKPLVRPEQLQSLPTQMYKFRERHMEMSAKGREMFGARIRNPDFLQGEDVLWIHFKDVFDLYHLDALDVSLLSTWILMXDSKGPTAGGLRYWVHRPSENQHRNDRQVRERHKGQSRPSPNAAAFQDVHTTAVQHRSHCVRLNE

SEQ ID NO: 171887 - protein, 165 aa, Oryza sativa
  Clone ID: PAT_MRT4530_70075C.1.pep
MKMEIHPFLNEEDLGAFTNYLCRSRDVDGDDNGPLQIVLRSLTDNDVQLRYGAGEVGDDNSDGELTMQMMWCDKPAPKKAEEFPQLLEDEMDQDDLLLLTHAAASLQLAQWLLLLNDLLLEDDESRAAAVEDTAAATGDGMRADGLMVWLPAAASAAGAPGRTSD

SEQ ID NO: 171888 - protein, 982 aa, Oryza sativa
  Clone ID: PAT_MRT4530_70076C.1.pep
MADRDEEQILYDTIASGSSQYWNEEEGNEDPNQYLNEERDAEGNKEGNVERDAEGNEEEDSGSHPSAGQKRARGQRGAAKKIEGRHIITEVDADSRPSAPAQAAKNFVRHSGWVVRDNVPVSKTFTLPAGTENIVKQWTLKKMAEQFQTFKGDLYRKYILKGQTPNFDVFPKLRDHLDEFVAYKTGQQGVAMPKWEEMEASLLERGIEPATAKWPDRSKFWYYAHGGTLNPVDGSLVFSDQIREAANRLTDAVEASSQGTFRPDREKDELSLALQTPEHPGRTRGKGVIPWKIGFKEDIHTYRSRMRSKRDTEAKIADLEYRVSSYELSMQEKVARKVDERMAAHRSHDPQPYIHPPMVSPSGNRSSCASTGQVASGMAIPTDISGTYHCRPIPAGYSRVKVELVEAVYEDIELDYPGGDVCVPRLIPGRGFYAQISSENTSEFPGVTILWRKWYIILPGRQAASRAASPPAPPSPPAPSPLAPPPPPPPCPPAPPKTRSRQAPPPASTRATKKAKVDTTKNKEPPYGCSQVELDAYVAGEVKRQLKPRSPEKKIPIDPSVKNFFKGMSTANKEALKLSDCDRTLRKAYYKKSKPVPQLGEQPHQVVEPLVTGEDFSITDFILDTGLPMAQLVGGAPIPKAEVAYKFELGKPLVRPDQLQSLPTEMYKFHERYMEMSANGREMFGARIRNPDFLQGEDVLWIHFKDVFDLYHRDTLDVSLLSAWILMEIQRARRRGVYDTGFIDPRKINTEMLDKYEKDTEDNLVHLLTQQHFKTFILLPYNTEFHWVLFFFNLDAYRVTVYDSINKEEKVFYKVFQLIDRAWDRFRQLVRGTWKEKLGRRFHFPCAKQDKGTNLCGYYVCEYAHCLSNQIYTTRELDRIHMREKLPHKDFITAVQEQLMGFINEEVLNPDGEFYYDGSTIRNVGPSSSDVTQASKSRKLSTLKQHPRGGGHRRRLQQRCRQDEHHHDEHLRQPPAAGGPER

SEQ ID NO: 171889 - protein, 87 aa, Oryza sativa
  Clone ID: PAT_MRT4530_70077C.1.pep
MATGVKVCSWLVFSDPLLVTESLALNLVISVEPFLTEQSVRASQVLELIYAAFVAWFGSYIAWSMILGVFLQKMAKQCFMMDSSVKC

SEQ ID NO: 171890 - protein, 260 aa, Oryza sativa
  Clone ID: PAT_MRT4530_70078C.1.pep
MIKFQFTAEANRSNITHIQALYSKGNMQLRPKTVMLMTATSSASCTRMYHTTTCRSQTRLASRLRSAFADGSKREEMVGAERGRGKRNLDEVDQADEPQERRPERRRHPPRPRRGGGRSRRRRHGGNGRDGLLVAVDSRVRVDQEVESNAEIAILCREHFYQQKRHFRDLLVSKCGNFLVIQRVSGRSESDPVAEGSGLRGDQRGIRGSFRLTRSCLITQLLVQSAHYCRVLTALEIGTTYTFVDKFSTKNLTDVIIVQS

SEQ ID NO: 171891 - protein, 50 aa, Oryza sativa
  Clone ID: PAT_MRT4530_70079C.1.pep
MASLAVSASASASGEEVTHLAQRQAAEIDEQLMGPLGLSALPLMELAGLS

SEQ ID NO: 171892 - protein, 192 aa, Oryza sativa
  Clone ID: PAT_MRT4530_7007C.1.pep
DDLEDTERFVHELTVTAGEGNIETMLSVDKGLQELAFLKVEDAVLIALAHHHRPNVAELVDPDLSKEEEEDVLFKQEGITNYNIVQNAWLVYFWRRAKTHNVEDDIAEERLQMWIDRHGQQPTSHDAVDVDMGIRELRRLGIEQLLWELSRREANSTKEEELNSTKEELKNTTTKDEMDTTNEESSDVEDLT

SEQ ID NO: 171893 - protein, 494 aa, Oryza sativa
  unsure (1)..(494): unsure at all Xaa locations
  Clone ID: PAT_MRT4530_70080C.1.pep
MVVVVVGGGGGGGGGGGVKKEEGEEEARGRGGGGGVVGGWGTWEELVLGSAVIRHGGVAWGAVAAEVRSRSPCAFSPEECEAKFSEIQARYSACDAWFEELRKRRVAELRNDLKKSENFIGSLQSMIKSLSNSKHDDGNSECHTSHTESCSNNENTADNNSSSXALSKDRSSAASFTEEESDSQNSDKVQHCDTDSIQVNNTSAEALVKPLVEKKVCAEDGLLWGSRKKRAVRDRRTFLMADNSCRAGENTSTSHIQTDGSSEGYAKKGLKTPNLESGVSVVEKAKPNLAEILKTISTQSDCYMLQRRLDVQRKRTRYKKMIRRHIDFRILHSKIKSGATSSTKELLRDILLFVNNVLAFYPKATLEHMAAIELRNIAFRTVQESASMPSKSCGVTGAATAPLVKKNTRPVQPGSHGPHDAKRSKVSLKGTGSTVKQGEAKGSRGGSSVTANVKTMQRNPPAKKRGVGRPPKNGQKRAAAQQDSPNKGRKRTRR

SEQ ID NO: 171894 - protein, 276 aa, Oryza sativa
  Clone ID: PAT_MRT4530_70081C.1.pep
MPESCVAAVLLYLDPPEICQVARLNRAFRGAASADCVWAGKLPVNYRYLLAFAAAADDEGGDGGHGNGKRSSPSSKKDIFARLCRPTPFDFGNKEFWIDKNKGGICLSISSKAMVITGIDDRRYWSQLATEESRFHHIAYLQQIWWLEVDGELDFCFPAGSYSIFFRLHLGRPYRRMGRRICGTEQVHGWEAKPTRFQLSTSDEQHATSEYYLEQEGSWILYHVGDFVVLNSDELMKLKFSMLQIDCTHTKGGLCVDSVLIYPKGYRHEKANIVHM

SEQ ID NO: 171895 - protein, 163 aa, Oryza sativa
  unsure (1)..(163): unsure at all Xaa locations
  Clone ID: PAT_MRT4530_70082C.1.pep
AGHDSMCCWPVLILRXCSVLAHASLGVGTIGVRIDTRKVRMGADGDLIPTRKEMVNNVRPAAHGWQVNENSVLILASNTLMHDDGSTHTVRVNLNIADVLEIDILPGGLGLSVDGVGLHGLTTLKISILIVQKCITPRLHHMERDEGNLTTYHGNHGRIPDAW

SEQ ID NO: 171896 - protein, 86 aa, Oryza sativa
  Clone ID: PAT_MRT4530_70083C.1.pep
WSLIPCHQPPPPPPTAVAASPIPCARRPSLPRHPRCPSARPGATCLPRTRGPSPAPATTRHSTPAPRWRMRPSSTAGSARRLPVLR

SEQ ID NO: 171897 - protein, 144 aa, Oryza sativa
  unsure (1)..(144): unsure at all Xaa locations
  Clone ID: PAT_MRT4530_70084C.1.pep
PLKNGPKRAPRFKFPRGLKKGGFRARFPGRSKNHFKKPPGAPKKLLKPPFFGKKGGLDGGTRAPPEVFLEKPRVPLGDPQKNPPPLKLGGGGQNPPPGVPGGEKGPPXGPGPPLPGPAKWGGPPHKGKLRARKSAPPPPQWGAG

SEQ ID NO: 171898 - protein, 278 aa, Oryza sativa
  Clone ID: PAT_MRT4530_70085C.1.pep
MAPVNRTGPGVLGPRAKTYMESPTLMSREVDRRTIDTSVAIGESRFANLLFSFARRREVTESAEAASGMTRPHNVDFKAKEHKSHEHLQRNVQSRAIGKYILRNYKTSEVDLLREGNLKEAAMVDLWTEVETHQFNPALSPIMFQCIINPALHGIPTNQKIVDETVEKLKKVLEVYEAHLSENTYLAGEFVSFANISEHEEDYPIIDYACRAAPPLQPPSSVAVATIVVAVASPSSSAPSPLPKTAGAPSPPSTRSPPPLLPCRRRCPLFLRRFFGHR

SEQ ID NO: 171899 - protein, 97 aa, Oryza sativa
  Clone ID: PAT_MRT4530_70086C.1.pep
IRSGNGSSSLRSRRRQYNRLDRMNKTEATPNICATAKEHLCIRETPTLISFRKEYRREKEMEGESQVSYIQMGQFWVKYRLKRKEHICMMNTCCKGV

SEQ ID NO: 171900 - protein, 103 aa, Oryza sativa
  Clone ID: PAT_MRT4530_70087C.1.pep
WRFTTAMSPLQEPMILDSVSNLMLRTKLSDFASDMRDHGWLASDRICVHLSVHLVLQLRGYKDIDRRYLSQLVICRYDFVCNPVTHRSCPLPDSVSGKKKKKK

SEQ ID NO: 171901 - protein, 70 aa, Oryza sativa
  Clone ID: PAT_MRT4530_70088C.1.pep
LVFIFMSCDLFYFFCWLERDPPVNTEPEGLRGPTPLKTLMQPPLLLGPQPTMFPPSPGEPGRGGNKGVGP

SEQ ID NO: 171902 - protein, 1302 aa, Oryza sativa
  unsure (1)..(1302): unsure at all Xaa locations
  Clone ID: PAT_MRT4530_70089C.1.pep
TRVIPEASERGREEGWERGRRGGGGGWRWRAAGGSTGRRRGGSCRRRSFSTISAXRFVLNVPKEDLESFERILFLLEQAHWFYEDNSVEHNPSLKSLSFKDFTTLMFNSCAALRPYRAHLDDIYKDFTHYKFRVPVCGAIILDDTYEKCLLVKGWKSSASWSFPRGKRSKDEEDHTCAVREVLEETGCDVSKLLKLEDYIEVSMWQQRVRLYIITGVKGDTVFAPQTKKEISEISWHNIDELLPAGDDAISRGVNGMKLYMVAPFLQGLKAWIATHRHPQYQKSDTSARGTVWKAKNSSTGAAPVENPVITRTGSDPQTLDSRPVVSVILNATDASTIVIISLHFVHMNVFSSVHSDLCLKCCSKWKASGIWSRADAMAALVRPAVLPVCAMTGGGGNDKRSPPQQRSWWGGNKQRLPHQPRRQPGGNGGRGGGGGALDQVLGVLRRDGEFLQAAAGAPLRDIFWLRFLEKKKQQRRRKQPKPKPKPPEQQQQQEEAAAAIQAPSFPPPSYQPGLSCLDLMTADFEALKLYIGYSKHAIEQQFLKGKRQPQHQQTPKPKLQQQQQQQKKKQQQQEQQNQTLQPPAFPPPSYPPGLSCMELMMADIEALKLYINYYVAILTTPLPQHYDPEILSRYFTSRPHILAFRTIQIIFAFVSAAVKMQISKRTNLITDATYSCNSTGSKGFNASQYMVGQLLKETFLDLGPTFVKVGQSLSTRPDITGSEISEVSYISDEPVAAASFGQVYQGRTVDGALVAIKVQRPNLLPSVLRDIYILRLGLSFVRKVAKRKSNIALYADELGKGLVGELDYNIEAANATKFLEYHSRYSFMLVPKVLKQLTRRRVLTMEWVSGENPTDLLSLSKGISSEIAESSEKQKIEATARLLDLVNKGVEASLVQLLETGLLHADPHPGNLRYTPEGRVGFLDFGLLCMMEKKHQHAMLASIVHIVNGDWASLVYDLTAMDVVPPRTNLRRVTMDLEDALGEVTFEDGIPDIKFSRVLGKIWSVAFKYHFRMPPYYTLVLRSLASLEGLAIAADGTFKTFQAAYPYVVRKLLSDNSVATRRLLHQAIFNKRKEFQWNKITVFLKLASARYNTGVLPERKGLDVAKLVEISDASSSLHLNRATPERALHTANLCLRLLLSKESIVIRRLVMTANAKSLARDLISKDASIYRVLLSRVLADVIFQWMVKATGFKRAGQLEPHPRVTAGKNDEDLGLSKEAPALVTFQTAVRDRRLKVIFSKFVRDIREDPILMVRVSWNMFAISVVSAAIGVHRFIVVLSEEFLSTLPPPVPPPRLVQIQSI

SEQ ID NO: 171903 - protein, 974 aa, Oryza sativa
  unsure (1)..(974): unsure at all Xaa locations
  Clone ID: PAT_MRT4530_7008C.1.pep
LYDAGFIRPCRYAEWVSSIVPVTKKNGKVRVCIDFXDLNKATPKDEYPMPVADQLVDATSGNKILSFMDGNAGYNQIFVAEEDIHKTTFRCPGAFGLFEWVVMTFGLKSAGATYQRAMNYIYHDLICWLVEVYIDDVVVKSKEIEDHIANLRRVFERTRKYGVKMNPTKCAFGVSAYQFLGFLVHERGIEVTQRNVNAMKKIQPPEDKTELQEMIGKINFVRRFISNLSGRLEPFTPLLRLKADQQFTWGAEQQKALDNIKEYLSSPHVLIPPQKGIPFRLYLSAGEKSIGSVLIQELEGKERVVFYLSRLLLDAETRYSPVEKLCLCLYFSCTRLRHYLLSNECTIICKADVVKYMLLAPILKGRVGKWIFSLTEFDLRYESPKAIKGQAIADFIVEHRDDSIGSVEIVPWTLFFDGSVCTHGCGIDLVIISPRGACFEFAYTIKPYATNNQAEYEAVLKGLQLLKEVKADTIEIMGDSLLVMSQLAGEYECKNDTLMVYNEKCQELMKEFRLVTLKHVSREQNIEANDLAQGASGYKPMIKDVKVEIAAMTADDWRYDVHQYLHNPSQSASRKLRYKSLKYTLLDDELYYRTVDGVLLMCLSADQAKIAIGEVHEGICGTHQSAHKMKWLLRRAGYFWPTMLEDCFRYYKGCQDCQKFGAIQIAPASAMNPIIKPWPFRGRGIDMIGMINPPSSKGHKFILVATDYFSKWVEAIPLKKVDSXDAIQFVQEHIIYRFGIPQTITTDQGSIFVSDEFVQFADSMGIKLLNSSPYYAQANGQAEVSNKSLIKLIKRKNSDYPRQWHTRLAEALLSYRMACHGSIQVPPYKLVYGHEAVLPWEVRIGSRRTELQNDLTADEYYNLMADEREDLVQSRLRALAKVTKDKXCVARHYNKKVVPKVFLEGELVWKLILPIGTRDSRFGKWSPNWEGPFQIYKVVSKGAYMLQGLDGEVYGRALNAKFLKKYYPSVWVNA

SEQ ID NO: 171904 - protein, 93 aa, Oryza sativa
  Clone ID: PAT_MRT4530_70090C.1.pep
MDLCARKVMTALGELHCLPMVGGAGRPDSTARLGMGTGTGTALAGGGAICVDVGELPHLIGDLISLTTIDLSNNSSPATTPSSHCPELAPVPG

SEQ ID NO: 171905 - protein, 177 aa, Oryza sativa
  Clone ID: PAT_MRT4530_70091C.1.pep
EDHTCAVREVLEETGCDVSKLLKLEDYIEVSMWQQRVRLYIITGVKGDTVFAPQTKKEISEISWHNIDELLPAGDDAISRGVNGMKLYMVAPFLQGLKAWIATHRHPQYQKSDTSARGTVWKAKNSSTGAAPVENPVITRTGSDPQTLDSRPGKSFRNFRFDTASILQSMEASFLRT

SEQ ID NO: 171906 - protein, 165 aa, Oryza sativa
  unsure (1)..(165): unsure at all Xaa locations
  Clone ID: PAT_MRT4530_70092C.1.pep
QRGPTRHPLGAPEGAHAGAVAVGGAPTPRWSPPATTGAAERQPIKGREGGKERMVPGSPRGDGADGGGGRTRGRCRRGSGRRGQRRSGGRRPKRRGGRGWRGCGEPRAPLXRSGGAVGHPARPSPWWRSRRPPRAPLAMVEEPSATPRAPRRGGGAVGHPARPSP

SEQ ID NO: 171907 - protein, 190 aa, Oryza sativa
  unsure (1)..(190): unsure at all Xaa locations
  Clone ID: PAT_MRT4530_70093C.1.pep
RPGFHLLALASLPVLLLSFLLLMGAYDYVSDXSRPLPHTYNTSIXSTTYKRVGGDNSDAIYVSNAXTSRHHDYTRISCAYADLNXITCNWNASKWTPXIQLSVDYYAIVHILDDSRTIMLVNTXRLRGGGWPRVQHNITVSQGDESLXHIGPRDQLTFFFXMXLAPLPPMETRLTRNEKYKMSNWNELSN

SEQ ID NO: 171908 - protein, 102 aa, Oryza sativa
  unsure (1)..(102): unsure at all Xaa locations
  Clone ID: PAT_MRT4530_70094C.1.pep
GVLPERKGLDVAKLVEISDASSSLHLNRATPERALHTANLCLRLCTXSRRALVIRRLVMTANAKSLARDLISKDASIYRVLLSRVLADXVIFQWMVNRLMPI

SEQ ID NO: 171909 - protein, 96 aa, Oryza sativa
  unsure (1)..(96): unsure at all Xaa locations
  Clone ID: PAT_MRT4530_70095C.1.pep
RPASPILSGLFPGKAPRHWWVFKGNPPGHGVSYPFQTHSPLCLSPPTHSRPPPHITFNLYSYLXNSTSSPFSFIPNQNLFFLTHNPLHLLPIFINP

SEQ ID NO: 171910 - protein, 82 aa, Oryza sativa
  Clone ID: PAT_MRT4530_70096C.1.pep
NICKAYKEYSSSRRFHNKPIINSFSLLCKTFHLQTVVNHHFKIVAILITIHPHLHHIPYFNLKSTHTMINRNHPMTAYIVPC

SEQ ID NO: 171911 - protein, 95 aa, Oryza sativa
  Clone ID: PAT_MRT4530_70097C.1.pep
LFFYFLCFFFCLFFGMILVWAHSARAKGGYGKRQVGRTANRKSWKGNIRKGPQPGISRKRPLHLQSQASTVGIFPTKHFLRPNISRTFSIPEMLT

SEQ ID NO: 171912 - protein, 387 aa, Oryza sativa
  unsure (1)..(387): unsure at all Xaa locations
  Clone ID: PAT_MRT4530_70098C.1.pep
MPPPPPSKNRGHVPAPRPPPGKPPGRRMASRDAAERAAFFARREAAAVLRRVLRGDASRRAAGSIKSLVYSPSVRNKRATFALVCQRVLXHLTPIRTQEVIRMMKQRVERIRKTLRLQXNDLLFGQETAASGSVEQLIMLHKDTIMAALEKMCIRRKVRSVEDLVSKKRTVKPKPRFLRVNTLRTSTDSVIEELNKIHKGKASCMVAVALCPEPGWKVIDACAAPGNKTVHLAALMNGEGNIETINGDFLDIDSNDPSYAEVRAILLDPSCSGSGISTERLDHLLPSHSRGNQDDASTSSRIRKLSAFQRKALSHALSFPSVERVVYSTCSIHQAENEDVVSSVLPLASSLGFELATPFPQWRRRGLPVFEGCRCSIPQISTMISPG

SEQ ID NO: 171913 - protein, 71 aa, Oryza sativa
  Clone ID: PAT_MRT4530_70099C.1.pep
KKRRRSGKEKSGKKGEENKKRKKEERKVKEGSKVKGREGKEKEGMKREHKQRMEVMEAKAKKKRIGKKGKR

SEQ ID NO: 171914 - protein, 113 aa, Oryza sativa
  unsure (1)..(113): unsure at all Xaa locations
  Clone ID: PAT_MRT4530_7009C.1.pep
TARRRGARRRSTAGTTATATTAAAGPRAPPRRSPPACARRAGATSPPATSAAAAAGTRAAXRPPPPPPPPPPPSLTTGSFRRRPRPRHTSLCPPPPRRCSPTSTSTSHGAPPP

SEQ ID NO: 171915 - protein, 329 aa, Oryza sativa
  Clone ID: PAT_MRT4530_700C.1.pep
MSAPSDPAVATHPQAGAAAAASSSSGLTFKLHPLVIVNVSDHHTRVKAQAACSGDGASSAAAGGQPPRVFGCVIGVQRGRTVEIFNSFELVLDPVSGTLDRAFLEKKQELYKKVFPDFYVLGWYSTGSDVRDTDMQIHKALMDINESPVYLLLNPAINLSQKDLPVTIYESELHVIDGSPQLIFVRANYTIETVEAERISVDHVAHLKPSDGGSAATQLAAHLTGIHSAIKMLNSRVRVIHQYLVSMQKGDMPLDNSLLRQVSSLVRRLPAMESEKFQDDFLMEYNDTLLMTYLAMFTNCSSTMNELVEKFNATYERSTARRGGRGAFM

SEQ ID NO: 171916 - protein, 78 aa, Oryza sativa
  unsure (1)..(78): unsure at all Xaa locations
  Clone ID: PAT_MRT4530_70100C.1.pep
VGPPQWIRTLGSNLVPPWSPWAPPPQVAGFPPVCDPNLPFAPLKGGGPPPPGGPPKKGPTMLXKWPFPAGEVLIPFLY

SEQ ID NO: 171917 - protein, 65 aa, Oryza sativa
  Clone ID: PAT_MRT4530_70101C.1.pep
HSKRRRMTPEYIARCATSHIEAIPIQGIFFFLLTSMDNYQLFTACSCGGSYCLCLRRSVVALFEM

SEQ ID NO: 171918 - protein, 192 aa, Oryza sativa
  Clone ID: PAT_MRT4530_70102C.1.pep
MAASSSLSPSLLLGCSFLIAAAVLLRRHDSAVATTTTTTHLHFYMHDAYTGPAPTAMRVVSGRSLLQSTTDIVDGSSPPRQFGDIVVLNNALTEGPDAGSARVGTAQGFGVRVSEGGLVTDLSMHLVMEAGEHRGSSVAIKGRIDVGVGVRESVVVGGTGRFRLARGYMASSSYDYSLAAGGVVEIHVYLQH

SEQ ID NO: 171919 - protein, 64 aa, Oryza sativa
  unsure (1)..(64): unsure at all Xaa locations
  Clone ID: PAT_MRT4530_70103C.1.pep
VVIVHTELXRREEXVRRKTXEDNXNXXNXMNTGFWNXXDFLHVYLFXHLFVCITYXVXAWXXEX

SEQ ID NO: 171920 - protein, 154 aa, Oryza sativa
  Clone ID: PAT_MRT4530_70104C.1.pep
MLASRVGGGASVDGGISGRRGPGPALMAAAASCGVRWFGDVCGRRSPAPASMVAVSTEQQGSTAACGMLGVDDHGERRGVTPDEVVVERSDTKQCGRGGVRGVAGHDVEVAVERSSQMPQQRQQRRVVGLGAGAGGKEECSSIDEGYWVVHDLY

SEQ ID NO: 171921 - protein, 58 aa, Oryza sativa
  Clone ID: PAT_MRT4530_70105C.1.pep
LNEQKRTVHLVQAGIREYGRSDSRTGYDQMLHVRSQVPEQLRDTIMNYQGSSCPQTPI

SEQ ID NO: 171922 - protein, 97 aa, Oryza sativa
  Clone ID: PAT_MRT4530_70106C.1.pep
MSFTVEYIFFTDTDKRNLALPPNIAEFIFVEADYASRRLHYPYVLATSDPSIRGILERRRETALLRGSAIATRTTSFCMAQHGILPTAKPQIDRPSE

SEQ ID NO: 171923 - protein, 926 aa, Oryza sativa
  unsure (1)..(926): unsure at all Xaa locations
  Clone ID: PAT_MRT4530_70107C.1.pep
MAETVLSMARSLVGNAITKAGEAAAAEISLLIGVNKEIWKTLTLNFPNWLFSNTHPHPPKKETKLLVPSDELKTMQAFLMTAEEMEKKPRLLKAWVEQVRDLSFDIEDCLAEFMVHVGSKSLSQQLMKLKHRHRIAIQIRDLKSRVEEVSDRNSRYSLISPNTDEHDTLRDEFRYWSAKNIDEAELVGFDDAKESILNLIDVHANHGLAKVIFVVGMGGLGKTSLVKKVYHSINIVNNFSCRAWVTVSQSFVRTELLRGLIKQLLGGDSENEHFKGLQSMQRNEKVEDLVEDLKQGLKEKRYFVVLDDMWSIDALNWLNESVFPDSNNGGSRIIVTTRDASIIQNCAYPSYLYRLEPLKTDDAKQLLLRKSNKSYEDIKEARLRSIFPEDFPIKRRCMVNRWIAEGFVDAKFGMAMEDVGNSYFDELINRSMIQPCRFYSHGVVQSCVLHDIMRDIAISISAEENFVFMTKGFVSGIPPENIHHLSIDGRQDSYLSFDLSHVRSLSFFYNPKEQLASLCSPQLRMLRVLDLEFSLCRVTQNDISNIGSFCHLRYLSVKKGSYIYHIPRSIRKLQGLQTLNLKRSLITKVPAEVTELRSFRSLRCSTLGVYSHFEFTTPETNPRRWWRSSARVSVPKGIGSLKELQILELVDIARSNKKAVHELGELTQLKKLGVAGVTERNVSYLCEALQKLSSLCSLRVEAKPFRGLHMLEQLASPPPFLHTLKLKGSLHEIPSWVGKLEKLVKVQLVFTKLKDTESIQVLGELPGLKCLRLIXNAYIGKELVLCHGKFRGLKTLRLDSLEELKKVTFEERTSPKLETITIQDCSSELAVCGTVNLQSLEKIKFFAKGKLVKRPVVQAGQSQSAHHREDIKAAEIIEKSQTSSLEKGESSQSIPRPDVLRTLPPIFATTKLKRSLSCPASTSIVM

SEQ ID NO: 171924 - protein, 138 aa, Oryza sativa
  unsure (1)..(138): unsure at all Xaa locations
  Clone ID: PAT_MRT4530_70108C.1.pep
YQLIASRDYWGDFLAWSWEQPRPRRXLRRLRECARSEYDHPCLRTCEPRAIYERLKDAASPDLMVGYLEQFLGGDEKRPDLPPRLDEGLPLCLIFGGDGRHMAAFSPDNDSAGTSLTSEGVPXSIWDRLVAVENAQLR

SEQ ID NO: 171925 - protein, 85 aa, Oryza sativa
  unsure (1)..(85): unsure at all Xaa locations
  Clone ID: PAT_MRT4530_70109C.1.pep
MKKILFSMFYSILVGEEPDSVFLKKEGKQNQVKMIWVAPSSCAKDLTISEGTGATFLFNFHSRVSICFHALFXRPRNMKWTNSFS

SEQ ID NO: 171926 - protein, 41 aa, Oryza sativa
  Clone ID: PAT_MRT4530_7010C.1.pep
TTLLYTATYLAFSSRLLTVRGQLLRMVTFYPSHLPSPNCHC

SEQ ID NO: 171927 - protein, 203 aa, Oryza sativa
  Clone ID: PAT_MRT4530_70110C.1.pep
TLVSANARLVDFQSTLELAGRWEGGEVASADGMRFVTPVKTINSGSNRKYFGSGRGITWYNFVSDQYSGFHGIVVPGTLRDSIFVLEGLLEQQTGLNPVEIMTDTAGSSDIIFGLFWLLGYQFSPRLADAGEAVFWRVNKSANYGVLDKLARGYADLSKAESQWDEMMRTAGSLKLGTIHASELIRSLLKSSRPSGLAQAIME

SEQ ID NO: 171928 - protein, 58 aa, Oryza sativa
  Clone ID: PAT_MRT4530_70111C.1.pep
HNPCSSIIMFVEHFGDSSFSNILASRHSSRDRPCRPVSGEVLEKAHQACRRCIFSAEV

SEQ ID NO: 171929 - protein, 67 aa, Oryza sativa
  unsure (1)..(67): unsure at all Xaa locations
  Clone ID: PAT_MRT4530_70112C.1.pep
FFFFXXASLLLFVIFNVLLFLRALFFCSYFWGGFLAFFIRTSCSPVGPGVVFRVLPPSPRILKXTLP

SEQ ID NO: 171930 - protein, 94 aa, Oryza sativa
  Clone ID: PAT_MRT4530_70113C.1.pep
ERGEPVLGSGNENNPPQGENGGGFFILPAGSPLKAPSFGGAVWGQLENPGRNLGGNTARESPRHYARGGLRGLPPTRGPTQKSPAGPRGGPGFA

SEQ ID NO: 171931 - protein, 100 aa, Oryza sativa
  Clone ID: PAT_MRT4530_70114C.1.pep
MSHPSGFQGVLPRGPRPATTWRGEQAGRKTLLRAFNVRRPNRPAPQLMRRGRDAEWGQVYPVPLTRCQGRPTRMVAMLLPVEAKDSGMIRAMWASPPMEG

SEQ ID NO: 171932 - protein, 80 aa, Oryza sativa
  Clone ID: PAT_MRT4530_70115C.1.pep
HEAHTHIHTHHTHTHPLLNEDTNSSLSPVCNNGHRLLQPRRLEDHQAQVDRRSGDAGLLPPVTGGRRRLSPPPPPAPVPY

SEQ ID NO: 171933 - protein, 57 aa, Oryza sativa
  Clone ID: PAT_MRT4530_70116C.1.pep
EVSSCSFSTIRSSSWADFSHFLYSLAFFMSLCAMFPPFWWSMPLRVPDNDSVRGGVR

SEQ ID NO: 171934 - protein, 211 aa, Oryza sativa
  Clone ID: PAT_MRT4530_70117C.1.pep
MTSLPLSSLSSSSLVSALFFLFFLPHLSSLLTLTTWESQVLLQLDGWREPLGFCEEVIDKRGYVEAIPTISEILVLFTGSMRGRGPATEMYCLYLNDPSGEPSSIVASIARPAIQLIMALVVPTAWLVPCRRLVHAMPKRKKIAIPKLEGVTGCFGAVMVPVPYCALDVGEVLMVAATDEGALRLPDHSTYLSCEPQGQHLGQILVKLCRR

SEQ ID NO: 171935 - protein, 127 aa, Oryza sativa
  unsure (1)..(127): unsure at all Xaa locations
  Clone ID: PAT_MRT4530_70118C.1.pep
MAGEEVEESTSSPLVQMYEVDWALIGDAPDWTQVPQRDXRWNLPHDTHWGYSRSSSSSGVPPSSWMRHSVSSRGDLGELTRRVCALVLQAGEIQHALEDHIMQTQEGSILTPDLEQKASLGERPLPR

SEQ ID NO: 171936 - protein, 453 aa, Oryza sativa
  Clone ID: PAT_MRT4530_70119C.1.pep
MAIYNETWFEFLHLFSVYGDWGGSMQKRGAGVRRIKDMCGWVPGSGAEVCWGGHRLAAGWIQCGWGLCSYRHAAAAATDDGGVSPLPALPSTAKAAAMPSLRIIKSISDKSKYIVVLELRGLAIEKVPDAVGCLFNLRYLGLRHSKVKFLPKSVERLSNLLTLDIFNSYIQELPQGIVKLKSLRHLLVERINDPSWRDFRSRHGVCIPKGAVVGQAQSAFIRGRDHKNFAYVQGAVWHWNHHRAKTPCHTLKFGDCYLKHAHASPLPRIDPVNLREAAQMEHEYLAYGWDGLDISSLVDDLLAKSQRLAPSIQLQQYLGFPCRETPSSSPPGAAVVSSPPPASAPVSAAPASVRHRHRPSSSASMMARAVLAVDDNDGGDGERTTPRLTWVQARAVDDDDAGDGRTLAWLTLALARAVADSLPPCPRHTVDDDDDDGGRQGWTMPVTDGRLRG

SEQ ID NO: 171937 - protein, 1651 aa, Oryza sativa
  unsure (1)..(1651): unsure at all Xaa locations
  Clone ID: PAT_MRT4530_7011C.1.pep
MAEKQAPLPSSLGSVKGKAPKPGLTDIIDDNVLPIDLEKFTPDQKQEFEAMMQQARDQYLSSFMQTRKGTLVQKYKMKLVADTPGTGSSNNGEVKQAPDGSAQPSNKGATSGSVGNQDDNPQEVHGAPGDIAQGPQGGNLSQNIELAQDFFNNFQDRVDYAVHHALINQEQFSLRPKETGSLYRQPYPEWFERVPLPNRFKIPDFSKFSGQEGVSTYEHISRYLAQCGEASAVDALRVRMFRLSLSGSAFTWFSSLSYGSVNSWADLEKQFHSYFYSGVHEMKLSDLTAIKQRYDEPAHEYIQRFREMRNKCFSLSLTDAQLADLAFQGMIPPIREKFSSEDFDSLSHLIQKVTLHEHRLADVRRSSKKVNHVCPYMYRSDDEDDDSEIAAAEWVRSKKVIPCQWVKSPGKEQKYDFDITKAXRSSICCSEKSRFNSLPVFRQQIQVAIEGGKIKFDDSKKPMKVDGNPFPVNMVHTASQAADGARTKGFQVHSAKIINKYQRRYDKQQGRRYEENDNGFDPHWDCEFFRFCWNEGMRLPSIENCPGCSDVIENSSRPHNRGDRPRQTRLPVHQRLGPMGQDHGQEDELTRKNQWCPSGIFTKNQKRRVQRLRSRERFQEVEEEINHRLKKPKPRQVWRVKNQAPAADNATADEAKRLAKGKSVVTAPTNMVFTLPAEFGINQADVDEVEEESAKLVLSSEQAVFEKPEGTENRHLKPLYVNGYVNGKPMSKMMVDGGAAVNLMPYATFRKLGRNAEDLIKTNMVLKDFGGNPSETKGVLNVELTVGSKTIPTTFFVIDGKGSYSLLLGRDWIHANCCTPSTMHQCLIQWQGDKIEVVPADSQLKMENPSYYFEGVVEGSDICAKDTVDDLYDKHGQGFMLADDLEEIDIGPGDRPRPTFISKGLSLEFITKLIELLKEFRDCFAWDYYEMPGLSRSIVEHRLPIKPGVRPRQQPPRRCKADMLEPVKAEIKRLYDAGFIRPCRYAEWVSSIVPVIKKNGKVRVCIDFRDLNKATPKDEYPMPVADQLVDAASGNKILSFMDGNAGYNQIFMAEEDIHKTAFRCPGAIGLFEWVVMTFGLKSAGATYQRAMNYIYHDLIGSLVEVYIDDVVVKSKEVADHIADLRKVFERTRKYGLKMNLTKWIEGACFEFAYTIKPYATNNQAEYEAVLKGLQLLKEVEADTVEIMGDSLLVISQLAGEYECKNDTLMVYNEKCLELMKEFRLVTLKHVSREQNLEANHLAQGASGYKSMIKDVKVEIAAMTADDWRYDVHQYLSNPSQSASRKLRYKALKYTLLDDELYYRTIDGVLLKCLSADQAKVAIGEVQEGICGTHQSAHKMKWLLRRTGYFWPTMLEDCFRYYKGCQDFQKFGAIQRASASAMNPIIKPWPFRGWGIDMIGMINPPSSKGHKFILVATDYFTKWVEAIPLKKVDSGDAIQFVQEHIIYRFGLPQTITTDQGSIFVSDEFVQFADSVGVKLLNSSPYYAQANGQAEASNKSLIKLIKRKISDYLRQWHTRLAKALWSYSMACHGSIQVPPYKLVYGHEAVLPWEVRIGSRRTELQNDLTADVYYNLMADEREDLVQSRLRALAKVTKDKERVARHYNKKVVPKDFSEGELVWKLILPIGTRDSKFGKWSPNWEGVAPVFLFSFI

SEQ ID NO: 171938 - protein, 59 aa, Oryza sativa
  Clone ID: PAT_MRT4530_70120C.1.pep
MAFMLAGGFFVKCRWKFFLKIQLQGMSNLHFVLFARDLHPSTYTKIALSSHPEVFDWAK

SEQ ID NO: 171939 - protein, 168 aa, Oryza sativa
  unsure (1)..(168): unsure at all Xaa locations
  Clone ID: PAT_MRT4530_70121C.1.pep
GGAVVRSAAVAAVAVTTVAGGMAASDGXLRAWQTATSGRRGIVWRRGRRPAWRRVAQPMTAEAGSAREARAAEMEAGLAREARPVEGGRIGARGASGGGRPDWRERRIRRGRRWKRRPLCEEELLVGVARSSTHEDWPAEDASAGVPHVGRAGEVVEHRCVSRGFTGG

SEQ ID NO: 171940 - protein, 279 aa, Oryza sativa
  Clone ID: PAT_MRT4530_70122C.1.pep
MAATPLSAGEAANGGGQCRQGDGGSGFTFAESGHPLARVGAGGGGGRGAATRQGRRRRHDEAAATARRRDGDDLHGSRRRPPRRDGGARLGNDGVGGAAGDGQWWRCQWQPRLQPEAVAATPVGAEAEASELVAAAASAAAVARSGCGCGDHGRRRHGGLGRLAEGVADGYIGPAQHCLEEGSETGLAQSGIADDSGGRLGARGASGGDGGQLGARGATGGGGGDLGARRSGRWVWRGLWRTKTGWRETPVQGSRMSAELERWWSTGASAKDLQVVSSG

SEQ ID NO: 171941 - protein, 67 aa, Oryza sativa
  unsure (1)..(67): unsure at all Xaa locations
  Clone ID: PAT_MRT4530_70123C.1.pep
EKEEKEQKLKVKXAIEKGNMDXARIYXENXICKRTEHMNYFCXXSXXDAVVXARXXXQXKMQVIXKS

SEQ ID NO: 171942 - protein, 266 aa, Oryza sativa
  unsure (1)..(266): unsure at all Xaa locations
  Clone ID: PAT_MRT4530_70124C.1.pep
QRGRGDERRRLGSGGGGRSRRGDGGSGITFAGSGHPLAXPAGVGAGGEGGRGAATRQGRRRWRSVGSGXRRRRRGDDSHGSRRQPRRRRDARGRRRRLHGGPGGSGPSDGSCTAVTAARGSRTAATSGAAGEGQRRRCQWQPRLRPAWRRVAQPMIAEAGSAREARAAEMEASLAREARPMEGGRIGAGGASGGGGRLGARGAADGGGGDLGARRSCRWVWRGLRRMKTGWRRTPVQGPHMSVELQRWWSIGASAKDILSVFLCQS

SEQ ID NO: 171943 - protein, 158 aa, Oryza sativa
  unsure (1)..(158): unsure at all Xaa locations
  Clone ID: PAT_MRT4530_70125C.1.pep
MFSLLLPAAADATSSALLDLLLLLCPILDFHACTGSXVLVNAYPYFAYAEDPTSVELEYTLLELTYAGVAAPSSAGGRAGGVARHKSCAGAVVAACGDSVQQLTPAQLWCPLAAVGARAPVAPRFSAVVEPQGDRIVVVGVQPHTRAPPHTLRCRAWH

SEQ ID NO: 171944 - protein, 280 aa, Oryza sativa
  Clone ID: PAT_MRT4530_70126C.1.pep
MEQPLYLHRLVQANWTRMCRRGRFCFHCRSPFCHHCCPEHWDRHHPAGGRGRVATIGLLGSGDPAAFAKYPVGRWGYNWNYIQRVKDWNRDWILLNPRMTPLQGRGRTCVNCNQKIGESSARYCCLMCKHNHVHQGKGRDMIQALAAGNYFQIHRPDRFCTICMSSFCSACCAEHIERHHPEKANAHGDQIIEVVHVDAWAAVAPSVLVPEDVLHGVQVVHAGGGALVYPVMRLEAPPAVQHVGDVPWQHNCGAPGCHEMILVQAQFCCLRCKAAVHWAA

SEQ ID NO: 171945 - protein, 59 aa, Oryza sativa
  Clone ID: PAT_MRT4530_70127C.1.pep
MEENLPNKRRNPAASLTDELIVEVLRRLPVRSVCQFNHVGLRTDPELTTALQKGNGSQD

SEQ ID NO: 171946 - protein, 393 aa, Oryza sativa
  Clone ID: PAT_MRT4530_70128C.1.pep
MELEGRARPLLMLKEWLELESSAELSRDGFGCYPRRQLAAELRGGGGGSGRRRNGAVIERVSAAVRAALLIRPSSSAREGGEAALSKSFSRRLGRGFWRKRRGEGDEVNSRVDSCSAAAVSGRDDGSSPAMSPRRRSWEGRHAGGVAGRQSHETQKQVASKMDCEATCHLDEELEQGQRRSPVSVMDFLSQDEEDDDGEVEDGNGNSEYDDVDDSIASPTFQQSLSNIRRVGQQLLQKIRQFEQLAELDASDVDDATLAKEDVVCHVADSDSMEDDTEEAFVQDLVDLLEANSPGSTRCFQKLLIDFFYDGLPPWQGERLDGPDRAKLLLEIAKAWLDDQDFSSRFDGKAEVEEIERIGRWRCFKEVGQELLAVDLEGEIFWSLVAEMVGELG

SEQ ID NO: 171947 - protein, 376 aa, Oryza sativa
  Clone ID: PAT_MRT4530_70129C.1.pep
MVGQTVMRIVRPCFKPDHQLAVGGTRDGLLWYKDTGRHACGDFSMALVQANNLLEDASQVEAAPLLLSHSSSTTFVGIYDGHGGPETAHFIAQHFFPNLKKFATEQQTVSVDVIRKSYAATEEGFLNLVRKQWLIKPQLASVGSCCLVGIINEGVLYVANTGDSRAVLGRLERGVIKAVQLSAEHNASIESVREELRQFHPDDPRIVVLKHNVWRVKGLIQVSRTLGDAYLKSTEFNREPLLARFRLSEPFHKPILSPEPSIEVHKLCTEDQFVIFASDGLWEHLTNQEAVDIVNCAPRNGIARRLIKAALREAAKKREMRYSDLKKIDRGVRRHFHDDITVVVLFLDSALVGKRFYGGPLLSLRGGDGASTLTQK

SEQ ID NO: 171948 - protein, 75 aa, Oryza sativa
  Clone ID: PAT_MRT4530_7012C.1.pep
MGPTRPETSTFAKLRRRTTRGWAKEPSFLFSRLGPRRPAGDGGDADTGRRTTPAGDARADNGEDELTGGAMAPMR

SEQ ID NO: 171949 - protein, 78 aa, Oryza sativa
  unsure (1)..(78): unsure at all Xaa locations
  Clone ID: PAT_MRT4530_70130C.1.pep
ARGSTAAHSLLNNGDGEVDPPAHGVRAACVRGXLLLLQRPGGDRGRRRRAAGDGAAGRARSLTAAAVLRQREDGGGGA

SEQ ID NO: 171950 - protein, 58 aa, Oryza sativa
  unsure (1)..(58): unsure at all Xaa locations
  Clone ID: PAT_MRT4530_70131C.1.pep
HDVLVHXLFFFSKTTDQMNXXKXSXRRKRNXKRXIKXXXXWXXLGXPTHPXXXHHXXP

SEQ ID NO: 171951 - protein, 215 aa, Oryza sativa
  Clone ID: PAT_MRT4530_70132C.1.pep
MVGQTVMRIVRPCFKPDHQLAVGGTRDGLLWYKDTGRHACGDFSMALVQANNLLEDASQVEAAPLLLSHSSSTTFVGIYDGHGGPETAHFIAQHFFPNLKKFATEQQTVSVDVIRKSYAATEEGFLNLVRKQWLIKPQLASVGSCCLVGIINEGVLYVANTGDSRAALGRLERGVIKAVQLSAEHNASIESVREELRQFHPDDPRIVVLKHNVWR

SEQ ID NO: 171952 - protein, 85 aa, Oryza sativa
  unsure (1)..(85): unsure at all Xaa locations
  Clone ID: PAT_MRT4530_70133C.1.pep
KTXNXSRXLXGXXXXYXXLXVXSXVXCXKXGPYPFNXWTWQSXXRRNLKPLSHLDETECVSCSSLYLSLSTLLLPPPPVLLCVRQ

SEQ ID NO: 171953 - protein, 173 aa, Oryza sativa
  Clone ID: PAT_MRT4530_70134C.1.pep
HASKAGLAAESTAQAPAQPHFVLAPLAAHGHLIPMVDLAGLLAAHGARASLVTTPLNATWLRGVAGKAAREKLPLEIVELPFSPAVAGLPPDYQSADKLSENEQFTPFVKAMRGLDAPFEAYVRALERRPSCIISDWCNTWAAGVARSLGIPRLFFHGRRASTRSATSTPSCT

SEQ ID NO: 171954 - protein, 232 aa, Oryza sativa
  unsure (1)..(232): unsure at all Xaa locations
  Clone ID: PAT_MRT4530_70135C.1.pep
DAGGEEKGKRKGEKGXPLCRFGKEEEGSGGDAAEGGGALPPSLGGLRAEWRGPGDDDGDDGGXFGAERRHWRQARXQALTTAATERKFMSVEVARPGKDGAFQRMATRREYRPYYQVFAVAMPILVRLMLSTLVIDRYGGWVGNVAWMVVAQVGKNGSAATATAYAVAVVGVHVPAHGRVRVVMSATAVGGAVRGRYFPVDIRSAEQAMTVSIVSRGDERRRNEPTEVTDRD

SEQ ID NO: 171955 - protein, 158 aa, Oryza sativa
  Clone ID: PAT_MRT4530_70136C.1.pep
MARSPAARKPSAAQTVAVTLALALDSAGLLLLLFHLSPSSPTPHPHPHRRLRLRGARASPSPRGQIPFDPVIAGLERRRDDREWERLAAAGLHAPWVEAGPVPEDYIDGGGGFGADPDEDYINDAVRFNLTRGVEALFPKIDVDPADGAETPAELTAW

SEQ ID NO: 171956 - protein, 93 aa, Oryza sativa
  unsure (1)..(93): unsure at all Xaa locations
  Clone ID: PAT_MRT4530_70137C.1.pep
QTTHPVPVDEPSSSFFLLFWSWRCPELPLYFLSFLXTRSIGRCYFVGCSLILRYQSRTTTSTVVFCSTCLFIFYRPFDVWVHAPVLMRIYISM

SEQ ID NO: 171957 - protein, 72 aa, Oryza sativa
  Clone ID: PAT_MRT4530_70138C.1.pep
ATTSAVRPGGRANGDKRRVAWTSSVGGAMPSRRFPSSARDGGGVLQDSACTGNPTRLREGEGVEVPLPRKFR

SEQ ID NO: 171958 - protein, 106 aa, Oryza sativa
  unsure (1)..(106): unsure at all Xaa locations
  Clone ID: PAT_MRT4530_70139C.1.pep
RXXXPXXSXWXAXAXXSWRDFWMRFWIRTREGQXREEGGGDGGGGRHKWRSFQMSKKTXXTVIKQVIXXDXGPLFXSGLXSXRXAXIXXXVVPPGXXSSRIRSPGW

SEQ ID NO: 171959 - protein, 1900 aa, Oryza sativa
  unsure (1)..(1900): unsure at all Xaa locations
  Clone ID: PAT_MRT4530_7013C.1.pep
MAEKPPLSPSSTSPSLVKEKIQKLGLTDVNEGNVVPIDPEKFTPEQKKDFEAMLQKARDQFLNSFMQTRKGTLVQKYKVKVVANDPRTSSSKGEDGKQAPDGSAQLSDKGATGGSLGSQGDNSQGVHGVQGDGVHGVQDQVDYAVHHALINQSGVLVNTLSNMMKSIADGSIAEHQAAGPVYLQGGVFPNYRPLITDAQPSIQVVSPVAPLAQPTAPASTPLPAPSALAPGQLVNPQLLMREQPQHSGQVVNRPTQDQVAAMFLPPQPAVDPIQXSRFNRHSRFSRLYNHLRIGWVCDAWWTACTTIFKSSRPRTLGSPCTAGWHXIMPQVVPEHLAQTGSLYRQPYPEWFKRVPLPNRFKVPDFSKFSGQDGMSTYEHISRFLAQCGEASAVDALRVRLFRLSLSGSAFTWFSSLLYGSINSWADLEKQFHSYFYSGVHEMKLSDLTAIKQRHDEPVHEYIQRFREMRNKCFSLSLTDAQLADLAFQDDDEDDSEIATAEWVRSKKVIPCQWVKSSGKEEKYDFDIIKVDKIFDLLLREKQIQLPAGHTIPSAEELGKKRYCKWHNSGSHSTNDCKVFRQQIQVAIEGGKIKFDDSKKPMRVDGNPFPVNMVHTAGRTTDTGRMRGYQVSSARIINKYQRKYDKQQERHHEEDNGGFDPHWGCEFFRFCWNEGMRLPSIEDCPGCSDVAGGSSRLYDGGNWPKQTRVHVHQRLGPVNQHGDLEDDENKKTQWCPPGIFTKNQKRRKAKPRQEWRVKNQAPVADDVATDEAKRLAKGKSVVTAPVNMVFTLPAEFGIDQADVDEVEEESAKLVLSPEQAVFEKPEGTENRHLKPLYINGYVNGKPMSKMMVDGGTAVNLMPYATFRKLGRNAEDLIKKNMVLKDFGGNPSETKGVLNVELTVGSKTIPTTFFVIDRKGSYSLLLGRDWIHANCCIPSTMHQCLTQWQGDKIEIVPADRQLKMENPSYYFEGVVEGLSIYTKDTVDDLDDKQGQGFMSADDLEEIYIGPSDRPRPTFISKNLSPEFRTKLIELLKEFRDCFAWEYYEMPGLSRSIVEHRLPIKLGVRPHQQPPRRCKADMLEPVKAEIKHLYDAGFIRPCRYAEWVSSIVPVIKKNGKVRVCIDFRDLNKAKPKDEYPMPVAVQLVDATSGNRILSFMDGNTMYNQIFMAEEDIHKTAFRCPGAIVLFEWVVMTFGLKSAGATYQRAMNYIYHDLIGWLVEVYIDDVVVKSKEVKDHIADLRKVFEGTRKYGLKMNPTKCAFGVSAGQFLEFLVHERGIEITQRSINAIKKIKPPENKTKLQEMIGKTNFVRRFISNLSGKLEPFTPLLRLKADQQFTWGAEQQKALDDIKGYLSSPPVLIPPQKGIPFRLYLSAGEKSIGSVLIQELDGKERVVFYLSRRLLDAETRYSPVEKLCLCLYFSCTRLRHYLLSNECAIICKADVVRYMLSAPILKGRVGKWIFSLTEFDLWYESPKTIKGQAIADFIVEHRDDSIGSVEMVPWTLFFDGSVCTHGCGIGLVIISPRGACFEFAYTIKPYATNNQAEYEAVLKGLQLLKEVEADAIEIMGDSLLVISQLAGEYECKNDTLIVYNEKCQELMKEFRLVTLRHVSREQNIETNYLAQGASGYKPMIKDVKVEIAAITADDWSMVATDYFTKWVEAIPLKKVDSVDAIQFVQEHIIYRFGIPQTITTDQGSIFVSDEFVRFADSVGIKLLNSSPYYAQANGQAEASNKSLIKLIKRKISNYPRQWHTRLAKALWSYRMACHGSIQVPPYKLVYGHEVVLPWEVRIGSRRIELQDGLTADEYYNLMADEREDLVQWRLRALAKVTKDKERVARHHNKKIVPKDFSEGELVWKLILSIGTRDNKFGKWSPNWEGTFQIYKVVSKGAYMLQGLDGEVYG

SEQ ID NO: 171960 - protein, 31 aa, Oryza sativa
  Clone ID: PAT_MRT4530_70140C.1.pep
TIPLVLSYLSHRAHVMVQFKQPARSNFNPKS

SEQ ID NO: 171961 - protein, 80 aa, Oryza sativa
  Clone ID: PAT_MRT4530_70141C.1.pep
MLHGRIVTIKLPSLHRCRPTAAITAASPGRLLAVPVLVTIAVDIYYTAYVCNHLAASMLIHGDGSIGLRKRTGDSIGACR

SEQ ID NO: 171962 - protein, 92 aa, Oryza sativa
  Clone ID: PAT_MRT4530_70142C.1.pep
MERVGGGEKQLEDCTVSNALGTWFFSVAGALVAIPVGIKKKSLAPLVFFGTTGTMLDIIMGISQCEREHAERQMKLLEAQNLSANASADGEN

SEQ ID NO: 171963 - protein, 59 aa, Oryza sativa
  Clone ID: PAT_MRT4530_70143C.1.pep
MEISLHWWENARAPMPPTQLQLRYSRSYNNCSGLFEWAVRNSLAQSKIGVKTERIQADS

SEQ ID NO: 171964 - protein, 142 aa, Oryza sativa
  Clone ID: PAT_MRT4530_70144C.1.pep
FFFFFFWEPWHRANPKHRISSISWHHIHHQVMQQSANPFLNPLTTLTTPAANSHAQLHSESTPLCTISTIFFPKIPTHLWGRKSGHTSGTVNYHWEGISGGGEAYIWRTRAKLWGSPHFEGNVLYWWVPSLVCTIPHFLIER

SEQ ID NO: 171965 - protein, 456 aa, Oryza sativa
  Clone ID: PAT_MRT4530_70145C.1.pep
MLLAAATATAAPVSSSSSFFAATTRATTTRSSAQLQLSLPRRCRSWWGNGKARRSSRRRSHHCWAGGGAATPEDHMDELPPGRGRYHPFEEIAEKLQVDDGEPAHLTDAESARTIVEVNSKATVMISTLIDEGVHERIILPEFPYLTDENGDIYFEVDNDDALLESIMGDDKTAHVIIGLDNTQVFADLDLAAASATEFAQEDDDDDDDDDDSDDEESDFDDDFDGEGVFAVDDDDGDEDGEDEDLPRWTDLETMNSCHPLYFARMIAETSTKSSIDWLDRPPASLVVEGQLRPAFAEESTMVSRHLSNDEPRKDNKESGATFFKVEVLSIELITAYGTEPKVKIGEYRKARPDIIAHSAPNIISRLRAGGDKISQALKSLCWRCKAIQIEEAAVIGVDCLGFDLRVCSGTQVQTLRFAFPAKATSEFGAEKQIHELLFPRIQQEGQSPQTRQKES

SEQ ID NO: 171966 - protein, 829 aa, Oryza sativa
  Clone ID: PAT_MRT4530_70146C.1.pep
MPFRPRLPLPLLLLLLPHLRRRRSSPRPPVPAWRPLSYYPSAAAAAAEVTESEEDAAAVGRDTRAPPSIGGIARGAPRVGCNGGGAADDEEVERKARAVARIKLCHELLRERRWRAMRAALAQLVTEQGYIVFPEALSIDHYHIKNRSGSAAALCDILWNRFRECDSNGCVWDALANSYARAQMVHDALYVLSKMSSLNMQISVFTYDSLLHGLRMTDVALELFEEMESCGVSPSEYSHSIIINGLCKQDKVGEALSFLQEARKEGKFKPLGMTFNILMSALCNWGFVQSAKSFLCLMLKYGLVPDRYTFSTLIHGLCKVGSMEEALDLFERVTKEGMELEIVTYNSLINGYRLLGLTKEIPKIIQMMRGQGVEPDLVTYTILIAGHCESGDVEEGMKVRKDVLDQGLQLNIVTYSVLLNALFKKGMFCEIDNLLGEIYNIGLDMDVIAYSILIHGYCKLGEIEKALQVCNAMCSSQRVMPTSLNHFSILLGLCKKGLLVEARWYLENVARKYQPTDVVFYNVVIDGYAKLGDIVNAVRLYDQITVAGMHPTIVTCNSLLYGYCKIGDLQLAESYFRAIQLSGLLPTAVTYTTLMDALSEAGEVNTMLSLFDEMVAKRIKANAVTYSVIVKGLCKQLRFDEAINVLKDMDSKGINADPITYNTLIQGFCESENVQMAFHIHDIMLCRGLVPTPVTYNLLINVLCLKGKVIQAEILLESLRENGIKLRKFAYTTLIKAQCAKGMPINAVLLVGKLLDAGFEASIEDFSAAINRLCKRQFAKEAFMFVPIMLSVGIYPDTQIYCVLGRALQKNSELVYLPILNALAVKTGI

SEQ ID NO: 171967 - protein, 142 aa, Oryza sativa
  Clone ID: PAT_MRT4530_70147C.1.pep
MVSLLLSAHRLLSLSPGLPPTVRGLLLSVAISNASTSLGMARSTPSVAPSWSSPCYGPLATVSSELDPAIPTMAEAPTTRSTCHDDEGDHQQRRGSFPCVARGFLWLSLLISYLLILVVKTILVIPFMLKWVSSAWVVDDPL

SEQ ID NO: 171968 - protein, 63 aa, Oryza sativa
  unsure (1)..(63): unsure at all Xaa locations
  Clone ID: PAT_MRT4530_70148C.1.pep
FAEVLAWAKEKRPSXTNSWMIKEIDWRTNQDLLQAHFHLTASLLVHRRQEIKFYTFWIRIRAS

SEQ ID NO: 171969 - protein, 1262 aa, Oryza sativa
  Clone ID: PAT_MRT4530_70149C.1.pep
MEAADKSQKRGSGLQKLGSAVCRMPVRPKPNVQLLFVELKKVVGLQWEWKVKQLNDKEFLINFPSDDVRSKISTCKSFDFETSLIKASVVETGMTEEAVDELVAVWVKVYGIPKIARNEDAIKSIAELVGEFEALDGASIRRDGPIRVRVACKDPRELHFGMHVYINKVGYLIRWEPEGYSSIENRPIHPDDDDKDDKDENDGNEDMNVDEDYKMQSPTRGRQNQNTGASSRGGHSAPPAYKGKEYKSGYVKKIASKKTSTISSSELVLEKEKKKELVSLQQEPKHTESTELVLWEKKMEIVPMEQESQEIDFSLSAPLHSQEKEFSGKIDAALWDDELEKCAIPTDSDIERLREEEDKEEEISFQEVSHRKKGKSKSTEPAISSRMSLRNREMATIPVTKRAEILTQKKNLESPAQVSRFDLACILLCAGFPAPEPDSNLETPAELNAIAVAANINLGNSDAEINSNIETFRAKELVQASLAAARWKIESEEKELKEKQLEEMVNKEISQIEENPDEVPAHKKRDETKKESFNSRELNSYQGAKEFFWCWKASRGASGGILIGVNQEVAEVTNTHVGAYFLSCEIKCKRDNESWEVISVYGPVDNSLRESFLEELNWHLQFRQLPVVVGGDFNLYRFASEKSNNNLDFRSMEKFNSFIANLELRELFRSGPTFTWTNKQEIPVQVVLDRVLVSTDWDDKFPTSLLSSILRVGSDHTPLLLDTNELDVKGCSYFKFESAWLIQENFVEMVRLKMTPRDDSYILEYWNKKLVPLRRFLKGWWINVQRDARIKKVVLKNQLEEWDLQAEQRDLSCEEWNERYAKETELEHIYELEELLWHKRGGGQWLLEGDRNTEFFHRVANGRRRKCTIVSLEEDGRLITNKDELSDHIVGYYKELFRADTPSNIHLSQGVWEESFSLTNDEKLNLIRPFTRVELDKVIREAKTNTAPGPDGFNVHFYRTFWAEVREDLFEMLILLYNGELDLKRLNFGVISLIPKKSDPSDIRHFRHICVLNDCFKFISKVVTNRFTEVANSVISPTQTAFIPGRFILEGCVIVHEVLHELKLRSDKGIIWKLDFEKAYDRVSWNFLFEVMERKGFPDRWLKWVEACVTGGKVCVNINGERSNFFRTYRGLRQGDPLSPLLFNMVSDALAVMLDKAKGAFPMKYLALPISPEKFLTMILIFWDINWKRDWELGKQIHFHMLAELSKLMLAYHPSPPMQWASTNYLKWRKLCRAEEEGKLEQFAEKMKELTFNLKPRRTGVG

SEQ ID NO: 171970 - protein, 434 aa, Oryza sativa
  Clone ID: PAT_MRT4530_7014C.1.pep
LGEGADRSRLSGQDPWVPIPAARIADARYAAFHTLKAGRVFHAHLLPLALPALGPSSRGITSLTVAYFLHLYSLWIVIKLPQAAPRARYSRYGELVQAIFADVIISSGNTKLKTCNVAKILSADLIHLTGEKLGMWLSLFPTIYLSAGSATALILVGGETMKLFYQIVCGPICSPSPISTIEWYLVFTSLAIVLSQLPNLNSIAGVSLIGGTTAITYCTMSWVLSVSQPQPPTVSYEPQAYTSLGSSLFSTLNALGIIAFAFRGHNLALEIQVPQGGMLTALYAFHSHDIPRGLLAATFLLVVFNCLSSFQIYSMPVFDSFEAAYTGRTNRPCSVWVRSGFRVFYGFLSLFISVALPFLSSLAGLLGGLTLPVTFAYPCFMWICIKKPERFSSGWYLNWGLGLLGTAFSLALCVGGVWSIISSGMKFKFFKPPS

SEQ ID NO: 171971 - protein, 233 aa, Oryza sativa
  Clone ID: PAT_MRT4530_70150C.1.pep
MAFASLPVGERVDGHADHGTSSNEQEEGEAPARNSQERGGRHEKAKRSATHGAELARPHEPPEHHAPARAIDGVGDEGVDGRSLDLQRQPECPTMFNAANLFEMLILLYNGELDLKRLNFGVISLIPKKRRFILEGCVIVHEVLHELKLRRDKGIIWKLDFEKAYDRVSWNFLFEVMERKGFPDRWLKWVEACVTGGKWRKLCRAEEEGKLEQFAEKMKELTSNMKPRRTGVG

SEQ ID NO: 171972 - protein, 640 aa, Oryza sativa
  Clone ID: PAT_MRT4530_70151C.1.pep
MEKFNSFIANLELRELSRSGPTFTWTNKQEIPVQVVLDSVLVSTDWDDKFPTSLLSSILRVGSDHNPLLLDTNELDVKRCSYFKFESAWLIQESFVEMVRLKMTPRDDSYILEYWNKKLVALRRFLKGWWINVQRDARIKKELLWNKRGEGQWLLEGDRNTEFFHRVANGRRRKCTIVSLEEDGRLITNKDELSDHIVGYYKELFRADTPSNIHLSQGVWEESFSLTNDDKLNLIRPFTRVELDKVIREAKTNIAPGPDGFNVHFYRTFWAEVREDLFEMLILLYNGKLDLKRLNFGVISLIPKKSDPSDIRHFRPICVLNDCFKFISKVVTNRFTEVANSVISPTQTAFIPGRFILEGCVIVHEVLHELKLRRDKGIIWKLDFEKAYDRVSWNFLFEVIERKGFPDRWLKWVEACVTGVKVCVNINGERSNFFRTYRGLRQGGPLSPLLFNMVSDALAVMLDKAKEIGREIGNLGNKYTFMLAELSKLMLAYHPSPPMQWASTNYRKWRKLCCAEEEGKLEQFAEKMKELTSNLKPRRTGVGGFGDDWNLTGDLQVTRCLGRVFAVMDRESTWRNGSLTGNSTAVRPAADLRSDRRRRHELARNLGGSTDRSTSVRPTFFRQSVRRFYFGQTAIHRIWG

SEQ ID NO: 171973 - protein, 66 aa, Oryza sativa
  Clone ID: PAT_MRT4530_70152C.1.pep
WQCWHGDPRSDQVRKAPELHDTICPKFSTVFVHGNRLHGFSNSTVLVCTLVASFSVNINFILSFSI

SEQ ID NO: 171974 - protein, 541 aa, Oryza sativa
  Clone ID: PAT_MRT4530_70153C.1.pep
MEKIKKRVAIVGAGVSGLAACKHALERGFRPVVFEADGAGAVGGVWARTIASTRLQTPRPYFEYSDFPWPPGVTDLYPDHDQVTAYLRSYAERFGVLECVRFGCRVAGMEYAAAGGEEEVMAWEHWAGNGEAFGTGRGEWRLTVQSGHNIEASTNNYSYSVSYYLHVADFVVLCIGRFSGFPNMPRFPPDKGPEAFAGTAIHSMDYSNMGAAKAAQLVKGKRVAVVGYQKSAVDIAAECADANGASHPCTIVLRTKRWIVPDLYAWGVPVPVFYINRLSQILLHKPGDGLILSFLAILLSPLRWLFAKFVESYYKWALPMEKHGMVPDEDFMEAMCSCSVMKLPDKFYDKVEEGSIVLKKSKRFSFCKEGLVVEGDSSSETIKSDVVIFATGFNGDQKIREMFKSPLFREIVAGPPSSIVPHFRQCIHPRIPQLAIIGYAESWSNLCVSELLSKWLAHFLHGSFRLPSVKEMEEDIDEWDKYMKRYSPGRFRRSCIGPVSVLCSDRLCQDMGVQRRRKKWLLADWLVPYGPADYADINLNS

SEQ ID NO: 171975 - protein, 493 aa, Oryza sativa
  Clone ID: PAT_MRT4530_70154C.1.pep
MEADMDMPDPEELEWMESHGLLPEEEEEYAYFDDPEDEGFLPAAAGADQPRRSPQETTAAPSKPADEVSEGNLKRPPPPPPPEQGEERSKRRNVDREDSGDGDEDWLRYSPPPVVEVVAEKTISRFASDIRGDCMSVTAPNGERVYAKVATDGLDGGGIGGTRQRTRISKPNFNYKGLLSESFHSLTSRAEQEALAKTMLIAVGHKLNAVYLTDPYFAMVMKALQESAETQNLESCPVTPLVTEQLWVEKYSPNSFTELLSDEHTNREVLLWLKQWDSCVFGSHVRATGDDVLSALRRHSSAIQKNSSNRNFFSKSKGGPGMSQDNMLQNAHGSNSEDLTSSFNKRPTTDNAPEQKVLLLCGPPGLGKTTLAHVAAKHCGYHVVEINASDDRSASSIEPKILDVIQMNSIMSDSKPKCLVIDEIDGALGDGKGAVEINAEKNNSSNSSTSAEDTQVRKSSKKGHKIPKLMRPVICICNDLYAPALRQLRQVAK

SEQ ID NO: 171976 - protein, 27 aa, Oryza sativa
  Clone ID: PAT_MRT4530_70156C.1.pep
CYLTSRIRYLNLLKRKHILSSTTRQIH

SEQ ID NO: 171977 - protein, 110 aa, Oryza sativa
  unsure (1)..(110): unsure at all Xaa locations
  Clone ID: PAT_MRT4530_70157C.1.pep
HSRLQSEKASGSRLHSEKTSGEDDEALASGERMRPPPARTVASXGAGAAATCHGALAGAGAGAAAAGEDARGEVAEGRGCRRGRSLXRVRAPPPPARTVASAAAAAAGEG

SEQ ID NO: 171978 - protein, 158 aa, Oryza sativa
  Clone ID: PAT_MRT4530_70158C.1.pep
MTYILLRARETPAGTVRAGCACVHNTDERGEGWGKRQRRDREEVARCMRERELDRLAKSVRVEEGEEEEEGGVEMGQPDSIARTSHHTTPHHTAPPATRTTPYYLAARLIACQSVVSRGWIESRGVAAGLAAVCARVRDRVRWGWIWEREGLLDMRSP

SEQ ID NO: 171979 - protein, 47 aa, Oryza sativa
  Clone ID: PAT_MRT4530_70159C.1.pep
YAEYAVARFLEASRISLRARANESALVTMRPALTSRASPSSDLSSEL

SEQ ID NO: 171980 - protein, 2155 aa, Oryza sativa
  unsure (1)..(2155): unsure at all Xaa locations
  Clone ID: PAT_MRT4530_7015C.1.pep
MAEKAVPPSPGSVRGKAPKPGLTDIIEDNVLPVDPDKFTLDQKQELEAMMQQARDQYLSSFMQTRKGTLVQKYKMKLVADIPGTGNQGDNLPEMLGALSRIAQELQGGNFSQDIQESFNNFQDRVDYAVHHALINQSGVLVNTLSNMMKTIADGSIAEHQATGLVYLPGGVFPSYRTLITDAQPVVQAAPPIAPVAQSTASASTPLPAASATAAAQPMNPRLLMREYSQPAGQTSNQPTQDQVAALFLPPPPVVDPAQQQPIQQAPPIQLVVQSIQQQVVQPTQQAPSTQLVVQQIQQQVAQPAHQAPPTQPVVQPIQPQAVQPMQQAPLIQPMVHPAQQQVAQPVQQAPLTQQHLQPIQQTPPRQRLQPIQQTPVRQQPIQHLGSANASAGFAALGGQPAQQVVNQATPEHLVHHVQPDGTVIPQMVPEHLFKPMQQQSHGAGQQRPWADVIADVMREQFGLRPKETGSLYRQPYPEWFERVPLPNRFKIPDFSKFSGQEGVSTYEYISRYLAQCGEASAVDALRVRMFRLSLSGSAFTWFSSLPYGSVNSWADLEKQFHSYFYSGVHKMKLSDLTAIKQRYDEPVHEYIQRFREMRNKCFSLSLTDAQLADLAFQGMIPPIREKFSSEDFDSLSHLIQKVTLHEHRSVDVRRSSKKVNHVCPYMYGSDDEDDDSEIAAAEWVRSKKVIPCQWVFRQQIQVAIEGGKIKFDDSKKPMKVDGNPFPVNMVHTASQAADGPRSKGFQVHSARIIDKYQRRYDKHQGRRYEENDNGFDPHWDCEFFRFCWNERMRLPSIENCPGCSDVIESSSRPHNRGDRPRQTRLPVHQRLGPMGQDHGREDEPTRKNQWCPSGIFTKNQKRRVQRLRSREHFQEVEEEINHRLKKPRPRQVWRVKSQAPAADDATADEAKRLAKGKSVVTAPINMVFTLPTEFGISQADVDEVEEESAKLVLSSEQAVFEKPKGTENRHLKPLYVNGYVNGKPMSKMMVDGGAAVNLMPYATFRKLGRNAEDLIKTNVVLKDFGSNPSETKGVLNVELTVGNKTIPTTFFVIDGKGSYSLLLGRDWIHANCCIPSTMHQCLIQWQGDKIEVVPADXMENPSYYFEGVVEGSXQGQGFMSADDLEEIDIGPGDLPRPTFISKGLSSEFRTKLIELLKEFRDCFAWEYYEMPGLSRSIVEHRLPIKPGVRPRQQPPRRCKADMLEPVKAEIKRLYDAGFIRPCRYAEWVSSIVPVIKKNGKVRVCIDFRYLNKATPKDEYPMPVADQLVDAALGNKILRFMDGNAGYNQIFMAEEDIHKTAFRCPGAIGLFEWVIMTFGLKSAGATYQRAMNYIYHDLIGSLVEVYIDDVVVKSKKVADHIADLRKVFERTRKYGLKMNPTKCAFGVSAGKFLGFLVHERGIEVTQRSINAIQRIKPPKNKTELQEMIGKLEPFTPLLRLRADQQFTWGAEQQKALDNIKEYLSSPPVLISPQKGIPFRLYLSAGEKSIGSVLVQELEGKERVVFYLSRRLLDAETRYSPVEKLCLCLYFSCTRLRHYLLPNECTVICKADVVRYMLSAPILKGRVGKWIFSLSEFDLHCGQAIADFIVEHRDDSIGSVEIVPWTLFFDGSVCTHGCGIGLVIISPRGACFEFAYTIKPYATNNQAEYEAVLKGLQLLKEVEADIIEIMGDSLLVISQLAGEYECKNDTLLVYNEKCLELMKEFRLVTLKHVSRDQNLEANDLAQGASGYKPMIKDVKVEIAAISADDWRYDVHQYLSNPSRLASRKLRYKALKYTLLDDELYYRTIDGAKVAIGEVHEGICGTHQSAHKMKWLLRCTGYFWPTMLEDCFRYYKGCQDCQKFGAIRRAPASAMNPIIKPWPFRGWGIDMIGMINPPSSKGHKFILVATDYFTKWVEAIPLKKVDSGDAIQFVKEHIVYQFGLPQTITTDQGSIFVSDEFVQFADSVGIKLLNSSPYYAQANGQAEASNKSLIKLIKRKISDYPRQWHTRLAEALWSYRMACHGLIQVPPYKLVYGHEAVLPWEVRIGSRRTELQNDLTADEYYNLMADEREDLVQSRLRALAKVTKDKERVARHYNKKVVPKDFSEGELVWKLILPIGTRDSKFGKWSPNWEGPFQIHKVVSKGAYMLQGLDGEVYGRALNGKYLKKYYPSIWINS

SEQ ID NO: 171981 - protein, 78 aa, Oryza sativa
  Clone ID: PAT_MRT4530_70160C.1.pep
TPQLLRPLSTTAYRMSNSTLKSVDPPVSTALPGDSFQLLPEASKAGQAEDALFEEQVQAVKDWWASPRYKGIKRPYSA

SEQ ID NO: 171982 - protein, 87 aa, Oryza sativa
  unsure (1)..(87): unsure at all Xaa locations
  Clone ID: PAT_MRT4530_70161C.1.pep
FRFLSSPLLPPPNEPLAIKAXRERAMAAXXRWPTSTLAAVAVAVVVLLAASAATRRRRSRRVGAXXPAGPVLDQACLTALLNXSDCL

SEQ ID NO: 171983 - protein, 54 aa, Oryza sativa
  Clone ID: PAT_MRT4530_70162C.1.pep
KANPAPMSTTRRPVADRLSVPTTQPLAGSSTISWERLDISITNLYEHRIFSFLL

SEQ ID NO: 171984 - protein, 107 aa, Oryza sativa
  Clone ID: PAT_MRT4530_70163C.1.pep
EVGNTFTIKKIKVERKMLKREHEAKKLRRSLSYFLLREGWRFNDWSIQLFNLAPLDVYFIFFSFLKPNKMFIVIVNKIPISRVLLLLSGVETVPGLNFCSLIDDMTD

SEQ ID NO: 171985 - protein, 58 aa, Oryza sativa
  Clone ID: PAT_MRT4530_70164C.1.pep
RETLLGFGPPLIAKRGWNYIRAFLVRGKGNFWVQLKHGFWRWAYKKFPNYPNIRLSTI

SEQ ID NO: 171986 - protein, 841 aa, Oryza sativa
  Clone ID: PAT_MRT4530_70165C.1.pep
MPESNGAACGAAEKVKPAASPASEEPAAIAGNISFHAQYSPHFSPLAFGPEQAFYSTAESVRDHLVQRWNETYLHFHKTDPKQTYYLSMEYLQGRALTNAVGNLGITGAYAEAVKKFGYELEALVGQEKDAALGNGGLGRLASCFLDSMATLNLPAWGYGLRYRYGLFKQCITKEGQEEIAEDWLEKFSPWEIVRHDIVYPIRFFGHVEILPDGSRKWVGGEVLNALAYDVPIPGYKTKNAISLRLWDAKASAEDFNLFQFNDGQYESAAQLHARAQQICAVLYPGDATEEGKLLRLKQQYFLCSASLQDIFFRFKERKADRVSGKWSEFPAKVAVQLNDTHPTLAIPELMRLLMDVEGLGWDEAWDITNKTIAYTNHTVLPEALEKWSQIVMRKLLPRHMEIIEEIDKRFKEMVISTRKEMEGKIDSMRILDNSNPQKPVVRMANLCVVSAHTVNGVAELHSNILKEELFADYLSIWPNKFQNKTNGITPRRWLRFCNPELSEIVTKWLKTDQWTSNLDLLTGLRKFADDEKLHAEWASAKLASKKRLAKHVLDVTGVTIDPNSLFDIQIKRIHEYKRQLLNILGAVYRYKKLKGMSAEERQKVTPRTVMIGGKAFATYTNAKRIVKLVNDVGAVVNNDPDVNKYLKVVFIPNYNVSVAEVLIPGSELSQHISTAGMEASGTSNMKFSLNGCVIIGTLDGANVEIREEVGQENFFLFGAKADQVAGLRKDRENGLFKPDPRFEEAKQLIRSGAFGTYDYAPLLDSLEGNSGFGRGDYFLVGYDFPSYIDAQAQVDEAYKDKKKWIKMSILNTAGSGKFSSDRTIAQYAKEIWGITASPVS

SEQ ID NO: 171987 - protein, 93 aa, Oryza sativa
  unsure (1)..(93): unsure at all Xaa locations
  Clone ID: PAT_MRT4530_70166C.1.pep
RCSVIARAVMSVVGGQGHLXVVAHRGRSVXHGSLPPPRVVLVPLSFSVLLQSSRLFFAWASFNAFLHXAVCSQFGGGASFLRALPVVVVGYAS

SEQ ID NO: 171988 - protein, 90 aa, Oryza sativa
  Clone ID: PAT_MRT4530_70167C.1.pep
MLSVSCPRVYMSRKALDFGQLASCRCRWAGRSGMRVAPRRRMPCLAAVDVPAEAISSARTTTMIPERISVSSLLEVVSDDLLKLNNNLKS

SEQ ID NO: 171989 - protein, 462 aa, Oryza sativa
  Clone ID: PAT_MRT4530_70168C.1.pep
MAAPSSLASSSHLSRRATAAASPSIPPPSPPPPPQRLRCGWVGRAAPPTRRAPGVCSVVSPSKPGSLSAAPLLVCLALGGGGVGRVRLSSWVCFGVGVAAVDVPAATIPDAAATGVGVAERISVSSLLEVVADDLLKLNNNLKSVSFTFSSQSLHHSVQLVHDTKNPVLVSAAEQIFGAGGKRLRPALVFLVSRATAELAGLLELTTEHQRLAEIIEMIHTASLIHDDVIDDSGMRRGKETIHQLYGTRVAVLAGDFMFAQSSWFLANLENIEVIKLISQVIKDFASGEIKQASTLFDCDITLDDYLLKSYYKTASLIAASTRSAAIFSGVSTTICEQMYEYGRNLGLSFQVVDDILDFTQSAEQLGKPAGSDLAKGNLTAPVIFALQDEPKLREIIDSEFSESDSLATAIDLVHRSGGIRRAQELAKEKGDLALQNLQCLPKSQFRSTLENVVKYNLQRID

SEQ ID NO: 171990 - protein, 65 aa, Oryza sativa
  Clone ID: PAT_MRT4530_70169C.1.pep
MKVNLDNSRLYAGLSYACYASSATSPSTNGHVPISPDIPYLGAVFHTGNWTNTAGGSHYYRSGLQ

SEQ ID NO: 171991 - protein, 175 aa, Oryza sativa
  unsure (1)..(175): unsure at all Xaa locations
  Clone ID: PAT_MRT4530_7016C.1.pep
LNSIAGVSLIGGTTAITYCTMSWVLSVSQPQPPTVSYEPQAYTSLGSSLFSTLNALGIIAFAFRGHNLALEIQATMPSTFKHPAHVPMWRGAKVAYALIAMCLFPVAIGGYWAYGNMVPQGGMLTALYAFHSHDIPRGLLVXTFLLXVFNCLSSFQIYSCPXFDSFEAAYTGRTN

SEQ ID NO: 171992 - protein, 408 aa, Oryza sativa
  Clone ID: PAT_MRT4530_70170C.1.pep
MLSVSCPRVYMSRKALDFGQLASCRCRWAGRSGMRVAPRRRMPCVCFVASPSQPGLAAVDVPAEAISSARTTTMIPERISVSSLLEVVFDDLLKLNNNLKSLVGAENPVLVSAAEQIFGAGGKRLRPALVFLVSRATAELAGLLELTTEHQRLAEIIEMIHTASLIHDDVIDDSGMRRGKETIHQLYGTRVAVLAGDFMFAQSSWFLANLENIEVIKLISQMMCSQVIKDFASGEIKQASTLFDCDVTLDDYLLKSYYKTASLLASSTRSAAIFSGVSTTICEQMYEYGRNLGLSFQVVDDILDFTQSAEQLGKPAGSDLAKGNLTAPVIFALQDEPKLREIIDSEFSESDSLATAIDLVHRSGGIRRAQELAKEKGDLALQNLQCLPKSQFRSTLENVVKYNLQRID

SEQ ID NO: 171993 - protein, 68 aa, Oryza sativa
  Clone ID: PAT_MRT4530_70171C.1.pep
SEGIRKQIKGLSSRAPEEIEFNPALKKRLGFLALLLVASMPVVQVLLIGVVGAFSVLGYSNIFNFKGL

SEQ ID NO: 171994 - protein, 124 aa, Oryza sativa
  Clone ID: PAT_MRT4530_70172C.1.pep
MEEEERYVEVASRFYRVKPGAGGGGGGRRLHFLESCFLCKSSIAGDRDIFMYRGDAAFCSDDCRQEQMDMDEALQAVARRHRLRSSAAPASAEAAAAAPARSPMMHRRPTIANFAARTPVAATS

SEQ ID NO: 171995 - protein, 91 aa, Oryza sativa
  unsure (1)..(91): unsure at all Xaa locations
  Clone ID: PAT_MRT4530_70173C.1.pep
TYRTGLPTRTTRSCYLERADEAPNTVTVHSILELQLTEHTKSHXTGVDLFYDHTLNLTDATSGCQLAITHSDNRQMLIKSKLGETRTSDSS

SEQ ID NO: 171996 - protein, 839 aa, Oryza sativa
  unsure (1)..(839): unsure at all Xaa locations
  Clone ID: PAT_MRT4530_70174C.1.pep
MELALASAKPSPSPAPAPLLFAPLKPLPLLRFPPRTRRPAGGTRTTAVAGAAALGAVSVAGAAAVNSAVPGVAAAGLHNYVAGSDDPTKLESSEVEAIASKYGVSTEDATFKAELCDLYGRFVFSLIHPGYEDLEGTEVETIIKFKKALGLNDIDAANRRAFQKLIYVSNLVFGDASTFLLPWKRLFGVTDSQIDIAMRENAKILYASQLKSIGRGLDIGTLIEVRRAQLXYKLSDEVXLKMLYSAYAMEVLSDGHLNDDKLAALNQLRNIFGLAKYEAEAIITDVKARVFXRPTKFFNNELAATPKKAEFLQDICEELQFDPXLASKMHEGAILTPSLASIPLGADGELNKDEVEALMAFQVRLCIPQETVDAVHSEICGKLFEKVVVEAISSVDGYDTNRRQAVKKAAQGLNLKNESVMAIFSKVVRKLFLNYIQRAKAAGNRIETAKELKKMISFNTVVVSELLADIKGEPTTAEPQTSDATSEPEVSESEGDDEYEWEQLETLRKTRPDKELREKLAKSSQKEITLKDDIPLRDRAELYETYLVFCVTGETTNVSFGTAISTKKDNSEYLFPMQAAHLLGFPRKEAQNVHIKMAEKAFVQQAEVILADGKLTEAKADQLAKIQKQVGLPTEYAQKIIKNITTTKLSSAIEASISRGQIGIQQVRGLKEANFQLDSLIAEPLRENIYKKSVEEIFSSGTGEFDEEEVYVKIPADLIINAEKAKSIVQDIAKIRLDNALVQAVALLRQKKKDEVVASLNDLLACDAAVPASKPLSWPTSGELDDLYGIYMKSIPKPEKLSRLQYLLGISDEKAGQIRDAASAGTLSVATEEEDELVF

SEQ ID NO: 171997 - protein, 449 aa, Oryza sativa
  Clone ID: PAT_MRT4530_70175C.1.pep
MELSLASAKPSPRAAAAAAAAAAASSSLLSLRGRRRRVGVVCAAVSSGEEVFGGRRELAGVQPLVEALPPVARAVVELAVVAAAAAAGYVVGLRAGGTRTTAVAGAAALGAVSVAGAAAVNSAVPGVAAAGLHNYVAGSDDPTKLESSEVEAIASKYGVSTEDATFKAELCDLYGRFVFSLIHPGYEDLEGTEVETIIKFKKALGLNDIDAANVHMEIAKRIDRNAGVGQQQAFEKLIFVTNLVFRDAYEYLLPWKRLFGVHESQGCVHVMAGTSSDYNASLSIMSVRDRSLTKTLIDDVMRESAKSLYASLLKSIGRGLDIGTLIEVRRSQLAYKLSDEIASEMFREHAKKLVEENISTALNNLNNRTQVVEEVKSILSFNGGDSDHEKRVEDLKMLYSAYAMEVLSDGHLNDDKLAALNQLRNIFGLAKYEAEAIITDVKARVFQTY

SEQ ID NO: 171998 - protein, 604 aa, Oryza sativa
  Clone ID: PAT_MRT4530_70176C.1.pep
MATSSTATIIAASSSPQPQPLFLLLRLRSRARPGARLRAAAARCSSYNGWADLAAEPDLPFPLQPSHALLPLLLLPIAALSLPRLPPLPLLAAAFSAGFATRHLAPSPSPTHSRRLAALLADLDAQLRALSSSSSSTADPSLLLDVANQLRDAARLAAQGTMLGDAVKEAAGYFAAFSSPRKKPKTAAAAALSLETPSPQDDGNGGLLASATNATTKRTQGKPLDSPSASGGTRTGLGDMLPFDMDIHPLDDAGFSAHSKQDDDADDGVERLVSKHRYGRHTDSFQQGRLATESMESPLLERTLEIRDRSYKLKIESCRGNKSQSNEAQQRPSHHTTTSDNIDDESNAVDSDGDEFSHNVIEAAEILRKARECMMARDDEETADALLYKSARLLSTAVALRPSSLVAVGQLGNTYLLHGELKLKVSRELRTLLANTGALLNGRDRVSRSRKLDRRILSRENISSALVDVCEECESLLVEAGRSYRMALSIDSGDVKALYNWGLALIFRAQLLADIGPEAAIDADRVYLAAIDKFDAMLSKSNTYAPEALYRWGIALQQRSYLRSGNNKEKMRLLEQAKSMFEDVLYVEADNKTGAPGCIVLVKK

SEQ ID NO: 171999 - protein, 322 aa, Oryza sativa
  unsure (1)..(322): unsure at all Xaa locations
  Clone ID: PAT_MRT4530_70177C.1.pep
GYEDLEGTEVETIIKFKKALGLNDIDAANVHMEIAKRIDRNAGVGQQQAFEKLIFVTNLVFRDAYEYLLPWKRLFGVHESQIDDVMRESAKSLYASLLKSIGRGLDIGTLIEVRRSQLAYKLSDEIASEMFREHAKKLVEENISTALNNLNNRTQVVEEVKSILSFNGMLTVLSNFPGEERFVRGLGPITLGGDSDHEKRVEDLKMLYSAYAMEVLSDGHLNDDKLAALNQLRNIFGLAKYEAEAIITDVKARVFQXTKFFNNELAATPKKAEFLQDICEELQFDPXQLASKMHEGAILTPSLVPPLVSQRSCPDRLEIWAN

SEQ ID NO: 172000 - protein, 120 aa, Oryza sativa
  Clone ID: PAT_MRT4530_70178C.1.pep
MSLLELGEHSKLKFCCITSSVTFQQGNQNRSLLRNTHSIQETIPDSAFLTFLSDPEPYQQRLKKRKAVIRCPKPPTFSYPNNNDDDDNNKLYEKSGVTEKQSPWNLTNLFILFWSKQGPD

SEQ ID NO: 172001 - protein, 70 aa, Oryza sativa
  Clone ID: PAT_MRT4530_70179C.1.pep
KTPEQRGKGFLMRKTPHNFFTLFPTYHEVRGPTWGTFDRVCAKKPLNPMSYFTDPKLYAFASLNTHKAYP

SEQ ID NO: 172002 - protein, 151 aa, Oryza sativa
  Clone ID: PAT_MRT4530_7017C.1.pep
MRSGGDVRSFFRQQKAHAAGGVKPTGGVSKKAALPRHHHKPASQGAFLLPVSPAPETVRSIASPLIRLFGFFAATPDRAVDDARRHVEEAEEEEGRERMAREFDMDMRYGPCLGLTRAQRWRRAAALGLAPPPAVIAVCSDDQPCLWEGRV

SEQ ID NO: 172003 - protein, 40 aa, Oryza sativa
  Clone ID: PAT_MRT4530_70180C.1.pep
VHLLCWDGFLARGGFIGDKLDLIPSACCLIQNGFQRRIRS

SEQ ID NO: 172004 - protein, 349 aa, Oryza sativa
  Clone ID: PAT_MRT4530_70181C.1.pep
MAPSRPVAIAVILLCTFLAFQAMAADAYGGGGDDGVTTQMFEEWMAKFGKKYPCHGEKEYRFGVFRDNVRFIRSYRPPAGYNSALRVNQFADLTNDEFVSTHTGAKPPCPKDAPRGVDPIWLPCCIDWRYKGAVTDVKDQGACGSCWAFAAVAAIEGLTQIRTGKLTPLSEQELVDCDTGSSGCAGGHTDRAFELVAAKGGITAESGYRYEGYRGKCRADDALFNHAARIGGHRAVPPGDERQLATAVARQPVTAYIDASGPAFQFYGSGVFPGPCGSGSGAAAAAPTTNHAVTLVGYCQDGASGKKYWVAKNSWGKTWGEKGYILLEKDVASPHGTCGVAVSPFYPTV

SEQ ID NO: 172005 - protein, 156 aa, Oryza sativa
  Clone ID: PAT_MRT4530_70182C.1.pep
MPELTNAAMPAADHAASTAGRGLPSTQLQRWRGAGRRRCREAGRHKKVPKFPDKTTVLGSLGTLIGKLEATVSKHAAQAAKEMHTDRWTSTCDVLVCIKLTHPEINLEEVLSKSGAEKTHEGIKYFPESELSVGGESERDRGWRSKRARWTMMVLR

SEQ ID NO: 172006 - protein, 70 aa, Oryza sativa
  Clone ID: PAT_MRT4530_70183C.1.pep
LGCAVVMDDHTTREPGMRTGVSNWAHGLLASTLLPPFHNVCVYIYIYSINMNIENSLHCETEGVLTSVLI

SEQ ID NO: 172007 - protein, 703 aa, Oryza sativa
  Clone ID: PAT_MRT4530_70184C.1.pep
MAASANRAAVNGAAGSGEPEASRDHVIIFPFMAKGHTLPLLHFAAALSVHHKSLRVTLVTTPANLAFARRRLPGSVHLVVLPFPSLQPPLLPAGVESTDALPSMSLYPAFLRATALLREPFAEFMASLSSSPPLVVVSDFFLGFTHGVASDAGVPRVVFHGMSCFSMAICKSLVVSPHVGGGAAPFHVSRMPEHVTITPEEIPPTVASFADPDNPIARFMIENVESTDVRSWGVLVNSFAAVDGDYVASFESFYQPGARAWLVGPLFLASGDTPERDEENDDPEGCLAWLDERASRPGSVVYVSFGTQAHVADEQLDELARGLVRSGHPFLWAVRSNTWSPPVDVGPDQGRVVRGWVPQRGVLAHEAVGGFVSHCGWNSVMESLAAGKPVLAWPMMAEQALNARHVVDVVGAGVKVDAAVGSVAVVGSAEVEEKVRRVMDAGGEEGRRMRTQAAWAQRAARSAVSDGGTSRVALQKLIGDLQESYYPAPGPRKTTCVWHHTDCVDGTCYARKGLVAEVSKFLFGRFAADHAAIAIAIAGVKVEVATVAYFPRLPPFPSSSHCREPPLPSPACPPAVAHGLSPLPLGHRRRHDAGRRVVQVVVATDGAKEKGEGREARGVGGRRDGETDQTGGRERRWRQWESIGGGATDVPAVAQRRSVKRLSLAMWASKSERWRRVAIRVEGWEREAGHGLGCDRLCEDGEV

SEQ ID NO: 172008 - protein, 130 aa, Oryza sativa
  Clone ID: PAT_MRT4530_70185C.1.pep
ARGGDGMESLAHIAGHTPPRRGEVESPPAESGPPVRPFQDEATGMGPVVCLRWRLPPSWRRRRRSPEDQHFLAVGIGGGGRSLDRRRKEETPPRHGVGEDAGRSSSKACDLRRGFQIKASWLQAKGSKSK

SEQ ID NO: 172009 - protein, 257 aa, Oryza sativa
  Clone ID: PAT_MRT4530_70186C.1.pep
MLPAALRPLRRIPLARLRSRLLSSSASGEGGPPAVASTDEAVRAAKLREEAYKQVANLDWSSNADFWKAVDIVKTLPPKRKEFGLSLFCSHSVVTRKHDKFEKTKLVQYPADPELYDLVVPAVYLVAQYARSEIKRMEAEAEEKKKKDEELEKEKQLEADSVKDETDSKLSAVLVRLDTLEGVVNEIVDDKRKGSAPGFSNKEEATKKGERQSNSTDGQVVPVKSKDIINGATNASPNSTQQSPTGNGDKASSDPKG

SEQ ID NO: 172010 - protein, 90 aa, Oryza sativa
  unsure (1)..(90): unsure at all Xaa locations
  Clone ID: PAT_MRT4530_70187C.1.pep
TEYRCSTSPSGDPKRISNLGNVXNLPKAKTIQGQQLMRGSGYSSMMYPNVEDYXTGFXGCHHLPSTSNKSVGYTTNKVEPWAPPLGLFFG

SEQ ID NO: 172011 - protein, 114 aa, Oryza sativa
  unsure (1)..(114): unsure at all Xaa locations
  Clone ID: PAT_MRT4530_70188C.1.pep
RVGVQSCWAADRSRAHNCITKGKRKPRLGPNNTGTTXELGRNPKTHRSRLAPGRTPHQQDPLHLLQQLGGGGYLYRARFYPRCFSDFKFEDDRXYSCRVHDFRGATGWLQGNMV

SEQ ID NO: 172012 - protein, 525 aa, Oryza sativa
  Clone ID: PAT_MRT4530_70189C.1.pep
MVQRSLLKSIFALTLRPHWRNWRSGTGLADQVDLVLLYLFTIADRYTDDIGSDINDMIKSTGTLTHMKASFGPALELSRSPRPRVFCQHVERHCDGALDAPCGPLPASFPRASATAGGSGGGLPARIGVSRRWRRTTLGIGESRRRWWNFPRLSATASGGGRTSRAASATTGGGRDLHLVKALIPLLDLSVCLGVDLELCLWVLPGSAAWTTSMMMVRSTGGVDGVGDGDPDASSRLVIEVAGGEGQAKNKMELAVGASDSAMRSLLGKLGSLLAQEYTLISGVRSEIQPGDWMEQVRDVAYDIEDCIDDFSHRLGGQPRGEGLLSGLRRARYAVATLWERRGIAARVVDLKNRAQGVGERRTRYGVKDPGRPDAGNGKAARSAPSYHVNDRPQPGPQLVGAAESVGMEDAIGKLGAWLTEGLPDLRVLAVVGFGGLGKTTLALALHRKFGEKFESRACVQASQKLNLAALLRSILRQVMPQVPDKESTDGDSLAGIERWTDKQLKEKLTAHLEQKRYSFPPSAP

SEQ ID NO: 172013 - protein, 54 aa, Oryza sativa
  Clone ID: PAT_MRT4530_7018C.1.pep
LNEDAMLGKRDGMKDVIEHVNRQFKDPDLTTFVCVSIPELLSLDETKRLWHELA

SEQ ID NO: 172014 - protein, 68 aa, Oryza sativa
  Clone ID: PAT_MRT4530_70190C.1.pep
MWAADRSRALNCITKGKRKPRLGPNFTGATWELGRNPKTHRSRLAPGRTPHQRDPLHLLQQTLPTRHY

SEQ ID NO: 172015 - protein, 125 aa, Oryza sativa
  unsure (1)..(125): unsure at all Xaa locations
  Clone ID: PAT_MRT4530_70191C.1.pep
AETLKLNVAGLLLEELLVSGIRFIFFSNWGXVIYIEQGLLTSAEGVHFTHTTLLTRITQPVGISHVGRPPSFHDKAFPKPTQVYHMPTRGVPDQQXDFKFEGGRRYSCRVHDFRGATGWLQGNMV

SEQ ID NO: 172016 - protein, 131 aa, Oryza sativa
  unsure (1)..(131): unsure at all Xaa locations
  Clone ID: PAT_MRT4530_70192C.1.pep
PLQCGEKKKFFYKSYQGATEKEGVEIKRREQKKRGXXSSSSSSAPLISSPALTTEADRAGARGIARPPARGKEATATHATARRGEEQPSGGGGGGGGVRSTTIPERARARPVRRPPNRDGFLPSPPRARQL

SEQ ID NO: 172017 - protein, 67 aa, Oryza sativa
  Clone ID: PAT_MRT4530_70193C.1.pep
VRGKKPQNDALLVIFTWPCCIASTSHGRLPTPVMRDPVPHRRYLPPDHVFPRDIDMSKAETVDGEEE

SEQ ID NO: 172018 - protein, 150 aa, Oryza sativa
  Clone ID: PAT_MRT4530_70194C.1.pep
DMFILIAPQNAVGNCIIDDMKAMTDAAGDRPVILVNPRLKDMPGSSGVMQTMGRDMRLKYAASFETCYSFRLLFYAGSFYPIMGALRMAYPNKYEIYRRVDEPNGQERYVLLEEFVEKPTPDEITNAFRPRKNENEKSASGFWGFLSGIL

SEQ ID NO: 172019 - protein, 61 aa, Oryza sativa
  Clone ID: PAT_MRT4530_70195C.1.pep
LGSMLFVIDLIIPALALRLLSYITLRSYPVILGSCGCLLREKARAVLENLRGGEVIIRERE

SEQ ID NO: 172020 - protein, 227 aa, Oryza sativa
  unsure (1)..(227): unsure at all Xaa locations
  Clone ID: PAT_MRT4530_70196C.1.pep
MAASSSSSSPAAASAPFAAPGPHRRPGLALRPSPPTPPSSSLSCCRASPAAAAVSSVSATAAPNRGPRGMGLRCRASEGAAAAARKEAPLKVMISGAPASGKGTQCRMIVEKYXLVHISTGDLLRAEVSSGTEIGKKAKEYMDNGMLVPDQVVTDMVVSRLSQPDVRERGWLLDGYPRSYAQAQSLESMKIRPDIFIXLEVPDDILIDRCVGRRLDPETGKXYHIKN

SEQ ID NO: 172021 - protein, 801 aa, Oryza sativa
  Clone ID: PAT_MRT4530_70197C.1.pep
MPMEEPSGVEAATPMPSSFSCLPSLSDPELAYAAMPSLLSRSEGIEDVVSFPTSARFQADRGSHAWPPRELSGATSARDASSNPHTPSLPSTHTRPHTPRRSPRAPLVVVAQMAASSSSSSPAAASAPFAAPGPHRRPGLALRPSPPTPPSSSLSCCRASPAAAAVSSVSATAAPNRGPRGMGLRCRASEGAAAAARKEAPLKVMISGAPASGKGTQCRMIVEKYGLVHISTGDLLRAEVSSGTEIGKKAKEYMDNGMLVPDQVVTDMVVSRLSQPDVRERGWLLDGYPRSYAQAQSLESMKIRPDIFIVLEIELYNQFIKFLVHENITGYFNNVSTVPDDILIDRCVGRRLDPETGKIYHIKNFPPENDEVSARLVTRSDDTFEKVKSRLDTYKQNSEAVIPTYSDLLNQVGGHLSLKGGRRSHRRRHMLEVGMAMRIGGWKEFRGIPTRLNNIPHSREIRKYFYNDVLVATRHAVEDKKTRLQIDINIPELNPEMDVYRIGTLMELVRELSLSFADDGKRVKVCVQGSMGQGAFAGIPLQLAGTRKILEIMDWGEYGAKGTFINFGAVGASEVDKEDDMFILIAPQNAVGNCIIDDMKAMTDAAGDRPVILVNPRLKGCGVGVRGWGSRGGGKVNGKNRVVKYAADLMPHSFVGYGRDGWFRRLKPVQEVQWGRCISFSYVLCGKRIDLDMPGSSGVMQTMGRDMRLKYAASFETCYSFRLLFYAGSFYPIMGALRMAYPNKYEIYRRVDEPNGQERYVLLEEFVEKPTPDEITNAFRPRKNENEKSASGFWGFLSGIL

SEQ ID NO: 172022 - protein, 75 aa, Oryza sativa
  Clone ID: PAT_MRT4530_70198C.1.pep
FFFFFFKLTGTCNVAAVKGEKMLSFTDAHQQGHKPMDSFTFTVTEIKLTPKKSRYSRVNRHFVTQAISSGPKEGV

SEQ ID NO: 172023 - protein, 84 aa, Oryza sativa
  unsure (1)..(84): unsure at all Xaa locations
  Clone ID: PAT_MRT4530_70199C.1.pep
MATAYAPMASAXVMKSSLVCSKPRGLVXVLSLPRRPPLQVKAFHFEKPXYQGVQPINGQPFIRRLENAGNFNPLVGCDLFNLPG

SEQ ID NO: 172024 - protein, 309 aa, Oryza sativa
  unsure (1)..(309): unsure at all Xaa locations
  Clone ID: PAT_MRT4530_7019C.1.pep
PASAMNPIIKAWPFRGWGIDMIGMINPPSSKGHKFILVVTDYFTKWXEAIPLKKVDSGDXYSICSKSIIIYRFGLPQTITTDQGSIFVSDEFVQFADSVGIKLLNSSPYYAQANGQAEASNKSLIKLIKRKISDYPRQWHTWLDETLWSYWMACHGSIQVPPYKLVYGNEAVLPWEVRISSRRTELQNDLTADEYYNLMADEREDFVQSRLRALAXLLRVKERVARHYNKKVVSKDFLEGELVWKLILPIGTRDSKFGKWSPNWEGPFQIHKAVSKGAYMLQGLDGEVYGRALNGKYLKKYYPSVWVNA

SEQ ID NO: 172025 - protein, 57 aa, Oryza sativa
  unsure (1)..(57): unsure at all Xaa locations
  Clone ID: PAT_MRT4530_701C.1.pep
MPRVYRPDLGVLRPCNPILAXXLVAGEVGRWTSSSSSERTTXXRKPEVGXXKLNFDG

SEQ ID NO: 172026 - protein, 112 aa, Oryza sativa
  unsure (1)..(112): unsure at all Xaa locations
  Clone ID: PAT_MRT4530_70200C.1.pep
MWKRATYVLVQHRCVLTRRCQVIGGSDLPRALXCTRSDAAQARTMEEDVMPICTGLQRHEIDGXLQGKKRFDMDETCWPFGTKEAAARYXSYYNKWIDICTDCVGEDKQDDL

SEQ ID NO: 172027 - protein, 76 aa, Oryza sativa
  Clone ID: PAT_MRT4530_70201C.1.pep
MGGGEFIGAALIEVWRWEERMVEKKRTRNTRERGGLFPRKLQLRALAAIARFRRWGFDHTFLDPFTLEIGDLQEVP

SEQ ID NO: 172028 - protein, 36 aa, Oryza sativa
  Clone ID: PAT_MRT4530_70202C.1.pep
AGTAYINCDFVPVFCHRFDFTRASWLIQKAALSFKS

SEQ ID NO: 172029 - protein, 202 aa, Oryza sativa
  Clone ID: PAT_MRT4530_70203C.1.pep
MKCTRVPDLPKGSDKLRFGRSRDTNRSGFLNAHALEPRNRSTTSPLVITRVETAQRPKYGDAAPGQILDVNLFGRFPLTRKEFGHGTKTIGKLKSTKLNLREYERALLGVCVEMERVRGLYSLPMTVGMVGNTLEPSLGANLYRPGETLHPTAMRGVRPNQVPAQPAHNLDGGLLDFSPPLHTTVAMIVVEVGAPTTAIPNQ

SEQ ID NO: 172030 - protein, 79 aa, Oryza sativa
  Clone ID: PAT_MRT4530_70204C.1.pep
LSWIQRKKMNEKAALANNDELVYTNLYKVHINLKQEANSHKKTVKFTIKCKTNQAYAREHCGILCRKCNAQTLAVDCHK

SEQ ID NO: 172031 - protein, 114 aa, Oryza sativa
  unsure (1)..(114): unsure at all Xaa locations
  Clone ID: PAT_MRT4530_70205C.1.pep
LWEVTFFNVSFNSLAGPLPPEVPGMQKVEXLDVAHNHLLGTVLEAXCGLPLLRNFTSPCFRRSPASSPPSPAWSWRRAIDLAAYDVVFLAAAAGKVEGAVRGAPGMGNHMAAGR

SEQ ID NO: 172032 - protein, 51 aa, Oryza sativa
  Clone ID: PAT_MRT4530_70206C.1.pep
CWCSFETHIVWVYLQLYRLHTPVPAYTRATLILGLVPVSLLCGGGLSSSDL

SEQ ID NO: 172033 - protein, 87 aa, Oryza sativa
  unsure (1)..(87): unsure at all Xaa locations
  Clone ID: PAT_MRT4530_70207C.1.pep
PEXLXXXAPXXXPYXWGXRXXXXXXXXXKGXXXXXGXXXPPXXWAPQKXXKXAXEGXXXXXXSQGXAKDAKWXXXWXRXHSXXFLXL

SEQ ID NO: 172034 - protein, 331 aa, Oryza sativa
  Clone ID: PAT_MRT4530_70208C.1.pep
MPLSSLFLSPLSRRLYLVLIPLPRRIGPRPQTAAPKMSRPQSRSPLRQTSRVGRCQLWVRLAVPAVEIEDVRVRQIDYGDGKVNGEWAEEAGLDNKGVAIRELDRDDHGVEDTNGAGLLAAPGYGSTTYPDSEDFSVLEGCHQLYTHLKPTVGYEATPEINYPDTTSTQRCTTGPTRNGQGSSATHHTGVVRKSFKHITCPFLIPPQPPTTPGFPTILPRACVMWLRRVHHAGGTPCPNKLAQMRPSKGLPTLTTLQRGINDHSAISTKTSWSQIRRVIVVAEPAQAVAASGSEFVTPCMQRCDTGWLDLLHACREHHMQEKHTLRTLSYC

SEQ ID NO: 172035 - protein, 50 aa, Oryza sativa
  Clone ID: PAT_MRT4530_70209C.1.pep
MKLSPSILDETAMIWGGKGYNDLLMQAGPLGNAQAELFLRKDSRGFTLDK

SEQ ID NO: 172036 - protein, 66 aa, Oryza sativa
  Clone ID: PAT_MRT4530_7020C.1.pep
SWAHSGVSWGEIGYPGHNSQHTHTDAGSIKGTRRGGQKEESSTSHIMAWRSMPVTQIGKNRVVPSW

SEQ ID NO: 172037 - protein, 75 aa, Oryza sativa
  Clone ID: PAT_MRT4530_70210C.1.pep
MRLWIWLSREEAARRVVEATTSTGLGVQSGKFLPATTAASQLHADANAAAAAAHVVHVIVVAAAVVEGEEEARRH

SEQ ID NO: 172038 - protein, 201 aa, Oryza sativa
  Clone ID: PAT_MRT4530_70211C.1.pep
YSIPLASVHRRSGKQVSGTSAFDVLHREKAAIRFLGSASHDCSLFVRDGSPSSLLTCCAPSSTPATASSSSTNSATRCLPPVGHHRNPSPAARRLPSRRIWRRGDRRRRRSPAASPPAGSGGREAAACRPPRCAAACRTSPPAGGEAATTRRRPPPSPPLARCRPPQCAAACRASPPTDLGEGRPPSPPVARRLPFSHRLA

SEQ ID NO: 172039 - protein, 230 aa, Oryza sativa
  Clone ID: PAT_MRT4530_70212C.1.pep
MAEAQNGAAAAPPPADHAIAAAVPAPPPTDPRDQMVIMLQQLGMGNLVCKLRKQVDASDAKPNQSRLQLTYQLARGLVESGDLTDGEKRLIHGGDGDDDDLSKKKKKKSSGLKLDGYDRHGRRYGAMRFGRVGSVDGKNGNGLYRLKSFGRFVAANGLRAGHTVVAWVFRLPPPPPPEEEEDAPARLAVMLLDYPSSDPAMVEAMVVWEDDVLEKFGAASGIVKISNAGN

SEQ ID NO: 172040 - protein, 178 aa, Oryza sativa
  unsure (1)..(178): unsure at all Xaa locations
  Clone ID: PAT_MRT4530_70213C.1.pep
MAGKEEGRIFVGGLSFHTDERKLADAFRRFGKVVDAQIMLERHTQRHRGFFFVTFSDPEAVDSAIKEMHCQELDGRTISVNKAEPKMNTDDTRYESGGGRGEYRGGRGDGPPPGNCFECGRAGHWARDCPNPGGGRSARYSSSSSAXGGRGDRFSGSDRFGDRYMDDRYDGGYREPCD

SEQ ID NO: 172041 - protein, 323 aa, Oryza sativa
  Clone ID: PAT_MRT4530_70214C.1.pep
MAGKEEGRIFVGGLSFHTDERKLADAFRRFGKVVDAQWFGSFCGSFVNQVILIMLERHTQRHRGFGFVTFSDPEAVDSAIKEMHCQELDGRTISVNKAEPKMNTDDTRYESGGGRGEYRGGRGDGPPPGNCFECGRAGHWARDCPNPGGGRSARYSSSKFSAGGRGDRFSGSDRFGDRYMDDRYDGGYREPVDVRDRYGGGRDRYANDRYPSGGDRYVPDRYGGPDRYQPSSYGRERERSYERDGVRGNGGYDRSGPRGGGSYDRDGPRGGISGGYDRDGPRGGGVDRYGGGGPARYDGGSYRDRSGPYDRPSRGGRFDDRFQ

SEQ ID NO: 172042 - protein, 95 aa, Oryza sativa
  Clone ID: PAT_MRT4530_70215C.1.pep
TLLYPATTQGHAYGTRHTAQHRNAHGHKTDTPHARGALAKNPQHIQEHAHTTGCPTTLPRENEPELLRAAALGAAAAKTPPGVPDPLNALHAAGK

SEQ ID NO: 172043 - protein, 112 aa, Oryza sativa
  unsure (1)..(112): unsure at all Xaa locations
  Clone ID: PAT_MRT4530_70216C.1.pep
GXGAGXXDEIPMMIDDPSKLARDPSNXDRXTXTLTXXXTVLFXRXNKRQGLPTXKLGXNASKLSLRSNSDRQYXIHXIILHAAGDNXNXSXCRXTGXPCTGAPLQXLXPXPX

SEQ ID NO: 172044 - protein, 153 aa, Oryza sativa
  Clone ID: PAT_MRT4530_70217C.1.pep
PTRPPTRPPTRPPASRKREGSNNSASSSPDSDSDVHPSNSEGFQCFLQDLAGAAVAHNPCIDDAKDVESLCAESPPRSDHDSAPKDQSLADLYWPDSLGPLDLDIPSATYHADDLLLGDSQNSWNRMMANSLDAFRNLSFFTADKNDSIPSIM

SEQ ID NO: 172045 - protein, 353 aa, Oryza sativa
  Clone ID: PAT_MRT4530_70218C.1.pep
MEVLHTTPLAVYVQGRTCAQGSGLNRSTAAFNREMIDMVLGLMAAEAIGDPIGGSDTSGGWLELSGAGGIQRRPALVNGGGGSSYKDGVRGSSYAHHAGGLHTGVLSKMCKYHPMARSSNYMVAGGWAGTETESNQAPELVVETVLVRLSRGMAQYVESREEVVRIAESLVYGEPIEGLSGRLGVSGEKGSTQVLYTEIRASNEFSSVFENSGPNFIQKIRSLSQSDRIFSQPLERGDGGDAEAVPALEEDTALEVEAEVEGAGAGRRWRRRAGQRRPAVAPPTPSAHPPPARLHGGGGDVFDVYCMYIGIWNEEYWKQEDGGGAWGSVEEDDRQPEIKLNLPSQPNFRDCFT

SEQ ID NO: 172046 - protein, 252 aa, Oryza sativa
  Clone ID: PAT_MRT4530_70219C.1.pep
MLPTPSRSATRRSASTTSGCSTATRERRECGGAGAAAVTLVSPRAAPREWKIKPYSRKYLDGLKPVTVRCVPNPEDAPPCTTRLNVPAMVIELGGLTGNYWHDFTDVLVPLFIGARRFGGEVQLLVVNLLPFWVDKYRRIFSQISRHDIVDLEKDDDRGVVRCYPHVVVGYGSRKEFTIDPSLDDTGGGYTMVNFTEFLRQSYSLPRDRPIKLGTNHGARPRMMILERTHSRKLMNLPESRAALEDPSLRKG

SEQ ID NO: 172047 - protein, 1822 aa, Oryza sativa
  unsure (1)..(1822): unsure at all Xaa locations
  Clone ID: PAT_MRT4530_7021C.1.pep
ICLGKNLPQRLMDQINWHANTPEGEFWTCTGVKQISQASCFQSTRFWHVQWDLXEVSQQFFLMAEKPPPSASPASPGSVKEKMQKLLLTDVNEGNIVPIDPEKFTPEQKKEFEAMLQQARDQFLNSFMQTRKGTLVQKYKIKVVADDPGTSSSKDGDGKQARDGSAQPSDKGATDGSLGNQGDNSQGVHGVQDHGVHGIADVMREQFGLKPKETGSLYRQPYPEWFERVPLPNRFKVPDFSKFSGQDGVSTYEHISRFLAQCGEASAVDALKVMLFRLSLSRLAFTWFSSLPYGSINSWADLEKQFHSYFYSGVHEMKLSDLMAIKQRHDEPVHEYIQRFREMRNKCFSLSLTDAQLADLAFXGMIAPIREKFSSEDFDSLSHLIQKVTLHEHRSVEVRKSSKKVNHVCPYMYGSDDDEDDSEIAAAEWVRSKKVIPCQWVKSSGNEEKYDFDITKADKIFDLLLREKQIQIPAGHTIPSDEELGKKRYCKWHNSGSHSTNDCKVFRQQIQVAIEGCKIRFDDSKKPMKVDGNPFPVNMVHTAGQTADRARARGFQVNSAKIINKYQRKYDKQQEKHHEEYDDGMRLPSIENCPGCNRLRQTRVSVHQRLGPVNQDHGQEDNVIRKNQWCPSSIFTKNQKRRKAKPRQEWHVKNQVPVADNVAADEAKRLAKGKSVVTAPVNMVFTLLAEFGIDQPDVDEVEEESAKLVLSPEQAVFEKPEGTENQHLKPLYINGYVNGXPMSKMMVDGGAAVNLMPFAMFRKLGRYAEDLIKTNMVLKDFGGNPSETKGVLNVELTVGSKTIPTSFFVIDGKGSYSLLLGRDWIHANCCIPSTMHQCLIQWQGDKIEIVPADSQLKMENPSYYFEGVVEGSNVYTKDTVDDLDDKQGQGFMSADDLEEIDIGPSDRPRPTYISKNLSPEFRTKLIELLKEFRDCFAWEYFEMPGLSRSIVEHRLPIKPXMLEHVKAKIKRLYDAGFIRPCRYAEWVSNLNKATPKDEYLMPVVDQLVDAASGNKILSFMDGNAGYNQIFVAEEDIHKTAFRCPGAIGLFEWVVMTFGLKSAGATYQRAMNYIYHDLIGWLVEVYINDVVVKSKEVEDHIADLRKVFERTRKYGLKMNPTKCAFGVSAGQFLGFLVHERGIEVTQRSVNANAIKKIQPPENKTELQEMIGKINFVRRFISNLSGKLEPFTPLLRLKADQQFTWGAEQQKALDNIKEYLNSPPVLIPPQQGIPFRLYLSAGEKSIGSVLIQELDGKERVVFYLSRRLLDAETRYSPVEKLCLCLYFSCTGLRHYLLSNECTVICKADVVKYMLSAPILKGRVGKWIFSLTEFDLRYESPKAIKGQAIADFIVEHRDDSIDSVELVPWTLFFDGSVCTHGCGIGLVILSPRGACFEFAYTIKPYVTNNQAEYEAVLKGLQLLKEVEADAIEIMGDSLLVISQLAGEYECKNDTLMVYNKKXQELMKEFRSVTLKHVSREQNIEANDLAQGASGYKSMIKDVKVEVAAMTADDWRYDVHQYLHNPSXSASRKLRYKALKYTLLDDELYYRTIDGVLLKCLSADQVKVAVGEVHERICGTHQSAHKMKWLLRRAGYFWPTMLEDCFRYYKRCQDCQKFRAIXRAPTLAMNLIIKPWPFRGWGIDMIGMRNPPSSKGHKFILVTTDYFIKWVEAIPLKKVDSRDAIQFVEEHIIYRFGIPQAITTDQGSIFVSDEFVQFADSMGIKLLNSSPYYAQANGQAEASNKSLIKLIKQKISDYPRQWHTRLAEALWSYRMACHGSIQVPPYKLVYGHEAVLPWEVRIGSRRTELLNGKYLNKYYPSVWVNA

SEQ ID NO: 172048 - protein, 83 aa, Oryza sativa
  unsure (1)..(83): unsure at all Xaa locations
  Clone ID: PAT_MRT4530_70220C.1.pep
MADNGPGNKEDLLIWGAGVVDMAESHLDEVKRMVAXQFLEPVVKIQGATLRVGQVADVAQAKDAAGDSAHLDLGVRPMVKDTT

SEQ ID NO: 172049 - protein, 98 aa, Oryza sativa
  Clone ID: PAT_MRT4530_70221C.1.pep
ASKKQIHTHPTQSRKSTTSTKTHASAIIQEPSPMKEYLERGTNLEVNQVEAQEQEEYLSLSLSPSLLPQSRLSLSLSLSLGKDRGQRNGGTTTTSAEA

SEQ ID NO: 172050 - protein, 88 aa, Oryza sativa
  Clone ID: PAT_MRT4530_70222C.1.pep
LLAKDHRAYINLQFQSHLEDTNRAIFQALCFCIHHGILPTTRGTGMLRCQIHTTLRAGGMQGSCAFLKSQLCKFLRQMKDPQITVLIT

SEQ ID NO: 172051 - protein, 83 aa, Oryza sativa
  Clone ID: PAT_MRT4530_70223C.1.pep
CRHAAAFVRRAVAPEPPRRASPPCAAVEPEGVADPSEGQDPQDFEQGKSSLFLEHVDPNCEIVLFTNKIACNDEHPTCDYAMP

SEQ ID NO: 172052 - protein, 505 aa, Oryza sativa
  Clone ID: PAT_MRT4530_70224C.1.pep
MDPAPQAHPILSYVLSRLPTLAKARPAGGGGDFDIEQPPVHTPSPRTPSTAGEFELVERMPGLRHPSVLRAMTRAVADVSAARSALQVLGPRPDHELVDSSRAIVAATDAEAGGSRRVPEGDLEACRAVVRLEETHDAYEALLQEAEGRLEAVYRSAMEGKDLEEPDGRDESAAAAAGDDAAVQEEVIAVLRQAEEGKPVESVRLVDRQLRHLPEAFGRIQGLRVLDVSRNQLEVIPDAIGGLDHLEELRLASNALISLPDSIGLLLNLRILNVGSNRLRSLPDSISKCRSLIELDASYNGLAYLPTNIGYELVNLRKLWVHMNKLRSLPSSICEMRSLYLLDAHFNELCGLPSAIGKLSSLEILNLSSNFSDLKDLPASFGDLLNLRELDLSNNQIHALPDNFGRLDKLEKLNLEQNPLSMPPMEIVNKGVDAVKEYMLQRWLDILLEEERKSIAAAESPQAPTTPSAWLARSVSWVSDVSGSLVGYLSGENKTEKDAYLDQQY

SEQ ID NO: 172053 - protein, 105 aa, Oryza sativa
  Clone ID: PAT_MRT4530_70225C.1.pep
FSHLFAKELAPHNPLAKFFCLKGIVFFFFWQGFALKVLAAVGIIRSPPFWLGVGPLPGAIPNVLVFFEMVFFSVFPQFASPVAPSSGGARGKFEKKNEWSRFCFG

SEQ ID NO: 172054 - protein, 513 aa, Oryza sativa
  Clone ID: PAT_MRT4530_70226C.1.pep
MCHTSGIPCERCSSPSSRASPDSSRASPPSSRAAPPCSRPQSTGSKLFSPISPRAEIAELDPQVGGESCPSAAVRRPAAMDPQGGGGSRLSAAGRGGNKRGGKQLGLKRSSAPAPSPATAQPPLPASSPPEAPSPATVQPPTPSSSPAVAAPSSSPAVPMSTMPPWPPQGAGWGSVPPNFAFLQGNQQGPSSWLYPTEGFVNFLQQNCLPQPQEGENFHLVGQTTNTMSTPPPTPQAAANNTVQIDIHEDAINDASAKKRSLRYWTHDEEERLASAWLNASKDPIHGNEKKGDTFWKEVTDEFNRKGNGKRTREINQLKVHWSRLKSSIGEFNDYWTKVTQMNTSGYDDDMLEKEAQQMYANTFGKPFALVHWWKILRKEPKWCAMIEKDKNKAEVVDIPDEQKRPIGREAAQAERNGKRKKDSMSEGIVILGDNIEKIIKVTQDRKLEREKVTEAQIHISNVNLKAAEQQKEAKMFEVYNSLLTQDTSNMSEEQKARRDKALQKLEEKLFAD

SEQ ID NO: 172055 - protein, 83 aa, Oryza sativa
  Clone ID: PAT_MRT4530_70227C.1.pep
MEDPSLGNLVMTGATLGALWWRPPKLEGLSDSDDDGGSELGDNRSDGAGLDRGRFANDDLGSCGASAPMTMAADYDSGNDGLQ

SEQ ID NO: 172056 - protein, 68 aa, Oryza sativa
  Clone ID: PAT_MRT4530_70228C.1.pep
DIIALEIHYFQGAIAAGNGLQIYNPFKILWHLYASSMPMYTQTPKNELPLDHNQQKEMEKDERIQSSS

SEQ ID NO: 172057 - protein, 71 aa, Oryza sativa
  Clone ID: PAT_MRT4530_70229C.1.pep
MESSRKFFPAIAVLLLLVINTEMAPAQARECETESSKFSGMCMIQANCDHICMGGDDCRGFRRRCMCRTQC

SEQ ID NO: 172058 - protein, 1186 aa, Oryza sativa
  unsure (1)..(1186): unsure at all Xaa locations
  Clone ID: PAT_MRT4530_7022C.1.pep
CTFNVKNQAPVANEATAYEARRLAKGKSVVIASVNMVFTLPAEFGIKQANVDEVEAESAKLILSLXKAIFEKPEGTENWHLKSLYINGYVNGKPMSMMMVDGGATVNLMPYTTFRKPGRNAEDLIKTNMVLKDFGGNPSETKGVLNVELTVGNKTIPTTFFVIDRKGSYSLLLRRDWIHANYCIPSTMHQCLIQWQGDKIEIVPADNQLKMENPSYYFEGVVEGSNVYTKDTVDDLDDKQGQGFMSADDLEEFDIGPGGRPRLTFISKNLSSEFRTKLIELLKEFRDCFAWEYYEMPGLSRSIVEHRLPIKPGVRPHQQPLRRCKADMLEPVKAEIKRLYDVGFIRPCRYAEWVSSINKATPKDEYPMPVADQLVDAASGHKILSFMDGNARYNQIFLAEEDIHKTAFRCPGAIGLFEWVVMTFGLKSAGATYQRAMNYIYHDLIGWLVEVYIDDVVVKSKEIEDHIADLRKVFERTRKYGLKMNPTKCAFGISASXFLGFLVHERGIEVTQRSVNAIKKIQPPENKTELQEMIGKINFVRRFISNLSGRLEPFTPLLRLKADQQFTWGAEQQKALDSIKEYLSSPLVLIPPQKGIPFRLYLSADDKSIGSVLIXELEGKERVVFYLSRRLLDAETRYSPVEKLCLCLYFSCTRLRHYLLSSECNVICKADVVKYMLSAPILKGRVGKWIFSLTEFDLRYESPKAIKGQAIADFIVEHRDDSIGSVEIMPWTLFFDGSVCTDGCGIGLVIISPRGXCFEFAYTIKPYATNNQAEYETVLKGLQLLKEVEADAIEIMGDSLLVISQLAGEYECKNDTLMVYNEKCQELMKAFRLVTLKHVXREQNIEANDLAQGASGYKPMIKDIKVEIVAITADDWRYYVHQYLQNPSQSASWKLRYKVLKYTLLDDELYYRTIDGVLLKCLSADQAKVAIGEAHEGICGTHXSAHKMKWLLRXCRYFWPTMLEDCFRYYKGCQDCQKFGAIQQAPASAINPIIKPWPFRGWGIDMIGMINPPSSKGHKFILVATDYFTKSVEAVPLKKVDFGDAIQFVQEHIIYRFGIPQTITTDQGSIFVSDEFVQFANSMGIKLLNSSPYYAQANGQAEASNKSLIKLIKRKISDYPRQWHTRLAEALWSYRMACHGSIQVPPHKLVYGHEAVLPWEVRIGSRRTELQNDLTNDEYYNLMADE

SEQ ID NO: 172059 - protein, 324 aa, Oryza sativa
  Clone ID: PAT_MRT4530_70230C.1.pep
LPTDEGSDGVVICPPDGNNDDREEAISSNNHDNCQEGEVTCVKDPVIDSETQEDKCVNQDSVKLIDQEKSGPPKSPSKPGISGSDRSKRTVPQPFALSSQRKSHGGNSKAAHPSGNGENSGDKSNSSPASLTKKTAPITPKKIAQPDHMLHHQEEDSCSVTSSTTTSTRAGKTKATVGVAPSFVCADRADKRKEFYTKLEEKHKALEAEKNEAEARKKEEQETALKQLRKSLVIRAKPMPSFYQEGPPPKAELKKVPPTRAKSPKFTRRRSCSDAPPTPEAANTTAASSRSHRHSIANPKDANRVQCSPKNGVAAKTRAVKPVS

SEQ ID NO: 172060 - protein, 61 aa, Oryza sativa
  unsure (1)..(61): unsure at all Xaa locations
  Clone ID: PAT_MRT4530_70231C.1.pep
IQIRLTCLXTILAMHLINFCDDDASHHHVVVVSYSHXTNQMAWAAHQFLPRGCVLSYFARR

SEQ ID NO: 172061 - protein, 206 aa, Oryza sativa
  Clone ID: PAT_MRT4530_70232C.1.pep
MHLRFVPFPAIAVGGASLRFLADNTRAVGGSGRRRCSDVVAFSSSEKGPGPGSGEEREPRAEEALRRLAELDSQLEGLSEPRERPPAPPLPPDPYMDRDMITGRGSKDELPEFSPTYVTFSTLALVILTIFTNVVFNLYIKPSVDGVDQPDRNSEVPLYAVNILGVINAELECAVDNGRVRGEKRSSTELLWCGSGPELYDLLLCR

SEQ ID NO: 172062 - protein, 69 aa, Oryza sativa
  unsure (1)..(69): unsure at all Xaa locations
  Clone ID: PAT_MRT4530_70233C.1.pep
MMLTKPHPSSNLLLPTTTALPNPSPNPSRKTVVVKYGGAAMKSPXLQSSVIRDLVLLSCVGLRPVLVHA

SEQ ID NO: 172063 - protein, 199 aa, Oryza sativa
  unsure (1)..(199): unsure at all Xaa locations
  Clone ID: PAT_MRT4530_70234C.1.pep
MEKMREIISMHIGQAAIQVGIACWELYXASEHGFEPYGAMPRDTTVGVSHDAFNXLFNATGAGXHVPTALFETCTTXDEVRTGRPSALHPVHFMSAKEDAAINFARVHYTAGKEIAHLCLDRARMLADNCTALHGFLXFCAVGGGSGSRLEALVWXRLSAGYGQIPWLGFTIYSLPPGLNSXAVEPYKSXLCTQSLLEH

SEQ ID NO: 172064 - protein, 343 aa, Oryza sativa
  Clone ID: PAT_MRT4530_70235C.1.pep
MLLAKPHLSSSSFLPSTRVSSPAPGPNHAKPIAASPAPRRCLRLAVTSAAAPAASSAEAAAALSRVDVLSEALPFIQRFKGKTVVVKYGGAAMKSPELQASVIRDLVLLSCVGLHPVLVHGGGPEINSWLLRVGVEPQFRNGLRVTDALTMEVVEMVLVGKVNKHLVSLINLAGGTAVGLCGKDARLLTARPSPNAAALGFVGEVSRVDATVLHPIIASGHIPVIATVAADETGQAYNINADTAAGEIAAAVGAEKLLLLTDVSGILADRNDPGSLVKEIDIAGVRQMVADGKVGGGMIPKVECCVRALAQGVHTASIIDGRVPHSLLLEILTDEGTGTMITG

SEQ ID NO: 172065 - protein, 346 aa, Oryza sativa
  Clone ID: PAT_MRT4530_70236C.1.pep
MMLTKPHPSSNLLLPTTTALPNPSPNPSRVTPLASGRGRRGHHRVCASSVAPAQPASVAQPTAPALSRVDVLSEALPFIQRFRGKTVVVKYGGAAMKSPELQSSVIRDLVLLSCVGLRPVLVHGGGPEINSWLGRVGVEPQFRNGLRVTDALTMEVVEMVLVGKVNKQLVSLISVAGATAVGLCGKDARLLTARPSPDAAALGFVGEVTRVNPSVLHPIIESGHIPVIATVAADETGQAYNINADTAAGEIAAALGAEKLLLLTDVSGILADRNDPGSLVKEIDIAGVRQMVADGKVGGGMIPKVECCVRALAQGVHTASIIDGRVPHSLLLEILTDEGTGTMITG

SEQ ID NO: 172066 - protein, 219 aa, Oryza sativa
  Clone ID: PAT_MRT4530_70237C.1.pep
MQTAAATTWATDRVPVKQNEQICESSSCEREKYTEQEKVKEKKKTCCVEVQRLSKPNSLPKPIWAQHDAACDWAQWPARAHIRVRTLGNRETVKRTRQRGDNAHQNQTNTDGSKVAEYNAISYTQQMRLRTAVELLKATKDIVSQLEKICSPLLILHGAADFDLVTDPHVSEFLYEKASTKDKTLKLYEDGYHSILEGEPDDRISTAINDIISWLDSHC

SEQ ID NO: 172067 - protein, 79 aa, Oryza sativa
  unsure (1)..(79): unsure at all Xaa locations
  Clone ID: PAT_MRT4530_70238C.1.pep
XSRQTYRSIHDISIEATTMRTDKVDNRQMTQQTTKKDTYMSQXNKAKSTTVASSTTATSAQPMQRVRKGNSISISRQPP

SEQ ID NO: 172068 - protein, 44 aa, Oryza sativa
  Clone ID: PAT_MRT4530_70239C.1.pep
FFFFFSFFFFLAKRQCIQIIRFYWLTLPFHYRLHMSACILYTNT

SEQ ID NO: 172069 - protein, 1362 aa, Oryza sativa
  unsure (1)..(1362): unsure at all Xaa locations
  Clone ID: PAT_MRT4530_7023C.1.pep
MRNKCFSLSLTDAQLADLAFHGLRKLGRALRELIMFVRTCMDDEDDPEIAAAEWVRSKKVVPCQWVKCSGKEEKYNFDITKADKIFDLLLREKQIQLPAGHTIPSAEELGKKRYCKWHNSRSHSTNDCKVFRQQIQVAIEGGKIRFDDSKKPMKVDGNPFPVNMVHTASQTTDRARARGFQRKYDKQQEKHYEEYDDGFDPHWGCEFFRFCWNEEDSVVRKNQWCPSAEFGIDQADVDEVEEESAKLVLSPEQAVFEKPEGTENRHLKPLYIXNGYVNGKPMSKMMVDGGVAVNLMPYAMFRKLGRNAEDLIKTNMVFKDFGGNPSETKGILNVELTVGSKTIPNMFFAIDGKGSYSLLLGRDWIHANCCIPSTMHQCLIQWQGDKIEIVPADSQLKMENPSHYFEGIVEGSSVYTKDTVDDLDDKQGQGQHLLIELLKEFRDCFAWEYYEMPRLSRSIVEHRLPIKLGVRPXPARRCKADMLEPVNAEIKRLYDAGFIRPCRYAEWVSSIVPVIKKNGKVRVCIDFRDLNKATPKDEYSMLVADQLVDAASGNTILSFMDGNAGYNQIFMAEEDIHKTAFRCPGAIGLFEWVVMTFGLKSAGATYQRAMNYIYHDLISWLVEVYIDDAVVKSKEIDDHIADLRKVFERTRKYGLKMYPTKCAFGVSAGQSLGFLVHERXVEVTQRSVNAIKKIQPLENKTELQEMIGKINFVRRFISNLSGRLRHYLLSNECTVICKADVVKYMLSAPILKRRVGKWIFSLTEFDLRYESPKAIKGQAIADFIVKHRDDSIGSVEILPWTLFFDGSVCTHGCGIGFVITSPRGXCFEFAYTIKPYATNNQAEYEAVLKGLQLLKEVEADTIEIMGDSLLVISQLAGEYECKNDTLMVYNEKCQELMKEFWLVTLKHVSREQNIEANDLAQGASGYKPMIKDVKVEIAAMTTDDWRYDVHRYLSNPSQSVSRKLRYKALKYTLLDDELYYRTIDGVLLKCLSADQAKVAIGEVHEGICGTHQSAHKMKWLLRRAGYFWPTMLQDCFKYYKGCQDCXKFGAIQRAPASAMNPIIKPWPFRGWGVDMIGMINPPSSKGHKFILVATDYFTKWVEGIPLKKVDSGDAIQFVQEYIIYRFGIPQTITTDQGSIFVSDEFVQFADSMGIKLLNSSPYYAQANGQAVASNKSLIKLIKRKISDYPRQWHTRLAEALWSYRMACHGSIQVPPYKLVYGHEAVLPWEVRIGSRRTELQNDLTADEYYNLMADEREDLVQSRLRALAKVTKDKERVARHYNKKVVPKDFSEGELVWKLILPIGTRDSKFGKWSPNWEGPFQIYKVVSKGAYMLQGLDGEVYGRALNGKYLKKYYPSVSVNA

SEQ ID NO: 172070 - protein, 194 aa, Oryza sativa
  unsure (1)..(194): unsure at all Xaa locations
  Clone ID: PAT_MRT4530_70240C.1.pep
TLFPGRSLSRTPSRVLLHLRSLDYQIRSXRLPPISPCRRHPWTTVPNPAHVATTIIADLHRCPRELTAGVQVRSIINPSLLYRHYAGTNPICCRHLRAGVVVVVVPRFAAWVATGVDAGAWPKAAAPRHPSHPGRDTPFRSLSPRALDLRLLPFPSPSAPLIVELLLLLLLLAAFLLDFLLREGEGMRRRVGLH

SEQ ID NO: 172071 - protein, 67 aa, Oryza sativa
  unsure (1)..(67): unsure at all Xaa locations
  Clone ID: PAT_MRT4530_70241C.1.pep
QRHAPHHGGGGQGGGWTPSRTTKXARXRPXNKNKPAKMRRSWTGGTPTSPGAWPRRXRWRQKXPXQG

SEQ ID NO: 172072 - protein, 205 aa, Oryza sativa
  unsure (1)..(205): unsure at all Xaa locations
  Clone ID: PAT_MRT4530_70242C.1.pep
MSSTSPSRPRLPCPLPPLSRSPALPRRPGFDFRIPPLSPLPLPHFGRRFPPLPATLAAASRRRRRRVRVAKVHPVRPSSVEVVPDPVRRLSTSLCRSSSPVVAAPSGEDSLPFPFLPRAPPPPALAAAFGCRRRRGAVRCRRSRRRLPSPVVAXPPPRPPWPAGRLCAEPSQARPPPHCPIGPGPIRAVDPVDRRWTTRVVPVHG

SEQ ID NO: 172073 - protein, 57 aa, Oryza sativa
  Clone ID: PAT_MRT4530_70243C.1.pep
FDFELPPLLYSGGFKLQTVWLKRHAPKEDVIRHDHPLSTLAADHAGTGRERHAWDWG

SEQ ID NO: 172074 - protein, 542 aa, Oryza sativa
  Clone ID: PAT_MRT4530_70244C.1.pep
MGFMPSYNVWTSHRELGVQMDEDEAEDENIPDWAQYGGFEGNTAGEVDGAVEDSDAVDDLGQMLQDVKEDCEIEKEAKCGLSDKAFGDLLKLVKNILPEENKLPEATYEAKKIVCPLGLEVQKIHACPNDCILYRCEEYENLEACPVCQALRYKIRRDDPGEVDGQPLKKRVPAKRDDLHLEPKENGSQYLSPASYTLSKAEMERMFECLESIKLLPVIIQGILPDNVQATITNLCAFMNAISYKVIDPDRLEDLQNDVVQSSIAKGYGTEKVIEFCMEFIEDLHPIGVAESRYEGRLRGKGTLERKAIMTIDINLFHKAHFTVLQQSSLVAPYIEEHMVIVRSENIGKSDAWITRHHIDTFPAWLQRHLMGNETINQQLAFLVRGPSISITTWQGYEINEYTFYTRALDSKGMNQNSAVRINAMIHDGTTRTYYGAINDIWELDYGALKIPLFRCQWVRSTGGGVSIDDSGMTTVDLSKVGYSDEPFVLVNEVTQVFYVKDMASKAKKGKGPDEPKLHVVLPDVLKIQLILYGHMSIIYDN

SEQ ID NO: 172075 - protein, 1736 aa, Oryza sativa
  unsure (1)..(1736): unsure at all Xaa locations
  Clone ID: PAT_MRT4530_70245C.1.pep
MAERAVAHSLSPNASGVDGEQNPRRRARTPPSPSRRNLXAGEALREVGGHATSPLAVDGGGRRDGARRRLVYGDXQRLGAGGRSSATEASGAAAAGSKSSRRRARRAAAVTRHSSAIPSSMPPTQEDVRGGPDARLDIERQRDARHAARATEGASSSGAPLRSGHXVRPPVSPVGGAGCRAFVASLRNVRWPPRFRPTITEKYDGSVNPAKFLQIYTTGIEAAGGDDRVMANFFPASVHSWENLCQXQFTTNFQGTYPRPGEEADLHAVQRRDDESLRSYIQRFCQVRNTIPCIPAHAVIYAFRGGVRHNRMLEKIASKEPQTTAQLFELADRVARKEEAWTWNSSGSGVAASAAPGSAARSGRRDRRRKKGSARFDDEGHVLAVEGASRAPRKGRPASDKKKEAGAPSRERPTGKWCTVHNTSLHDLADCRAVKSLAERTRKWEEEKRQERREGKTLAAPAGNRRGEAKQKAIAEDIDDGDDDLGFQEPEATVATLGRVLIDGGAALNILSPAAFDAIKVPGMVLRPSQPIIGVTPGHTWPLGHIDLPVTFGGSANFRTERVDFDVADLSLPYNAVLGRPALVKFMAAVHYAYLQMKMPGPSGPITVHGDLKVALACMEQRADHLAAASKPAGGDERLSTSVPAAPRRRMVTCDEVPVKEEDALVSFLRANADVFAWRPADMPGVPREVIEHRLAVQPGARPVRQKVRRQAPERQAFIREEVARLLEAGFIREANGKLRMCIDYTDLNKACPKDPYPLPRIDQIVDSTAGCDLLCFLDAYSGYHQIRMAREDEEKTAFITPIGTYCYTTMPFGLKNAGPTFQRTTRISLGSQIGRNVEAYVDDLVVKTRNQETLLSDLAETFKSLRSARIKLNPDKCLFGVPASKLLGFLVSARGIEANPEKIRAIERMRPPSKLRDVQCVTGCMAALSRFISRLGEKALPLFKLLKRSGPFTWTEEAERTFTQLKAYLSSPPVLVAPEPDEPLLFYLAATPXGAPDPQDGPGATAGRPRLSPSDPEXSAQKPSAGPRGLSDEERPGDAAPGEEDRPRRKVQRPIYFVSEALRDAKTRYPQAQKMLYAILMASRKLRHYFQAHRVTVVTSYPLGQILHNREGTGRVVRWAIELSEFDLRFEPRHTIKSQALADFVAEWTPAPEPVSAPEASSGPPQLPHTAYWGAGAGVTLTSPSGDVLRYLVRLDFRATNNMVEYEGLLAGLRVAAGLGIHRLLVLGDSQLVVNQVRCMERHFDGIELRHVPRRDNAVADELSRLASSRAQTPLGAFEERLAQPSARPDPLGETDAPERPLRPVGVQASGPEGSAPSSPRLIAWITEIQAYLVDKTLPEDREGSERVRCISKRYVLVEGTLYRRAANGVLLKCIPREQGVELLADIHEGECGAHSASRTLVGKAFRQGFYWPTALNDAVDLVRRCRACQFHARQTHQPAQALQTIPLSWPFAVWGLDILGPFRRAPGGFEYLYVAVDKFTKWPEAYPVIKIDKHSALKFIRGITARFGVPNGIITDNGTQFTSELFGDYCEDMGIKLCFASPAHPRSNGQVERANAEILKGLKTKTFNILKKHGDSWIEELPAVLWANRTTPSRATGETPFFLVYGAEAVLPSELTLRSPWVTMYCEADQDQLRRDDLDYLEERRRRAALRAARYQQCLRRYHQRHVRARSLCVDDLVLRRVQTRAGLSKLSPMWEGPYRVIGVPRPGSVRLATGDGAELPNPWNIEHLRRFYP

SEQ ID NO: 172076 - protein, 156 aa, Oryza sativa
  unsure (1)..(156): unsure at all Xaa locations
  Clone ID: PAT_MRT4530_70246C.1.pep
MVADKVVKVFGMWMSLMAIRVXEWMLRLQGCHYQYFLEYLANTXEALLRHNPVTKKVPELVHDGKALAESTDILEDIDEGXNHGYPIMASDPFDRAHDRFCSRFAGEKCHAALYPIFMTTGDEQRKLLHQDHECLNTLDTFLDEKKFFGGDAFLYL

SEQ ID NO: 172077 - protein, 1785 aa, Oryza sativa
  Clone ID: PAT_MRT4530_70247C.1.pep
MAERAVAHNLSPSASGDDREQNPRRRARTPPSPFRRSLGRKEALEGIERSATSSPTGDGEGRRDGERRLLVYGDGSTPQGALQAAGALLRHPPVVPDPETPARRWLDDVANLVMTAQQRLGAGGQSFAPKASGAATTGSVSSMRRARRAAAVTRRSSVIPSSTPPTQEDGHGEFLPMVLKGQARGWLMNLPPASVHSWEDLCQQFTMNFQGTYPRPGEEADLHAVQRGDDESLRSYIQRFCQVRNTIPCIPAHAVIYAFRGGVRHNRMLEKIASKEPQTTAELFQLADRVARKEEAWTWNSSGSSVAAPAAPGSAARSGRRDRRRKKRSALSDDEGHVLAAEGASRATRKGRPASNRKKEAGAPSRERPTGKWCSVHNTSLHDLADCRAVKSLAERTRKWEEERRQERRDGKAPAAPAGNQRGEAKQKAPAEDVDDGDDNLGFQEPQATVATVDGGACAHASRRSLKAMKRELLAAAPTHEATRRARWSEVALTFDMTDHPPCVARGGQIAMVVSPTICNVKLGRVLIDGGAALNILSPAAFDAIKAPGMVVRPSQPIIGVTPGHTWPLGHIDLPVTFGGSANFRTERVNFDVADLSLPYNAVLGRPALVKFMAAVHYAYLQMKMPGPGGPITVHGDLQVALACMEQRADQLAAASKPECGDERLSAFVPAAPRQRMIMCDEVPEDALVSFLRANADVFAWRPADMPGVPREVIEHRLAVRPGARPVRQKVRRQAPERQAFIREEVARLLEAGFIREVIHPEWLANPVVVPKANGKLRMCIDYTDLNKACPKDPYPLPRPTFQRTTRISLGSQLGRNVEAYVDDLVVKTRNQETLLSDLAETFESLRSARIKLNPDKCVFGVPAGKLLGFLVTARGIEANPEKIRAIERMRPPSKLRDVQCVTGCMAALSRFISRPGEKALPLFKLLKRSGPFTWTEEAERALTQLKAYLSSPPVLVAPKPDEPLLLYLAATPQVVRAALVVERDEDNPRSAHPHSVSTRPGRDQGGEAPEPNGGPRPPTAGAGPLPACPTVPGPPDSQDGPGATAGRPRLSPSDPEVDDTEAECAPRGLSDEKRPGDAALGEEDRPRRKVQRPVYFVSEALRDAKTRYPQAQKMLYAILMASRKLRHYFQAHRVTVVTSYPLGQILHNREGTGRVVKWAIELSEFDLHFEPRHAIKSQALADFVAEWTPAPEPVSIPEASSGPSQPPHTVYWVMQFDGSLSLQGAGAGVTLTSPSGDVLRYLVRLDFRATNNMAEYEGFLAGLRVAAGLGIRRLLVLGDSQLVVNQVCKEYRCSDPQMDAYVRQVRRMERHFDGKELRHVPRRDNAVADELSRLASSRAQTPPGAFEERLAQPSARPDPLGEMDAPERPPRPVGVQASGPEESAPSSLRLIAWIAEIQAYLTDKTLPEDREGSERVQRISKHYVLVEGTLYRRAANGVLLKCIPREQGVELLADIHEGECGAHSASRTLVGKAFRLGFYWPTALNDAVDLVWRCRACQFHARQTHQPAQALQIIPLSWPFAVWGLDILGPFRRAPGGFEYLYVAIDKFTKWPEAYPVVKIDKHSALKFIRGITARFGVPNRIITDNGTQFTSELFGDYCEDMGIKLCFASPAHPRSNGQVERANAEILKGLKTKTFNILKKHGDSWIEELPAVLWANRTTPSRATGETPFFLVYDAEAVLPSELTLGSPRATMYCEADQDQLRRDDLDYLEERRRRAALRAARYQQSLRRYHQRHVRARSLCVDDLVLRRVQTRAGLSKLSPMWEAFFDFLRTVSVPLFPFAES

SEQ ID NO: 172078 - protein, 134 aa, Oryza sativa
  unsure (1)..(134): unsure at all Xaa locations
  Clone ID: PAT_MRT4530_70248C.1.pep
PPNHXQGXWNGTGCRXXYRXQKVCXKMEGFEGDQEGXLNRSLPXDLXXXXYGERNEKKLTXLXYTAXIDNFSWGVXNRXCXIXVGIHXEAKGXGYXEDXRPAXXLDXXXLTXLLVXTXXXWXXPSKFFCQVKVW

SEQ ID NO: 172079 - protein, 414 aa, Oryza sativa
  unsure (1)..(414): unsure at all Xaa locations
  Clone ID: PAT_MRT4530_70249C.1.pep
MMQLDVVRAKVVEISGRGAGEVRVVACPYRICPLGAHIDHQGGTVTAMTINYGVLLGFVASDDAEISLQSGQFEGVIRFRVDDLQKPIENPENINWESYARGAVYALQNFGYDLKKGIIGYISGVKGLDSSGLSSSAAVGIAYLMALENVNXLVVSPVDNIQLDKSIENKYLGLENGILDPSAILLSRYGYLTFMDCKTATHSYVYFSVLSKSQQCQGELPFKILLAFSGLQHNLPKKSGYNTRVFECKEAARALLCASGCEDASSILRNVNPAIYEAQKCILEENLARRAEHYFSEMKRVVKGRDAWARGDLREFGQLISASGRSSILNYECGSKEMIQLYEILLKAPGVLGARFSGAGFRGCCLAVVESGHAEAAAAFVRAEYEKAQPELVSKIPPGRRVLVCEPGDGARVI

SEQ ID NO: 172080 - protein, 130 aa, Oryza sativa
  unsure (1)..(130): unsure at all Xaa locations
  Clone ID: PAT_MRT4530_7024C.1.pep
MAEERETFESXWAPSDVTEENVKEMVAHGVLPAKESSDXRLACGEAFLTPDTHEVVVFSHFFYSGFSLPTSRFFRGILEFYGISLHHLNPNSIVHIXNFIHACEAFLGIXTPENSLWIRIFYLKIEPPRP

SEQ ID NO: 172081 - protein, 2002 aa, Oryza sativa
  unsure (1)..(2002): unsure at all Xaa locations
  Clone ID: PAT_MRT4530_70250C.1.pep
MAERAVAHNPSPSASGDDGEQNPRRRARTPPSPSRRGLGREEALEGVERSATSPLAGDGEGRRDGERRLLVYGDGSTPQGALQAAGALLRHPPVVPNPETPARRWLDDVANLVMTAQQRLGVGGRSSANKASGAATAGSVSSRRRVRRAAAVARRSFAIPSTTPPTQEDVRGRPDARLNIERRRNGCRAAHATEGASSSRAPLRSGHGGQSPVSPVGGAGCRAFVASLRNVRWPPRFRPTITEKYDGSVNPAEFLQIYTTGIEAAGGDDRVMANFFPMALKGQARGWLMNLPPASVHSWEDLCQQFTMNFQGTYPRPGEEADLHAVQRRDDESLRSYIQRFCQVRNTIPCIPAHAVIYAFRGGVRHNRMLEKIASKEPQTTAEVFQLADRVARKEEAWTWNSPGSGVAASAAPGSAARPGRRDRRRKKRSAYSDDEGHVLSVEGASRATRKGKPASDKKKEARAPSRERPSGKWCSVHNTSLHDLADCRAVKSLAERTRKWEEERRQERREGKAPAAPAGNRRGEAKQKATAEDVDDGDDDLGFQEPGATVATVDGGACAHVSRRSLKAMKRELLATAPTHEATQRARWSEVALTFDQTDHPPCVARGGQIAMVVSPTVCNVKLGHVLIDGGAALNILSPAAFDAIKAPGMVLRPSQPIIGVTPGHTWPLGHIDLPVTFGGSANFRTERVNFDVADLSLPYNAVLGRPALVKFMAAVHYAYLQMKMPGPGGPITVHGDLKVALACMEQRADHLAATSKPAGGDERLSTSVPATPRQRMVTCDEVPVKEEDALVSFLRANADVFAWRPADMPGVPREVIEHRLAVRPGARPVRQKVRRQAPERQAFIREEVARLLEAGFIREVIHPEWLANPVVVPKANGKLRMCIDYTDLNKACPKDPYPLPRIDQIVDSTAGCDLLCFLDAYSGYHQIRMAREDEEKTAFITPIGTYCYTTMPFGLKNAGPTFQRTTRISLGSQLGRNVEAYVDDLVVKTHNQETLLSDLAETFESLRSARIKLNPDKCVFGVPAGKLLGFLVSARGIEANPEKIRAIERMRPPSKLRDVQCVTGCMAALSRFISRLGEKALPLFKLLKCSGPFTWTEEAEQAFTQLKAYLSSPPVLVAPEPDEPLLLYLAATPQVVSAALVVERDEDNPHSAHPHPVSTQPGSEQGGEAPEPNGGPRPPTAGAGPPPTCPTVPGAPDPQEGPGATAGRPHLSSSDPEVNPVSTRPGREQGGEAPESDGGPRPPMAPEPNGGPRPPTAGAGPPPACPTAPGAPDPQDGPGATEGRLRLSPSDPEVIGTEAECXGLSDEERPVDAAPSEEDRPXERKLRHYFQAHRVTVVTSYPLGQILHNREGTGRVVKWTRGYLHFEPRHAIKSQALADFVAEWTPAPEPVSVPEASSGPEQLPHTAYWVMQFDGSLSLQGAGAGVTLTSPSGDVLRYLVRLDFRATNNMAEYEGLLAGLRVAAGLGIRRLMVLGDSQLVVNQVCKEYRCSDPQMDAYVRQVRRMERHFDGIELRHVPRRDNAVADELSRLASSRAQTLPGAFEERLAQPSARPDPLGETDAPERPPRPVGVQASGPEGSAPSSPRSIAWIAEIQVYLTDKTLPENREGSERIQRISKRYVLVEGTLYRRAANGVLLKCIPREQGVELLADIHEGECGAHSASRTLVGKAFLQGFYWPTALNDAVDLVRRCRACQFHAKQTHQPAQALQTIPLSWPFAVWGLDILGPFRRAPGGFEYLYVAVDKFTKWPEAYPVIKIDKHSALKFIRGITARFGVPNRIITDNGTQFTSELFGDYCEDMGIKLCFASPAHPRSNGQVERANAEILKGLKTKTFNILKKHGDSWIEELPAVLWANRTTPSRATGETPFFLVYGAEAVLPSELTLRSPRATMYCEADQDQLRRDDLDYLEERRRRAALRATRYQQSLRRYHQRHVRARSLCVDDLVLRHVQTRAGLSKLSPMWEGPYRVIGVPRPGSIRLATGDGTELPNPWNIEHLRRFYP

SEQ ID NO: 172082 - protein, 1624 aa, Oryza sativa
  unsure (1)..(1624): unsure at all Xaa locations
  Clone ID: PAT_MRT4530_70251C.1.pep
MNFQGTYPRPGEEADLHAVQRRDDESLRSYIQRFCQVRNTIPCIPAHAVIYAFRGGVRHNRMLEKIASKEPQTTAELFQLADRVARKEEAWTWNSSGSGVAASAAPGSAARSGRRDRRRKKRSAHSDDEGHVLAVEGVSRATRKGRPASDKKKEAGAPSRERPTGKWCSVHNTSLHDLADCRAVKSLAEWTRKWEEERRQERREGKAPAAPAGNRRSEAKQKAPAEDIDDGHDGLGFQEPEVTIATVDGGACAHVSRRSLKAMKRELLAAAPTHEATRRARWSEVALTFDQTDHPPCVAQGGQIAMVVSPTVCNVKLGRVLIDGGAALNILSPAAFDAIKAPGMVLRPSQPIIGVTPGHTWPLGHIDLPVTFGGSANFRTERVNFDVANLSLPYNAVLGRPALVKFMAAVHYAYLQMKMPGPGGPISVHGDLKVALACMEQRADHLAAASKPEGGDGRLSTSVPAAPRQRMVTCDEVPVKEEDALVSFLRANADIFAWRSADMPGVPREVIEHRLAVRPGARPVRQKVRRQAPERQAFIREEVARLLEVGFIREVIHPEWLANPVVVPKANGKLRMCIDYTDLNKACPKDPYPLPRIDQIVDSTAGCDLLCFLDAYSGYHQIRMAREDEEKTAFITPIGTYCYTTMPFGLKNAGPTFQRTTRISLGSQIGRNVEAYVDDLVVKTRNQETLLSDLAETFESLRSARIKLNPDKCVFGVSAGKLLGFLVSARGIEANPEKIRVIERMRPPSKLRDVQCVTGCMAALSRFISRLGEKALPLFKLLKLSGPFTWTEEAERALTQLKAYLSSPLVLVAPEPDEPLLLYLAATPQVVSAALVVERDEDNPRSARPHPVSTRPGREQGGEAPELNGGPRPPTAGAGPPPACLTVPGAPDPQDGPGATEGRPRLSPSDPEVTGTEAECASRGLSDEEHPRDAAPGEEDRPRRKVQRPVYFITEALRDAKTRYPQAQKMLYAILMASRKLRHYFQAHRVTVVTSYPLGQILHNREGTGRVVRWAIELSEFDLRFEPRHAIKSQALADFVAEWTPAPELVSAPEASSGPSQLPHTAYWVMQFDGSLSLQGAGVGVTLTSPSGDVLRYLVRLDFRATNNMAEYEGLLAGLRVAAGLGIRHLLVLGDSQLVVNQVSKEYQCSDPQMDAYVRQVQRMERHFDGIELQHVPRRDNAVADELSRLASSRAQTPPGAFEERLAQPSARPDPLGETDAPERPPRPVGVQASGPEGSVPGSPRLIAWITEIQAYLADKTLPEDREGSERVRRISKRYVLVEGTLYRRAANGVLLKCIPREQGVELLADVHEGECGAHSASRTLVGXAFRQGFYWPTALNDAVDLVRXGPFRRAPGGFEYLYVAVDKFTKWPEAYPVIKIDKHSALKFIRGITARFGVPNRIITDNGTQFTSELFGDYCEDMGIKLCFASPAHPRSNGQVERANAEILKGLKTKTFNILKKHDDSWIEELPAVLWANRTTPSQATGETPFFLVYGAEAVLPSELTLRSPRVTMYCEADQDQLRRDDLDYLEERRRRAALRATRYQQSLRRYHQRHVRARSLCVDDPVLRRVQTRAGLSKLSPMWEGPYRVIGVPRPGSVRLATGDGTELPNPWNIEHLRRFYP

SEQ ID NO: 172083 - protein, 1206 aa, Oryza sativa
  unsure (1)..(1206): unsure at all Xaa locations
  Clone ID: PAT_MRT4530_70252C.1.pep
MKRELLAAAPTHEAMRRARWSEVPLTFDQTDHPPCVARGGQIAMVVSPTVCNVKLGRVLIDGGAALNILSPAAFDAIKAPGMVLRPSQPIIGVTPGHTWPLGHIDLPVTFGGSANFRTERVDFDVADLSLPYNAVLGRPALVKFMAAVHYAYLQMKMPGPGGPITVHGDLKVALACMEQRADHLAAASKPAGGDERLSTSVPAAPRQRMVTCDEVPVKEEDALVSFLRANADVFAWRPADMPGVPREVIEHRLAMRPGARPVRQKVRRQAPERQAFIREEVARLLEAGFIREVIHPEWLANPVVVPKANGKLRMCIDYTDLNKACPKDPYPLPRIDQIVDSTAGQIGRNVEAYVDDLVVKTRNQETLLSDLAETFESLRSARIKLNPDKCVFGVPAGKLLGFLVSARGIEANPEKIRAIERMRPPXKLRDVQCITGCMAALSRFISRLGEKALPLFKLLKRSGPFTWTEEAERAFTQLKAYLSSPLVLVAPEPDEPLLLYLAATPQVVSAALVVERDEDNPHSAHPHPVSTRPGREQGGEAPKPNGGPRPPTAGAGPPPACPTVPGAPDPQDGPGATAGRPRLSPSDPEVISTEAECAPRGLSDEERPGDAAPSEEDRPRRKVQRPVYFVSEALRDAKTRYPQAQKMLYAILMASRKLRHYFQAHRVTVVTTYPLGQILHNREAPEPVSAPEATSGPSQLPHTAYWVMQFDGSLSLQGVGAGVTLTSPSGDVLRYLVRLDFRATNNMAEYEGLLAGLRVAAELGIRRLLVLGDSQLVINQVCKEYQCSDPQMDAYVRQVRRTERHFDGIELRHVPRRDNAVADELSRLASSRAQTPPSAFEERLAQPSARPDPLGETDAPEWPPRPVGVQASGPEGSAPSSPRLIAWITEIQAYLADKTLPEDREGSERVRRISKRYVLVEGTLYRRAANGVLLKRAPGGFEYLYVAVDKFTKWPEAYPVIKIDKHSALKFMRGITARFGVPNRIITDNGTQFTSELFGDYCEDMGIKLCFASPAHPRSNGQVERANAAILKSLKTKTFNILKKHGDSWIEELPAVLWANRTTPSRATGETPFFLVYGAEAVLPSEHTLRSPRVTMYCEADQDQLRRDDLDYLEERRRRAALRAARYQQSLRRYHQRHVRARSLCVDDLVLCRVQTRAGLSKLSPMWEGPYRVIGVPRPGSVRLATGDGTELPNPWNIEHLRHFYP

SEQ ID NO: 172084 - protein, 96 aa, Oryza sativa
  Clone ID: PAT_MRT4530_70253C.1.pep
VVLAFNIGFRLSPKEMVAIDHRALSFLVMLEDVKCTKEETSSLAMVRGVERLNGCHRYSLGVGAVVVARYHQTPAVANEGQKPWRHSSQRGPLKKF

SEQ ID NO: 172085 - protein, 1640 aa, Oryza sativa
  Clone ID: PAT_MRT4530_70254C.1.pep
MTAQQRLGAGGRSSATKTSGAATTGSVSSRRRVRRAAAVARHSSATPSSTPPTQEDLRGGPDARISIERRRNGRRAAHATEGASSSGAPHRSGHGDQPPVSPVGGAGCRAFVASLRNARWPPRFRPTITEKYDRSVNPAEFLQIYTTGIEAAGGDDRVMANFFPMALKGQARRFCQVRNTIPCIPAHAVIYAFRGDVRHNRMLEKIASKEPQTTAQLFELADRVARKEEAWTWNSSGSGVAAPAAPGSAARSGRRDRRRKKGSARSDDEGHVLAVEGASWAPRKGRPASDKKKEAGTPSRERPTGKWCTVHNTSLHDLADCRAVKSLAERTRKWEEEKRQERREGKSPAAPAGNRRSEAKQKATAEGIDDGDDDLGFQEPEATVATVDGGACAHASRRSLKAMKRELLAAAPTHEATRRARWSEVALTFDQTDHPPCVARGGQIAMVVSPTVCNVKLGRVLIDGGAALNILSPAAFDAIKAPGMPLGHIDLPVTFGGSANFRTERVDFDVADLSLPYNAVLGRPALVKFMAAVHYAYLQMKMPGPGGPITVHGDLKVALACMEQRADHLAAASKPAGGDERPSTSVPAAPRRRMVTCDEVPANAAVFAWRPADMPGVPREVIEHRLAVRPGARPVRQKVRRQAPEHQAFIREGVARLLEAGFIREVIHPEWLANPIVVPKANGKFRMCIDYTDLNKACPKDPYPLPRIDQIVDSTAGQIGCNVEAYVDDLVVKTRNQETLLSDLAETFESLRSARIKLNPDKCVFGVPAGKLLGFLVSARGIECVTGFMAALSRFISRLGEKALPLFKLLKRSGPFTWTEEAERALTQLKAYLSSPPVLVAPEPDEPLLLYLAATPQVVSAALVVERDEDNPHSAHPHPVSTRPGREQGGEAPEPNGGPRPPTAGAGPPPACPMVPGAPDPQDGPEATTGRPRLSPSDPKGVGTEAECAPRGLSDEERPGVAAPGEEDRPRRKVQRPVYFVSEALRDAKTRYPQAQKMLYAILMASRKLRHYFQAHRITVVTSYPLGQILHNREGTGRVVRWAIELSEFDLRFEPRHAIKSQALADFVAEWTPAPEPVSAPEATSGPSQLPHTAYWGAGAGVTLTSPSGDVLRYLVRLDFRATNNMAEYEGLLAGLRVTAGLGIRRLLVLGDSQLVVNQSFGTCPDELSRLASSRAQTPPGAFEERLAQPSARPDPQGETDAPERPPRPVGVQASGPEGSAPSSPRLIAWITEIQAYLADKTLPEDREGSERVRRISKRYVLVEGTLYRRAANGVLLKCIPREQGVELLADIHEGKCGAHSASRTLVGKAFRQGFYWPTALNDAVDLVRRCRACQFHARQTHQPAQALQTIPLSWPFAVWGLDILGPFRRAPGGFEYLYVAVDKFTKWPEAYPVIKIDKHSALKFIRGITARFGLPNRIITDNGTQFTSELFGDYCEDMGIKLCFASPAHPRSNGQVERANAEILKGLKTKTFNILKKHGTSWIEELPTVLWANRTTPSRATGETPFFLVYGAEAVLPSELTLRSPRVTMYCEADQDQLRRDDLDHLEERRRRAALRTARYQQSLRRYHQRHVRARSLCVDDLVLRRVQTRAGLSKLAPMWEGPYRVIGVPRPGSVRLATGDGIELPNPWNIEHLRRFYP

SEQ ID NO: 172086 - protein, 107 aa, Oryza sativa
  unsure (1)..(107): unsure at all Xaa locations
  Clone ID: PAT_MRT4530_70255C.1.pep
QRQKTQEKQPGEQASERDQIKASRRRNPKRPDQARRTTRPRKDRRKWRRRPESQRAQGRXRLEQRRTGEPDEQTAKQSREAEGRMRDETRKTEENATEEETNETDEQ

SEQ ID NO: 172087 - protein, 1781 aa, Oryza sativa
  unsure (1)..(1781): unsure at all Xaa locations
  Clone ID: PAT_MRT4530_70256C.1.pep
MAERAVAHNLSPSASGDDGEQNPRRRARTPPSPSRRSLGREEALEEVERSATSPPAGDGEGRRDGERRLLVYGDGSTPQGALXLRARSNLVMTAQQRLGAGGRSSATKASSAATAGSVSSRRRARRAAAVTRRSSAIPSSMPPTQEDVRGGPXHARLNIERRRNGRRAAHATEDASSSGAPLRSGHXGQPPVSPVGGAGCRAFVASLRNVRWPPRFRPTITEKYDGSVNPAEFLQIYTTGIEAAGGDDRVMANFFPMALRGQARGWLMNLPPASVHSWEDLCQQFTMNFQGTYPRPGEEADLHAVQRRDDESLRSYIQRFCQVRNTVPCIPAHAVIYAFRGGVRHNRMLEKIASKEPQTTAELFQLADRVARKEEAWTWNSSGTGVAAPAAPGSAARSGRWDRRRKKRSAHSDDEGHVLAVEGASRATRKGRPASDKKKEAGAPSRERPTGKWCSVHNTSLHDLADCRVVKSLAKRTRKWEEERRQERRVGKAPATPAGNRRGEAKQKATAEDVDDGDDDLGFQEPEATVATVDGGACAHASRRSLKAMKRELLAAAPTHEATRWARWSEVTLTFDQTDHPPCISRGGQIAMPIIGVTPGHTWPLGHIDLPVTFGGSANFRTERVNFDVADLSLPYNAVLGRPALVKFMAAVHYAYLQMKMSGPGGPITVHGDLKVALACMEQRADHLAAASKSAGGDERLSTSVPAAPRQRMITCDEVPEDALVSFLRANADVFAWRPADMPGVPREVIEHRLAVRPGARPVRQKVRRQAPERQAFIREEVARLLEAGFIREVIHPEWLANPVVVPKANGKLQMCIDYTDLNKACPKDPYPLPRIDQIVDSTAGQIGRNVEAYVDDLVVKTRNQETLLSDLAETFESLRSARIKLNPDKCVFGVPAGKLLGFLVSARGIEANPEKIRAIERMRPPSKLRDVQCVTGCMAALSRFISRLGEKALPLFKLLKRSGPFTWTEEAERAFIQLKAYLSSPPVLVAPEPDEPLLLYLAATPQVVSSALVVERDEDNPHSAHPHPVSTRPGREQGGEAPEPNGGPRPPTAGAGPPPACPTVPGAPDPQDGPGATAGRPRLSPSDPEVVGAEAEGAPRGLSDEERPGDAAPGGEDRPRRKVQRPIYFVSEALRDAKTRNPQAQKMLYAILMASRKLRHYFQAHRVTVVTSYPLGQILHNREGTGRVVKWAIELSEFDLHFEPRHAIKSQALADFVAEWTPAPEPVSVPEASSGPSQLPHTAYWVMQFDGSLSLQGAGAGVTLTSPSGDVLRYLVRLDFRATNNMAEYEGLLAGLRVAAGLGIRRLLVCKEYRCSDPQMDAYVRQVRRMERHFDGIELRHVPRRDNAVADELSRLASSRAQIPPGAFEERLAQPSARPDPLGETDAPERPPRPVGVQASGPEGSAPSSPRLIAWITEIQAYLADKTLPEDREGSERVQRISKRYVLVEGTLYRRAANGVLLKCIPREQGVELLADVHEGECGAHSASRTLVGKAFRQGFYWPTALNDAVDLVWRCRACQFHARQTHQPAQALQTIPLSWPFAVWGLDILGPFRRAPGGFEYLYVAVDKFTKWPEAYPVIKIDKHSALKFIRGITARFGVPNRIITDNGTQFTSELFGDYCEDMGIKLCFASPAHPRSNGQVERANAEILKGLKTKTFNILKKHGDSWIEELPAVLWANRTMLSRATGETPFFLVYGAEAVLPSELTLRSPRATMYCEADQDQLRRDDLDYLEERRRRVALRAXRYQQSLRRYHQRHVRARSLCVDDLVLRRVXQTRAGL

SEQ ID NO: 172088 - protein, 1909 aa, Oryza sativa
  Clone ID: PAT_MRT4530_70257C.1.pep
MAERAVAHNLSPSASGDDGEQNPRRRARTPPSPSRRSLGREEALEEVERSATSTPAGDGEGRRDGERRLLVYGDGSTPQGALQAAGALLRHPPVVPDPETPARRWLDDVANLVMTAQQRLGAGGRSSATKASGAATADSVSSRRRARRAAAVIRRSSAIPSSTPPTQEDVRGGPDARLNIERRRNGRRAAHATEGASSSRAPLRSGHGGQPPESPVGGAGCRAFVASLRNVRWPPRFRPTITEKYDGSVNPAEFLQIYTTGIEAAGGDDRVMSNFLPMALKGEEADLHAVQRRDDESLRSYIQRFCQVRNTIPCIPAHAGRPASDKKEAGAPSRKRPTGKWCSVHNTSLHDLADCRAVKSLAERTRKWEEERRQERREGKAPAAPAGNRRGEAKQKATAEDVDDGDDDLGFQEPGATVATVDGGACAHASRRSLKAMKRELLAAAPTHEATRRARWSEVALTFDQTDHPPCVARGGQIAMVVSPTVCNVKLGRVLIDGGAALNILSPAAFDAIKAPGMVLRPSQPIIGVTPGHTWPLGHIDLPITFGGSANFRTERVNFDVADLSLPYNAVLGRPALVKFMAAVHYAYLQMKMPGPGGPITVHGDLKVALACMEQRADHLAAVSKPAGGDERLSTSVLAAPRQRMITCDEVPEDALVSFLRANADVFAWRPADMPGVPREVIEHRLAVRPGARPVRQKVRRQAPERQAFIREEVARLLEAGFIREVIHPEWLANPVVVPKANSKLRMCIDYTDLNKACPMDPYPLPRIDQIVDSTAGCDLLCFLDAYSGYHQICMAREDEEKTAFITPIGTYCYTTMPFGLKNAGPTFQRTTRISLGSQIGRNVEAYVDDLIVKTRNQETLLSDLAETFESLRSARIKLNPDNKLRDVQCVTGCMAALSRFISRLGEKALPLFKLLKRSGPFTWTEEAERVLTQLKAYLSSPPVLVAPEPDEPLLLYLAATPQVVSAALVVERDEDNPHSAHHHPVSTRPGREQGGEAPEPNGGPRPPTAGAGPSPACPTVPDAPDPQDGPGATTGRPRLSPSDPEVIGAEAEGAPRGLSDEERPGDAAPGEEDRPRRKVQRPIYIVSETLRDAKTRYPQAQKMLYAILMASRKLRHYFQAHRVTVVTSYPLGQILHNREGTGRVVKWAIELSEFDLHFEPRHAIKSQALADFVAEWTPAPEPVSVPEASPGPSQLPHTAYWVMQFDGSLSLQGAGAGVTLTSPRGDVLRYLVRLDFRATNNMAEYEGLLAGLRVASGLGIRRLLVLGDSQLVVNQVCKEYRCSDPQMDAYVRQVRRMERHFDGIELRHVPRRDNAVADELSRLASSRAQTPPGAFEERLAQPSARPDPLGETDAPERPPRPIGVQASGPEGSAPSSLRLIAWIAEIQVYLADKTLPEDREGSERVQRISKRYVLVEGTLYRRAANGVLLKCIPREQGVELLADIHEGECGAHSASRTLVGKAFRQGFYWPTALNDAVDLVRRCRACQFHARQPHQPAQALQTIPLSWPFVVWGLDILGPFRRAPGGFEYLYVAVDKFTKWPEAYPVIKIDKHSALKFIRGITARFGVPNRIITDNGTQFTSKLFGDYCEDMGIKLCFASPTHPRSNGQVERANAEILKGLKTKTFNILKKHGDSWIKELPAVLWANRTTPSRATGETTFFLIYGAEAVLPSELTLRSPRATMYCEADQDQLRRDDLDYLEERRRRAALRAARYQQSLRRYHQRHVRARSLCVDNLVLRRVQTRAGLSKLSPMWEGPYRVIGVPRPGSVRLATGDSTELPNPWNIEHLRRFYPYTLVLDPALGGPGRRKSPNGAQNRAAPRGMVNSGGESAKAHNRVTHNPRSPRSRPASLDMWISPGTSPDPRHLRLGPGHEPLFKPRHRRTAAQTILVSYTRQIELTQKFPLYLIAD

SEQ ID NO: 172089 - protein, 1424 aa, Oryza sativa
  unsure (1)..(1424): unsure at all Xaa locations
  Clone ID: PAT_MRT4530_70258C.1.pep
VKSLAERTKKWRGERAQEPREGKAPAAPAGNRXSEAKQKAPAEDIDDGDDDLGFQEPEATIATVDGGACAHASRRSLKAMKRELLAAAPTHEATRRARWSEVALTFDQTDHPPFAMLGRVLIDGGAALNILSPAAFDAIKAPGMVLWPSQPIIGVTPGHTWPLGHIDLPVTFGGSANFRTERVNFDVADLSLPYNAVLGRPALVKFMAAVHYAYLQMKMPGPSGPISVHGDLKVALACMEQRADHLAAASKPEGGNERLSTSVPAAPRQRMITCDEVPVKEEDALVSFLRANADVFAWRPADMPGVPREVIEHRLAVRPGARPVRQKVRRQAPERQAFIREEVARLLEAGFIREVIHPEWLANPVVVPKANGKLRMCIDYTDLNKACPKDPYPLPRIDQIVDSTAGCDLLCFLDAYSGYHQIHMAREDEEKTAFITPIGTYCYTTMPFGLKNAGPTFQRTTRISLGNQIGRNVEAYVDDLVVKTRNQETLLSDLAETFESLRSARIKLNPDKCVFGVPAGKLLGFLVSARGIEANPEKIRAIERMRPPSKLRDVQCVIGCMAALSRFISRLGEKALPLFKLLKRSGPFTWTEEAERAFTQLKAYLSSPPVLVTSEPDEPLLLYLAATPQVVSAALVVERDEDNHHSAHPHPMLTRPRREQGGEAPEPNGGPRPPTAGAGPPPACPTVPGAPDPQDGPGATAGRPRLSPSDPEVVGTEVECAPGGLSDEERPGDAAPGEEDRPRRKVQRPVYFVSEALRDAKTRYPQAQKMLYAILMASRKLRHYFQAHRVTVVTSYPLGQILHNREEWTPAPEPISVPEASSGPSQLPHTAYWVMQFDGSLSLQGAGAGVTLTSPSGDVLRYLVRLDFRATNNMAEYEGLLAGLRVAAGLGIRRLLVLGDSQLVVNQVCKEYRCSDPQMDAYVRQVRRMERHFDGIELRHVPRRDNAVADELSRLASSRAQTPPGAFEERLAQPSARPDPLGETDAPERPPRPVGVQASGPEGSAPSSLRLIAWIAEIQAYLADKTLPEDREGSERVQRISKRYVLVEGTLYRRAANGVLLKCIPREQGVELLADIHEGECGAHSTSRTLVGKAFRQGFYWPTALNDVVDLVRRCRACQFHARQTHQPAQALQTIPLSWPFAVWGLDILGPFRRAPGGFEYLYVAVDKFTKWPEAYPVIKIDKHSTLKFIKGITARFGVPNRIITDNGTQFTSELFGDYCEDMGIKLCFASPAHPRSNGQVERANAEILKGLKTKTFNILKKHGDSWIEELPAVLWANRTTLSRATGETPFFLVYGAEAVLPSELTLRSSRATMYCEADQDQLRRDDLDYLEERRRRAVLRATRYQQSLRRYHQRHVRARSLCVDDLVLRRVQTRAGLSKLSPMWEGPYRVIGVPRPGSVWLATGDGTELPNPWNIEHLRRFYP

SEQ ID NO: 172090 - protein, 36 aa, Oryza sativa
  Clone ID: PAT_MRT4530_70259C.1.pep
RLQLLAIHSTEVKMIRLQGALRSVGRRDAGLPEYCC

SEQ ID NO: 172091 - protein, 54 aa, Oryza sativa
  Clone ID: PAT_MRT4530_7025C.1.pep
AGDIIGDWTLHHPNVITLKVNKRSYRHTKVYAHQRIILSSNPYPRKCVVTSRTH

SEQ ID NO: 172092 - protein, 1901 aa, Oryza sativa
  unsure (1)..(1901): unsure at all Xaa locations
  Clone ID: PAT_MRT4530_70260C.1.pep
MAERAVAHNLSPSASGDDGEQNPRRRARTPPSPSRRSLGREEALEEVERSATSPPAGNGEGRRDGERRLLVYGDGSTPQGALQAAGALLRHPPVVPDPETPARRWLDDVADLVMTAQQRLGTGGRSSATKASGAATAGSVSSRRRARRAAAVTRRSSAIPSPTPPTQEDVRGGPDARLNIEHRRNGRRAAHATEGASSSGAPLRSGHGGQPPVSPVGGAGCRAFVASLRNVRWPPRFRPTITEKYDGSVNPAEFLQIYTTGIEAAGGRGVRHNRMLEKIASKEPQTTAELFQLTDRVARKEEAWTWNSSGSGVAASAAPGSAARSGRRDRRRKKRSAHSDDEGHVLAVEGASRATRKGRPASDKKKEAGAPSRERPTGKWCSVHNTSLHDLVDCRAVKSLAERTRKWEEERRQERREGKAPVAPAGNRRGEAKQKATAEDIDDGDDDLGFQEPEATVATVDGGACAHASRRSLKAMKRELLAAAPTHEATRRARWSEVALTFDQTDHSPCVARGGQIAMVVSPTVCNVKLGRVLIDGGAALNILSPAAFDAIKAPGMVLRPSQPIIGVTPGHTWPLGHIDLPVTFGGSANFRTERVNFDVADLSLPYNAVLGRPALVKFMAAXHYAYLQMKMPGPGGPITVHGDLKVALACMEQRADHLAAASKPAGGDERLSTSVPAAPRQRMIXEDALVSFLRANADVFAWRPADMPGVPREVIEHRLAVRPGARPVRQKVRRQAPERQAFIREEVARLLEAGFIREVIHPEWLANPVVVPKANGKLRMCIDYTDLNKACPKDPYPLPRIDQIVDSTAGCDLLCFLDAYSGYHQIRMAREDEEKTAFITPIGTYCYTTMPFGLKNAGPTFQRTTRISLGSQLRRNVEAYVDDLVVKTRNQETLLSDLAETFESLRSARIKLNPDKCVFGVPAGKLLGFLVSARGIEANPEKIRAIERMRPPSKLRDVQCVTGCMAALCRFISRLGEKALPLFKLLKRFGPFTWTEEAERALTQLKVYLSSPPVLVAPKPDEPLLLYLAATPQVVSAALVVERDEDNPHSAHPHSVSTRPGREQGGEAPEPNSGPRPPTAGAGPPPVCPMVPGAPDPQDGPGATAGRPRLSPSDPEVVATEAECAPRGLSDEKRPGNAAPGEEDRPRQKVQRPVYFVSEALRDAKTRHPQAQKMLYAILMASRKLRHYFQAHRVTVVTSYPLGQILHNREGTGRVVKWAIELSEFDLHFEPHHAIKSQALADFVAEWTPAPEPVSVPKASSGPSQLPHTAYWVMQFDGSLSLQGAGAGVTLTSPSGDVLRYLVRLDFRATNNMAEYEGLLAGLRVAAGLGIRRLLVLGNSQLVVNQVCKEYRCSDPQMDAYVRQVRRMERHFDGIELRHVPRQDNAVADELSRLASSRAQTPPGAFEERLAQPSARPDPLGESDAPERPPRPVGVQASGPEGSAPSSLRLIAWIAEIQAYLADKTLPEDREGSERVQRISKRYVLVEGTLYRRAANGVLLKCIPREQGVELLADIHEGECGAHSASRTLVGKAFRQGFYWPTALNDAVDLVRRCRACQFHAKQTHQPAQALQTIPLSWPFAVWGLDILGPFRRAPGGFEYLYVAIDKFTKWPEAYPVIKIDKHSALKFIRGITARFGVPNRIITDNGTQFTSELFGDYCEDMGIKLCFASPAHPRSNGQVERANAEILKGLKTKTFNILKKHGDSWIEELPAVLWANRTTPSRATGETPFFLVYGAEAVLPSELTLRSPRATMYCEADQDQLRRDDLDYLEERRRRAALRAARYQQSLRRYHQRHVRARSLCVDDLVLRRVQTRAGLSKLSPMWEGPYRVIGVPRPGSVRLATGDGTELPNPWNIEHLRRFYPYIFVFLRNVSVPLFPFEESWLELARSCSILPSVARAG

SEQ ID NO: 172093 - protein, 144 aa, Oryza sativa
  Clone ID: PAT_MRT4530_70261C.1.pep
KPKPNPNPFFPPRIKKLQLPWTVYFFQRKKGNSFFFYKHFSNLKIGRLKKKMHLFFPTNFKKGGGSLKTPPTFYFQHKKKIPVFPVRGPWNTLEKKKILLGLAPGADQVNNTFSLPPLFFPPGNMFNKFFFKNNSTLGVKNSPP

SEQ ID NO: 172094 - protein, 147 aa, Oryza sativa
  unsure (1)..(147): unsure at all Xaa locations
  Clone ID: PAT_MRT4530_70262C.1.pep
MTDPETLPSPSASTDSSSPPPDAWAAEYRRLLPQWESMRDSSKIAIPISISRVNQFDAARLDVEMSAMLKEQLVKVFSXVKPGLLFQYEPELDAXLEFLIWRFSIWVDKPTPGDALMNLRYRDERAAPITGKRVRTGLEGPGLSVSQ

SEQ ID NO: 172095 - protein, 66 aa, Oryza sativa
  Clone ID: PAT_MRT4530_70263C.1.pep
MSRIKLIHEWAKNSKLTRRIGPKFTSLRRGAVEEATSQIVGWMGRPLVRPNPPGHRWIQVLAGRLR

SEQ ID NO: 172096 - protein, 98 aa, Oryza sativa
  Clone ID: PAT_MRT4530_70264C.1.pep
MAVVTEDKDDEHERMWARTGGWKWMTTTSAKDEDGRRDACDARCRGGRVRRLWRRWATTTGQLWAMTVATSEGDGTWDQPTLALKTLFVGPARPQTIP

SEQ ID NO: 172097 - protein, 231 aa, Oryza sativa
  Clone ID: PAT_MRT4530_70265C.1.pep
MAILGLKEFGSGMGDLFCRLGWLKKARRRDKVWADDSRKQMLREASVICLAMDNISRMESAPAVSADMEWCDEFGLGSEEWTTKVEIKIRNVAEHVCHPEKMERLVSSFCDVQTYSFDAMKKEYYICGFARSIESIPKYKYLKIKYGTENGVWIKFFMLNLEAIPYVDPEKDVVANEKDPELYEDPDVVREAFESQVRLQRIADGEESSISADGSLCMSIDSDWSLKYGGR

SEQ ID NO: 172098 - protein, 46 aa, Oryza sativa
  Clone ID: PAT_MRT4530_70266C.1.pep
ILPFSSERIFFYFAIPLDLDVRKNSMQLNSTSIEKRGIDSRSQTLL

SEQ ID NO: 172099 - protein, 61 aa, Oryza sativa
  Clone ID: PAT_MRT4530_70267C.1.pep
FTSKHLIFGNGFWCNILSPESLATNDLCECWYNTILIGQFCRKEPALFLRMSQHLFACGFI

SEQ ID NO: 172100 - protein, 326 aa, Oryza sativa
  Clone ID: PAT_MRT4530_70268C.1.pep
MAAPRRPAAAKARNGGGAGRTSRWMAADGSKRWGETFFLLYTPFWLTLCLGVVVPFKLYERFTELEYLVVGLVSTVPAFVIPLFLVGKADSVRSLKDRYWVKANIWIIIFSYVGNYFWTHYFFTVLGASYTFPSWRMNNVPHTTFLLTHACFLFYHMTSNMSLRKLHHSTAHLPQFLRWSFEAAWVLALSYFIAYLETLAIANKICGNAFQSGQIPLDRPSGYTTFEHWEKFPYYEFIDRDIMYKVGSLFYAIYFIVSFPMFSRIDENEEKWSLSRVAVDALGAAMLVTIILDLWRIFLGPIVPIPESRRCGQPGLAWFQVQNESV

SEQ ID NO: 172101 - protein, 76 aa, Oryza sativa
  Clone ID: PAT_MRT4530_70269C.1.pep
PGSSSQKLIDCQQLILKPGTRTLSSELPDSQLNHSQPNTNTTGSWCVCKSDWHWMARTNDGCADLGLSLIGGCLTN

SEQ ID NO: 172102 - protein, 496 aa, Oryza sativa
  Clone ID: PAT_MRT4530_7026C.1.pep
AIKGQAIADFIVEHRDDSIGLVEIVPWTLFFDESVCTHGCGIGLVIISPSGACFEFAYTITPYATNNQAEYEAVLKGVQLLKEVEADTIEIMGDSLLVISQLAEEYECKNDTLMVYNEKCQELMKEFRLAKVAIGEVHEGVCGTHQSAHKMKWLLRHAGYFWPTMLEDCFRYYKGCQDCQKFGAIQRAPASAMNPIIKPWPFRGWGIDIISMINPPSSKGHKFILVATDYFTKWVEEIPLKKVDSRDAIQFVQEHIIYRFGLPQTITTDQGSIFVSDEFVQFTDSMGIKLLNSSPYYAQVNGQAEASNKSLIKLIKRKIFDYPWQWHTQLAEALWSYRMACHGSIQVPPYKLVYGHEAVLPWEVRIGSRRTELQNDLTADEYYNLMANEREDLVQSRLRALAKVTKYKERIARHYNKKVVPKDFSEGELVWKLILPIGTRDSKFGKWSPNWEGPFQIYKVVSKGAYMLQGLDGEVYGRALNGKYLKKYYPSVWVNA

SEQ ID NO: 172103 - protein, 160 aa, Oryza sativa
  Clone ID: PAT_MRT4530_70270C.1.pep
MVRLVDALVHGGGDDDDDDDGGGGYYYFAFGWEWEKPLLEGTLVFDKSVALQGVAAPPSGGSTMGSLRFRDPTTHPPWLPEPGEAAGGAEPANVVRGVVGRRCGGRPMSLRLGGKEVQNVCYIDKRMSSRSEAKCPGPVNKERPKICAEKTVDSLNYIGE

SEQ ID NO: 172104 - protein, 121 aa, Oryza sativa
  Clone ID: PAT_MRT4530_70271C.1.pep
RGRRRHRRRRRPHRCVRRLGAGLLPAPPSGTVRPRRTRASGTSTPAGSAVPPKGARRWGAPATCGATGASTESPSSPPSTTTPSPPAAPKGPCSSTATSNARSSMAAPRASRSVAGSSTTA

SEQ ID NO: 172105 - protein, 57 aa, Oryza sativa
  unsure (1)..(57): unsure at all Xaa locations
  Clone ID: PAT_MRT4530_70272C.1.pep
QAILQQIQLQQGGVVYFCQNQGQGQSFVALNLPPQSGVYPKXYNGPRSIPPGGGVWG

SEQ ID NO: 172106 - protein, 72 aa, Oryza sativa
  Clone ID: PAT_MRT4530_70273C.1.pep
PVCIRRSGLMYILSGGATTLIVIPLGASAVYFSCSCDRQCQGTSVDPPTKRPHCRTVSFLISTSALRDERCC

SEQ ID NO: 172107 - protein, 168 aa, Oryza sativa
  unsure (1)..(168): unsure at all Xaa locations
  Clone ID: PAT_MRT4530_70274C.1.pep
KRGNRSDWHGSTKDTIPLMRDADSNRADEFGVVDGVACEGTQTVPALLLLCSHQQLVQIQSKCCCYTSSASSTGGGRGQQAWAMVAIWQPPXEDEGRWLLRIARQHGADRQGPWRRRRRRKGSQWRPWAEKRQAPVVVELASKSRRHGGLSPALPFLESPSQPSRSRS

SEQ ID NO: 172108 - protein, 140 aa, Oryza sativa
  Clone ID: PAT_MRT4530_70275C.1.pep
FPVTNPGPSDQSETHVLQQNLAALSGHQGRERGREESSAHPKLEADGEELENDAGHGCPLSRAENLLPRRAPLVGGEMAPSSPPPSSLSSSCRPSPSLPEAKSGQIWPSHHRSALPPPRCHAARPKLRRTISDGALRVPS

SEQ ID NO: 172109 - protein, 1755 aa, Oryza sativa
  unsure (1)..(1755): unsure at all Xaa locations
  Clone ID: PAT_MRT4530_70276C.1.pep
QEKGKPPHATEGTSSSGAPLRSGHGGRPPVSPVGGAGCRAFVASLRNVRWPPRFRPTITEKYDGSVNPTEFLQIYTTGIEAAGGDDRVMANFFPMALKGQARGWLMNLPPASVHSWEDLCQQFTTNFQGIYPCPGEEADLHAVQRRDDESLRSYIQRFCQVRNTIPCIPAHAVIYAFRGGVRHNRMLEKIASKEPQTTAQLFELADRVARKEEAWAWNSSGSGVATPAAPGSAARSGRRDRRRKKGSARSDDEGHVLAVEGASRAPRKGRPASDKKKEAGAPSRERPTGKWCTVHNTSLHDLADCRAVKSLAERTRKWEEEKRQERREGKTPAAPAGNRRGEAKQKATAEDIDDGDDDLGFQEPEATIATIDGGACAHASRRSLKAMKRELLAAAPTHEATRRARWSEVALTFDQTDHPPCVARGGQIAMVVSPTVCNVKLGRVLIDGGAALNILSPAAFDAIKAPGMVLRPSQPIIGVTPGHTWPLGHIDLPVTFGGSANFRTERVDFDVADLSLPYNAVLGRPALVKFMAAVHYAYLQMKMPGPGGPITVHGDXMEQRADHLAAASKPAGGDERLSTSVPAAPRQRMVTCDEVPEDALVSFLRANADVFAWRPADMPGVPREVIEHRLAVRPGARPVRQKVRRQAPERQAFIREEVARLLEAGFIREVIHPEWLANPVVVPKANGKLRMCIDYTDLNKACPKDPYPLPHIDQIVDSTAGCDLLCFLDAYSGYHQIRMAREDEEKXAFITPIGTYCYTTMPFGLKNAGPIFQRTTRISLGSQIGRNVEAYVDDLVVKTRNQETLLSDLAKTFESLRSARIKLNPDKCVFGVPAGKLLGFLVSARGIEANPEKIRAIERMRPPSKLRDVQCVTGCMAALSRFISRLGEKALPLFKLLKRSGPFTWTEEAERAFTQLKVYLSSPPVLVAPEPDEPLLLYLAATPQVVSTALVVERDEDNPHSAHPHPVSTRPGREQGGEAPEPNGGPRPPTAGAGPPPACPTVPGAPDPQDGPGATAGRPRLSXPLTPRSSAQKPSAPRVASRTKSALEMREALRDAKTRYPQAQKILYAILMASRKLRHYFQAHRVTVVTSYPLGQILHNREGTGRVVRWAIELSEFDLRFEPRHAIKSQALADFVAEWTPAPEPVSAPEASSGPSQLPHTAYWVMQFDGSLSLQGAGAGVTLTSPSGDFLRYLVRLDFRATNNMAEYEGLLAGLRVAAGLGIRRFLVLGDSQLVVNQVCKEYRCSDPQMDAYVRQVRRMERHFDGIELRHVPRRDNAVADELSRLASSRAQTPPGAFEERIAQPSVRPDPLGETDAPERPPRPVGVQASGPEGSAPSSPRLIAWITEIQAYLADKTLPEDREGSEHVRRISKRYVLVEGTLYRRAANGVLLKCIPREQGVELLADVHEGECGAHSASRTLVGKAFRQGFYWPTALNDAVDLVRRCRACQFHARQTHQPAQALQTIPLSWPFPVWGLDILGPFRRAPGGFEYLYVAVDKFTKWPEAYPVIKIDKHSALKFIRGITARFGVSNRIITDNGTQFTSELFGDYCEEIGIKLCFASPAHPRSNGQVERANAEILKGLKTKTFNILKKHGDSWIEELPAVLWANRTTPSRATGETPFFLVYGAEAVLPSELTLRSPRVTMYCEADQDQLRRDDLDYLEERRQRAALRAARSQQSLRRYHQRHVRARSLCVDDLVLRRVQTRAGLSKLSPMWEGPYRVIGVPRPGSVRLATGDGTELPNPRNIEHLRRFYP

SEQ ID NO: 172110 - protein, 1340 aa, Oryza sativa
  unsure (1)..(1340): unsure at all Xaa locations
  Clone ID: PAT_MRT4530_70277C.1.pep
MVVSPTVCNVKLGRVLIDGGAALNILSPAAFDAIKAPGMVLRPSQPIIGVTPGHTWPLGHIDLPVTFGGSANFRTERVSFDVADLSLPYNAVLGRPALVKFMVAVHYAYLQMKMPGPGGPITVHGDLKVALACMEQRADHLAAASKPAGGDERLSTSVPTAPRQRMITCDEVPIKQEDALVSFLRANADVFAWRPADMPRVPREVIEHRLAVRPGARPVRQKVRRQAPERQAFIREEVARLLEAGFIREVIHPEWLANPVVVPKANGKLRMCIDYTDLNKACPKDPYPLPRIDQIVDSTAGCDPLCFLDAYSGYHQIRMAREDEEKTAFITPIGTYCYTTMPFGLKNAGPTFQRTTRISLGSQIGRNVEAYVDDLVVKTRNQETLLSDLAETFKSLLTARIKLNPDKCVFGVPAGKLLGFLISARGIEANPEKIRAIERMRPPSKLRDVQCVTGCMAALSRFISRLGEKALPLFKLLKRSGPFIWTEEAERALTQLKAYLSSPPVLVAPEPDEPLLLYLAATPQVVSAALVVERDEDDPRSAHPHPVSTRPGREQGGEAPEPNGGPRPPTTGAGPLPACPTVPGAPDPQDGPGATAGRPRLSPSDPEVVDTEAECAPRGLSDEKRPGDAAPGEEDRPRQKVQRPVYFVSEALRDTKTQYPQAQKMLYAILMASRKLRHYFQAHRVTVVTSYPLGQILHNREGTGRVVKWAIELSEFDLHFEPRHAIKSQALADFVAEWTPAPEPVSIPEASSGPSQLPHTAYWVMQFDGSLSLQGAGAGVTLTSPSGDVLKYLVRLDFRATNNMVEYEGLLAGLRVAAGLGIRRLLVLGDSQLVVNQVSKEYQCSDPQMDAYVRQXLRHVPRRDNAVADXLASSRAQTPPGAFEERLAQPSARPDPLGETDAPERPPRPVGVQASGPEGSAPSSLRLIAWIAEIQAYLADKTLPEDREGSERVQRFSKRYVLVEGTLYRHATNGVLMKRIPREQGVELLAYIHKGECGAHFASRTLVGKAFRQGFYWPTALNDAVDLVRRCRACQFHAKQTHQPAQALQTIPLSWPFAVWGLDILGPFRRAPGGFEYLYVAIDKFTKWPEAYPVIKIDKHSALKFIRDITARFGVPNRIIMDNGTQFTSELFGDYCEDMGIKLCFASPAHPRSNGQVERANAKILKGLKTKTFNILKKHGDSWIEELPAVLWANRTTPSRATGETPFFLVYGAEAVLPSELTLRSPRATMYCEADQDQLRRDDXDYLEERRRRXAIRAARYQQSLRRYHQRHVRARSLCVDDLVLRRVQTRAGLSKLSPMWEGPYRVIGVPRPGSVRLATGDGTELPNPWNIEHLRRFYP

SEQ ID NO: 172111 - protein, 1886 aa, Oryza sativa
  Clone ID: PAT_MRT4530_70278C.1.pep
MAERAVAHNLSPSASGDDGEQNPCRRARTPPSPSRRSLGREEALEGVERSATSPLAGDGEGRRDGERRLLVYGDGSTPQGALLRHPPVVPDPETPARRWLDDVANLVITAQQHLGTGGRSSATKASDAATTGSASSRRRARRAAAVTRRSSAIPSSTPPTQEDVRGGPDARLSIERRCNCRRAAHATEGASSSGAPLWSGHGGQPPMSPVGGAGCRAFVASLRNVRWPPRFRPTITEKYDGSVNRAEFLQIYMTRIEAAGGDDRVMANFFPMALKGQARGWLMNLPPASVHSWEDLCQQFTMNFQGTYPRPGEEADLHAVQRRDDESLRSYIQRFCQVRNTIPCIPAHVVIYAFRGGVRHNRMLEKIASKEPQTTAELFQLADRVARKEEAWTWNSSGSGVAASAAPGSAAPSGRRDRRRKKRSAHSDDEGHVLAVEGASRATRKGRPASDKKKEAGAPSRERPTGKWCSVHNTSLHDLADCRAVKSLAERTRKWEEERRQERREGKAPAAPAGNRRSEAKQKAPAEDIDDGDDGLGFQELEATIATVDGGACAHVSRRSLKAMKRELLAAAPTHEATRRARWSEVALTFDQTDHLPCVARGGQIAMVVFPTVCNVKLGRVLIDGGAALNILSPAAFDDIKAPGMVLRPSQPIIGVTPGHTWPLGHIDLPVTFGGSANFRTERVNFDVADLSLPYNAVLGRPALVKFMAAVHYAYLQMKMPGPGGPISVHGDLKVALACMEQRADHLAAASKPEGGDGRLSTSVPAAPRQRMVTCDEVPVKEEDALVSFLRANADVFAWRPADMPGVPREVIEHRLAVRPGARPVRQKVRRQAPERQAFIREEVARLLEAGFIREVIHPEWLANPVVVPKANGKLRMCIDYTDFNKACPKDPYPLPRIDQIVDSTAGCDLLCFLDAYSGYHQIRMARVDEEKTAFITPIGTYCYTTMPFGLKNVGPTFQRTTRISLGSQIGRNVEAYVDDLVVKTRNQETLLSDLAETFESLRSARIKLNPNKCVFGVPAGNLLGFLVSARGIEANPEKIRAIERMRPPSKLRDVQCVTGCMAALSRFISRLGEKALPLFKLLKRSGPFTWTEEAERALTQLKAYLSSPPVMVAPEPDEPLLLYLAATPQVVSAALVVERDEDNPHSAHPHPMSTRPGREQGGEAPELNGAPDPQDGPGATAGRPRLSPSDPEVVGTEAECAPRGLLDEERPGDAAPSEEDQPRRKVQRPVYFVSEALRDVKTRYPQAQKMLYAILMASRKLRHYFQAHRVTVVTSYPLGQILHNLEGTGRVVKWAIELSEFDLHFEPCHAIKSQALADFVAEWTPAPEPVSDPEASSGPSQLPHTAYWVMQFDGSLSLQGAGAGVMLTSPSGDVLRYLVRLDFRATNNMTEYEGLLAGLRVAAGLGIRRLLVLGDSQLVVNQTPPGTFEERLAQPSARPDPLGETDAPERPPRPVGVQASGPEGSAPSSLRLIAWIAEIQAYLADKTLPEDREGSERVQRISKRYVLVEGTLYRHAANGVLLKCIPREQGVELFADIHEGECGAHSASRTLVGKAFRQGFYWPTALNDAVDLVRRCRACQFHARQTHQPAQALQTIPLSWPFAVWGLDILGPFRRAPGGFEYLYVAVDKFTKWPEAYPVIKIDNHSALKFIKGITARFGVPNRIITDNGTQFTSELFGDYCEDMGIKLCFASPAHPRSNGQVERANAEILKGLKTKTFNILKKHGDSWIEELPAVLWANRTTPSRATGETPFFLVYGAEAVLPSELTLRSPRATMYCEADQDQLRRDDLDYLEERRRRAALRAARYQQSLRRYHQRHVRARSLCIDDLVLRRVQTRAGLSKLSPMWEGPYRVIGVPRPGSVRLATGDGTELPNPWNIEHLRRFYP

SEQ ID NO: 172112 - protein, 55 aa, Oryza sativa
  Clone ID: PAT_MRT4530_70279C.1.pep
KTGETCNMARMEREGSTSSTPVQMYVAGWEPSGDAPRWTQAPGHCIGGSGWESAS

SEQ ID NO: 172113 - protein, 1777 aa, Oryza sativa
  unsure (1)..(1777): unsure at all Xaa locations
  Clone ID: PAT_MRT4530_7027C.1.pep
MATDLSQSLDLSIYRYKGYISLTSTADRVDLVLSYLFMTADRYIYDIGSKINASTELVLKFIYANTQGNSGAEVYVKVVADVPGTGSSKDGEAKQAPDGSAEPSDKGATDGSQGNQGDNSQGVQGVQGDGTQGVQGGGVDQDSNTAQLQFNNFQDQVDYAVHHALINKSGILTNTSAQPMAPVPAPTPAAPSSAPSQLVNPRLLVREQPQHIGQNVNRLTQDQMASMFLSPQHTGDPTQQQPIQQTPPRQQVVQPTQQTPPIQQGVQPVQQTPQRRQVLQPIQQTPLRQQVVQPIQQQSLMNASARFATPGGQPVQHAANKVVLEHLVHHVQPDGTMIPQAIPEHLEQFGLRPKDAANLYRQPYPEWFERVPLPNLFKVPDFSKFLGQDSTSTYEHVSRFLAQCGEASAVDALRGMIAPIREKFSSEDFESLSHLTQKVTLHEQRFAEARKNSRKVNHVCPYIYGSDDEDDDSEIAAAEWVRSKKVIPCQWVKNSRKDERYDFDITKPNKIFDLLLREKHIQLPAGHTIPSAKELGKKRPMKVDGNPFPVNMVHTAGRTADEGRARGFQVNSAKIINKYQRKYDKQQEKHYEEDDDGFDPHWGCEFFRFCWNEAMKLPSIEDCPGCCDIAENSSRSYSRGNRLRQTRVPVHQRLGPVNQDHGQEDNENMKTQWCPSGIFTKNQKRRKTKPRQEWRVKNQVPVADEATADEARRLAKGKSVVTASVNMVFTLPAEFGVKQADVDEVEEESAKLTLSPDQTVFEKPEGTEHRHLKPLYINGYVNGKPMSKMMVDGGAAVNLMPYTTFRKLGRNAEDLIKTNLVLKDFGGNPSETKGVLNVELTVGNKTIPTTLFVIDGKGSYSLLLGRDWIHTNCCIPSTMHQCLIQWQGDKIEIVPADSQLKMENPSYYFEGVMEGSNVYTKDTVDDLDDKQGQGFMSADDLEEIDIGPGDRPRPTFISKNLSSEFRTKLIELLKEFRDCFAWEYYEMPGLSQSIVEHQLPIKPGVRVCIDFRNLNKATPKDEYPMPVADQLVDAASGHKILSFMDDNAGYNQIFMAEEDIHKTAFRCPGAIGLFEWVVMTFGLKSAGATYQRAMNYIYHDLIGWLVEVYIDDVVVKSKEIEDHIADLRKVFERTRKYGLKMNPTKCAFGVSTGQFLGFLVHERGIEVTQRSVNAIKKIQPPENKTELQEMIGKIKFVRRFISNLSGRLEPFTPLLRLKADQQFTWRAEQHKALDDIKEYLSSPPVLIPPQKREFEGKMRVVFYLSRRLLDAETRLRHYLLSNECTVICKADIVKYMLSAPILKGMVGKWIFSLTEFDLPYESPKAIKGQAIADFIVEHRDDSIGSVEILPWTLFFDGSVCTHGCGIGLVIISPRGASFEFAYTIKSYATNNQAEYEAVLKGLQLLKEVEADAVEIMGDSLLVISQLAGEYECKNDTLMIYNEKCQELIKEFRLVTLKHVSREQNIEANDLAQGASGYRPMIKDVKVEVAAITADDWXDCFKYYKGCQDCQKFGAIQRAPXASAMNPIIKPWPFRGWGIDMISMINPPSSKGHKFILVATDYFTKWVEAIPLKKVDSGDAKQFVQEHLIYRFGIPQTITTDQGSIFVSDEFVQFADNMGIKLLNSSPYYAQVNGQAEASNKSLIKLIKRKISYYPRQWHTRLAEALWSYRMACHGSIQVPPYKLVYGHEAVLPWEVRIGSRRTELQDNLTIDEYYNLMADEREDLVQSRLRALAKVTKDKERVARHYNKKVVLKDFSEGELVWKLILLIGTRDSKFGK

SEQ ID NO: 172114 - protein, 1784 aa, Oryza sativa
  Clone ID: PAT_MRT4530_70280C.1.pep
MTAQRRLGAGGRSSATEASGAAAAGSMSSRRRARRAAAVTRRSSAIPSSTPPTQEDVRGGPDARLNIERRRDARRAAHATEGASSSGAPLRFGHGGRPPVSPVGGAGCRAFVASLRNVRWPPRFRPTITEKYDGSVNPAEFLQIYTTGIEAAGGDDRVMANYFPMALKGQARGWLMILPPASVHSWEDLCQQFTTNFQGIYPRPGEEADLHAVQRRDDESLRSYIQRFCQVRNTIPCIPAHAVIYAFRGGVRHNRMLEKIASKEPQTTAQLFELADRVARKEEAWTWNSSGSGVAAPAAPGSAARSGRRDGRRKKGSARSDDEGHVLAVEGASRAPRKGRPASDKKKEAGAPRWERPTGKWCTVHNTSLHDLVDCRAVKSLAERTRKWEEEKRQERREGKTPAAPAGNRRGEAKQKATAEDVDDGDDDLGFQEPEATVATVDGGACAHASRRSLKAMKRELLAVAPTHEATRRARWSEVALTFDQTDHPPCVAQGGQIAMVVSPTVCNVKLGRVLIDGGAALNILSPAAFDAIKAPGMVLRPSQPIIGVTPGHTWPLGHINLPVTFGGSANFRTERVDFDVADLSLPYNAVLGRPALVKFMAAVHYAYLQMKMPGPGGPITVHGDLKVALACMEQRADHLAAASKPAGGDERLATSVPAAPRQRMVTCDEVSVKEEDALVSFLWANADVFAWRPADMPGVPREVIEHRLAVRPGARPVRQIVRRQAPERQAFIREEVARLLEAGFIREVIHLEWLANPVVVPKANGKLRMCIDYTDLNKACPKDPYPLPRIDQIVDSTAGCDLLCFLDAYSGYHQIRMAREDEEKTAFITPIGTYCYTTMPFGLKNAGPTFQRTTRISLGSQIGRNVEAYVDDLVVKTRNQETLLSDLAETFESLRSARIKLNPDKCVFGVPAGKLLGFLVSARGIEANPEKIRAIEWMRPPASLGMPFTWTEEAERAFTQLKAYLSSPLVLVAPEPDEPLLLYLAATPQVVSAALAVERDEDNPHSAHPHPASTRPGREQGAEAPEPNGGLRPPTAGAGPPPACPTVPGAPDPQDGPGATAGRPRLSPSDPEVVGTEAECAPRGLSDEERPGDVAPGEEDRPRRKVQRPVYFVSEALRDAKTRYPQAQKMLYAILMASRKLRHYFQAHRVTVVTSYPLDQILHNREGTGRVVRWAIELSEFDLRFESRHAIKSQALADFVAEWTPAPEPVSAPEASSGPPQLPHTAYWVMQFDGSLSLQGAGAGVTLTSPSGDVLRYLVRLDFRATNNMAEYEGLLAGLRVAAGLGIRRLLVLGDSQLVVNQVCKEYRCSDPQMDAYVRQVRRMERHFDGIELRHVPRRDNAVADELSRLASSRAQTPPGAFEERLAQPSARPDPLGETDAPEWPPRPVGVQASGPEGSTPSSPRLIAWITEIQAYLADKTLPEDREGSERVRRISKRYVLVEGTLYRRAVNGVLLKCIPREQGVELLADVHEGESCQFHARQTHQPAQALQTIPLSWPFAVWGLDILGPFRRAPGGFEYLYVAVDKFTKWPETYPVVKIDKHSALKFIRGITARFGVPNCIITDNGTQFTSELFGDYCEDMGIKLCFASPPHPRSNGQVERANAEILKGLKTKTFNILKKHGDSWIEELPAVLWANRTTPSRATGETPFFLVYGAEAVLPSELTLRSPRVTMYCEADQDQLRRDDLDYLEERRRRAALRAARYQQSLRRYHQCHVRARSLCVDDLVLRRVQTRAGLSKLSPMWEGPYRVIGVPRPGSVRLATGDGTELPNPWNIEHLRRFYP

SEQ ID NO: 172115 - protein, 1109 aa, Oryza sativa
  Clone ID: PAT_MRT4530_70281C.1.pep
MTGRPAAPPRGLIAPPSHPHGALPRNKQGSGAVQAAAAAQDTGQQRRNYDQDNRGAQDAGRGYTHAAGNHRHQDQPGEASTGNTEDRNTVLSITGQLTLMLVAVLIRAAEKRSAKRFLLARNRCKCNGHLPAVCKADLNCIICNKKDSHLSIKCPILKMPKPNASLLGFGKNELGFLQVPDFDYKLETTVPAPTALVTITGGHLGADGVQTELARLIRADWNWEALPHGKDSFLVTFPSEEELKRMADVEFRLKNHGVALTISEWQEAGDVIPSYELDMAWVHVTGVPHAWRHYLGFWALGSVIGATEEVDMLTFRKLGVIRIKVGIMDREHFPFTTDVVFGKHGYELIYTIEPEDFQPAIPTPSNDTMDHDSAGTDNGSNMDGGSADHAAKKKKANTSTPESSNAAVSGPTPMQLAVTPFGDRRPVPQRQQIILGTRVNKQHIAVTPCASRTDIDCASTEVFIIDGYSTRADNGGVSTYACTFGVVAHVDPTPIRSCADPAGIHSTHVDPLASSRQSTSAPTKSPLVPTLPMPTSLVQTPPVPTTTTQTAAYTHEGHVTQPGSSSIKHSTFGHVRSPCTPLQEEKTEGLRHSDRCNAAISSNGIAAADEDSTTKAKRRAAMRNLDGPMMSKMADLAKSSLSSTSYLDPSIGMHSNLPSSSIVYLSNEQFSSNLGKIGVSLGSGSENVAFSVNAIKHMKVDRWKVAPKTKMKAKVIDEANDQNPFDDGDDEDAKPDGILLAHLFKEVSEVDLDDAELSTTICDLIDTPRKSKSASKKKGIFWNSRGLLDLAKYWYVAENIKEHNLDFVALLETRKNDVSKTNLDRLAGGADFIWHCLPPRGRSGGILLGINAAVMDLSLIVEGKFYVKFHLRNKEDRFEWILMAVYGPAQDEFKSSFLAELVRACQQNPHPTLIGGDFNILRSSTEKNNNRYNDRWPFLFNAVIDSFDLREIALAGRQFTWANSLANPTYEKLDRVLMTTEWESKFPIVSVHALERGVSDHTPLLLDTGSAAFIGNHKQFKLELSWLTRDDFHDRVVEIWNKPVKGRNSVQRWNNKMSALRKHLRGWAAHMSGDNNTKYFQMVAKRKHMNRRIVYLEHNEGKVLGQAAF

SEQ ID NO: 172116 - protein, 65 aa, Oryza sativa
  unsure (1)..(65): unsure at all Xaa locations
  Clone ID: PAT_MRT4530_70282C.1.pep
YLSMSQAEIVICCTWCRYILSMPIACGGGGAVLHPVTSSTVSTFICYSIEEKKKXXIGLLGXKKK

SEQ ID NO: 172117 - protein, 1673 aa, Oryza sativa
  Clone ID: PAT_MRT4530_70283C.1.pep
MAERAVEHNLSPSASGDDGEQNPRRRARTPPSPSRRNLGRGEALEGVERSATSPPAGDGGGRRDGVHRRLVYGDGGTPQGALQAMGALLRHPPVVPDPETPARCWLDDVADLVMTAQQRLGAGGQSSATKASGAAAAGSTSSRRRARRAAAVTHRSSAIPSSTPPTQEDVRGGPNARLDIKRRRDDCRAAHATEGASSSGAPLRSGHGGRPPVSPVGGAGYRAFVASLRNVRWPPRFRPTITEKYDGSVNLAEFLQIYTTGIEAAGGDDRVMENFFPMAPEGPGAGLVNELATRVGPLLGGFVPAAHHELPGHISAPRRRSGLACVRNTIPCIPAHAVIYAFRGGVRHNRMLEKIASKEPQATAQLFELADRVARKEEAWTWNSSGSGVAAPAAPGSAAQSGRRDRRRKKKSARSDDEGHVLAVEGASRAPRKGRPASDKKKEAGAPSRERPTGKWCTVHNTSLHDLADCHAVKSLAERTRKWEEEKRQERREGKAPAAPASNRRGEAKQKATAEDIDDGDDDLGFQEPEATVATVDGGACAHASHRSLKAMKRELLAAAPTHEATRRVRWSEVALTFDQTDHSPCVVRGGQIAMVVSPTVCNVKLGRVLIDGGAALNILSPAAFDAIKAPGMVLRPSQPIIGVTPGHTWPLGHIDLPVTFGGSANFRTERVDFDVADLSLPYNAVLGRPALVKFMAAVHYAYLQMKMSGPGGPITVHGDLKVALACMEQRADHLAAASKPAGGDERLSTSVPATPRQRMVTCDEVPEDALVSFLRANADVFAWRPADMPGVPREVIEHRLAVRPGARPVRQKVRRQAPKRQAFIREEVARLLEAGFIREVIHPEWLANPVVVPKANGKLRMCIDYTDLNKACPKDPYPLPRIDQIVDSTAGCDLLCFLDAYSGYHQIRMAREDEEKTAFITPIGTYCYTTMPFGLKNAGPTFQRTTRISLGSQLGRNVEAYVDDLVVKTRNQETLLSDLAETFESLRSARIKLNPDKCVFGVPAGKLLGFLVSARGIEANPETIRAIERMRPPSRLRDVQCVTGCMATLSRFISRLGEKALPLFKLLKRSGPFTWMEEAERAFTQLKAYLSYPPVLVAPEPDEPLLLYLAATPQVVSAALVVERDEDNPHSAHPHPVSTRPGREQGGEAPEPNGGPRPPTAGAGPPPACPTVPGAPDPQDGPGATAGRPRLSPSDPEVVGTEAECAPRGLWDEERPGDAAPGEEDRPRRKMQRPVYFVSEALRDAKTRYPQAQKMLYAILMASRKLRHYFQAHRVTVVTSYPLGQILHNREGTGRVVRWAIELSEFDLRFEPRHAIKSQALADFVAEWTPAPEPVSAPEASSGPSQLPHTAYWVMQFDGSLSLQGAGAGVTLTSLSRDVLRYLVRLDFRATNNMAEYEGLLAGLRVAAGLGIRRLLAYLADKTLPEDREGSERFRRISKRYVLVEGILYRRAANGVLLKCIPREQGVELLADIHEGECGAHSASRTLVGKAFRQGFYWPTALNDAVDLVRRCRACQFHARQTHQPAQALQTIPLSWPFAVWGLDILGPFRWAPGGFEYLYVAVDKFTKWPEAYPVIKIDKHSALKFIRGITARFGVPNRIITDNGTQFTSELFGDYCEDMGIKLCFASPAHPRSNGQVERANAEILKGLKTKTFNILKKHGDSWIEELPAVL

SEQ ID NO: 172118 - protein, 251 aa, Oryza sativa
  Clone ID: PAT_MRT4530_70284C.1.pep
HVWPVKPTRSDGSGSCPQAAAVTPTPNPYFYYPNKSDIEHDGSFREGVITCVSKMVKDEATQDIIITELNMYQEQQGTFGKEIAMRQRRNKNFNPTKWWLNHGTIIPNLRILVSRILNLTCSSSGCERNWFVFEQRGSKDRDPLEKEVNDVVADNENEFITGIVPLSNELAEHDPQDGASQGETSQAQGKRKRHVRPKKKKIRSVHSLMNDVTMQPGPSSSDSEDGDGNGAGDVSEGSSDSDKSHGVFESD

SEQ ID NO: 172119 - protein, 58 aa, Oryza sativa
  Clone ID: PAT_MRT4530_70285C.1.pep
WSGFISLSAFKLCSVSCRRPGAHCCANTCTVNYDMLVLRRHQLCFCCPWPSFSICPWV

SEQ ID NO: 172120 - protein, 1840 aa, Oryza sativa
  Clone ID: PAT_MRT4530_70286C.1.pep
MAEQAVAHNLSPSASGDDGEQNPRRRASTPPSPSRRSLGREEALEGVERSATSPPAGDGEGRRDGERRLLVYGDGSTPQGALQAAGALLRHPPVVPDPETPARRWLDDVADLVMTAQQRLGAGGRSSATKASGAATAGSVSSRRRARRAAAVTRRSSAIPSSTPPTQEDVRGGPDARLNIERRRNGRRAAHATEGASSSGVPLRSGHGGQPLRWPPRFRPTITEKYDGSVNPAEFLQIYTTGIEAAGGDNRVMANFFPMALKGQARGWLMNLPPASVHSWKDLCQQFTMNFQGTYPRPVRNTIPCIPAHAVIYAFRGAVRHNRMLEKIASKEPQTTAELFQLADRVARKEEAWTWNSSGSGVAAPAAPGSAARSGRRDRRRKKRSAHSDDEGHVLAVEGASRATRKGRPASDKKKEAGAPSRERPTGKWCSVHNTSLHDLADCRAVKSLAERTRKWEEERRQERREGRAPAAPAGNRRGEAKQKATAEDVDDGDDDLGFQEPEATVATVDGGACAHASRRSLKAMKRELLAAAPTHEATRRARWSEVALTFDQTDHPPCIARGGQIAMVVSPTVCNVKLGRVLIDGGAALNILSPAAFDAIKAPGMVLRLSQPIIGVTPGHTWPLGHIDLPVTFGGSANFRTERVNFDVADLSLPYNAVLGRPALVKFMAAVHYAYLQMKMPSLGGPITVHGDLKVALACMEQRADHLAAASKPAGGDERLSTSVPAAPRQRMITCDEVPVKEEDALVSFLRANADIFAWRPADMPGVPREVIEHRLAVRPGARPVRQKVRRQAPERQAFIREEVARLLEAGFIREVIHPEWLANPVVVPKANGKLRMCIDYTDLNKACPKDSYPLPRIDQIVDSTAGCDLLCFLDAYSGPTFQRTTRISLGSQIGRNVEAYVDDLVVKTRNQETLLSDLAETFESLRSARIKLNPDNSTPVLVAPEPDEPLLLYLAATPQVVSAALVVERDEDNPHSAHPHLVSTRPGREQGGEAPEPNGGPRPPTARAGPPPACPTVPGAPDPQDGPGATAGRPRLSSSDPEVIGAEAEGAPRGLSDEERPGDAAPGEEDRPRRKVQRPIYFVSEALRDAKTRYPQAQKMFYAILMASRKLRHYFQAHRVTVVTSYPLSQILHNREGTGRVVKWAIELSEFDLHFEPRHAIKSQALADFVAEWTPAPEAVSVPEASSGPSQLPHTAYWVMQFDGSLSLQGAGLRVAAGLGIRRLLVLGDSQLVVNQVCKEYRCSDPQMDAYVRQVRRMECHFDGIELRHVPRRDNAVADELSRLASSRAQTPPGAFEERVAQPSARPDPLGETDAPERPPRPVGVQASGPEGSAPSSLRLFAWIAEIHAYLADKTLPEDREGSERVQRISKRYVLVEGTLYRRVANGVFLKCIPREQGVELLADIHEGECGAHSASRTLVGKAFRQGFYWPTALNDAVDLVWRCRACQFHARQTHQPAQALQTIPLSWPFAVWGLDILGPFRRAPGGFEYLYVAVDKFTKWPEAYPVIKIDKHSALKFIRGITARFGVPNRIITDNGTQFTSELFGDYCEDMGIKLCFASPAHPRSNGQVERANAEILKGLKTKTFNILKKHGDSWIEELPAVLWANRTTPSRATGETPFFLVYGVEAVLPSELTLRSPRATMYCEADQDQLQRDDLDFLEERRRRAALRAARYQQSLRRYHQRHVRARSLCVDDLVLRRVQTCAGLSKLSPMWEGPYRVIGVPRPGSVRLAMGDGTELPNPWNIEHLHRFYPYTLVLDPALGGLVRRQCCLPGGDGGLEVRQLPLLRVQGAGALLQRRGATLKGLFAPPGRRLVLRRPLFPGSCGVKDSPGGVELLF

SEQ ID NO: 172121 - protein, 1571 aa, Oryza sativa
  Clone ID: PAT_MRT4530_70287C.1.pep
MNFQGTYPRPGEEADLHAVQRGDDESLRSYIQRFCQVRNTIPCIPAHAVIYAFRGGVRHNRMLEKIASKEPQTTAELFQLADRVARKEEAWTWNSSGSSVAAPAAPGSAARSGRRDRRRKKRSALSDDEGHVLAAEGASRATRKGRPASNRKKEAGAPSRERPTGKWCSVHNTSLHDLADCRAVKSLAERTRKWEEERRQERRDGKAPAAPAGNQRGASGHGRPVDGGACAHASRRSLKAMKRELLAAAPTHEATRRARWSEVALTFDMTDHPPCVARGGQIAMVVSPTICNVKLGRVLIDGGAALNILSPAAFDAIKAPGMVVRPSQPIIGVTPGHTWPLGHIDLPVTFGGSANFRTERVNFDVADLSLPYNAVLGRPALVKFMAAVHYAYLQMKMPGPGGPITVHGDLQVALACMEQRADQLAAASKPECGDERLSAFVPAAPRQRMIMCDEVPEDALVSFLRANADVFAWRPADMPGVPREVIEHRLAVRPGARPVRQKVRRQAPERQAFIREEVARLLEAGFIREVIHPEWLANPVVVPKANGKLRMCIDYTDLNKACPKDPYPLPRPTFQRTTRISLGSQLGRNVEAYVDDLVVKTRNQETLLSDLAETFESLRSARIKLNPDKCVFGVPAGKLLGFLVTARGIEANPEKIRAIERMRPPSKLRDVQCVTGCMAALSRFISRPGEKALPLFKLLKRSGPFTWTEEAERALTQLKAYLSSPPVLVAPKPDEPLLLYLAATPQVDGPGATAGRPRLSPSDPEVDDTEAECAPRGLSDEKRPGDAALGEEDRPRRKVQRPVYFVSEALRDAKTRYPQAQKMLYAILMASRKLRHYFQAHRVTVVTSYPLGQILHNREGTGRVVKWAIELSEFDLHFEPRHAIKSQALADFVAEWTPAPEPVSIPEASSGPSQPPHTVYWVMQFDGSLSLQGAGAGVTLTSPSGDVLRYLVRLDFRATNNMAEYEGFLAGLRVAAGLGIRRLLVLGDSQLVVNQVCKEYRCSDPQMDAYVRQVRRMERHFDGKELRHVPRRDNAVADELSRLASSRAQTPPGAFEERLAQPSARPDPLGEMDAPERPPRPVGVQASGPEESAPSSLRLIAWIAEIQAYLTDKTLPEDREGSERVQRISKHYVLVEGTLYRRAANGVLLKCIPREQGVELLADIHEGECGAHSASRTLVGKAFRLGFYWPTALNDAVDLVWRCRACQFHARQTHQPAQALQIIPLSWPFAVWGLDILGPFSGAPGGFEYLYVAIDKFTKWPEAYPVVKIDKHSALKFIRGITARFGVPNRIITDNGTQFTSELFGDYCEDMGIKLCFASPAHPRSNGQVERANAEILKGLKTKTFNILKKHGDSWIEELPAVLWANRTTPSRATGETPFFLVYDAEAVLPSELTLGSPRATMYCEADQDQLRRDDLDYLEERRRRAALRAARYQQSLRRYHQRHVRARSLCVDDLVLRRVQTRAGLSKLSPMWEGPYRVIGVPGRAPFGWPRATTQSCLTRGTSNTFVASTPSRGRVSGLGLGPTPHPPRGVQGWPGATTYAYTYLFSLLYFNKSIFRFPKDCVCAIVSFC

SEQ ID NO: 172122 - protein, 137 aa, Oryza sativa
  unsure (1)..(137): unsure at all Xaa locations
  Clone ID: PAT_MRT4530_70288C.1.pep
TSAAAWAHRTSAPXAGQSPHAATSLGSTSIGFASRCASIVRQPSLTPPATLQGYRPQHSTGIGQPQPPALVVALCRRRGLLPLHRRHGLRTSISSTSALSRPPLLAAPSVTDALLTVKFACFLIANKGFIGVSAGSN

SEQ ID NO: 172123 - protein, 75 aa, Oryza sativa
  Clone ID: PAT_MRT4530_7028C.1.pep
MAAAARRLANAASTAGIVGPTFPLVPVRGGICDWDSDAGEGRRVRHGRRKALGATSAAVSFLEDGFLVQGKLVMK

SEQ ID NO: 172124 - protein, 81 aa, Oryza sativa
  unsure (1)..(81): unsure at all Xaa locations
  Clone ID: PAT_MRT4530_70290C.1.pep
GYNSQKKVCPRRLHNNNINSSCTYSVIRTIFNLNSSFYNQSPQKQFRIDDNLYNNFTTHSRDGKHSMIHPTSMGTRCSXVM

SEQ ID NO: 172125 - protein, 802 aa, Oryza sativa
  unsure (1)..(802): unsure at all Xaa locations
  Clone ID: PAT_MRT4530_70291C.1.pep
QSGHGGQPPMSPVGGAGCRAFVASLRNVRWPPRFRPXIPEKFDGSVTPAEFLQIYTPGIEAAGGDDRVMANFFPMVLKGQARAVLSSPQHYTVHPRTRGDLRVQGGXVRHNRMLEKIASKEPQTTAELFQLADRVARKEXACTWNSSGSGVAAPAVPGSAARSGRQDRRRKKRLAFSDDEGHVLTVEGASRATRKGRPASDRKKEAEAPSRERPTGKWCSVHNTSLHDLADCRAVKSLAERTRKWEEERRQERREGKAPAAPAGNRRGEAKQKAPAEDVDDGDDNLGFQEPQATVATVDGGACAHASRRSLKAMKRELLAAAPTHEATRRARWSEVALTFDQTDHPPCVARGGQIAMVVSPTICNVKLGHVLIYGGAALNILSPAAFDAIKAPGMVLQPSQPIIGVTPGHTWPLGHIDLPVTFGGSANFRTERVNFDVADLSLPYNAVLGRPALVKFMAAVHYAYLQMKMPGPGGPITVHGDLQVALACMEQRANQLAAASKPEGGDERLSASVPAAPRQRMITCDEVPVKKEDALVSFLRANADVFAWRPADMPGVPREVIEHRLAVRPGARPVRQKVRRQAPERQAFIREEVARLLEAGFIREVIHPEWLANPVVVPKANGKLRMCIDYTDLNKACPKDPYPLPRIDQIVDSTAGCDLLCFLDAYSGYHQIRMAREDEEKTAFITPIGTYCYTTMPFGLKYAGPTFQHTTRISLGSQLGRNVEAYVDDLVVKTRNQETLLSDLAETFESLRSARIKLNPDKCVFGVPAGKLLGFLVTARGIEANPEKIQAIERMRPPQQT

SEQ ID NO: 172126 - protein, 108 aa, Oryza sativa
  Clone ID: PAT_MRT4530_70292C.1.pep
MGAWAGGGNEDGEEDGRRDMGRRCRLIKKPTPKSSRGGWGGNGGRSRIWDRHRRAEQWRRWLPRRIRRRGGNGDCFYEIVEGSVICFGSLGVTGLGVKGNDSMFEPMH

SEQ ID NO: 172127 - protein, 1797 aa, Oryza sativa
  unsure (1)..(1797): unsure at all Xaa locations
  Clone ID: PAT_MRT4530_70293C.1.pep
VRGGPDARLNIERRRNGRRAAHATEDASSSGAPLRSGHGGXPPVSPVGSAGCRAFVASLRNVRWPPRFRPTITEKYDGSVNPAEFLQIYTTGIEAAGGDDRVMANFFPMALKGQARGWLMNLPPASVHSWEDLCQQFTMNFQGTYPRPGEEADLHAVQRRDDESLRSYIQRFCQVRNTIPCIPAHAVIYAFRGGVRHNRMLEKIASKEPQTTAELFQLADRVARKEEAWTWNSSGSGVAAPAAPGSAARSGRRDRRRKKRLAHSDDEGHVLAVEGASRATRKGRPASDKKKEAGAPSRERPTGKWCSVHNTSLHDLADCRAVKSLAERTRKWEEERRQERREGKAPAAPAGNRRGEAKQKATAEDVDDGDDDLGFQEPEATVATVDGGACAHASRRSLKAMKRELLAAAPTHEATRWARWSEVTPTFDQTDHLPCIARGGQIAMVVSPTVCNVKLGRVLIDGGAALNILSPAAFDAIKAPGMVLRPSQPIIGVTPGHTWPLGHIDLPVTFGGSANFRTERVNFDVADLSLPYNAVLGRPALVKFMAAVHYAYLQMKMSGPGGPITVHGDLKVALACMEQRADHLAAASKSAGGDERLSTSVPAAPRQRMITCDEVPVKQEDALVSFLRANADVFAWRPADMPGVPREVIEHRLAVRPGARPVRQKVRRQAPERQAFIREEVARLLEAGFIREVIHPEWLANPVVVPKANGKLRMCIDYTDLNKACPKDPYPLPRIDQIVDSTAGCDLLCFLDAYSGYHQIRMAREDEEKTAFITPIGTYCYTTMPFGLKNAGPTFQRTTRISLGSQIGRNVEAYVDDLVVKTRNQETLLSDLAETFESLRSARIKLNPDKCVFGVPAGKLLGFLVSARGIEANPEKIRAIERMRPPSKLRDVQCVTGCMAALSRFISRLGEKALPLFKLLKRSGPFTWTEEAERAFTQLKAYLSSPPVLVAPEPDEPLLLYLAATPQVVSVALVVERNEDNPHSAHPHPVSTRPGREQGGEAPEPNGGPRPPTAGAGPPPACPTVPGAPDPQDGPGATAGRPRLSPSDPEVVGTEAECAPRGLSDEERPGDAAPGEEDRPRRKVQRPIYFVSEALRDAKTRYPQAQKMLYAILMASRKLRHYFQAHRVTVVTSYPLGQILHNREGTGRVVKWAIKLSEFDLHFEPRHAIKSQALADFVAEWTPAPEPVSVLEASSGPSQLPHTAYWVMQFDGSLSLQGAGAGVTLTSLNGDVLRYLVRLDFRATNNMAEYEGLLAGLRVAAGLGIRRLLVLGVSQLVVNQVCKEYRCSDPQMDAYVRQVRRMERHFDGIELRHVPRRDNAVADELSRLASSRAQIPPGAFEERLAQPSARPDPLGETDAPERPPRPVGVQASGPEGSAPSSPRLIAWITEIQAYLADKTLPEDREGSERVQRISKRYVLVEGTLYRRAANGVLLKCIPREQGVELLADVHEGECGAHSASRTLVGKAFRQGFYWPTALNDAVDLVRRCRACQFHARQTHQPAQALQTIPLSWPFAVWGLDILGPFRRAPGGFEYLYVAVDKFTKWPEAYPVIKIDKHSALKFIRGITARFGVPNRIITDNGTQFTSELFGDYCEDMGIKLCFASPAHPRSNGQVERANAEILKGLKTKTFNILKKHGDSWIEELPAVLWANRTTPSRATGETPFFLVYGAEAVLPSELTLRSPRATMYCEADQDQLRRDDLDYLEERRRRAALRAARYQQSLRRYHQRHVRARSLCVDDLVLRRVQTRAGLSKLSPMWEGPYRVIGVPRPGSVRLAMGDGTELPNPWNIEHLRRFYP

SEQ ID NO: 172128 - protein, 41 aa, Oryza sativa
  Clone ID: PAT_MRT4530_70294C.1.pep
RSFCWWRKSVKQQRGNITCLDDLNNFFVLKFRSVVNIVWFA

SEQ ID NO: 172129 - protein, 82 aa, Oryza sativa
  Clone ID: PAT_MRT4530_70295C.1.pep
AFCPLGRFFLPQVPFFAGFVGGPPGRAPARVAFHLPPLGGVSPRACSPPCQVVPGPSGFWGCGPPYLYSWVNKGPPPLVCVL

SEQ ID NO: 172130 - protein, 127 aa, Oryza sativa
  Clone ID: PAT_MRT4530_70296C.1.pep
TGGHLRPFWEPVSLPRYERQQAWPPHALRSCRRIGRSPRRFPLLAGGARPPHRWCRSLISLLRERHLCGSPDGRAAVWPPSCVVTPAARLDALARHGFCLVRPPAYRQLKVPVARGLRQETFAGAFG

SEQ ID NO: 172131 - protein, 87 aa, Oryza sativa
  Clone ID: PAT_MRT4530_70297C.1.pep
MAKSELEVELGVNGLASCQVTDLFRLHLNWIPSTDNGTDATLEQRDHPHGRRKGSAFAVLEASATHAGASKFWTLVGWARARFASAP

SEQ ID NO: 172132 - protein, 282 aa, Oryza sativa
  Clone ID: PAT_MRT4530_70298C.1.pep
VFSAERRRKEEDGRRREKEKRKRKGERSDSHCCSLLATAAHFLMDPKLAASGFFDRYHGGDSLAATMAQEERRRPLSSSHRSLVACHLDPLAAPKLAPVAFSATAMGDTGQRPHHSTVGRVRYQRVGVADVIQPSIRAAHGAREKTRRTRPPACRPRRAPREGQIWPPDRPLSGRGTVELVTVIPAAHSVAIYPLAQCQCGRTVRRRYLVRGSCNILGTTKANGAFLLPNGLQSSFPSRILKAQASVRVLVYVRALHSDAMRYCDAAFIDYYLLPPSHKKPT

SEQ ID NO: 172133 - protein, 49 aa, Oryza sativa
  Clone ID: PAT_MRT4530_70299C.1.pep
ALLLLVVPLHPHSTSPSPEKTPRNDQKETDQQGRSLKEQPKPRSFYHLS

SEQ ID NO: 172134 - protein, 159 aa, Oryza sativa
  unsure (1)..(159): unsure at all Xaa locations
  Clone ID: PAT_MRT4530_7029C.1.pep
MAAAERRCGGSEAAAWRRRCGRGGGVARGGAVSAAARHRRGAAAAWRAAQRQHVAXRGGGVARRRRGSTAVACRGSVVASRRRRHCRHDVVAGGGRIEVGVGIVGAAESCLAATTSAAASATRRPAXEMRRRRRRRRRRLLRPRDDGEIRRRRRHWDAL

SEQ ID NO: 172135 - protein, 61 aa, Oryza sativa
  unsure (1)..(61): unsure at all Xaa locations
  Clone ID: PAT_MRT4530_702C.1.pep
PVDPLREAKSRVQEEIKRXFXAIMATGXVQAGEAAVLATRXVMERHGLRXXAXAGGGMQRG

SEQ ID NO: 172136 - protein, 75 aa, Oryza sativa
  Clone ID: PAT_MRT4530_70300C.1.pep
MASCASPRLKSLCHHPLFIILLALSLLQTITAEDEQEADRVAFLPGQPRSPQMSQFSGYITVNSQNGRALFYWFF

SEQ ID NO: 172137 - protein, 95 aa, Oryza sativa
  Clone ID: PAT_MRT4530_70301C.1.pep
PPPPPRGNKSICPIGVHQKRSRRSGSDSLLCSVDLGISHRTCSPGLLSIWRFFAASSPTTPGRGGAGRVGTARAAARGESRRRVQRQWIGFVAIR

SEQ ID NO: 172138 - protein, 63 aa, Oryza sativa
  Clone ID: PAT_MRT4530_70302C.1.pep
QSNRQHDQAKVNHEILRRLQATSRSKLPYFHLPESWPVLEPGMLVTVSPQLQRIDDDPRQLQN

SEQ ID NO: 172139 - protein, 103 aa, Oryza sativa
  Clone ID: PAT_MRT4530_70303C.1.pep
RGNKKIFWKQRKKNGGGPPPTQLHTYFQGGYFFLFLKKTKNGWEQTSPIYMTRTKGVKWQVWKKKPPLFFSPFKKKGGREKKKKIHWYFPPTFNGLGKKKIKG

SEQ ID NO: 172140 - protein, 41 aa, Oryza sativa
  Clone ID: PAT_MRT4530_70304C.1.pep
KRDSSKTGRDSQKAPAPLVDVAPNLSKMQKYPGRFAPPVIT

SEQ ID NO: 172141 - protein, 71 aa, Oryza sativa
  Clone ID: PAT_MRT4530_70305C.1.pep
GIVKDDSLMIKGCCVGPKKRVVTLRQSLLTQTSRLALEEIKLKFIDTASIFGHGRFQTSLEKMRFYNRVTK

SEQ ID NO: 172142 - protein, 57 aa, Oryza sativa
  Clone ID: PAT_MRT4530_70306C.1.pep
KLAPSTMRIKIIAPPERKYSVWIGGSILASLSTFQQMWISKEEYDESGPAIVHRKCF

SEQ ID NO: 172143 - protein, 163 aa, Oryza sativa
  Clone ID: PAT_MRT4530_70307C.1.pep
MAAHESSGLRPRERPGARGSALRSGGGVLRQAGASSYGGGGGYGDDGAGGCNDDDGADSCDDDNDDDQRQVGGLQSRGGQVARGRGAAGARRRGGLLAALDRRRPAPPPRRSRPPPSAEASDARRQPTVVRGLPQGGEAPPQETLHVGKVLIASISDGLIPPY

SEQ ID NO: 172144 - protein, 306 aa, Oryza sativa
  Clone ID: PAT_MRT4530_70308C.1.pep
MVVEEAVVAAGNEMSLSNMVLGFYEEAELQSSPPGDCAAAAGDDDDGSDDEGSGGAAKCRAFWKEQQSQLYEALAKMSSAESRIQADAEEAMRQMRAAAAGACSCASRGAAAAAAGSGGCRSCTLRFLAERLRDAGYNSAICRSKWPRSPEIPSGEHSYVDVVAPTRSGKAVRVVVEPSFRGEFEMARGGAGYRALVASLPEAFVGRADRLRGVVRVMCAAAKQCARESGMHMAPWRKQRYMEAKWLATPERVAPPGNAGGAGDAVAVGSPSSPLSPGMTNRQMQPKFRASMLTLDFGGRTAVEVV

SEQ ID NO: 172145 - protein, 39 aa, Oryza sativa
  Clone ID: PAT_MRT4530_7030C.1.pep
SENNEQSQTQGEYLCIQICRQLSITEYTIYSNKVSILYN

SEQ ID NO: 172146 - protein, 56 aa, Oryza sativa
  Clone ID: PAT_MRT4530_70310C.1.pep
FLQAYIQNLESSRLKLTQIEQELQRARQQGIFISTSSDQSHSASGNGNSVLTFLFF

SEQ ID NO: 172147 - protein, 63 aa, Oryza sativa
  Clone ID: PAT_MRT4530_70311C.1.pep
MSSVPMTPDADILALRGNYVAIMKGSMPLARDPFTSRLLGNEGFNAIAIDTEMLDLGAVRCIP

SEQ ID NO: 172148 - protein, 1910 aa, Oryza sativa
  unsure (1)..(1910): unsure at all Xaa locations
  Clone ID: PAT_MRT4530_70312C.1.pep
MAHNLSPSASGDDGEQNPRRRARTPPSPSRRSLEREEALERVERSATSPLAGDGEGRRDGERRLLVYGDGSTPQGALQAAGAFLRHPPVVPDPETPARRWLDDVADLVMTAQQRLGAGRRSSVTKASGAATTGSASSRRRARRAAAVTRRSSAIPSSTPPTQEDVRGGPDARLNVERRRNGRRAAHATEGASSSGAPLWSGHGGQPPVSPVGGAGCRAFVASLRNVRWPPRFRPTITEKYDGSVNPAEFLQIYTTGIEAAGGDDRVMANFFPMALKGQARGWLMNLPPASVHSWEDLCQQFTMNFQGTYPRPGEEADLHAVQRRDDESLRSYIQRFCQVRNTIPCIPAHAVIYAFRGGVRHNRMLEKIASKEPQTTAELFQLADRVARKEEAWTWNSSGSGVAASAAPGSAARSGRRDRRRKKRSAHSDDEGHVLAVEGASRATRKGRPASDKKKEAGAPSRERPTGKWCSVHNTSLHDLADCRAVKSLAERTRKWEERSEAKQKAPAEDIDDGDDGLGFQEPEATIATVDGGACAHASRWSLKAMKRELLAAAPTHEATRRARWSEVALTFDQTDHPPCVARGGQIAMVVSPTVCNVKLGRVLIDGGAALNILSPAAFDDIKAPGMVLRPSQPIIGVTPGHTWPLGHIDLPVTFDGSANFRTERVNFDVADLSLPYNVVLGRPALVKFMAAVHYAYLQMKMPGPGGPITIHGDLKVTLACMEQRADHLAAASKPAGGDERLSTSVPAAPRQRMITCDEVPEDALVSFLRANADVFAWRPADMPGVPREVIEHRLAVRPGARPVRQKVRRQALERQAFIREEVARLLEAGFIREVIHPEWLANPVVVPKANGKLRMCIDYTDLNKACPKDPYPLPRIDQIVDSTAGCDLLCFLDAYSGYHQIRMAREDEEKTAFITPIGTYCYTTMPFGLKNAXTRNQETLLSDLAETFESLRSARIKLNPDKCVFGVPAGKLLGFLVSARGIEANPEKIRAIERMRPPXKLRDVQCVTGCMAALSRFISRLXEKALPLFKLLKRSGPFTWTEEAERALTQLKAYLSSPPVMVAPEPDEPLLLYLAATPQVVSAALVVERDEDNPHSAHPHPVSTRPGREQGGEAPESNGGPRPPTAGAGPLPACPTVPGTPDPQDGPGATAGRPRLSPSNPEVVGTEAECAPRGLLDEERLGDAAPSEEDRPRRKVQRPVYFVSEALRDAKTRYPQAQKMLYAILMASRKLRHYFQAHRVTVVTSYPLGQILHNREGTGRVVKWAIELSEFDLHFEPCHAIKSQALADFVAEWTPAPEPVSDPEASSGPSQLPYTAYWVMQFDGSLSLQGAGAGVTLTSPSGDVLRYLVRLDFRATNNMAEYEGLLAGLRVAAGLGIRRLLVLGDSQLVVNQVCKEYRCSDPQMDAYVRQVRRMERHFDGIELRHVPRRDNAVADELSRLASSRAQTPPGAFEERLAQPSARPDPLGETDAPERPPRPVGVQASGPKGSAPSSLRLIAWIAEIQAYLTDKTLPEDHEGSERVQRISKRYVLVEGTLYRRAANGVLLKCIPREQGVELLADIHEGECGAHSASRTLVGKAFRQGFYWPTALNDAVDLVRRCRACQFHARQTHQPAQALQIIPLSWPFAVWGLDILGPFRRAPGGFEYLYVAIDKFTKWPEAYPVIKIDKHSALKFIRGITARFGVPNRIITDNGTQFTSELFGGYCEDMGIKLCFASPAHPRSNGQVERANAEILKGLKTKTFNILKKHGDSWIEELPVVLWANRTTPSRATGETPFFLIYGAEAVLPSELTLRSPRVTMYCEADQDQLRRDDLDYLEERRRRAAFLPLRSYRSLPXXHHXHVPARSLCVDDLVLRRVQTRAGLSKLSPMWEGPYRVVGVPRPGSVRLATGDGTELPNPWNIEHLRCFYP

SEQ ID NO: 172149 - protein, 110 aa, Oryza sativa
  Clone ID: PAT_MRT4530_70313C.1.pep
MTPSSTNTPSTRETLCMDMWQWVFLLDYRGVHLLLFRNHGTTVKLAVTDPSRRACYPINVPTTDILVGLLSCHRRSLVHALAHHTPCIRGSSSRGRMGAVQNSTFEYLGY

SEQ ID NO: 172150 - protein, 67 aa, Oryza sativa
  unsure (1)..(67): unsure at all Xaa locations
  Clone ID: PAT_MRT4530_70314C.1.pep
TRRGXXXSGXXRPXQRGRXGTAXGGXSAGLPRXXXXEXXRLAWXTXXXRAXXAIGAVXCGRPVXVXV

SEQ ID NO: 172151 - protein, 76 aa, Oryza sativa
  unsure (1)..(76): unsure at all Xaa locations
  Clone ID: PAT_MRT4530_70315C.1.pep
LVSGLVAEHQGLLNLASPRWLDPLVLLVSWQLWKERNARVFDSALSSISVVLESIHSEGXLWSLAGVAAFGDLLGV

SEQ ID NO: 172152 - protein, 66 aa, Oryza sativa
  Clone ID: PAT_MRT4530_70316C.1.pep
QFGDDKMSIVVSNAEKKLVHCKHYSNHSCKDDLRRATHVYLAVELTSQNFASLMACRGARLSLSNL

SEQ ID NO: 172153 - protein, 573 aa, Oryza sativa
  Clone ID: PAT_MRT4530_70317C.1.pep
MGRVGLGVAVGCAAVTCAIAAALVARRASARARWRRAVALLREFEEGCATPPARLRQVVDAMVVEMHAGLASDGGSKLKMLLTFVDALPSGSEEGVYYSIDLGGTNFRVLRVQVGAGSVIVNQKVEQQPIPEELTKGTTEGLFNFVALALKNFLEGEDDQDGKMALGFTFSFPVRQISVSSGSLIRWTKGFSIRDTLVVLVNIVNFSMVQARVFVAAGIAVFASDDPSSGGASAIANCMGEGYPKMAPAPANKDPPAALLQGRLSQRKQVGRDVAQCLNEALANCGLNVRVTALVNDTVGTLALGHYYDEDTVAAVIIGSGTNACYIERTDAIIKCQGLLTNSGGMVVNMEWGNFWSSHLPRTPYDILLDDETHNRNDQGFEKMISGMYLGEIARLVFHRMAQESDVFGDAADSLSNPFILSTPFLAAIREDDSPDLSEVRRILREHLKIPDAPLKTRRLVVKVCDIVTRRAARLAAAGIVGILKKLGRDGSGAASSGRGRGQPRRTVVAIEGGLYQGYPVFREYLDEALVEILGEEVARNVTLRVTEDGSGVGAALLAAVHSSNRQQQGGPI

SEQ ID NO: 172154 - protein, 79 aa, Oryza sativa
  Clone ID: PAT_MRT4530_70318C.1.pep
MAARWRIGSSGSGLQARERPGLAGSCLADGGGLICRHWALNGRIRGHRPRDGRRWTAATRSASVGPAAADSTATELATS

SEQ ID NO: 172155 - protein, 207 aa, Oryza sativa
  Clone ID: PAT_MRT4530_70319C.1.pep
MGSCGGAARAAGSAVTVGKLVKLLLVLALVVSAAAAHGADAARAVPGTGSASAGRGGGGAGARSLLSRPQPSCCTHDGNTVGTGCCPGKRHRRQRWLVLLEARGLVAIPCVDPKPPTAAVTSAFGDIFPVVGGSDDDDGRRFIKQVADLNAPPEILLQPNTAAKLCACDQFNGAARQHHGSDTDAFQYPVQSAGSGGPMIISDSLGE

SEQ ID NO: 172156 - protein, 68 aa, Oryza sativa
  Clone ID: PAT_MRT4530_7031C.1.pep
MEVDKWPPLKGGLVTLQGTSYGTAPIKPAFPGDPMFPGVHCSRLRRDNDVPWPSPRVLSQQYQRTSKN

SEQ ID NO: 172157 - protein, 52 aa, Oryza sativa
  Clone ID: PAT_MRT4530_70320C.1.pep
IKTGRLAMFSMVGFLEQTLVPDKGPLEVLDDHLVDTVVINAWAWTANFVYGK

SEQ ID NO: 172158 - protein, 124 aa, Oryza sativa
  Clone ID: PAT_MRT4530_70321C.1.pep
PLHGGGPCGHPPPGGPPGNSLPKRVGPGLSDYPGPEAHPEQAGFKGGGCFPPPALLGIIGGVTFPLQFGGPRVLSGPRPGIPGPSGGPPLSQGPIRRPPPYWGSGPKKKKKKPKGGNPHPKKTK

SEQ ID NO: 172159 - protein, 38 aa, Oryza sativa
  Clone ID: PAT_MRT4530_70322C.1.pep
MGNYIERGHLFSLSDSTNLKIHNYENGEIKVTQIEKFI

SEQ ID NO: 172160 - protein, 83 aa, Oryza sativa
  Clone ID: PAT_MRT4530_70323C.1.pep
PCRDREIVVAPAVAGAAGNGPRLSSLPRAAGGGRGHHRTPVLAVCGGDVVRCRGWGLCGLVRQQVAAVFDVGCVCLPCVDSNF

SEQ ID NO: 172161 - protein, 467 aa, Oryza sativa
  Clone ID: PAT_MRT4530_70324C.1.pep
FATPGLVVGGSASPPRLSSIVVQATPDLGEEREGRGAEKLADLDRATSPSTTPSRTGPCSPAYSDTDNSTTDDDVASMGKALDADQLRVAYIQKRLAGDTGDGADPHKFVEGGDTHVVSSLQTTATTNSAPDGTSAVSQTVIIDSGSDVPWVQCQPCPLLVCHPQRDPLFDPATSTTYAAVPCSSAACARLGPYRRGCLANSQCQFGITYANGATATGTYSSDDLTLGPYDVVRGFLFGCAHADQGSTFSYDVAGTLALGGGSQSFVQQTASQYSRVFSYCVPPSTSSFGFIMFGVPPQRAALVPTFVSTPLLSSSTMSPTFYRVLLRSIIVAGRPLPVPPTVFSASSVIDSATVISRIPPTAYQALRAAFRSAMTMYRPAPPVSILDTCYDFSGVRSITLPSIALVFDGGATVNLDAAGILLQGCLAFAPTASDRMPGFIGNVQQRTLEVVYDVPGKAIRFRSAAC

SEQ ID NO: 172162 - protein, 409 aa, Oryza sativa
  Clone ID: PAT_MRT4530_70325C.1.pep
MGKALDADQLRVAYIQKRLAGDTGDGADPHKFVEGGDTHVVSSLQVATGAGIGQKPHLTTTRLGTTATTNSAPDGTSAVSQTVIIDSGSDVPWVQCQPCPLLVCHPQRDPLFDPATSTTYAAVPCSSAACARLGPYRRGCLANSQCQFGITYANGATATGTYSSDDLTLGPYDVVRGFLFGCAHADQGSTFSYDVAGTLALGGGSQSFVQQTASQYSRVFSYCVPPSTSSFGFIMFGVPPQRAALVPTFVSTPLLSSSTMSPTFYRVLLRSIIVAGRPLPVPPTVFSASSVIDSATVISRIPPTAYQALRAAFRSAMTMYRPAPPVSILDTCYDFSGVRSITLPSIALVFDGGATVNLDAAGILLQGCLAFAPTASDRMPGFIGNVQQRTLEVVYDVPGKAIRFRSAAC

SEQ ID NO: 172163 - protein, 287 aa, Oryza sativa
  unsure (1)..(287): unsure at all Xaa locations
  Clone ID: PAT_MRT4530_70326C.1.pep
GRRRAGVEASAADGGWAXGWRRAGAEEAAGGGRGAEASDGXWRRRHWAXGGREAGRRARDEAAASGGRGAEGDPYPGGGSRTRGRVLLGGTHLILAHQSRXRLHRLWKVTLAPCRRPEGGRQIVETVSHRPSMXPGGLCLHCRPPSAHPLWPAWPPPPSPSAVVLEPPPPPANGSAPARCRPYLTAATLLRRLRLRAAVRAAVXRRPRRLHVPTARPRCARCAPAFSVPASCRPRLLDHRPPPPPPPPVASLAPTRRPLPPPSPPVAGFSSSPAAADPPEREEKEGI

SEQ ID NO: 172164 - protein, 57 aa, Oryza sativa
  Clone ID: PAT_MRT4530_70327C.1.pep
AFRELDIRKRLKMICFLSFRVSKINIVVVVVIKISVFWEIFLCNFNCLFFQYRFYDI

SEQ ID NO: 172165 - protein, 75 aa, Oryza sativa
  Clone ID: PAT_MRT4530_70328C.1.pep
MEESTASADGDAPPRSRIENDKKSFDSFVLEASDFSVIKDGAAGVIAGGARVEGAADSAEADVVGEGREVEEHEP

SEQ ID NO: 172166 - protein, 196 aa, Oryza sativa
  unsure (1)..(196): unsure at all Xaa locations
  Clone ID: PAT_MRT4530_70329C.1.pep
TKKGRKKKRRTKSVRSKKSEKKEKEKRIRFRGKKRAKRNKKEICLIPKKRAQKKPGEKNDQPIKRIRVDAVKKRAKNKXKKNKSVGLKKRIMLKNKRNFRRPLGKKSDKNKRSEKKVRLLRWKTERKNKKRREKKTSIAKKKMSDSKKNPTPRWRKIKARKNKKREKKTSTIKKKKKTSYIPARVMKRQPKQKKQN

SEQ ID NO: 172167 - protein, 346 aa, Oryza sativa
  Clone ID: PAT_MRT4530_7032C.1.pep
MGPTRQPHPRARAADGWAPRGGHTARPEAATTVQPAGGGARAPMVAGGGHRHGGVAAEREEGKGEKRRRSTAHPGSTATTKEAAGAEEGGSAARVDGDDGAPAVGELGEVVDGVGGDAAKPEKATPRREMVPASGEGRPEVVGDGGERGRRRELVSGEETGNSYVVNIIIRDLVPAEPWWYIACSICKRGTAREGNAYKCPRCSTDAIETRYRVAIMGIDPSDLANDQAKAAEFTFFGEIGEQLIGRPVLNLVASVHGARDIVPPEIKAIFGRQYVIRTSVSRGSLQRNRVSYQVIAIAQLDKKHKSSTADENLGHGGSSPDEHDCRKPSVVRTLFVHKLPPEPPK

SEQ ID NO: 172168 - protein, 39 aa, Oryza sativa
  unsure (1)..(39): unsure at all Xaa locations
  Clone ID: PAT_MRT4530_70330C.1.pep
XKDHYEGPNGKQFFRGKPTFFKWGKGRSKHAQTILLACM

SEQ ID NO: 172169 - protein, 38 aa, Oryza sativa
  Clone ID: PAT_MRT4530_70331C.1.pep
MFKSPAQWTLSSDKHYFMGINISAGTDCTMNRASHAWN

SEQ ID NO: 172170 - protein, 300 aa, Oryza sativa
  unsure (1)..(300): unsure at all Xaa locations
  Clone ID: PAT_MRT4530_70332C.1.pep
MAVTRVAVHSGPSPRTGEGGGTRRGADVAPTWRTRGGHMARHAGGRTDGPDLPESRSDGGGEHAAGTHGRPKPARWPRCTAALPQGGGGRQRXPTASGGGATARVMLAAAKQLGGSAATKRRGREREEGEEVSHRRRLMTASDGGRXRQRDELWNHLANTMKGVREXSKMEEGEDAGRRRWPWRXHRRKARSGFRRRNPTGEGRTGXPARRRTXRRRRRGSAQRLAAASSDRSGGGGGGKEGDSARAIEGTGELAKWRKRERGEWGCLNRGEGARTWLGEAGIASRRGVVGEEREAGFEN

SEQ ID NO: 172171 - protein, 96 aa, Oryza sativa
  Clone ID: PAT_MRT4530_70333C.1.pep
MGLGSKGLGHTMKNDRIICFFAREFGDRIGWRYRGIDRYIDDEREKLEASWASFPGAHSSSPLSGISAGGSPRICLFHSRNQPIQRRRSLHASRLP

SEQ ID NO: 172172 - protein, 792 aa, Oryza sativa
  unsure (1)..(792): unsure at all Xaa locations
  Clone ID: PAT_MRT4530_70334C.1.pep
MGVFDRLPPMDRLRSEKMCFVQLIIPAESARLAVTYLGELGLLQFKDLNEDKSPFQRIFVNQVKRCSEMSRKLRFFNDQINKAGVYSSVRTAMQPDIDLEELDAKERDNXYDHHDMKSICAKIIFTCNGFTDSPIAFSGPREIDPSFRTNLTSVESXITSTXYNLSTSNGNTHLNLXLGAVTNTASYLRLWALRFAFNVXEMAFERMLLRATRGNMFFNQAPAGEPVTDPISGEEAKAKILKICGSFGASCYPVPEEMVKQRQIFREVSGRLADLEATLDAGIQHRNKALESVGSQLWRWTIMVKKEKAVYDTLNMLNFDVTKKCLVGEGWCPIFAKSQIKDVLQRATLHSNSQVGIIFHEMDTIDSPPTYFQTDKFTNAFQEIVDAYGIARYEEANPAVYSVITFPFLFAVMFGDWGHGICLLLGACVLILREKKLSSQKLGSFMEMAFGGRYVILLMALFSIYCGLIYNEFFSVPFHIFGKSAYECREKTCSDAHTAGLIKVRDPYPFGVDPSWRGSRSELPFLNSLKMKMSILMGVTQMNLGIVLSYFDAKFHGNALDISLFGYLALLILIKWCTGSQADLYHVMIYMFLDPSGNLGENQLFWGQKELQILLLLMAIVAVPWMLFPKPFILKKLHKERFQGHTYRFLGTSEMDPDSEPDSARSRHDDFNFSEVFVHQMIHSIEFVLGAVSNTASYLRLWALSLAHSELSTVFYEKLLVLAWGYDNLVVKLVGLVIFSFATAFILLGMESLSAFLHALRLHWVEFMNKFYHGDGYKFRPFSFALLADDED

SEQ ID NO: 172173 - protein, 263 aa, Oryza sativa
  unsure (1)..(263): unsure at all Xaa locations
  Clone ID: PAT_MRT4530_70335C.1.pep
RPSLKMKMSILMGVTQMNLGIVLSYFDAKFHGNALDIRYQFIPQMIFLNSLFGYLALLILIKWCTGSQADLYHVMIYMFLDPSGNLGENQLFWGQKELQILLLLMAIVAVPWMLFPKPFILKKLHKERFQGHTYRFLGTSEMDPDSEPDSARSRHDDFNFSEVFVHQMIHSIEFVLGAVSNTASYLRLWALSLAHSELSTVFYEKLLVLAWGYDNLVVKLVGLVIFSFATAFILLGMESLSAFLHALRLHWVEFMNKFYHXDG

SEQ ID NO: 172174 - protein, 66 aa, Oryza sativa
  unsure (1)..(66): unsure at all Xaa locations
  Clone ID: PAT_MRT4530_70336C.1.pep
YGYGYFLSDTNTNMVSGFLSDTYNNSDIXKKYFRIRVQSYLILIRIXDSPYLFQYPAKKNENKYGM

SEQ ID NO: 172175 - protein, 118 aa, Oryza sativa
  unsure (1)..(118): unsure at all Xaa locations
  Clone ID: PAT_MRT4530_70337C.1.pep
VVGKFLFFRFWVLGFGVGCIQEPTTCFQVTCTRCLQNXGKRKKGAGVKERSLNCGVPPQIQANAGRRDQDTQGGPHHPPKGPEGTRGRKLTRVGNRPAGGQKPPGPPGKKKRRGQANN

SEQ ID NO: 172176 - protein, 78 aa, Oryza sativa
  Clone ID: PAT_MRT4530_70338C.1.pep
MWQIPLCVLVGSLRAGRKREDSAEVVVAWWRGRLEFVQMWLPGQVPRSVWGEVEKAQMGIPCVRRVTALALTQGQAVI

SEQ ID NO: 172177 - protein, 62 aa, Oryza sativa
  Clone ID: PAT_MRT4530_70339C.1.pep
PTGPGLFSPKDHITGKFLPPKMGFFPPPTLSGSKGLAFSPLIRYFNWKGFKKKKATLFFITP

SEQ ID NO: 172178 - protein, 286 aa, Oryza sativa
  unsure (1)..(286): unsure at all Xaa locations
  Clone ID: PAT_MRT4530_7033C.1.pep
MTSPTAAAARRSGRLGRRTLAGERRHXDANGGHRHVEDNAANTPVTKTAAEEQRTTTATRRKRRKPSGXRRRRSSGDLRRWRRGGRGRRRDGEHYGGLPERRRRLKRRRRTAGAAAATAKLGHTALEFFRRREAKARVATGRGDTGEAFKGARRRRRRPTAAATAKESSRLEGKRXDPNRTRIHRFPNRSSRSFQRRKGRGDPEDHFPSFDSAGEGKERPNLERNGGGGALGFRPGDGGSGKTNLTSGTHLSATARARXLRTGPTWAEERESGFGPTFGPKPKEDF

SEQ ID NO: 172179 - protein, 253 aa, Oryza sativa
  Clone ID: PAT_MRT4530_70340C.1.pep
GAFTALEEFLYEHLKIGWEFSVLSPNIPWEVEDIWRTFAAYFFIFHIPFSFGGLGVVAELLHCPSLDPLTTVSSTVVLQLTELTLALALLQYSTKKDHKLWAFFQGKLYPQHSWVKETVLGLIFLMTVVSLTTVVADRLIGLEDTYDPMLREILSDSPTSRLLCVFLYCVIAPLSEETIYRGFLLTALSSSMKWKDAVIVSSLMFSIAHFSINNSFQLFVIGCITGLAYSRTGTLAAPLTIHSLYNAAILHMT

SEQ ID NO: 172180 - protein, 41 aa, Oryza sativa
  Clone ID: PAT_MRT4530_70341C.1.pep
TLMMHIMIKLLISMEISGNKDGAWDIVYHDWLDEASMLMTD

SEQ ID NO: 172181 - protein, 798 aa, Oryza sativa
  Clone ID: PAT_MRT4530_70342C.1.pep
MRLPPVRFLPSSAAPAVVAANARIAHLARAGNIEGARAAFEAMPLRTTASYNALLAGYFRNRLPDAALGLFRRMPSRDLASYNALISGLSLRRQTLPDAAAALASIPFPPSVVSFTSLLRGYVRHGLLADAIRLFQQMPERNHVSYTVLLGGLLDAGRVNEARRLFDEMPDRDVVAWTAMLSGYCQAGRITEARALFDEMPKRNVVSWTAMISGYAQNGEVNLARKLFEVMPERNEVSWTAMLVGYIQAGHVEDAAELFNAMPEHPVAACNAMMVGFGQRGMVDAAKTVFEKMCERDDGTWSAMIKAYEQNEFLMEALSTFREMLWRGVRPNYPSVISILTVCAALAVLDYGREVHAAMLRCSFDMDVFAVSALITMYIKCGNLDKAKRVFHTFEPKDIVMWNSMITGYAQHGLGEQALGIFHDMRLAGMSPDGITYIGALTACSYTGKVKEGREIFNSMTVNSSIRPGAEHYSCMVDLLGRSGLVEEAFDLIKNMPVEPDAVIWGALMGACRMHRNAEIAEFAAKKLLELEPGNAGPYVLLSHIYTSVGRWEDASKMRKFISSRNLNKSPGCSWIEYDKRVHLFTSGDVLAHPEHAAILRILEKLDGLLMESGYSADGSFVLHDIDEEQKSHSLRYHSERQAVAYGLLKIPEGMPIRVMKNLRVCGDCHSAIKLIAKITSREIILRDANRFHHFKDGFCSCRDYWIQVSKRPFDREVHHPLQANCIWSIVLSRSWVWSGVVKLSKSSCTSLVHFVRALQPAPPEAPLPFRVELKPFDWAPAPGEVELEPKLCQTDPK

SEQ ID NO: 172182 - protein, 204 aa, Oryza sativa
  unsure (1)..(204): unsure at all Xaa locations
  Clone ID: PAT_MRT4530_70343C.1.pep
TRSGQHRYCALSLGGCQLNFMVAIDFTASNGNPXLPDSLHYIEPTGRPNGFWHAVLETXDALQCYDPAKRFPLWGXFGARPIDXPVSYFHCFNLNGSIYQPEVEGTQGIMSVYISALRNVSLAXPTLFCPVISTTTAIANQSLAMNQQKYFVLLIVTGGAMTDLQETIDTIIKASDFPSSILVAGVGGADGNGDNGTGKLLAII

SEQ ID NO: 172183 - protein, 66 aa, Oryza sativa
  unsure (1)..(66): unsure at all Xaa locations
  Clone ID: PAT_MRT4530_70344C.1.pep
EYFYWILSXSEILPQHIYAYYYFFYKISYDYSKKKISQHIVDIAYCNLYKILTYIFILKEYLVEEQ

SEQ ID NO: 172184 - protein, 160 aa, Oryza sativa
  unsure (1)..(160): unsure at all Xaa locations
  Clone ID: PAT_MRT4530_70345C.1.pep
MATMKAKAEDAASSAKAGVHKAKATAGEKVEKATTGDPLKKREAXERKEDRKLEAESDERVEKEGHADEKSGKHTFTTATGPSPTAGPFLGFPTSTLGRPGLARPGRHGMARSLVDRVWAGGRWSSSWAGTARHEVETSSWAGTAQHEVVTVPCRAGLMG

SEQ ID NO: 172185 - protein, 73 aa, Oryza sativa
  Clone ID: PAT_MRT4530_70346C.1.pep
MKNLLLVGVSVTIWAICKTRNKACFDNILPKDPIENLEANGRKLELGARVVKQVASDVFNSRYGWRPCVKRLE

SEQ ID NO: 172186 - protein, 113 aa, Oryza sativa
  Clone ID: PAT_MRT4530_70347C.1.pep
MERNMEHLERDVQIKMEGEDEPNSTVPKALIPLDGNWMPDLLSGEDNYRFGGNLTHKIWLLIKTMQTLQSQHNVSFGYQPCRNLIDLTRTVILTCESKNTSKNKKNRNSILDE

SEQ ID NO: 172187 - protein, 151 aa, Oryza sativa
  Clone ID: PAT_MRT4530_70348C.1.pep
MAAAHFVFVPLMAQGHLIPAVDTALLLATHGVLCTVVATPATVARVRTHRRIGPTVHLEAVLEEKSGELAFPRTRQVFMLNNTHAIVRHAVRSNLAMFLPSGWARAWEERMEGYVKSYLDMSWAPIVSRLAAGAATTAATKPATVSVLRRQ

SEQ ID NO: 172188 - protein, 61 aa, Oryza sativa
  unsure (1)..(61): unsure at all Xaa locations
  Clone ID: PAT_MRT4530_70349C.1.pep
PFESQHDEYGCPQCFAPKNRYAXXDAPTRRAIGGTQTQRTVFVSLKVGTAAVWALFVYGLR

SEQ ID NO: 172189 - protein, 382 aa, Oryza sativa
  Clone ID: PAT_MRT4530_7034C.1.pep
MLATAFQKSQNGNSPAGETNVQALTVKHQCKLSEFLKTGLPTFAIAVDPMEASDWLRTIEKKLGLIQCTDQERVGFATHQLVGPASEWWDSYEASRPEGHTITWNEFSSVFKRSHVPAGMITLRKREFRYLKQGDLTVTEYLHEFYRLAHYAPEDVETDEDKQEKFLQGLKDELAVQLLLEDYEDFEKLVDKAMQLESEHNRMTNCKRRIVNIPVIPCGNQRQRTEPLQITGSSVVHQEFLPQEDGRNTDNNPSNTNGDDTTNNHGSCPISDHSNQACNFDTEKDSNCDSNYGTTDANVSKDFQPPIPTPSQNDRSQTDNSAKKTLICYNCKEPGHFSRDCPQPKRNLRHHSGHYARRRQVTRLVVTGANAVPVRPHVNSNP

SEQ ID NO: 172190 - protein, 455 aa, Oryza sativa
  Clone ID: PAT_MRT4530_70350C.1.pep
MAGVGVVVDPEAVGGGGDGGGDGRMKEGLARRAVENLRFRSVWGEVNGAMGDLGTYIPIVLSLALSRQLDLGTTLVFTGIYNAITGLLYGVPMPVQPMKSIAAAALADPSFAIPEIMAAGILTAAFVLFLGLTRLMDLVYRFVPLSVVRGIQLAQGLNFAMAAVKYIRYEQDLGKGKSLGRRPWVGLDGLVLAIAAVCFIVLVNGAGEEQEQRQQQQQQQQWWRRRLGSVPSAVVVFVVGVAFAVARHPAAVRELRAGPSRMRVVHISREAWKQGFIKGALPQIPLSVLNSVVAVCKLTRDLFPERKESPTSVSVTMGAMNLVGCWFGAMPCCHGAGGLAGQYKFGGRSGGCVAALGVLKLALGLLLGGSMLRVLVQFPVGLLGALLLFAGVELAAAARDMSTRAEAFVMLLCTAVSLVGSSAALGFLCGMLAHALLYLRACALRERIVSSQTDL

SEQ ID NO: 172191 - protein, 65 aa, Oryza sativa
  Clone ID: PAT_MRT4530_70351C.1.pep
FGTRPRAEFGTRLSYCLPTYFCNIMGLPVFSSPQTRGVASVAFLAGSLSFFWLLFPATSPKLYNS

SEQ ID NO: 172192 - protein, 101 aa, Oryza sativa
  Clone ID: PAT_MRT4530_70352C.1.pep
MVLCCAMGLGQLTARLGAQWHQQYLPPVARSLPIQGIVILWSRDIPQVSPYVYFGPTLLQIKMVRHLNTLVACDAATSHHPAATLGEDNFLGKMGVRVFHH

SEQ ID NO: 172193 - protein, 56 aa, Oryza sativa
  Clone ID: PAT_MRT4530_70353C.1.pep
MDRRLETTVVGGEAGGWGRAPWTESAVQEARSRQEDRAGGRGEKGHGKGGAWTGCI

SEQ ID NO: 172194 - protein, 76 aa, Oryza sativa
  Clone ID: PAT_MRT4530_70354C.1.pep
KKKASTNSNYLAAATTHARCNAIRYHTSPSRFIMQWCPLITRTDPGQQLILHLNLACHTVACTSTNRVVFPKNFTC

SEQ ID NO: 172195 - protein, 269 aa, Oryza sativa
  Clone ID: PAT_MRT4530_70355C.1.pep
MLDPRSEIYPTIAYRPIQPSDLEVLENIHLALFPIRYEREFFLNVVNGNGIISWGAVDTSRSDDRRDELIGFVTTRIIAAQDSEIEDLFRYNSSRKDLTLLYILTLGVVESYRNLGIGCYLLVQLSFTVCDYDLINPHKHSRLQHPHWSERGVYLHVISYNQPAISFYNKMLFKLVRRLPHFYYIRGQHYDSYLFVYYVNGGRSPCSPLEVITSFVVDFRAFLKMVVARFWNKEERSTPRWSRCKESTTLLVSQNNKRIIGGDDTRCHV

SEQ ID NO: 172196 - protein, 28 aa, Oryza sativa
  Clone ID: PAT_MRT4530_70356C.1.pep
IYLLQPWSLYNLNIGKYFHFNPNTAGII

SEQ ID NO: 172197 - protein, 59 aa, Oryza sativa
  unsure (1)..(59): unsure at all Xaa locations
  Clone ID: PAT_MRT4530_70357C.1.pep
IKYGPLAMFSMFGFFVQAIVCGKGLLXNLAGRLHDPVHNNGWAYAASFVPVLVKWGTVA

SEQ ID NO: 172198 - protein, 127 aa, Oryza sativa
  unsure (1)..(127): unsure at all Xaa locations
  Clone ID: PAT_MRT4530_70358C.1.pep
RLSDDRRDELIGFVTTRIIAAQDSEIEDLFRYNSSRKDLTLLYILTLGVVESYRNLGIASSLVREVIKYAASISNCRGVYLHVISYNQPAISFYNKMLFKLVRRLSHFYYIRGQHYDSYXFVYYVNG

SEQ ID NO: 172199 - protein, 66 aa, Oryza sativa
  Clone ID: PAT_MRT4530_70359C.1.pep
MAMGSIKVQAVILTYVLLAVLLHPLLCQGSPAASLLEAQTSDGKTIDQGIAYILMIVALVVTYLVG

SEQ ID NO: 172200 - protein, 2029 aa, Oryza sativa
  unsure (1)..(2029): unsure at all Xaa locations
  Clone ID: PAT_MRT4530_7035C.1.pep
MSPSSTWRPPDLRYKRDSLGGPXGIESHSQHHPHSLRNPCTNVPQYPLYPVYGYHPSTVARQVGGLGAQGSTTMSSSFVDNSVNTNLNHGFPASTMLVWTQVGEIVFPVYTTIPISAGPSMTGNENAVVATQDDSVSKDPPAEAENRTSTTSKLEKDSNAAEPCCSDKNHEPTRTTSEATRSWCPIHKTRKHTLQACWVFLNVRAEIRACNERGIQRISPTRDVYCPIHKTKNHDLSSCKVFLSATKTSPPKDQQSGISLRDEDKEQRTLVSDRFVGVIDIDSHEPSVLHLLEDYSSSPTSTPREVLAIDGTSTSAHANAEAENQVTTPAQHIRTLNTILRERPYDPVLNNDLAWWQERLRESVTNLSHAFKEAAAATHREQPPTGGVDGENPEQRESPHQATPPPRGTGDLRDHLNGRREARRMRDDGNRSQHRVSSRHHRDRANRHNRHDHDDRERRTQGDTGRGRRHNDEDDGDRRRDNNGGRRQDSREPSRRPRNPTPEPSDSSSSSSSYSSSSSDRHPRRTHDRRQPTAPSAGCRAFGRSLCDVRWPEIFRPGAIEKYDGSTDPEEFLQVYSTVLYAAGADDNALANYLPSALKGSTRSWLMHFPPYSISLWADLWQQFIANFQGTYKRHAIEDDLHALTHNSGESLREFVRRFNECRNTIPEITDASVIRAFKSGVRDRYTTQELATRRITTRVKXRKSGKRKAQAEVLAAEYANPSKCLDPQGSDAKKAWCPIHKTDRHSLEDCLVLKKSLKKHMALEKCKRVRVVEKDVEAAAQESDSAYPDSDLHVSHIFXAPQRRNPIVVEPTIRNIKVARVLIDGGSSINLLFASTLDAMGIPRSELTPTDQPFHGITPQSSSKPLGKITLPVTFGQANNFRTEQITFDVAEFDTAYNAIIGRTALAKFMAASHYAYQVLKMPGPKGTITIQGNAKLAVQCDKSSLDMVEQTPSPPATTEPPKKVSKTNKMPKPDSAIKIVPLTSGNPNKTELALITFLRDNADVFAWQPSDMPGVPREVIEHKLMVRPDAKPVKQRLRRFAPDRKQAIXEELDKLLKAGFIREVLHLEWLANPVMVREANGKWRMCVDFTDLNKACPKDHFPLHRIDQPVDSTAGCELLSFLDAYSGYHQISMAKEDEEKTAFITPFGVFCYVKMPFGLITVGNTFQRTVQGALSNQLGNNVEEYVDDIVVKTKTSDSLIDDLRETFDNLXXYRLMLNLVKCTFGVPSGKLLGFLVSGRGIKANPEKIKAIENMKSPTRLKKVQKLTGCMAALSRFVARMGERGQPFFALLEKQDKFVWTLEAEEAFIALKCYLSNPPVLVAPQPNEELFLYIAATPYSVSTVIVVEREKVRXPVYYVSEALHDASSPRXKSRYPQIQKLLYTVIMTSRKLRHYFQAHRVTVVSSFPLGEVVRNKDVVGRIAKWVVELSQFDVHFVPRTAIKSQVLADFVADWTMPDNKSDNQIDNETWIMAFDGALNSQGAGAGFILTSPSGDQFKHAIHLNFRATNNTAKYEGLLAGIRAAAALGVKRLIVKGDSELVANQVHKDYKCSNPELSKYLAEVRKLEKRFDGIEVRHVYRKDNIEPNDLARRASRREPLEPGTFLDVLTKPSVKEVSGDVNLDAPDISSEATEAERVVADIETTDDWRTPLIKFINSDELPEDDAEAEKITRKTKIYCIIGNDLYKKAPNGVLLKCVSSDDGRHLLLDIHEGICGSHAAGRTLVGNAFQQGFFXPTALKDACDIXTHKATHTSAPDYPSYLAVLVLGARYTRAIPTRTGRLQVPIXVAIDKFTKWIEAIPTGEIKADNAIKFIKGIFCRYGLPHRIITDNGSQFISADFQDYCIGLGVKICFASVSHPQSNGQVERANGIVLQGIKTLLWAVRTTPTTSNKETPFFLVYGSEAMLPSELRYQSTRVQKYSDEDQEEQGNDDVNLLEEYRERVAVRAASYQQALRHYHEKHIRARILSIGDYVLRWVQSQAGRNKLSPKWEGPYTITQVLXPGAFKIADGDGRELANSXNIDQLRKFYV

SEQ ID NO: 172201 - protein, 105 aa, Oryza sativa
  unsure (1)..(105): unsure at all Xaa locations
  Clone ID: PAT_MRT4530_70360C.1.pep
IRPXXGXRVHSXRLLRLRXPXXLYLASHFRXXARPSTLLGTVDXXXXXXXAGAPAXXHXRRKLRGXRXDXXGXVPPDTSEXEXXRQHXVGGXXHGRCXLEXLIHT

SEQ ID NO: 172202 - protein, 160 aa, Oryza sativa
  Clone ID: PAT_MRT4530_70361C.1.pep
MATTPPRALQQSRSVVFSSGTTRGRNVTSWHGVRRRGRERERERFPWPLRETREEEEEIVDHLVPPYVPEQSRWDPSDRERRRNGTDDLRQCQAPGKSRKCAATAWFSARGVRGFCWFSPRFRAGLAAAAAASAYVARGERRSVAATGAIHSTGGGGGGG

SEQ ID NO: 172203 - protein, 161 aa, Oryza sativa
  Clone ID: PAT_MRT4530_70362C.1.pep
MTPDARNDSSQPLVQATYIFGQWNHLKQTRERFGLEMARQTLIDELISYSRHQGYQTQVAFHAQYQQSPASQEHPSPHLSIHYTDWLQTADTLIEKRRAHYRRHTYEYAGRLIVVTSDRAQVITVGGHRAEWMSAQLFAQEVDQRRAKRSQQAKQYGEKSQ

SEQ ID NO: 172204 - protein, 82 aa, Oryza sativa
  Clone ID: PAT_MRT4530_70363C.1.pep
KFKIIGSPFDTFSSKVVNSAVKNNKSEIKSQLTSKQTLQSSQGIADNFPSEQDFEHGAFKGPYVVRSYLYILFSNLPPLHNN

SEQ ID NO: 172205 - protein, 292 aa, Oryza sativa
  Clone ID: PAT_MRT4530_70364C.1.pep
MMRLKKKGTMDNTGTPKRTRWSENKAQQDGKDETTKLTYSIERDALECPICFVPFEDRVYMCKNGHAACGSCYAKMNTMCPCCIEPIGNIRCRPLEKVLAAMSAPCRFSTSAYMRLIRASGCTEIVAYTERRNHEASCPHAPCVCPFDGCNYQGHLLYSHIQDEHATDAAVVATGCLRGTGTTVTLHKSKPFHVLLHRGGSRVFLLLNGDNVLSGRSLSLVCISPPPPLPNCELLYKIELGAVSRAPGELGLSMSGTVPCVRRLEGFDAKAFLFVPDSYWGSSGTISVTVHL

SEQ ID NO: 172206 - protein, 102 aa, Oryza sativa
  unsure (1)..(102): unsure at all Xaa locations
  Clone ID: PAT_MRT4530_70365C.1.pep
YTFWAAGRGRDFSFLGPVLXFAWVGVLVVFAFRSEADSRWARISQMIDGXIASRVFSGYXRYDTDDIVKRYTCEQYVWAARCRYLEVINLFLSLMTLFRAAD

SEQ ID NO: 172207 - protein, 75 aa, Oryza sativa
  unsure (1)..(75): unsure at all Xaa locations
  Clone ID: PAT_MRT4530_70366C.1.pep
VSFKHTWQXHSYXKYIRIGLDYLSXELISSYHYDDLGRVADSLLDDGXLAGGDGGGKVGXLALDVAXAFPQPRRX

SEQ ID NO: 172208 - protein, 62 aa, Oryza sativa
  Clone ID: PAT_MRT4530_70367C.1.pep
MAVPVALIRGGDGGESPPARHSRETTEWPSQHQQTTLTTIRNYGYQSVDEVAETTVQNTWQD

SEQ ID NO: 172209 - protein, 208 aa, Oryza sativa
  Clone ID: PAT_MRT4530_70368C.1.pep
MGNCQAAEAAAVVIQHPGGKVERLYWPTTAADVMRANPGHYVALVILRISADKAASAAAAGDNKTNAGGATGGGGGGAKITRVKLLKPKDTLLLGQVYRLITSQEVTKALRARKNEKMRRCEAIRQQHEQLRRGDPLAGVAEEEEEEESASDDQDGKRDRHRSSGAGAPPAAGGRGRHWRPSLQSISEAASQSGGGGGGSSISESAAR

SEQ ID NO: 172210 - protein, 129 aa, Oryza sativa
  unsure (1)..(129): unsure at all Xaa locations
  Clone ID: PAT_MRT4530_70369C.1.pep
XRAMTLHARVRSLDXLERARAFAIAAAGISLPFAVLASAVAFVLRGSSRAAGGRATRRSSSSWAVGSPSPGSPSSLLHPRRAECCSPPPSGETVLXGVLCCSTTVAAWVLLALACGHLGQMVTPEPHRL

SEQ ID NO: 172211 - protein, 394 aa, Oryza sativa
  Clone ID: PAT_MRT4530_7036C.1.pep
MAAETFLFTSESVNEGHPDKLCDQVSDAVLDACLAQDPDSKVACETCTKTNMVMVFGEITTKATVDYEKIVRDTCRGIGFVSDDVGLDADRCKVLVNIEQQSPDIAQGVHGHFTKRPEEIGAGDQGHMFGYATDETPELMPLSHVLATKLGARLTEVRKNGTCAWLRPDGKTQVTVEYLNDAGAMVPVRVHTVLISTQHDETVTNDEIAADLKEHVIKPVIPDKYLDEKTIFHLNPSGRFVIGGPHGDAGLTGRKIIIDTYGGWGAHGGGAFSGKDPTKVDRSGAYIARQAAKSIVASGLARRCIVQVSYAIGVPEPLSVFVDSYGTGKIPDKEILKIVKENFDFRPGMMTINLDLKRGGNRFIKTAAYGHFGREDPDFTWEVVKPLKYEKASS

SEQ ID NO: 172212 - protein, 113 aa, Oryza sativa
  unsure (1)..(113): unsure at all Xaa locations
  Clone ID: PAT_MRT4530_70370C.1.pep
ILSILEYTLYTDMVYPRVYGYFLCTLRKSITXIEVESIDGRSPTRIKLGRYHIVWGPISLSPTWRSTDPRYKRDPXEQDLRHXILPPTHPPQPTKPEPTRAKSPGDLVEPTRL

SEQ ID NO: 172213 - protein, 674 aa, Oryza sativa
  Clone ID: PAT_MRT4530_70371C.1.pep
MAGGPLKLWNAWATQILVLLSLTLQIVLLLFAGIRRRESSALLRFFLWLAYLLADSTAIYTLGHLSLSSVTRDHKLVAFWAPFLLLHLGRPDNITAYALQDNQLWLRHLQILVVQVLGAGYVVYKRLIVGGEKTILLLATVLMFMVGLVKYCERTFALKRGDFSSIRSYVKELPGKQLRWYRGYLQSEDHYNSNDEFLLQRAHSLFHICKRGIVDSVINVDMDKTEAEITRKLINQIRNPQQPMVMWKVMEMELSLLYDILYTKAAVIHTWIGYLIRDMTPVAIVSSFLLFHFSDSKDGQNVVDITVTYILLGGALMMEMTSLLSALGSSWALAFLCAIPWSSLRHAVLCAGRWHRLRRAVVTLRQVVMAMTGGFLGRSRKWSGTIGQFNMLYFRAAQIHATNRRFGTLAKKLGCEDWWDSTCYSHSIKIPNTVKERAVKMVSKRAINTLGLLRHRWGELALDKKKYPKLVGDLEEWEGVDFHESIIIWHIATDLILCGRNRSSNDSTKKKEVERVRSIRAMSNYLMFLLVTRPDMVPGLPQNWLYQRTCDNLDKICKENRVQLISSGGRAYNIVFMVLMKLIRGNNNNSTTSYGLEQTNELAKILLGMKVSGKFDPSVPRLTYAHGIAKTVLGWKWFSVKVHGIYTSIDPLISVGSKQLSVPILEPAQQLPHL

SEQ ID NO: 172214 - protein, 70 aa, Oryza sativa
  Clone ID: PAT_MRT4530_70372C.1.pep
NEELRQPRVWSSNTTKVVSETLVHKKLLITAPTSICLPAKRKYNRNQTKFESNQTKTRSKREEITEETGD

SEQ ID NO: 172215 - protein, 43 aa, Oryza sativa
  Clone ID: PAT_MRT4530_70373C.1.pep
DSFSLSLDKTQGETRACLKRALLFGREQRCTHHCSHHMKYLHQ

SEQ ID NO: 172216 - protein, 67 aa, Oryza sativa
  Clone ID: PAT_MRT4530_70374C.1.pep
STPYRHTDTKTRLDFIHIIFNQIKGSYLDKTKGQTISPVRSHRLTGHHYTKTLKHYACHAPGTTSIV

SEQ ID NO: 172217 - protein, 115 aa, Oryza sativa
  Clone ID: PAT_MRT4530_70375C.1.pep
HRAASSRGAAVPSRASPSDATMRNSRAAMSFPSPMTQIWRGAATAAPGAAPTTQIWRGHRGQSRQRCQDHQHQIPSSHNRRHLHLLIHPIAIKVGRRGEEERRRGQGDCAVHCLS

SEQ ID NO: 172218 - protein, 190 aa, Oryza sativa
  Clone ID: PAT_MRT4530_70376C.1.pep
MDGEEGRGGGIVKENEKGISEEIEKEGEASLNVHVALPPRGSGPWMGGSCPSLARGVGLPRLGVKTAAPPSGGPDLAAPAPSRATSAAAAAGPASLARAAPLSTVAAAFRRTSPLLSGDKPAAVEDVVPITMGLERKELAAELKVHDGGGSGRRCGRSVGGSGWRWLPRRLERGGSGAVASGGGDVGAGG

SEQ ID NO: 172219 - protein, 123 aa, Oryza sativa
  Clone ID: PAT_MRT4530_70377C.1.pep
MSAVVCGKRASSSFFEDLTHPTGGSPPAAKRTRCGGAFFPPPPPPTWPRGVTKNDLVARLSTQFPAMSLEMIEKALDKSGNNVDSAIRSLLNLHLESVHNNSGVAFEPIQDTTDVQVSAEDNV

SEQ ID NO: 172220 - protein, 93 aa, Oryza sativa
  unsure (1)..(93): unsure at all Xaa locations
  Clone ID: PAT_MRT4530_70378C.1.pep
SCRLDWIQVGEEKLSEFVGDEEVAAPEVKRKPATREVDSIVLVDRNSTHPYXRANCRNMNSAIIKGGSARDLKVDGCGDKDLNRFXALSMRGN

SEQ ID NO: 172221 - protein, 188 aa, Oryza sativa
  unsure (1)..(188): unsure at all Xaa locations
  Clone ID: PAT_MRT4530_70379C.1.pep
MDGEEGRGGGIVKENEKGISEEIEKEGEASLNVHVALPPRGSGPWMGGSCPSLARGVGLPRLGVKTAAPPSGGPDLAAPAPSRATSAAAAAGPASLARAAPLSTVAAAFRRTSPLLSGDKPAAVEDVVPITXGLERKELAAELKVHDGGGSGRRCGRWASYCLDPAAVGLLPPGSGGGEPPLAQIRRW

SEQ ID NO: 172222 - protein, 75 aa, Oryza sativa
  Clone ID: PAT_MRT4530_7037C.1.pep
LMGGLQHPPAVTTRHRERTPLYKPSRHATATNSKHNMGPSLLTTPSHALALSPGAAPIRIFITTTMSYRLIFSIW

SEQ ID NO: 172223 - protein, 58 aa, Oryza sativa
  Clone ID: PAT_MRT4530_70380C.1.pep
MGSAVCGRKNGYGSRWGQMISVCVRHTPPRVADATHVEAFNLAQEAADDVLDEAVGEL

SEQ ID NO: 172224 - protein, 113 aa, Oryza sativa
  unsure (1)..(113): unsure at all Xaa locations
  Clone ID: PAT_MRT4530_70381C.1.pep
ATNYWWFVXGXXGSTGLVMLVLMXXXFTXXTPXFRRGPXPPPPXRSTXSXGFNSXXYSHHCFFIXYXLLIIPXXXLFLYQXXXKXNTNLXVPCGCSCTLPKSTKPVQPAETNS

SEQ ID NO: 172225 - protein, 310 aa, Oryza sativa
  unsure (1)..(310): unsure at all Xaa locations
  Clone ID: PAT_MRT4530_70382C.1.pep
DLRRVDWLADFKPTGIEKYDGKTGPESCLTIYTLAIRATGEDIKAMVNYLHVALTDSVRSWLLGLRYRFVANFQGTYVRPGIQLDVYHVIQQKNELLKDYIRRFFETSNKIPEDTDNVIIATFQKGICDENLIGKFTRKPPLTVMKLFKTANSYANSAEAINVVREDKQSSTPHLVNNNNEYYKKDRNRTPENLVAATSYFQSHCRRAXNYNRILNGPCPNHPNSKHSAKDCFTFKKFVEDNAKQLKLTAGKGTSGQNKDNTGEANPDGFQDXRVELNHIFGRPLAYKFKRKKLIDHYQRNTLSKYQFPK

SEQ ID NO: 172226 - protein, 110 aa, Oryza sativa
  Clone ID: PAT_MRT4530_70383C.1.pep
MEAAVASGLLKVAGHKLVSLIGSEFAAIARVAEDLSELHGIHGEITSWLSTVRDGSIECDPQFRWVIKLKDVAYDIDDLLHEVQLEYEKHKIHSNGDKHAIFDTLREKPK

SEQ ID NO: 172227 - protein, 125 aa, Oryza sativa
  Clone ID: PAT_MRT4530_70384C.1.pep
NISSKNNSSISSFINIPSNKNKQGDSEIEIERYPRTSKNKIKHIIKNFKHTRNIYIYIYIYIYIYIYIYIYICMYVCMYVCMYVCMYVCMYVCMYVCMYVCMYVCMYVCMYVCMYVCMYVCMYVC

SEQ ID NO: 172228 - protein, 65 aa, Oryza sativa
  unsure (1)..(65): unsure at all Xaa locations
  Clone ID: PAT_MRT4530_70385C.1.pep
LPVAVSARNRSAHSSHTAIPDAEFDMVDDPSFFLFLPSLSPPSYGEKQTGNLPDRVGRRREXPAP

SEQ ID NO: 172229 - protein, 98 aa, Oryza sativa
  unsure (1)..(98): unsure at all Xaa locations
  Clone ID: PAT_MRT4530_70386C.1.pep
SRPTPEGGTRRGLRAWATGTTPWPAXRAPPPPRPPRKRARRAPAPPPPVXPXAPXPPPPRRRPWMPPRXDRGLRCRHGRSRLAEPNSHSAASRCVCHC

SEQ ID NO: 172230 - protein, 74 aa, Oryza sativa
  Clone ID: PAT_MRT4530_70387C.1.pep
PSSTSIDERRRPTTRSSGGAASVDGGDGAPVIGDGGERAAGLPLTTAHLNAAAASGDDDGDGGATSPEMAGGNR

SEQ ID NO: 172231 - protein, 567 aa, Oryza sativa
  unsure (1)..(567): unsure at all Xaa locations
  Clone ID: PAT_MRT4530_70388C.1.pep
MGEVQTGVQQQNLIRPLNRCSCAERALNSPEVKATSAVLAHQGYQLLQQKLLISSQMQGGASATILWEWILLGTKNSNGEAPLFFSTYDHAAVLNLAMDKVVGILRGVAGVAADANAFREFFHWVTPHVLAAVRSQQQQQLLQLDSGGPVSASTGNNRTAPLHQIQDDLQKLEHNLWVIQTTITSTMHDLIDRLEWHSHRETEARHLRQIKDAVYDAEDLLDEYNYYALKVKVEASKNLGQDHSHGPVLEFLDSVNFNGNFSKVMEIQDRLKHVFDQSMGLGLHKTPKKFDRLVRPETCRVLDESQIFGREQELKELMQMLGVDGHKRGRPAAHTNTTEARRMELPVLPIVGMGGVGKTTMAQQICEDPEVRKHFHHRIIWICVSDEFEVNRLTKDALKSLGVKSEDTDTRDNLMVNLRDSVKSKKFLLVLDDMWDDVLKDEKGWRTFHRTLSNGLDGSMILVTTRSSKVANLVSDGNHYELKGLQDGVFWNFFKLCAFGSVQSWSNRPELQRIRPELERIGRAILPKLKGSPLAAKTLGRLLKCNRSIEHWEDIXKELWRLEQEET

SEQ ID NO: 172232 - protein, 139 aa, Oryza sativa
  Clone ID: PAT_MRT4530_70389C.1.pep
MAATALSSQVRLPMSLRVATAPAPARVSVLPASNKLGDRLRMQATYNVKLITPDGEVELQVPDDVYILDQAEEEGIDLPYSCRAGSCSSCAGKVVSGEIDQSDQSFLDDDQVAAGWVLTCHAYPKSDVVIETHKEDDLI

SEQ ID NO: 172233 - protein, 2087 aa, Oryza sativa
  unsure (1)..(2087): unsure at all Xaa locations
  Clone ID: PAT_MRT4530_7038C.1.pep
GVHRCKESYSDRTGSSLYRIGSDVSSPTWRPVDLWYKRDPPGGPKXIESQXPTHHHSLRNPRTSVPQYPLYPVYGYPSSTVARXVGGLGAQGSTTMTSSFVDNNVNTNLNQVVPTSTTLVWTQVGEIAFPVYTTMPISAGPPMAGNEKAVATTRGNSMSKDPPAEAEIGTSTTSEPEKDPSAAKPCLSDRNHEPTRITSEVTRSWCPIHKTRKHTLQACWVFLNVYAEIRAYKERGIQRTSPTRDVYCPIPKTKNHDLLSCKVFLXMKAPPPKVQQSHIPIMDKDKEQGATPISDRFVGVIDIDPHEPSVLHLLEDYGSSTTSTPREVLAIDDVGTSVRTNAEAENQVTTPAQHIRAVNAILRETPYDPVLNNDLARWTERLRESVTNLSNAFEEAAIAAHPEQPPTGDANGEDPERRESPHRATPPPRGTGDFRDHLNGHXEARRTRDNENRSRRHISSRRHDNGDNRHNRHDHDDRERQVLGGTGRGRRHNDDDDGDRRRDNNGRQRQDSREPGRRPRNYTPEPSDPSSSSSSSSSSSSDRHPRRTYDRRQPTAPSAGCRAFGRSLWDVRWPERFRPRAIEKYDGSTDPEEFLQVCSTVLYAAGADDNALANYLPTALKGSARSXLMHXPPYSISSWADLWQQFXANFQGTYKRHAIEDDLHALTQNPGESLRDYVRRFNECRNTIPEITDASVIRAFKSGVRDRYTTQELATRRIMTTWRLFEIFDRCAHADDALRRKNNKPKTGGEKKPAKDAPESSKKTNRKSGKRKAQSKVLATEYVDPPKRPDPQGSDTKKAWCPIHKTDTHSLEDCLVFKKSLAKHMASKKGKRVRVVEKDAEAPTQESDSAYPDSDLHVSHIFXVPWRRYPIVVEPTIRNIKVARVLIDSGSSINLLFASALDAMGIPRSELTPTDQPFHGITPQSSSKPLGKITLPVTFGQANNFRTEQITFDVAEFDTAYNAIIGRTALAKFMAASHYAYQVLKMPGPKGTITIQGNAKLAVQCDKQSLDMVKHTPSPPATAEPPKKVSKTNKTPKSDGAIKIVALSNANPDKTELALITFLHDNADVFAWQPSDMPGVPRXVIEHKLMVRPDAKPVKQKLRRFAPDQKQAIREELDKLLKAGFIREVLHPEWLANPVMVRKANGKWRMCVDFTDLNKACPKDHFPLPRIDQLVDSTAGCELLSFLDAYSGYHQISMVKEDEEKTAFITPFGVFCYVKMPFRLITAXNTFQRTVQGALSDQLGNNVEAYVDDIVVKTKTSDSLIDDLREMFDNLXRYRLMLNPEKCTFGVPSGKLLGFLVSGRGIEANLEKIKAIENMKSPTRLKEVQKLTGCMAALSRFVARMGERGQPFFALLKKQDKFVWTXEAEEAFIALKRYLSNPPVLVAPQPNEELFLYIAATPYSVSTVIVVEREKVQRPVYYVSEALHDAKTRYPQIQKLLYAVIMTSRKLRHYFXAHRVTVVSSFPLGEVVRNKDVVGRIAKWVVELSQFDIHFVPXTAIKSQVLADFVADWTMPDNRSDNQIDNETWTMAFNGALNSQGAGAGFILTSPLGDQFKHALHLNFRATNNTAEYEGLLARIRAVAALGIKXLIVKGDSELVANQVHKDYKCSSPELSKYLAEVRKLEKRFDGIEVRHVYRKDNIEPDDLARRASRREPLEPGTFMDILMRPSVKDAIDEDSPDSPNVGSGATKAERAVADIETTDDWRTPLIKFICSEELPEDDAEAEKISRKSKVYCMIGNDLYKKAPNRVLLKCISSDDGRHLLLDIHEGICGSHAAGRTLVGKAFRQGFFXATVLKDACDMXTHKATSASTPNYPSHLAVLVLGARYTRAIPTRTGRLQVPIXVAIDKFTKWIEAIPTGEIKADNAIKFIKGKFCRFGLPHRIITDNGSQFISADFQDYCIRLGVKICFASVSHPQSNGQVERANGIVLQGIKTLLWAVRTTQTTSNKETPFFLVYDSEAMLPTELXHQSTRVQKCSDEDQEEQRYDDVNLLKEHRDRVAVRAASYQQALRRYHEKRIRARTLSIGDYVLRRVQSQAGRNKLSPKWEGPYTITQVLRPGAFKIADGDSRELANSWNIDQLRKFYV

SEQ ID NO: 172234 - protein, 169 aa, Oryza sativa
  Clone ID: PAT_MRT4530_70390C.1.pep
MGNSNLGFGLTSFNHTGTATSSFPPNPVSGQMAPCGEGDRHVLMQEPRLQHHLLYETMEPVTHVGEEGEEGGDEAAAAARLPHLCSLPAPAILLLPPSSRRPAALVPRKRHIDDTQDEDQVNPPRKCHEKVSCPAARQQPATKFHCKDAERQDGQLMSGIKFCDQAITG

SEQ ID NO: 172235 - protein, 90 aa, Oryza sativa
  unsure (1)..(90): unsure at all Xaa locations
  Clone ID: PAT_MRT4530_70391C.1.pep
SWVARMNNTKGGFFFLRAVLAKGVAYAPEGESSTTHGEKTTTTQAEDGVKKPDCVPADDPRSLPGHGESRTPTPIXPDHHGGGGSFGTTP

SEQ ID NO: 172236 - protein, 124 aa, Oryza sativa
  Clone ID: PAT_MRT4530_70392C.1.pep
MPRRRPAIKEASRPLACSKSIHVGGLERERVREKNESPLPRTSPSSVAILQRQAAGARGLTRAKELVATFNAHLRQPSTPSMPVSNYKQPGRIVVASVLPPNIRRYSYELQIQIRKRMVDTQME

SEQ ID NO: 172237 - protein, 45 aa, Oryza sativa
  Clone ID: PAT_MRT4530_70393C.1.pep
MQKAGSPVEHIKARQGQTGTGKGQIDASARCRAGCGLRPEPGADG

SEQ ID NO: 172238 - protein, 56 aa, Oryza sativa
  Clone ID: PAT_MRT4530_70394C.1.pep
LKGNTNGFRAPQRRARRVDGAAAAMKECVLDEYSTKHRISINRFLQLKIFVKVHDR

SEQ ID NO: 172239 - protein, 66 aa, Oryza sativa
  Clone ID: PAT_MRT4530_70395C.1.pep
KKKKKKKKKKKKKKKKKKDGGCRCSGFTLSCVRVQSSSFWILKFNLMSLAVQRQRWDCHDLAHTKL

SEQ ID NO: 172240 - protein, 51 aa, Oryza sativa
  Clone ID: PAT_MRT4530_70396C.1.pep
LFCSSSKQFLSISLEKNIFFLYLHGQDLFLDPDSCMMVFVLIFNHYTLHYN

SEQ ID NO: 172241 - protein, 97 aa, Oryza sativa
  unsure (1)..(97): unsure at all Xaa locations
  Clone ID: PAT_MRT4530_70397C.1.pep
PRVRTHHSTKSGDQLTSLTDYQTRMTEGQSAIYXMTGESKMALGNAPFLEKLSKKGYEVMSMSAAINDDASGQLKEKEGENLDSATEERLKLDESAH

SEQ ID NO: 172242 - protein, 36 aa, Oryza sativa
  Clone ID: PAT_MRT4530_70398C.1.pep
LLTLFPRGPTLGQACYRQKTRQNVQSLLLIEHPHAL

SEQ ID NO: 172243 - protein, 77 aa, Oryza sativa
  Clone ID: PAT_MRT4530_70399C.1.pep
PVKGNGASPPQFVPRQKRVGFRRTTGVRALAFYQAGCNTGAFSPFRGAQIFIGSFQLGETMLSGWFFKKGQWASLGG

SEQ ID NO: 172244 - protein, 84 aa, Oryza sativa
  Clone ID: PAT_MRT4530_7039C.1.pep
TSKRVGLMNQRFFFFEQFKDRTPFCLFTMKGSFPFFKRVFFLYKNGRQPPLMKKFFFSKKNKKNLSARGTKFCKTMRMFCSFFG

SEQ ID NO: 172245 - protein, 125 aa, Oryza sativa
  Clone ID: PAT_MRT4530_703C.1.pep
MAGRGSAMAAVGVLVLLCVLLHGEMAESAVFTVGDRGGWGMGAGSWANGKRFKAGDVLVFKYDSSAHNVVAVNAAGYKGCTAAPRGAKVYKSGNDRVTLARGTNYFICNFPGHCQAGMKIAVTAA

SEQ ID NO: 172246 - protein, 54 aa, Oryza sativa
  Clone ID: PAT_MRT4530_70400C.1.pep
MVGPGRRWGPDSCETGCGEVASLGTTTLAECLRASHVAVVARINPVIRNTTRMM

SEQ ID NO: 172247 - protein, 118 aa, Oryza sativa
  Clone ID: PAT_MRT4530_70401C.1.pep
MGSGLSMKNESERLYEGEMVREVPVQRSLDLEHAVLASPAMARGDRPILDFVPPRLDGPALCSEIPPISAHPFPRPSTSAEGSDVGVEVSKATNHCSGPAQSISPAIIDRRSRAAFKL

SEQ ID NO: 172248 - protein, 100 aa, Oryza sativa
  unsure (1)..(100): unsure at all Xaa locations
  Clone ID: PAT_MRT4530_70402C.1.pep
VRTGVEWSMYVPDAPCYSRLPSRCGINVFVRAGSGVLTTGCLFMIECLMPASLGQPRGVFMRGFVQLPSFYHGLAYQLVLVWNPREDLKIPXGRSGDVWT

SEQ ID NO: 172249 - protein, 1274 aa, Oryza sativa
  Clone ID: PAT_MRT4530_70403C.1.pep
MAPRKRTGAAGGAASKKPPASQPSQPAKFGILHFFERQSQASSQNAKRQKADGPLQPPAPPPPPPPPPLIEEEPSEVSPEVTKTLAPKRVRFSPGMLIKQSQDDGGGEVVTWKISPVNDRLRMVTSRQMTGMALHPCSNNEKHSSVESTKKWHSSLLGMSRCTASARNLDMCGTGPGGCDGVEDTQSPFRTPPSLSYRCSEQQLNGGVVSDGGPEQLGAGEHKKALLDLLDQVEDAIMEEELPADGENKGEQLINGDPKNISCSPIADSDQNVPSQKSLDAPPFDSFLVLEVSEKHKGDNLPCDRYPVKVLRLLNEHGGKEHAVHLCDEWFHSLISPGDTVSVIGEFTDHGICIIDHDKNLVIVHPELLISGTRVASSFHCPRRSVLDDRLKSNEYSTSALIGTLLHQVFQAGLLEDVPSTQFLEQQAKEVLLKNIESLYACGASESNTLKTLIEAVPKILNWYKCFMKVSKCNNVNFGQIEGQKTVGVVEVMDIEEMAWAPRYGLKGIIDASIRSRVSCNGSSYDRVMPLEFKTGKGTSGQTAVEHTAQVILYTLLMTERYLNKDIDLGLLYYLHTDQTLGIKVKRSDLIGLIMRRNELATEILKASISQSFPPMIQAHGGNAATSGLGDLFDNLVNHLTVAHHTFLKHWDRLIDLEARVSQVKKKEIFQPHHSNTGSRHSSPSYFVLDVTNGHSIDSSGKSKRYIYTFLRQKLQPETADQPGEHVESVDFSLKCGDSVVLSTKSGRIAVANGYIRDLSRAHITVSLPRRLRLPGSNSLLEQGDLQCEVWRIDKDESVSSFATMRLNLVQLFAENPQNSHLRKLIVDLEAPRFDSGGLLSQDPALSYIQSLPNLNNDQQRSLHKILAAKDYALILGMPGTGKTYTMVHAVKSLLMRGESILLTSYTNSAIDNLLMKLKAEGVDFLRIGRHEAVHPDVKGHCLSTTDIQSVDAVKARMEQVQVVGVTCLGIYHPLLAHKKFDTCIMDEAGQITLPVSLGPLMLATKFVLVGDHYQLPPLVQSSEARENGMGVSLFWRLSEAHPQAISALRCQYRMSSGIMELSNSLIYGNRLSCGSLEIANAKLKLSGRGPVRLKLKEILNPDRAVVFANTDEVPAFEAKEHRTVNNPTEALIVSWITNELLKRGVAQDGVGIITPYNAQANLIQQHVDASVEVHTIDKYQGRDKECIIVSFVRSNGNTRASGSSLLGDWHRINVVLTRAKKKLIMVGSAATLSTIPLLRLMIEKVAERGGQLDLTNKDVQSIRELTSSRLNVQ

SEQ ID NO: 172250 - protein, 1287 aa, Oryza sativa
  Clone ID: PAT_MRT4530_70404C.1.pep
MAPRKRTGAAGWGACFEEACGLAAVAAGQVRHSPLLRAPVPGLLPERQAPEGRRPLAASRCLPACLRRHRRSSRRSHRRCRRRSPRLWRRSGSGFLLGWFGGFLFGAVQLIKQSQDDGGGEVVTWKISPVNDRLRMVTSRQMTGMALHPCSNNEKHSSVESTKKWHSSLLGMSRCTASARNLDMCGTGPGGCDGVEDTQSPFRTPPSLSYRCSEQQLNGGVVSDGGPEQLGAGEHKKALLDLLDQVEDAIMEEELPADGENKGEQLINGDPKNISCSPIADSDQNVPSQKSLDAPPFDSFLVLEVSEKHKGDNLPCDRYPVKVLRLLNEHGGKEHAVHLCDEWFHSLISPGDTVSVIGEFTDHGICIIDHDKNLVIVHPELLISGTRVASSFHCPRRSVLDDRLKSNEYSTSALIGTLLHQVFQAGLLEDVPSTQFLEQQAKEVLLKNIESLYACGASESNTLKTLIEAVPKILNWYKCFMKVSKCNNVNFGQIEGQKTVGVVEVMDIEEMAWAPRYGLKGIIDASIRSRVSCNGSSYDRVMPLEFKTGKGTSGQAAGEHTAQVILYTLLMTERYLNKDIDLGLLYYLHTDQTLGIKVKRSDLIGLIMRRNELATEILKASISQSFPPMIQAHGGNAATSGLGDLFDNLVNHLTVAHHTFLKHWDRLIDLEARVSQVKKKEIFQPHHSNTGSRHSSPSYFVLDVTNGHSIDSSGKSKRYIYTFLRQKLQPETADQPGEHVESVDFSLKCGDSVVLSTKSGRIAVANGYIRDLSRAHITVSLPRRLRLPGSNSLLEQGDLQCEVWRIDKDESVSSFATMRLNLVQLFAENPQNSHLRKLIVDLEAPRFDSGGLLSQDPALSYIQSLPNLNNDQQRSLHKILAAKDYALILGMPGTGKTYTMVHAVKSLLMRGESILLTSYTNSAIDNLLMKLKAEGVDFLRIGRHEAVHPDVKGHCLSTSDIQSVDAVKARMEQVQVVGVTCLGIYHPLLAHKKFDTCIMDEAGQITLPVSLGPLMLATKFVLVGDHYQLPPLVQSSEARENGMGVSLFWRLSEAHPQAISALRCQYRMSSGIMELSNSLIYGNRLSCGSLEIANAKLKLSGRGPVRLKLKEILNPDRAVVFANTDEVPAFEAKEHRTVNNPTEALIVSWITNELLKRGVAQDGVGIITPYNAQANLIQQHVDASVEVHTIDKYQGRDKECIIVSFVRSNGNTRASGSSLLGDWHRINVVLTRAKKKLIMVGSAATLSTIPLLRLMIEKVAERGGQLDLTNKDVQSIRELTSSRLNVQ

SEQ ID NO: 172251 - protein, 43 aa, Oryza sativa
  unsure (1)..(43): unsure at all Xaa locations
  Clone ID: PAT_MRT4530_70405C.1.pep
KXEQIFSNXXTQLYKXXQIDHWNRAKKRXXXDDACXIILXLKP

SEQ ID NO: 172252 - protein, 41 aa, Oryza sativa
  Clone ID: PAT_MRT4530_70406C.1.pep
TLLNVIQSTRGDAQRYVSTNTDLTVRKHKDGRSHSLLLGIT

SEQ ID NO: 172253 - protein, 184 aa, Oryza sativa
  Clone ID: PAT_MRT4530_70407C.1.pep
MAHISDIKLIRTDTTLDLSQKAEKGNFLEVGEEERSRSEARMGRKRKELLSSAPWRTGEAAEDDDEAARLSREGKVSVTSNPGETPTMHVPRNKRQDLDLAVDDFDEDEIDPELRYSFQRNSRFLRRVFSVDTLVKPLPPVMAYSVSRNVNFFFKIFTQFWDEEGIANAQKSLGLGNEDGSRRR

SEQ ID NO: 172254 - protein, 73 aa, Oryza sativa
  Clone ID: PAT_MRT4530_70408C.1.pep
GTGKWGFFSLKKNFYNSKKGIPLIKKSLLLKTHPKTDPPQGGPAQHPVRKLKRKFFICPIDPSLIHLKRDNLF

SEQ ID NO: 172255 - protein, 133 aa, Oryza sativa
  Clone ID: PAT_MRT4530_70409C.1.pep
PGTGPHPRTLPGSGADAHPYTTAGRASSAPTPMARSLSSLLTCSSILSRAVADALVELLASHPPPPVPTLPPSSSTSTTLSAPKAESTGETAAVGAPPQHEDEERREGSIGGGHLRVGPTFFLLECTSAKLQL

SEQ ID NO: 172256 - protein, 124 aa, Oryza sativa
  unsure (1)..(124): unsure at all Xaa locations
  Clone ID: PAT_MRT4530_7040C.1.pep
IWLTAHNRGHGYSNTFPLIKGVQLYPQDTAPRHVTVXPACQHDIPERGRDRTLRITRSNQTHHTSGFTPTPRKAAGSPLSCLGESESRIGRHRAHPNFITLTLAWMRQLEESYTTSPTVAHTGM

SEQ ID NO: 172257 - protein, 287 aa, Oryza sativa
  Clone ID: PAT_MRT4530_70410C.1.pep
MAAAAAGGDGEAAVMRAEVAALRLRVQELERENQRLGKIASRCTCGSSKDDSAASSPVVSESLSSSKQEPQKNVKSHCRGCQVGVVSHCPKRLIALKIMYFGQRFYGFASEAHTEPTVESEIFKALERAKLLVGSRKESCYSRCGRTDKGVSATGQVISLFLRSNIKDAKLDVLDNKSGDFLARFSCLGREYKYLFWKGDLNISEMQKAALKFIGEHDYRNFCKMDAANVSNYRRHITDFNISAYDQRSNYDELWAITIKGSAFLWHQVRCMVAVLFLIGQGLETPC

SEQ ID NO: 172258 - protein, 108 aa, Oryza sativa
  Clone ID: PAT_MRT4530_70411C.1.pep
MEWQFSEVQLVNQPLQRATRGYRQSGDEPTLFEEVSMVNVGDRLDGGVGGGSSTEGRGLEKLARKARYAVFATIEGGSKCVIDRPSKSRTTTDTSNRTLKLNVGNKIS

SEQ ID NO: 172259 - protein, 574 aa, Oryza sativa
  unsure (1)..(574): unsure at all Xaa locations
  Clone ID: PAT_MRT4530_70412C.1.pep
MQSPIGRTMHEMAVLPESRRLSLLLMAACFLLQALSAHAITRHYKFNVVMRNMTRLCSTKPILTVNGKFPGPTLYAREGDNVLVKVVNHVAHNVTIHWHGVRQIRTGWYDGPAYITQCPIQPGSSFLYNFTITGQRGTLLWHAHINWLRATVHGAIVILPKLGVPYPFPAPHKEAVIVLGEWWKEDTETVINQAMQLGVGPNISDSHTINGHPGPLSACASSNESVKDRCDHPQLPTLXRSKGAQNEDSIVKIGDHEVTXSVRRILRKPMYLYAHDINPXGTLNVLVTAHQGAARYLLSVPPWMDVPVVVDNKTGTATLHYANTVSSSMASLTLVKPPPQNATHIVSKFTDSLHSLNSKEYPANVPQTVDHSLLLTVGVGVNPCPSCINGTRVVGTINNVTFIMPSTPILQAHYYNIPGVFTEDFPATPLHKFNYTGSGPKNLQTMNGTRVYRLPYNASVQVVLQDTGIISPESHPIHLHGFNFFVVGKGVGNYNPRTSPSTFNLIDPIERNTIGVPTGGWTAIRFRSDNPGVWFMHCHFEVHTSWGLKMAFVVDNGKRPSETLIPPPKDLPQC

SEQ ID NO: 172260 - protein, 45 aa, Oryza sativa
  Clone ID: PAT_MRT4530_70413C.1.pep
MAVGWRRVQQIGSLRKIRTEETMSTGNPLFSDVALLCTRTGRTYK

SEQ ID NO: 172261 - protein, 247 aa, Oryza sativa
  unsure (1)..(247): unsure at all Xaa locations
  Clone ID: PAT_MRT4530_70414C.1.pep
QEFHFCEKVKEKLEHDAYQEFLKCLHIYXQEIITRSELKNLVNDILQQHPDLMDGFNEFLEHCENIDGFLAGVFSKRQTGRIVKTEERKEGGKGTEKEPDRIEKVPAYKEAPSQKPVFSSKEKYIYKPVSELDLSNCQRCTPSYRLLPKHYPMPPACNKTELGASVLNDHWVSVTSGSEDYSFKHMRXNQHEESLFICEDDRFELDMLLVSVNAATKRVEELIEXMHDNSLKPDSRIRIDEHLTPLN

SEQ ID NO: 172262 - protein, 83 aa, Oryza sativa
  Clone ID: PAT_MRT4530_70415C.1.pep
MTRLIKSQAYKGVECWRLMGYLKTINKTPNRILTTIKRKDDGHVVNQSVKTVVTIKKGGNGRVIEEYSDKVADIDICLSFRSS

SEQ ID NO: 172263 - protein, 1578 aa, Oryza sativa
  Clone ID: PAT_MRT4530_70416C.1.pep
MARANEMVRADSRMMVVFSALASKSGPLTFEDSLRFVKKVKACNYMLYLSLFDILGRMELSRLEAYRELQLLFQNYPDLHEELEKFRPPVPIKHPANNIWPWLFACAVPLVAVSLIPALGNPVLWFVQQTLGRSIRYVHVSLIWGCAGGMWFATGAGQRGGTEEEASLLFFFFASPLPRSSPILPSRVSRLAEAISRLSSPRVAFASRCALFAPRSGGLAGASGGQIRRRSPPPQAAAAPPAQPPAGGATAGQKLTTNDALVYLKAVKDKFQDKREKYEEFLEVMRDFKSERIDTNGVIIRVKTLFNGYPELILGFNTFLPKGYAIKLQEEKKPVDFVEAINFVNKIKNRFQHDEHVYKAFLDILNMYRKDNKSIQDVYHEVAVLFADHKDLLEEFQHFLPDTSVPPQAVAPSRPGIRRDDRTSLVPPASRNEKRDKAHPHADRESVDRPDLDHVIQRRRPKDRHDYDRGDKDGELDSKDLDIGLKRKPFPRKMEDPTSADAHHGGPLENHGILGASASLYDNKDALKSVYTQEFHFCEKVKEKLEHDAYQEFLKCLHIYSQEIITRSELKNLVNDILQQHPDLMDGFNEFLEHCENIDGFLAGVFSKKSHVNTNYINEGQTGRIVKTEERKEGGKGTEKEPDRIEKVPAYKEAPSQKPVFSSKEKYIYKPVSELDLSNCQRCTPSYRLLPKHYPMPPAGNKTELGASVLNDHWVSVTSGSEDYSFKHMRKNQYEESLFRCEDDRFELDMLLESVNAATKRVEELIEKMQDNSLKPDSPIRIDEHLTPLNLRCIERLYGDHGLDVMDVLRKNASVALPVILTRLKQKQEEWSRCRSDFNKVWAEIYAKNYHKSLDHRSFYFKQQDTKNLSTKSLLTEIKEINEKKRKEDDVLLAIAAGNRRPIVPNMSFDYVDSNIHEDMYKIIKYSCGEVCSSSDQLDKVVRIWTTFLEPILGVQPRTHGAEDADAVKPKSRTTKSGLATVGEINTTAAGAVAKHGHDENIPQEQTPSSLARMVNGVATDTQNGFHDVDRTARRAEEPSNTAVNGRVQGASPGTNEIPAVSTQNMPTERSAENIPVARTEQHGNAKANLEPTSGVNASRSSHAGNDTAAEARAGNETLPSVEGGETGRSGSTLNGGGASEGNKGRLFNEASASHNTPKVEREEGELSPNGDFEEDNFAPFEDGAVDGVSKAKEGSTSRPFQGRSGEAQPSCAEAAGENDADADDEGEESAQRSTEDSENASEGGEDASGSESGDGEECSREDHDEEEEDMDHDDQDAKAESEGEAEGTTETHDVEGGISLPLSERFLHSVKPLAKHVPTALHDRDEKSSRIFYGNDSFYVLFRLHQILYERLLSAKTNSSSAEKKWRTSKDTNPPDLYAKFISALYNLLDGSSDNTKFEDDCRSIIGTQSYVLFTLDKLIYKVVKQLQAIATDEMDNKLLQLYLYEKSRSPGRFFDLVYHENARVLLHEESIYRFECCSNPTKLSIQLMEYGHEKPEVTAVSIDPNFSSYLFNEYLSSMSDRKLSEGVFLERNKRKHSNNDEPSDSLKAMDGVKVANGLECKISCKTSKVTYFFFGR

SEQ ID NO: 172264 - protein, 82 aa, Oryza sativa
  Clone ID: PAT_MRT4530_70417C.1.pep
APSRSEPRAAPPARRHRRAPSPVASPSPEGAVDPSEGQDPQDFEQGKSSLFLEHVDPNCEIVLFINKIACNDEYPTCDYAMP

SEQ ID NO: 172265 - protein, 150 aa, Oryza sativa
  unsure (1)..(150): unsure at all Xaa locations
  Clone ID: PAT_MRT4530_70418C.1.pep
MGIIKLSIVGFLLYLVKEINILKKAYPEVAEFKEDVAEFKERRSTETVSKYFGEVLYAVGELRNDLVKPPSSDIPRTILGNRRFNPYYKDCIGAINGTHLXMSAAFRGRKCVTTHNVMAAVDFDLKFTYVLVGWEGSAHDALILAYALER

SEQ ID NO: 172266 - protein, 79 aa, Oryza sativa
  Clone ID: PAT_MRT4530_70419C.1.pep
TKLTDRDDRTYVPYLYLDGDLDGTHAVFHGLLLLGQSRPTTIIHSTSGVWLTYRTYTWCTTTYLRPTATTVPTPGPDDD

SEQ ID NO: 172267 - protein, 148 aa, Oryza sativa
  unsure (1)..(148): unsure at all Xaa locations
  Clone ID: PAT_MRT4530_7041C.1.pep
KVAAGRGDTGGPFKGARRRRRRPTATGDEKESSGKTNPKQTRIHEFPNDFSRCFQRRKGRGDREDHFPSIDSAGNGKERLDLEGNGGGGALGFRAAVARGRRXGPTGGTHLSATARARARRLRTGXGWAEERGRSFGPTFGPKPKEDF

SEQ ID NO: 172268 - protein, 64 aa, Oryza sativa
  Clone ID: PAT_MRT4530_70420C.1.pep
MHYTTRRYTIRRALSGEAASYRTAMAATSCVLHQCTGRDGARVSSASPGTRTHLLFCRAQKQDY

SEQ ID NO: 172269 - protein, 520 aa, Oryza sativa
  Clone ID: PAT_MRT4530_70421C.1.pep
MDAQMAAAAAHHPLPHQQKAANLARTFTKLLRRKRADAVAAATAVGEPGVPDAAAASVVGDEYECSVEAAAAGVPSLSKLKLSGNLGAAYSLDAFFRNAAEKKAAGVAGVAVAQTSPQVAPDVAKDSLLANLFAGVSAVKAAYAQLQLAQFPYDAEAIQAADAALVAELTRLSDTKRRYLRDPAAAAKNAAAAGHTALYAHAEEQRHLLKTYQITARKLEGELRAKEAEADRARSSLTAELRAERAMEARLHPGRTLASLDELHLSGLNPTHFLTALRHTVKSIRSFSKSMLNSMQSAGWDLAAAAAAVHPGVQLRRAGDTKFVFESYVAMKMFANFHRRDFNLSFLDEREFYDRRRFFEEFTELKAAPASAFLDARNARWGGFGKFLRAKYLSLVHARMETAFFGRLEQRGIVSAGPGFPESSWFADFAEMARRVWLLHCLFYAFDGGAEEDGASIFQVRTGARFSEVYMESVSDGRSDEAAAAAAEERVVGFTVVPGFRVGRTMIQCRVYLSRPGRRP

SEQ ID NO: 172270 - protein, 149 aa, Oryza sativa
  unsure (1)..(149): unsure at all Xaa locations
  Clone ID: PAT_MRT4530_70422C.1.pep
GENVGKLVEACVAEVALSAISKEETVAAVLAALAKRGGAEAIVNIVGVVARLVAAFMFGTDCARVNSTVALVLLCRGLGAXPAVTHVMVVPCVQWAIWELMSIGSERARRKAASLGLICRLWADVFVTXGERGGGCPVAHRVAPAMMVF

SEQ ID NO: 172271 - protein, 68 aa, Oryza sativa
  Clone ID: PAT_MRT4530_70423C.1.pep
LPIYPAVHGGRRWRVSRRRQGENTRRRAEELRARRRQVEEAGAAGKARTVQQRGVGGGGRHREAAGGG

SEQ ID NO: 172272 - protein, 164 aa, Oryza sativa
  unsure (1)..(164): unsure at all Xaa locations
  Clone ID: PAT_MRT4530_70424C.1.pep
MCNGHQISENLYLRWDSTRVYYFENEYLMDLFLTCLFTFDFNYFINFFYFYFIILFLLFFILFISFLFFFSFFFIFFFFFLYXYYILYFLIIFLYLLNFYLFLYYFIYFLXFFYLYIFSLFYTYFYNSIHIYFIYFNILHYFIFFLFLLFISFFLFLYFSIFIF

SEQ ID NO: 172273 - protein, 241 aa, Oryza sativa
  Clone ID: PAT_MRT4530_70425C.1.pep
MPDQRRGTTALLPTARHGPAASDRHHSASAARRDAAATRPATSVAAANTLVSSSLIEIESTHTPPTTGRPPRTGEQDGEAAVLRQGWVKKGPWTPEEDLMLASYIQEHGSGNWRAVPTNTGVMRCSKSCRLRWTNYLRPGIKRGNFTEQEEKLIVHLQALLGNRRDHMEVISPMKDGTFIDWDIVDNIWNHAFSFYPEEHPMLIVEPSTNTGQQREKYLLTLKIMKALCIYQGFDMVFVQE

SEQ ID NO: 172274 - protein, 287 aa, Oryza sativa
  unsure (1)..(287): unsure at all Xaa locations
  Clone ID: PAT_MRT4530_70426C.1.pep
MAFAAAYWLDHIWASFSWDVGDVVGAMARPEMVRVDGNDEVGRWRRYGHRERRRAYHQLFDQRRGTTALLPMARHGXPVASDRHHSASAARRDAAATRPATSVATANTRVSSSLIEIEXDTHTPPTTGRPPRTGEQDGEAAVLRQGWVKKGPWTPEEDLMLASYIQEHGAGNWRAVPTNTGVMRCSKSCPLRWTNYLQPGIKRGNFTEQEEKLIVHLQALLGNRRDHMEVISPMKDGTFIDWDIVDNIWNHAFSFYAEEHPMLIVEPSTNTGQQREKYLLTLKIMKA

SEQ ID NO: 172275 - protein, 92 aa, Oryza sativa
  Clone ID: PAT_MRT4530_70427C.1.pep
PNIIHDNSPHLEMLEELLCKEGGMYETLPAKCARFGLPMLTGDLEDDYEKHGPALLLRQTRMYLVWRKSVTWFLAWNLALGALFSQQVLRTL

SEQ ID NO: 172276 - protein, 321 aa, Oryza sativa
  Clone ID: PAT_MRT4530_70428C.1.pep
MGRPPCCDKVGVKKGPWTPEEDLMLVSYIQEHGAGNWRAVPTNTGLMRCSKSCRLRWTNYLRPGIKRGNFTEQEEKLIVHLQALLGNRWAAIASYLPERTDNDIKNYWNTHLKKKLKKMQAAGGGEDSGAASEGGGGRGDGDGGGKSVKAAAPKGQWERRLQTDIHTARQALRDALSLDHPDPSPATAAAAATPAGSSAAYASSADNIARLLQGWMRPGGGGGGNGKGPEASGSTSTTATTQQQPQCSGEGAASASASASQSGAAAAATAQTPECSTETSKMATGGGAGGPAPAFSMLESWLLDDGGMGLMDVVPLGDPSF

SEQ ID NO: 172277 - protein, 102 aa, Oryza sativa
  Clone ID: PAT_MRT4530_70429C.1.pep
SSACPPPLPCDASDGSCQELISFSPFPYPRAVVADLAVSSPASPFPFSSSDSGAPTLLSPLRNGQQAPQRLMVVVGPSRRRDEVHPLSHFLFRWQSIGLGHL

SEQ ID NO: 172278 - protein, 95 aa, Oryza sativa
  Clone ID: PAT_MRT4530_7042C.1.pep
GQKAQALKFKGGYMISFGPPGHGALCSAVRHGLLKQGVFGLKVKIMVAWGPQGKVGPAPPLPGFVTPPAPQGGGELPPPGLFPWGLAYNEISPLF

SEQ ID NO: 172279 - protein, 96 aa, Oryza sativa
  Clone ID: PAT_MRT4530_70430C.1.pep
DLDDFGWDTREQIISVQIGQKFSKPQSEDLYYSRARSMLQKLGLEKYEKNFKKGLLTDQTLPLLTDSALRDVKIPPGPRLLILDQIKRDPEFGKAR

SEQ ID NO: 172280 - protein, 152 aa, Oryza sativa
  unsure (1)..(152): unsure at all Xaa locations
  Clone ID: PAT_MRT4530_70431C.1.pep
GTSVARVQGLKFTADLRESRRSTNWGFGGVSNGGRIKCMQVWSIEGMKKFETVSYLPALTVEDLLKQIACLFXSRWXPCVAFSTVGYAYRESHRSTGYXYDGRYWTMWKLPMFGCTDATQVLKELEEAKKAYPDALCPIIGXDNARQVQLIS

SEQ ID NO: 172281 - protein, 44 aa, Oryza sativa
  Clone ID: PAT_MRT4530_70432C.1.pep
KTLSSHIKLSLLYIKSFYLTVYLNFIHFSSFFYNIFINFQYYSI

SEQ ID NO: 172282 - protein, 58 aa, Oryza sativa
  Clone ID: PAT_MRT4530_70433C.1.pep
VSSLPRAETLLHPRTKQPCFSFRFGFPLSDYLAMVTTTVGSCIGLSCTSVELFLSGWS

SEQ ID NO: 172283 - protein, 65 aa, Oryza sativa
  Clone ID: PAT_MRT4530_70434C.1.pep
AAPQPSLRKCLWSPALSSPPPPSSFKSIKIDGLSSSLLPTATPTMLGKQCKWYRQDKQLAKHMNR

SEQ ID NO: 172284 - protein, 272 aa, Oryza sativa
  Clone ID: PAT_MRT4530_70435C.1.pep
MERATTSGGGGGGSQPPRGVGLPLVEVQAAAASLRRSEVFYVVKELLGFVLYMHHQIPAVLQNLENEFASLKEEMTEMALPPGEMKPSDQRKYNTRKREVRRRIKKQEKLMNGLSSVFSALQKALDEVPSIEGVLLILGGSLVRPLFVYDITISHGRFDAGSANERGASKLAQSVSRKAIRALISSGAGSLSYTGPTKLFVLVRCPCTLNLPLDFLPKRDFRYSKKVVPLQMCIKCNIAGIQIDNQQITSIVDASRCTSESTISEVIWIKEI

SEQ ID NO: 172285 - protein, 428 aa, Oryza sativa
  Clone ID: PAT_MRT4530_70436C.1.pep
MAMELDRSLIACEEPPSEPMDFLSSAWCSSAIQVLQTGSMDCSMALVENPVMAPDNDRRDLLPKNDRSLVVDSSGFSTTQWKYDDLKSWIWLQKAIHPELDYDLKKKWLPRKMAPWSGISLKKWVKERKQKRKEEARLHKAEVHAAVSVAGVAAALAAIAAESSTPAATMKETAVASAAALVAAQCAKVAEAAGATRDQVAAAVNAAVAATDASNVITLTAAAATSLRGAAALRGRRSSGGGGGGGSQNERMDHASSALSQDDLDFDFNYARSKAALAKGDEMFVAMPDGKWKLHTVSAATSKGGKVVMRIKKMNLVMAFSNAKESKKPNAQVDRATAIPVHLLTLRENDRAGVIHDVQPCAPEKPSRDEDATYPIEVTTSKGKVELRADDYGVYKRWVTALTHMLAAPTAICKAHELPPPPPPHRRN

SEQ ID NO: 172286 - protein, 205 aa, Oryza sativa
  unsure (1)..(205): unsure at all Xaa locations
  Clone ID: PAT_MRT4530_70437C.1.pep
TLSPFSLLSSPPRRRRRRRRADAPCSTARTVKDVNPLEFRKAYSAHLKRSGGMALPVCVAVARAARLMVLPPYDPDWCYPWAASLARNIYLRHVLAVGGFHIIYGGRQRIGSRPPHFCLSGGAXSRSILXLLRMMGVIDAGPAGGXLITCHGRRYLDXAAGRAGVSIACSDPWILFPYCLSYGWWLSRLRFVCAFGLAPALSLGE

SEQ ID NO: 172287 - protein, 446 aa, Oryza sativa
  Clone ID: PAT_MRT4530_70438C.1.pep
MALGLSSTQLPERRRRPRRDVDHQRLAGDGGVAVVHRQVLQPRARAEDSWCRCRIGLQRAWAGCNLRNTGPKSLLQLINMGRNQLSCIDCGESFSQETVQGHAQCISGAEKYGPPKGQNKASMEIFPSCAGNHLASAATSRQAEGEDRISPLPDDILLLILQELAARVEAIRTCSLSRRWRWLPWLLLEPRISVKKFIPSGVELWMVDKRALDRVAGRFCRAVSRFLAISDATSIPKLTRLSVDSWFPDGAPIWIELEDPRPLQGSFSKLTVLNLGDGQYELLWMIFFLQAAPFLQNFNLSVSLKRCPQGGCDVDHRHRSFGTEARFSPGEYGRERKGIQKDMRSRHGRQQETPYCETTCSEFKHKHLKSLKIAGFKVEEKYMEFVRMVMELAMALQTIILTDEESCNYYRPTPTGSRYPKGDREKSSIVKQLMDGITSKVQIFIE

SEQ ID NO: 172288 - protein, 99 aa, Oryza sativa
  unsure (1)..(99): unsure at all Xaa locations
  Clone ID: PAT_MRT4530_70439C.1.pep
MAYLLLRSTTHLKXGENSKAEYNHRTQQATPMMQTCKGNTRTVTLGPKALLLPSFGDVVAESAWGPCGVPHGSRQQVGRRVATDDCVMDLHGEEREEAK

SEQ ID NO: 172289 - protein, 639 aa, Oryza sativa
  Clone ID: PAT_MRT4530_7043C.1.pep
MLSARAAATAAAAAASPLWKRGEGGSSGSGSGCTSCREVRRRAAAVRVRAAAPRRVEAVAMESAAETEKKEEVAAAGGGVEDMATEEVPVTPWAFSVASGYTLLRDPHHNKGLAFSEKERDAHYLRGLLPPAVVSQDLQVKKIMHNLRQYSVPLQRYMAMMDLQERNERLFYKLLIDNVEELLPVVYTPTVGEACQKYGSIFRQPQGLYVSLKDKGKVLDVLRNWPERNIQVIVVTDGERILGLGDLGCQGMGIPVGKLSLYTALGGVRPSACLPITIDVGTNNEQLLNDEFYIGLRQRRATGKEYHELMEEFMSAVKQIYGEKVLIQFEDFANHNAFDLLAKYSKSHLVFNDDIQGTASVVLAGLLSSLKVVGGTLAEHTYLFLGAGEAGTGIAELIALEISKQTKAPIEECRKKVWLLDSKGLIVNSRKESLQAFKKPWAHEHEPVTTLLDAVQSIKPTVLIGTSGVGKTFTKEVIEAMASFNERPVIFSLSNPTSHSECTAEEAYNWSQGRAVFASGSPFDPVEYNGKIHVPGQSNNAYIFPGFGLGVVISGAVRVHEDMLLAASETLADQATQENFEKGSIFPPFTNIRKISARIAASVAAKAYELGLATRLPQPRDLEKYAESCMYTPVYRSYR

SEQ ID NO: 172290 - protein, 405 aa, Oryza sativa
  Clone ID: PAT_MRT4530_70440C.1.pep
MSREIVPEKEADDARISGRTKVAGREGSRTSPSAAPPPPLPSPDPGGVIVGVVVAVGVGVVVAGHGGIGEGGEPHLPSGRITADAVFGHTAASAPLPSLDQGSVIVGVGVVAAGRGGREEEGEPLHHRRTPSGRTAASAPRRRRLPSPPRSRRIFSDPQRVNHNQPANIREPLSKPLKESIFNLLGVVFPHPLRSPELFFPNSGASTPSPFPGSPPPKAVEAAAGEQRTTRLTRSRSGAAYGPLASKALEALPVPLFPEGVASFLGAEAATSSSAVGVGVGHVGGDHNKMLCGGKMARQGAGIRGNMQDEASAFDDVSQAQQGVAGRDMPAGAGVEHLLCMAAGFRDVPQEPWSLQAQAQAPQESAGNSQEGVAAVGVEADAGVQHMAGQDASVNDMPGAHRGLP

SEQ ID NO: 172291 - protein, 946 aa, Oryza sativa
  Clone ID: PAT_MRT4530_70441C.1.pep
MAGASELEGSKDDRRKTTSLKHGGKVWTVKFLDVEWLKWRFECVLSRLCSVACLATPRIAVARSLAGAKDDANILRPADSHNSERRRRRRQQGSEDFKNGLCDQHVLCRLNAIFNSSRGRTRGLDDQIAMAGGTAHCDAFLLTASLLGGFLRLVMEAPASNALEARGPYAAPDLDLVSLVVLCSPAAASTAFLKTRGIRTRGVLFLGAGSRGFFRRGAIEAGRKGADRRRGAGERGRSGGAGVGEEEFRLIVVDPLRIRKDAVHTEKKHFRISEVFFLWQGGEGSGGGGVAEDGVGGNAAGGESSEESGCQLGEQLEDRRICCAQFSQKLPLKDVVRTSVLSRNWRHMWTCCTKLRFDGVMVSRDNINAILQQHSGKIVEEFEVKFEFDSKLVDHLNGLVDFVVSSQTKKMAFDLVPTNPVGLLDRYRFPFERFDNGSISRLQHIQLSFASLELPPHFSGFLNLRNLDLHLIRSTQKDLQDLLSQCFNIEWLSLVRCHIGGEIKSLSLDAYVPLTTLPSVPPCVQPLCLDVYVPLEVSSLLKNTCKFSHLKYLQLKLRLYYHDSGNILSLASFLRASPCIEKLEIHFNSYALSHLYYQPIRRLPQVPEVEAIVLPPCVALAIRRPRSGVWDYIWVNVSELAVEELSVPEYLEFMEQLVDGQKLTFSEVGAGQRWRRSQSGSVSRVGAGLDGSAKGAGGGGSSSSLPVGTLALPGAPPLLCGEFLGWIEAATCQRGKPRLLKQCHPVPGSPSARFGEETGGWWIGGVLGQLSGMEVTRLLPDVIGTTCSQWLEKVIGTEHTDILRVPFRIHLSFFLSFFAAGCCKRNYEGNAGQIYHFSCQLTADHAMTHRLHIMTSTFQEIARSKDTVRQYESHIAFTLPALAIRQSDSDHRILRWKFTRECKQSDENGFHKAYHISIGINLQTHCRLPSDGLISQRKSQILNFQT

SEQ ID NO: 172292 - protein, 144 aa, Oryza sativa
  Clone ID: PAT_MRT4530_70442C.1.pep
MAMATPTTNGSFLLGSGGYPGAQILSFSSSGHSGNGLDCGSSDVARMQGVLARVRGPFTPTQWMELEHQALIYKHIVANAPVPAGLLLPIRRSLHPPVFPHFSSGGILGSSSLGWGSFQLGYSGSADSEPGRCRRTDGKEMACS

SEQ ID NO: 172293 - protein, 268 aa, Oryza sativa
  Clone ID: PAT_MRT4530_70443C.1.pep
WLLSERIPSIPHLRTERPGCGFLGSSRKQWRQPPGSRGRQDSQDRGRGRRTVLSPPRRWRLSPFHCFRRELLPFLERRQRPAAAPSASGSATWEATTTRCCAEGRWRDRARAYGATCKMRRAPSTTCLRLNKAWPAGTCPREQASNTCCAWPRASVTFLKNHGVFRRRRRRRKKVPATRKKASPPWAWKRTRASSTWRARTRASTTCRARTGGFHDKPQESAEEAGGEQERVAVGGPACHGDLIVESTSAAATAVEDGVQAAKNMLVT

SEQ ID NO: 172294 - protein, 68 aa, Oryza sativa
  unsure (1)..(68): unsure at all Xaa locations
  Clone ID: PAT_MRT4530_70444C.1.pep
GRXXXRGGGXXQXXXXVPGVGGGGPDNVNGNGPTPLTSALLQFRSSSFSFSXHXVPXPSXCXRRLPVP

SEQ ID NO: 172295 - protein, 478 aa, Oryza sativa
  Clone ID: PAT_MRT4530_70445C.1.pep
MPSTSSSSPGFGNLLAIFAMATPTTNGSFLLGSGGYPGAQILSFSSSGHSGNEMCPLSPKMQSLLNPLEMALTLFTLPSSSERGLDCGSSDVARMQGVLARVRGPFTPTQWMELEHQALIYKHIVANAPVPAGLLLPIRRSLHPPVFPHFSSGGILGSSSLGWGSFQLGYSGSADSEPGRCRRTDGKKWRCSRDAVVDQKYCERHINRGRHRSRKHVEGQSSHAAKATVPAIAQPPIGASNGKLSGSHGVSNELTKTLATNRMMLDKANLIERSQDYTNQQHNILQNNTKGDNWSEEMSSQADYAVIPAGSLMNTPQSANLNPIPQQQRCKQSLFGKGIQHDDIQLSISIPVDNSDLPTNYNKAQMDHVVGGSSNGGNNTRASWIPGSWEASIGGPLGEFFTNTSSASDDKGKSRHPPSLNLLADGHTTSPQLQSPTGVLQMTSFSSVPSSTVSSPAGSLCNGLLTSGLVNAQTVQTL

SEQ ID NO: 172296 - protein, 102 aa, Oryza sativa
  Clone ID: PAT_MRT4530_70446C.1.pep
MATAAGGARRALAGLRSASSSRAFSQPAPAAAAARSPELAAFSLPRSTRRRPAISRVPVEALGGAHGLMPLHSATASALLTSMLGLKPGSWGWLSEGFATPL

SEQ ID NO: 172297 - protein, 76 aa, Oryza sativa
  Clone ID: PAT_MRT4530_70447C.1.pep
MGVIAVDGKQHQRAGEGGDAMVAVTSSRHAVLEIEVETEVEKLVEDSGGGRWGFENCGGGGTGVGGAPTDAHTLEM

SEQ ID NO: 172298 - protein, 289 aa, Oryza sativa
  Clone ID: PAT_MRT4530_70448C.1.pep
MEIKDEETTAEVAMVVQSRFRRVCVFCGSSHGKKKIYQDAAIELGKELVARNIDLVYGGGSVGLMGLVSQAVHNGGRHVIGVIPKTLMPREISGETVGEVKAVSDMHQRKAEMARQSDAFIALPGGYGTLEELLEVIAWAQLGIHDKPVGLLNVDGYYNPLLSFIDKAVEEGFIRPSARHIIVLAPTPKELIEKLEEYSPQHEKVVSKMKWEMEQMSYPQNYDIPRPKEGKMIIEAQRGSRLWISDPKRMESEPVPDFQSEETVNSEISARENASLGLHNHKDQGTSSL

SEQ ID NO: 172299 - protein, 83 aa, Oryza sativa
  unsure (1)..(83): unsure at all Xaa locations
  Clone ID: PAT_MRT4530_70449C.1.pep
KITASLVPILKWTDAXEVVGSFTYDNLTSLFSVSCWISLPLAIAGQSPVTFRSLSFSKGLVMYPWSDFFLYNTPSDLKXXXXP

SEQ ID NO: 172300 - protein, 382 aa, Oryza sativa
  unsure (1)..(382): unsure at all Xaa locations
  Clone ID: PAT_MRT4530_7044C.1.pep
YHHATRRGNANDERARRRQTGXNGDERRGDGFGGDPWTKARRGRHXLDDAEARTKTMTGAAATCLTDADDGRERLDGGTNATTTGNDERTTTTTTTGTGEEATRTAGSGCTGTRTTRTTPLRCRRRRRRRETTSRATDGTSTTRTIGDDDDGPRRGLDGGETMPRTTLPXPREGTAAPADAWAWRKGQPGEMPPRRKEKPARATVFRRSSGEEEVMPGMRAASWSRGRWWRRRPALRGRGRGGRRRRSGGDATGRRRGRVSGAFPAKRRADRGRGGSCDAGRGGGAAGGCTGEAGGAAGGGRLGEKRRATAGRQLRXVTSRDGGQAGVEEVAATLEEATARPDDAPARRERRLEAGRQRGRERATVGRWLETTGDRGRGLKR

SEQ ID NO: 172301 - protein, 425 aa, Oryza sativa
  unsure (1)..(425): unsure at all Xaa locations
  Clone ID: PAT_MRT4530_70450C.1.pep
WGSPGAWRREESTREEPTTVDCGGGNHRRXKRGKHDETTRVRFKGVGASPGFKESVSGVGLDGAAPRFAGDERRSSGAGGNGGEAVPGGDGAREWFGEVLGSSRTVVARGIGEGAHGGAQSGAAAAKQSNGGATRLGGRASNRTARGLSKMMQMARIWARSSPAREEQRWRRGGSRGEVVATAGRGRAAGGRQQRRGCFERGGDETRGEGAGFIGEEERSVWRRETDIGGQGSSAGVHGRQRRFRGQCESGDGVDALGSEGGGSSGGNRTAGVRAGAVKESELAWSVKRRRGSDTGSGREREKEGEKGAWSLAIMRRGRVRRRRRGRAAASPTLGRGLGMYQGKLKEESWKRFKRNTWVFVLGNIGWSQGKDSRRDLNNSGFVEVFGEDSKEGFEFQNFDFRDSNRKRNLDEGEDFDFDEREQRD

SEQ ID NO: 172302 - protein, 289 aa, Oryza sativa
  unsure (1)..(289): unsure at all Xaa locations
  Clone ID: PAT_MRT4530_70451C.1.pep
MDRFSSPGPSPLPSPSPPAVRFPPLDPPPSPPNASTPSPLSHCPXTAAAAREHQPSSLDRQCRFPSSKPTSPPXPIKPTPSPLVSSPPRSKHPRLCCRPPAARPRPAVATTSPRLPPSXPPPPLSPLPAWPTTWQPPQPRARLTGSXAPSQPPPPPTRRSRRSRPSPAKKTAAGPLPPTSPLLPRSPRARSPXPPQPPHLDLPSPHHKSPTPLLPPPPPPPPPPTNADTHRPRPPPSPTHISPTRSPPPPPPPPPTPPPPPPPPTXAPPHPSRFLPPPPPPLPPPPIPP

SEQ ID NO: 172303 - protein, 108 aa, Oryza sativa
  Clone ID: PAT_MRT4530_70452C.1.pep
MEPPSPRAGPSARAPRPWPPHGSHFTNPVPPSRHRRMQAILAVGPGGAAAARALVVADATKKAVAEALAMRELSVSTAVAVARKRSPPLAIAGNDRRLPFPDSSVDFI

SEQ ID NO: 172304 - protein, 135 aa, Oryza sativa
  unsure (1)..(135): unsure at all Xaa locations
  Clone ID: PAT_MRT4530_70453C.1.pep
MPAYTIQIFALVDLIVLSANATXTAITTMQDFPPTLNMSTMDPCIYYLIFTIXMIMSTNMSMTYTMPLLHYQCLLXLLRMMPHRHLITSCKMMXTMQQDICAGLKKQPMMKIAIEIXYMSNMAPVNLQLSFTRGV

SEQ ID NO: 172305 - protein, 311 aa, Oryza sativa
  unsure (1)..(311): unsure at all Xaa locations
  Clone ID: PAT_MRT4530_70454C.1.pep
MAAGPCAAARLAADRAHGREDGGRRLTGRDLTQSSGPGAEVAATWSATRAGAKGEEEEEEAPGIGRPTTREAFRRAAANRSERLPPAARGGQGESAAAEAATRRGDKGEGRRPWGSQGEVMGIPGSVAARGIDARGADDGGLRRRQSPESKRGNHDETTRVRFKGVGASPGFKESVSGVGLDGAAPRLARDERRSSGAGRASWRGRSSGXRGSDTCSGREREKEGEKGAWSLAIMRRGRVRRRGFRGGGVARHREGVAREGGRERWRPELLVARSRSHRLLRCXDDGRRRRERDEWQQGGDGGSAAMAWWV

SEQ ID NO: 172306 - protein, 355 aa, Oryza sativa
  unsure (1)..(355): unsure at all Xaa locations
  Clone ID: PAT_MRT4530_70455C.1.pep
MTVAGGGDQARRHADVAAREKSEGCAGSGLAEPVWCCDAHAVTRDPMVTGGARTAALGGGGSGDTARKQRRRPTALGQPGGGHGDPRERGGERNRRERSRRRWIXRRQSPESKRGXTTRRRGFDSKGWEHLRGSRGGLWWGAHQRRGGSVGGAVSVAARWSRRRGGTAPRGHGRGRREGEVVSGAPRHASTHAPAXRCSATDDNGESGTSSNKAATVVRRQWRGGGGEVGLGRGELTLAVKCSAGGSGGFVGGAKAATAWMRWAAKAVDRATEIEPLERGLARSVKGRSWRSRPWSWRWQAVTPMEGEGELGLRVLAGRAWSGLGTHAGPCGAGAAGQQGRAVQARQGRCGGDRA

SEQ ID NO: 172307 - protein, 678 aa, Oryza sativa
  unsure (1)..(678): unsure at all Xaa locations
  Clone ID: PAT_MRT4530_70456C.1.pep
IDEMLERLANHSFFCFLDGYSRYDQISIHPEDQSKTTFTCSYDTYAYRRMSFGLCNAPASFQRCMMSIFSDMIKDIMEVFMHDFSIYGKTSGHCLQNLDKILQQCQEKDLVLNFAVGAKVIVYTDHAALKYLLTKKDTKPRILXWILLLQEFDLEIKDKKGVENSVAEHLFRLQITGTQEQPMNDFLRDDMLMTVRDSNPWYANIVNYMVSKYIPPGXNQRKLKYEXPYLYRVCSDGLLRRCVPTEEGVKIIXRCHASPYGGHYGAFRTQAKIWQCGFFXPTMYEDSKRIVRRCPSCQRQAGITARNAVNXEGPFDVIDTSSHGAITLRDDSGNIFLVNGQLLRIFLEPNKTLDEEVVIIELIDYGXIMISSNACLKPCQVAFFMLSLGWCGTRKKLEARWTHQGLGSADPGWHPFGPNFELXSPPLVCSSLWCAFGGRSIRLNSEYLLFLFSSTFANSFSILTQSLDFHPQXPMASKSLIPYIGSSSNSTYNLDGEPTRWKXKRTMGTTPCDSAQLPSKYGTGRRAPWFGRTRXFGRTLPGPVRQRDPSPLAMLPRQKSGGLHLRDGRQRASXGLLKARRLFQNAEKVAPPSAEWYVGTLFTKAGDEVLHKYTTPTATPSTPKDDRFCIQGVQTPGGGYGKGLLRPLTASGKEGAAGSRSSPPMKVKRHLTPPTYYK

SEQ ID NO: 172308 - protein, 114 aa, Oryza sativa
  Clone ID: PAT_MRT4530_70457C.1.pep
MGQATPTRQPPGPLSRAEMRPRLQEGPEKGEGAWGNGGGGSRKQARWHELGLEIDGTPLIWSQRNTPFTRLELEVDGEVVDPGSGNWAVRTDVQRPVGARHALQCRKLRTSGSS

SEQ ID NO: 172309 - protein, 403 aa, Oryza sativa
  unsure (1)..(403): unsure at all Xaa locations
  Clone ID: PAT_MRT4530_70458C.1.pep
MAAGPRAAARLVVDRAHGREDGGRRLTGRDLTQSSGPGAEVAAMWSATRAGAKGEEEEEEEAPGIGRPTTREAFRRAAANRSERPPPAARGAETVRDRDAHAGTRDPMVTGDARAAALGSGGSGDTARRQRRRPTALGQPGGGHGDPRERGGERXSTREEPTTVDCGGGNHWRXKRGKHDETTRVRFKGXEHLRGSRNPFPASDWTERHRDWLATRDGLWERAAMAARPCRAATALGNDDANGXFGRGAHRRERSNVGDAEGVVARWSRRRGGXRATGGRQQRRGCFERGGDETRGEGAGFIGEEERSVWRRETDIGGQGSSAGTGSGREREKEGEKGAWSLAIMRRGRVRRRRRGRAAASPTLGRVRRGVAGAMDDVDDDGGGRFGMERGQGGSAWRRRRPA

SEQ ID NO: 172310 - protein, 336 aa, Oryza sativa
  unsure (1)..(336): unsure at all Xaa locations
  Clone ID: PAT_MRT4530_70459C.1.pep
MAEVARTWTSRRMGKGEEAGQLIGRPTARGGIRRTAASRKGRLALAAGEGEGELIPRLGSGRGRATTAGGGGQSRRHADVAAREKSEGCAGSGLAEPVWCCDAHAVTRDPMVTGGARTAALGGGGSGDTARRQRRRPTALGQPGGGHGDPRERGGERNRRERSRRRWIAAAAITGDQKGGKHDEMTRVRFKGMGASPGFKESVSGVGLGGAAPRLAGDERRPPGQSMAAGELWRAAAGTAHRMAGGGLWWGAHQSKRRQCWRRGQCRGEVFATPRRHSTERERPGKKGGRXVPGAPRHASTHAPXSGALATDGNGESGTSNNKAATVVRRQWRGGC

SEQ ID NO: 172311 - protein, 164 aa, Oryza sativa
  unsure (1)..(164): unsure at all Xaa locations
  Clone ID: PAT_MRT4530_7045C.1.pep
MVAGGGHRHGGAVAEKGEGKGEMKRWSTAHPEATAATEEAAGTEEGGGAARVDGVGGAPAVGERNGGVDEVGEDAAKPKEAAPRWEVVRGDDGGGPELGGDGGERERFNARGDXGCGGIGGGGGAWRGRGVGSGGRKGMTGGPHPSAREAGGPLGMAKGRVRHG

SEQ ID NO: 172312 - protein, 266 aa, Oryza sativa
  Clone ID: PAT_MRT4530_70460C.1.pep
MSWWKKSSGKSSSSSSQYYAGSDSSSFAGGGGDDRYGRAGSGNGRSPWTTSEEYPRYTSDDDNRSGSGSDDDDDHGDRNRRRGKKSNKKKSSSSSSSYKYDDDGGERDRSYSNYGGYGNNEGYSSSAPSGYNPYNNGGGYGGPSYGNGGGYGGSTYGNGGGYGGSSYGNGGAIVAGGGGGSAPASYGYGSNSGWGAPAPPRQEGGSGSAPTYLNVIYMTQPGSSSSQNENSGERRDNGGGGGGRNGLFGPTFQAVGGYMDRRFGFD

SEQ ID NO: 172313 - protein, 125 aa, Oryza sativa
  unsure (1)..(125): unsure at all Xaa locations
  Clone ID: PAT_MRT4530_70461C.1.pep
FNRCHASSSIGAAATPPPPVALLRRRRRYASXAVARSPSAAAXAFSSTSAAATTPSPPTPPFRLLRFREKPVHRRYTSSSAAAAARLREEPVRRRSASTSAGTAALPRPLPHRTEGREEGERGEA

SEQ ID NO: 172314 - protein, 376 aa, Oryza sativa
  Clone ID: PAT_MRT4530_70462C.1.pep
MVLVQLGLAGLNVMSKLTMASGMSPYVLLAYRNFIAAAFLAPIAFLVERATLNQVLYFVGLKYSSPTVASALNNTLPAVTFLLAALLKMEPVAGRAGRAKVAGTALCVAGSMLMTFYRGPLVRTLASPVHWPYVQGTMAAEAAAHAGGHAVVLGAVLVIGSNVAWAIWFIIQKNLSKSFACPYTSTALMALIASVQCAAIAGAAERRFSAWELGLDIRLVGALYAGIVASGMVCTVMSWCIQERGPVFVSMFSPLMLIVVAVVGWGILGEKIHVGSVIGAVIIVVGLYTVLWGKGRDLDGAAVAIASLPGDEEMNGVVGADDTTGRAPPVGQTRHDSCDASRWTWSTVPGARRDLQGGDTAHAGRVHARRRDGLVD

SEQ ID NO: 172315 - protein, 154 aa, Oryza sativa
  unsure (1)..(154): unsure at all Xaa locations
  Clone ID: PAT_MRT4530_70463C.1.pep
IDEDHVKKLKGLGISLGKIQAAWPEDAXXXEPKKRFVEDIMPKFTTDAEVLAIGDMFYADVEEEWVMQPGXPLAHKCNTLIQPSRLIMLTAQRFVQTFLGGNYIAXHFRRHGFLKXCNVKKESCFFPIPQAAEXILRIVXKLRPVIYLSTYPAG

SEQ ID NO: 172316 - protein, 521 aa, Oryza sativa
  Clone ID: PAT_MRT4530_70464C.1.pep
MMNPDGGDGDRLEAAGAGSSSAQQGHPTMEWRFAQVFGERAAGEDVQEVDIISAIEFDKSGDHLATGDRGGRVVLFERTDARDNASRREMERQDAPITRHPEFRYKSEFQSHEPEFDYLKSLEIEEKINKIRWCQTANNSLSLLSTNDKTIKYWKVQEKKVKQVSVMNLDSRSVGTGTSSSASTSSSRGLLPNGGCSDKSSFLNSDILFPPGGYPSLRLPVVASQDVNLVARCRRVYAHAHDYHINSISTNSDGETYISADDLRINLWNLEINNQSFNIVDVKPPNMEDLTEVITCAEFHPTHCNTLAYSSSKGSIRLIDLRQSALCVNHSKIFEEHEAPGSRSFFTEIIASISDIKFSRDGRYILSRDYMTLKLWDLNMDSGPVSTFQVHEHLRPKLCDLYENDSIFDKFECCLSGDGLHVATGSYGNLFRVFGCTPGSTEATTLEASRNPMRRQIVNPTRPTRTLTSLARGVRRGGENQGVDANGNSFDFSTKLLHLAWHPTENSIACAAANSLYMYYA

SEQ ID NO: 172317 - protein, 79 aa, Oryza sativa
  unsure (1)..(79): unsure at all Xaa locations
  Clone ID: PAT_MRT4530_70465C.1.pep
MARAQLVLVALVAXLLLAAPHAAVAITCXQVNSAVGPCLTYTRGGAGPSAACCNGVRXLKAAASTTADXRTXCNXLKKR

SEQ ID NO: 172318 - protein, 361 aa, Oryza sativa
  unsure (1)..(361): unsure at all Xaa locations
  Clone ID: PAT_MRT4530_70466C.1.pep
WFGEVLGSSRTVVARGIGEKAHGGAQAGAAAAKQSNGGAARLGGRDDANGKNLGEELTGVRKRYRRRFEDGKGWKADGGTRPSGGARRMTPRRRGVGASASGKMRGSAKMGRTGAPLWLPALAGSHGSATTTMAVKAAMVWWGEEARQRGRWEGSGFYSGAXGRKGGVSGALCPLPHQDKGESEAALPAREKRKEEEEREPCSFRFWAARLERRVGLASPRWRLVACGGGAMVTQRMTAKREEGWFGGERGPRRGDGGAATAVGLERRRAREHRRGAVKVGAQARQDVVGVLCLRAQEDKGERREVGFRREKRGARGKGCRRIQTAAAGIGAEGLGMYQGNSRRSHGIDSKGILGYLFSGT

SEQ ID NO: 172319 - protein, 242 aa, Oryza sativa
  Clone ID: PAT_MRT4530_70467C.1.pep
MFPAGLRVLVIDDDCSYLSVMEDLLLKCSYKVTTYKNVREAVPFILDNPQIVDLVISDAFFPTEDGLLILQEVTSKFGIPTVIMASSGDTNTVMKYVANGAFDFLLKPVRIEELSNIWQHIFRKQMQDHKNNNMVGNLEKPGHPPSILAMARATPATTRSTATEASLAPLENEVRDDMVNYNGEITDIRDLGKSRLTWTTQLHRQFIAAVNHLGEDKAVPKKILGIMKVKHLTREQVASHLQ

SEQ ID NO: 172320 - protein, 440 aa, Oryza sativa
  Clone ID: PAT_MRT4530_70468C.1.pep
MRRPPPPPPPAAASSHGRRRAGASPAPAPPRHAPGEAAVIWGGRGFSGDDLEAATGGGEREHALFGRREQNRGVAIGILVGGQVSPYSSHQYYYYSGETASTLIYAPSIREYKGFYYIIKGYYVIGQKVMSERIKCGLRMESGRQWRRRMEDDRTTPTTREGPANTGRHEGGRAKERLKDVDLLGWSSSWWRLGFGVILVKRMIRVLGYVGTRIYVIRYQANRRQRLYWFRLLIRIDDGKPHITIEVDEINDTDKIVVVVFDEISRRLDFVYSSFISYGGGPCYTVDHLDLQIPTAYTGTICVREADCLHIIIYIEHIADSSKPYRHRLISASAGITPSAYICLICNHDSGGNETTVDAVQLGLGLHGYRPTRARAERIRALLADALAEELPSRIAPSPSAVMPSSSSKANFGGVLFLLKMKMKMKIKFFTQNEVVLTYD

SEQ ID NO: 172321 - protein, 41 aa, Oryza sativa
  Clone ID: PAT_MRT4530_70469C.1.pep
LVLDASGRPGFFFFFFCFFFFFFFFFFFFFFFLFWEKAGPI

SEQ ID NO: 172322 - protein, 154 aa, Oryza sativa
  unsure (1)..(154): unsure at all Xaa locations
  Clone ID: PAT_MRT4530_7046C.1.pep
SXXXXSXXSXXXXCPXXGXFFFXXKXFLRRXPXXXXXSXVXXDXFXXLXAKXXXXXXSXVXXXXXNNXXNXXNDKXXIIIXXILKXHXPXNLSNXXXRAPXNKGXXXXXXTNXXXDXXPXXAPXXXRCXEXXXXNNXXTKKRXXXHXANXKKYT

SEQ ID NO: 172323 - protein, 226 aa, Oryza sativa
  unsure (1)..(226): unsure at all Xaa locations
  Clone ID: PAT_MRT4530_70470C.1.pep
ARSVGCSGGGGGRVREGTRVDKFSKNDIIVSPXSIRLSAAETLSKLGEQVKAVLDSGRFXMLLDVHLMIVEXEQRVPDFXKAGADIVSVHCEQSSTIHLHRTVNQIKSLGAKAGVVLNPATPLTAIDYVLDVVDLVLIMSVNPGFGGQSFIESQVKKIAELRRLCAEKGVNPWIEVDGGVGPKNAYKVIEAGANAIVAGSAVFGAPDYAEAIKGIKTSQKPVAVPA

SEQ ID NO: 172324 - protein, 156 aa, Oryza sativa
  Clone ID: PAT_MRT4530_70471C.1.pep
MSLSSYLTCNLVTRQRQRGGVEEDEYDGRRQPQTATCCTALKRGVTADGLLAQPRYAPVRTPQSALLLLDPPPPAPMTPTSSSSNSNHDDDDEKKKKQPMLQQQKQVRKCKSTVEEASASQLMECKGGGPPPRLRRSGGVRRDWSFEDLRANNTAA

SEQ ID NO: 172325 - protein, 212 aa, Oryza sativa
  Clone ID: PAT_MRT4530_70472C.1.pep
MLLRLRPPPQPAASLASFLPFSPFRRFLHSPSWRPPPPPPPRRHRLLSTAVASSSSSSKVSTSLEERYDVIVVGGGHAGCEAALASARLGARTLLLTLNIDRIAWQPCNPAVGGPAKSQLVHEVDALGGEMGKIADRCYLQKRVLNSSKGPAVRALRAQTDKREYAVEMKKVVESTQNLFIREAMATEVMIGQNDNVEGVRTFFGMDFYAPS

SEQ ID NO: 172326 - protein, 70 aa, Oryza sativa
  Clone ID: PAT_MRT4530_70473C.1.pep
MATGVGGGAQGRVAPTRAPRDVPAAGGAEEGVDGAGGGRSLGRRDGDERWRRLLGVAVFVGVVIIQTSSL

SEQ ID NO: 172327 - protein, 80 aa, Oryza sativa
  Clone ID: PAT_MRT4530_70474C.1.pep
PKLLDLLVDSSNLIGVNTCYKREETSSCLVVFFLRLDDIDHSRSSPDYLWRPPAPNPSSPMGSKHPPHRPASDGPSARLR

SEQ ID NO: 172328 - protein, 137 aa, Oryza sativa
  unsure (1)..(137): unsure at all Xaa locations
  Clone ID: PAT_MRT4530_70475C.1.pep
MDYSLSCRYIVSDQLYLETKPTHDIKDIPPKVLRXSSNHSTNTPTIAYEAXSRQEISSNDLDKDLAGIVGFICTLYIMWFSISISYKLDYDYYLTXGLNWYNPCLLSILMSYRVDPRTNVPQYPIYPVYGYPLSTVS

SEQ ID NO: 172329 - protein, 1011 aa, Oryza sativa
  Clone ID: PAT_MRT4530_70476C.1.pep
METMLSLLTHALLLQTVTSQTINGDDLSALLSFKSLIRDDPREVMSSWDTAGNGTNMPAPVICQWTGVSCNNRRHPGRVTTLRLSGAGLVGTISPQLGNLTHLRVLDLSANSLDGDIPASLGGCRKLRTLNLSTNHLSGSIPDDLGQSSKLAIFDVGHNNLTGNVPKSFSNLTTLVKFIIETNFIDGKDLSWMGNLTSLTHFVLEGNRFTGNIPESFGKMANLIYFNVKDNQLEGHVPLPIFNISSIRFLDLGFNRLSGSLPLDIGFKLPRIKIFSTIANHFEGIIPPTFSNASALESLQLRGNKYHGMIPREIGIHGNLKFFALGDNVLQATRPSDLEFFTSLTNCSSLQMLDVGQNNLVGAMPINIANLSGELSWIDLSGNQLIGTIPADLWKLKLTSLNLSYNLFTGTLPHDIGWLTRINSIYVSHNRITGQIPQSLGNASQLSSLTLSNNFLDGSIPSSLGNLTKLQYLDLSGNALMGQIPQEILTIPSLTKLLSLSNNALSGSIPRQIGLLNSLVKMDLSMNKLSGEIPKAIGSCVQLSFLNFKGNLLQGQIPENLNNLRSLEILDLSNNNLAGPIPEFLANFTLLTNLNLSFNALSGPVPNTGIFCNGTIVSLSGNTMLCGGPPDLQFPSCPSKDSDQASVHRLHVLIFCIVGTLIFSLFCMTAYCFIKTRMKPNIIDNENLFLYETNERISYAELQAATESFSPANLIGSGSFGNVYIGNLIIDQNLVPIAVKVLNLSQRGASRSFLTECDALRRIRHRKLVKVITICSGSDQNGDEFKALVLEFICNGSLDEWLHASTAAISTSYRRLNLMKRLHIALDVAEALEYLHHHIVPPIVHCDIKPSNILLDDDMVAHVTDFGLAKIINIAEPCKESSSFVIKGTIGYVAPEYGSGSPVSMDGDIYSYGVLLLEMFTGRRPTDNFINGMASLIDYVKTAYPNNLLEILDTNATYNGNTQDMTQLVVYPIFRLGLACCKESPRERMKMDNVVKELNAIKKAFSAHTYA

SEQ ID NO: 172330 - protein, 470 aa, Oryza sativa
  Clone ID: PAT_MRT4530_70477C.1.pep
MDQDKEQQLSLNQEDDTIRWKLTPDGFFSVSSAYDLFFMARETTWQRGAGRIKINASSVNDSRKITAEQLLESIKEEIFVWKSGVILRFQGSPQLPLLAITATSQTINGDDLSALLSFKSLIRNDPRQVLSSWDSIGNDTNMPAHVFCRWTGVSCNNCRHPGRVTTLRLSGAGLVGTISPQLGNLTLLRVLDLSANSLDGDIPASLGSCRKLHTLNLSRNHLLGSMPADLGQSSKLAIFDAGYNNLTGNVPKSLSNLTTLMKFIIKRNIIHGKNLSWMGNLTSLTHFVLDGNRFTGNISESFGKMANLIYFNVRDNQLEGHVPLPIFNISCIRFLDLGFNRLSGSIPLDIGFKLPRINYFSTIANHFEGIIPPTFSNTSAIESLLLRGNKYHDTIPREIGIHGNLKFFALGDNMLQATRPSDWEFFTSLANCSSLQMLDVGQNNLADAEEEPRAPAEAEDKLCAGGCEHP

SEQ ID NO: 172331 - protein, 76 aa, Oryza sativa
  Clone ID: PAT_MRT4530_70478C.1.pep
MAWHMDTEDGRRRDICSLSPTGGTPVIPVMVTASQTENVGKAGPQGRTYVTDNSCRTSPGHYDNVDLVSVDRKKGS

SEQ ID NO: 172332 - protein, 84 aa, Oryza sativa
  unsure (1)..(84): unsure at all Xaa locations
  Clone ID: PAT_MRT4530_70479C.1.pep
MFLRTLLIGERRMAFSGGNCRWKHLCPCGSRYXGRKMFPVMDEEGFTTHTVIMAEIPSKGHAHGXLEARTPPLPGSDNGCKQDF

SEQ ID NO: 172333 - protein, 148 aa, Oryza sativa
  Clone ID: PAT_MRT4530_7047C.1.pep
MGRLRPPCCDESSVKKGPWTREEDEKLVAYVDQHGGHGSWRSLPKRAGLNRCCKSCRLRWINYLRPDIKRGNFTPEEEQAIITLHSVLGNKWSTIATRLPGRTDNEIKNYWNTRLKKRLIGAGIDPATHRARPRPPAPGDLATALPQL

SEQ ID NO: 172334 - protein, 87 aa, Oryza sativa
  Clone ID: PAT_MRT4530_70480C.1.pep
SRVLNIAITCFFRPVFPKIRFSHNSSSGSISSLPPRVGFPIRLVTPSVAWAPWQWVFLKNMGLQVLYEFAIFMLLMVPGHFYIDGLI

SEQ ID NO: 172335 - protein, 59 aa, Oryza sativa
  Clone ID: PAT_MRT4530_70481C.1.pep
PRVRPRVRPRVRDKLQFKDLSLGHSMIPFGSCTMKLNASGEMMAVTFPKFGNMPPFGPS

SEQ ID NO: 172336 - protein, 37 aa, Oryza sativa
  Clone ID: PAT_MRT4530_70482C.1.pep
MGPMKEQDFAWVDVLRQANTRLVGTNHDDAEMVEGNR

SEQ ID NO: 172337 - protein, 78 aa, Oryza sativa
  unsure (1)..(78): unsure at all Xaa locations
  Clone ID: PAT_MRT4530_70483C.1.pep
RGSPSSRGVFFCTQGSPMDRPKILKGXRILKDNGPPKRWKKCQKGRLVRQKGEVAPPPNVWIVDSTNNFRAMELSGPR

SEQ ID NO: 172338 - protein, 755 aa, Oryza sativa
  Clone ID: PAT_MRT4530_70484C.1.pep
MAGQTVYYAGQTVPYPDQIAPPVAGLTAPLTTGQTGPWAVILLHTSLIPNAYNDPNGGYSHDTGYGQYNNIVPQQPPLRPPNPPLDSPRPETVEDWLRNIIRENFAVEPRNRAREYQKPYPDYYDILPYPRDYRISEFTKFSGEDSRTTCEHVGQFLAQCGRASNMDTYSVPYPQGFEVPNFTKLTGQNAMTTMEHIGQFTDQCGKVGSNDLLKLKLFPLSLSNFASTWYSLLAPSSISTWSQMEYEFHDYFKDVSLMEQRLIDDSSVTCGTISVTPMPKTGIISDPLSISPIDVDKKKWKSVIIRDPRPKTIRINNSKAEDHKVAKDESSSSQKTKKLKLTFEMLMAKYKKGLAGQRFHNQTSDSKRSRSSRRKRFGQTPKQSQPSTIPTPYKPPVVMPWYPYQMSLYGYPFMYYMPWMPQPPMPFHQEWKESPRSIPSHSSNSSQDCFPRKNRSDGSNVKNVKKVWVRKEAKAPEVVTIKEESQYVQVPTGDAAKTIQANKTEADAVTANSGGLTDLTGRKPILLGGQDINMLMKKSREMNGDGYDITSLSRRLLDANERRAGFYWPKVIDDCFKYYRGCEVCQRIGNVQLVPNAVLNPIIKPWPFRGWALDFIGQIYPSSLKGHRFVLVASNYFIKWAETVSFKNITYTEEIEEHQKKVAWVLLEALWAHRISKHGTIKVTPFELVYGQKAVLSVEINLGSLQYIKQNDLLIEDYKTLMGGNFENIIDKRLKTFEEMETLTTFFGEQSMGNT

SEQ ID NO: 172339 - protein, 69 aa, Oryza sativa
  Clone ID: PAT_MRT4530_70485C.1.pep
GIPLLPAELQHPIPHCCTVSDNDEDYMPPIDSSEEEEEPYVSTAPDDGDMCTFRDLIANSLMANRRRGT

SEQ ID NO: 172340 - protein, 920 aa, Oryza sativa
  Clone ID: PAT_MRT4530_70486C.1.pep
MSKRPKLGGFSIPRPTSYSFERSQPPQRLYVPADDPDLDDIAFSDDAAAPSDAPPAGGGGAAGDEEEIDPLDAFMAEIQEEIRAPPPAPKPEALRRADSDDEDDPVESFLRAKKESGLALAADAMHAGYDSDEEVYAAAKAVDAGMMEYDSDDNPIVVDKKKIEPIPPLDHSTIEYEPFNKDFYEEKPSVSGMSEQEVADYMKSLAIRVSGFDVPRPIKSFADCGFPVQLMNAIAKQGYEKPTTIQCQALPIVLSGRDIIGIAKTGSGKTAAFVLPMIVHIMDQPELEKEEGPIGVVCAPTRELAHQIYLEAKKFAQPYNLRVAAVYGGVSKFDQFKELKAGCEIVIATPGRLIDLLKMKALKMFRATYLVLDEADRMFDLGFEPQIRSIVGQIRPDRQTLLFSATMPYKVERLAREILTDPIRVTVGQVGSANEDIKQVVNVLPSDAEKMPWLLEKLPGMIDDGDVLVFAAKKARVDEIESQLNQRGFRIAALHGRTGRAGDKDGTAYTLITQKEVRFAGQDVPNELMDLAMKDGRFRANRDSRKGGKKSGKGKGGGGGGGGGSGARGRGRGVRGVDFGLGIGYNAESGSVPAPRSAALNSLKTGMMQNFKSSFVSASSSNTPSNSAPSRGAPSSFVRPALRGFVSGGTIGGDANQARAVLPAPSFVPASRPAENTVENANPNPERDREGAATAMPKLPMDQRPRLTLEDYILFFTTRSGHGLTMDHLNQIVFMHGFIKFHRQNKVPPQSTSICPHFGSVLPQKPVTRVSQPVIVDALNKFDLMRPRRSTVGINAAAPPRGAAKPSDALLTMDEARDDIEDLGWRECPVGSLLSIRAGGGDAAPSAAHMPIAAIRPGSTAVERVSPPSILSACSPAPPGAVVIRKRCKKGQGKAAMRGRKRRVVQLLTLPSVENLAATA

SEQ ID NO: 172341 - protein, 165 aa, Oryza sativa
  Clone ID: PAT_MRT4530_70487C.1.pep
MSSVFSGDETAPFFGFLGAASALVFSCMGAAYGTAKSGVGVASMGVMRPELVMKSIVPVVMAGVLGIYGLIIAVIISTGINPKAKPYYLFDGYAHLSSGLACGLAGLAAGMAIGIVGDAGVRANAQQPKLFVGMILILIFAEALALYGLIVGIILSSRAGQSRAD

SEQ ID NO: 172342 - protein, 977 aa, Oryza sativa
  Clone ID: PAT_MRT4530_70488C.1.pep
MSKRPKLGGFSIPRPTSYSFERSQPPQRLYVPADDPDLDDIAFSDDAAAPSDAPPAGGGGAAGDEEEIDPLDAFMAEIQEEIRAPPPAPKPEALRRADSDDEDDPVESFLRAKKDSGLALAADAMHAGYDSDEEVYAAAKAVDAGMMEYDSDDNPIVVDKKKIEPIPPLDHSTIEYEPFNKDFYEEKPSVSGMSEQEVADYMKSLAIRVSGFDVPRPIKSFADCGFPVQLMNAIAKQGYEKPTTIQCQALPIVLSGRDIIGIAKTGSGKTAAFVLPMIVHIMDQPELEKEEGPIGVVCAPTRELAHQIYLEAKKFAKPYNLRVAAVYGGVSKFDQFKELKAGCEIVIATPGRLIDLLKMKALKMFRATYLVLDEADRMFDLGFEPQIRSIVGQIRPDRQTLLFSATMPYKVERLAREILTDPIRVTVGQVGSANEDIKQVVNVLPSDAEKMPWLLEKLPGMIDDGDVLVFAAKKARVDEIESQLNQRGFRIAALHGDKDQASRMETLQKFKSGVYHVLVATDVAARGLDIKSIKTVVNFDIAKEMDMHIHRIGRTGRAGDKDGTAYTLITQKEVRFAGQDVPNELMDLAMKDGRFRANRDSRKGGKKSGKGKGGGGGGGGGSGARGRGRGVRGVDFGLGIGYNAESGSVPAPRSAALNSLKTGMMQNFKSSFVSASSSNTPSNSAPSRGAPSSFVRPALRGFVSGGTIGGDANQARAVLPAPSFVPASRPAENTVENANPNPERDREGAATAMPKLPMDQRPRLTLEDYILFFTTRSGHGLTMDHLNQIVFMHGFIKFHRQNKVPPQSTSICPHFGSVLPQKPVTRVSQPVIVDALNKFDLMRPRRSTVGINAAAPPRGAAKPSDALLTMDEARDDIEDLGWRECPVGSLLSIRAGGGDAAPSAAHMPIAAIRPGSTAVERVSPPSILSACSPAPPGAVVIRKRCKKGQGKAAMRGRKRRVVQLLTLPSVENLAATA

SEQ ID NO: 172343 - protein, 55 aa, Oryza sativa
  Clone ID: PAT_MRT4530_70489C.1.pep
ISIGEIHYITEWGLHNRGAHDLTLQLQLKDHLYQCASYNPDTYIHTPQSFKRCPN

SEQ ID NO: 172344 - protein, 278 aa, Oryza sativa
  unsure (1)..(278): unsure at all Xaa locations
  Clone ID: PAT_MRT4530_7048C.1.pep
PRTHRGGREPKKRGGVKKERLTSPPERWARPDGRPNGEEARAGFEAKRPGGVPRVAGQNGGPYEVGREPAKPEGGGXPKREEVRGDDGGKPELGGDGGKKGRRRGLYSDGEEXRRAAETEERGTGSDXIGLGGREGGRGGRNRPRKSRTPSMAPARIAGDFPNESEGEREGKEGGKREGITGSDFPLFMARGNGGXGGFGGGGGARARAGXRARREVGDDRWAPPVSEGGGRAHPSAARARGKADGPRGRGERGRELGRAGPRGGRGGKEDFLGFFFL

SEQ ID NO: 172345 - protein, 183 aa, Oryza sativa
  unsure (1)..(183): unsure at all Xaa locations
  Clone ID: PAT_MRT4530_70490C.1.pep
MRAGLEQGRXGQCKXVVGRASDAXARRLREKEAELDAARRRAAELEERLRQVAAESQAWCGLARSNEAVAAGIRATLDHLLLRAAAAAPAQPAEGFGDSDPLATAAADDAQSSCFDTNAHAADDAATSPAASKWSCKSCGEGDATVLLLPCRHLCLCKACEPKLDACPVCLAAKNASVHIAIN

SEQ ID NO: 172346 - protein, 1095 aa, Oryza sativa
  unsure (1)..(1095): unsure at all Xaa locations
  Clone ID: PAT_MRT4530_70491C.1.pep
MSSNPDGGRSFARRDILLKIQSDAQKXWEEGKVFEAEPGNKPPGPGEKFFGNFPYPYMNGLLHLGHAFSLSKLEFGAAYQRLRGSNVLLPFAFHCTGMPIKASADKLSREAQQYGYPPAFPEVEDDSSAEVADSSQADNAASVVPDKFKSKKSKAASKVGMQKFQWEIMRGFGLSDEEIAKFQDPYHWLTYFPPLAKEDLKAFGLGCDWRRSFITTDMNPFYDAFVRWQMRKLKKMGKVVKDMRYTIYSPLDGQPCADHDRASGEGVQPQEYVLIKMEVVPPFPPKLKTMEGRNVYLAAATLRPETMYGQTNCWVLPDGKYGAFEINDTDVFIVTSRAALNLAYQNLSGVPDTDVFIVTSRAALNLAYQNLSRVPEKPTCLMELSGSDLIGLPLSIVTSVPSDSPDDFMALQDLVAKPALIPRDAGDSPDDFMALQDLVAKPALRQKYGVKDEWVLPFKVVPIINIPEFGDKSAEKVCLDLKIKSQNDKEKLAEAKRMTYLKGFTDGTMIVGEFNGRKVQEAKPLINDECVVALTDQWYITYGETEWKQKAVQCLEKMNTFSAETRNGFEHTLGWLNQWACSRSFGLGTRIPWDEQFLVESLSDSTLYMAYYTIAHLLQNGNMYGKEISSIRPEQMTDEVWDYVFCDGPAPNSDIPPALLSKMKLEFEYWYPFDIRVSGKDLIQNHLTFSIYNHTALLPEHHWPRGFRCNGHLMLNSEKMSKSTGNFRTLRQAIEEFSSDATRFALADAGDGMDDANFVFETANAAILRLTKEIAWMEEVIAAESSLRAGPPSTYADHVFANEINIAVIETEKSYNAFMFRDALKLGFYDLQLARDEYRLSCGAAGMNRELLWRFMEVQTRLITPICPHYAEHVWRNILRKEGFAIKAGWPIAGTPDPTLRIANKYLQDSIVKFRKLLQKQESGSKKPKKGTAPPPSEQNKLTVGLVYVNENYYGWKEQCLRVLQSKFDSQARLFAPDEEINEALKNCSIGQETNFKQVQKLCMPFIKSKKDEARSVGPHALNLKLPFGEMSVLEENLELIKRQVGLEHAEVLSASDEAARAKAGVHASMLDKTPPSPGEPVAIFMSKLDLEARC

SEQ ID NO: 172347 - protein, 178 aa, Oryza sativa
  unsure (1)..(178): unsure at all Xaa locations
  Clone ID: PAT_MRT4530_70492C.1.pep
KVCLDLKIKSQNDKEKLAEAKRMTYLKGFTDGTMIVGEFNGRKVQEAKPLIKNKLLEEGTAVLYSEPEKKVMSRSGDECVVALTDQWYITYGETEWKQKAVQCLEKMNTFSAETRNGFEHTLGWLNQWACSRSFGLGTRIPWDEQXLVESLSDSTLYMAYYTIAQXLQNGNMYGKEIS

SEQ ID NO: 172348 - protein, 91 aa, Oryza sativa
  Clone ID: PAT_MRT4530_70493C.1.pep
MVSAYRQRAAAVSHRVHPRSAISKQQAAARPTSPQFFSSSPTVCRSSQIGSPRHQASSRLVVITAFLFRRSQRRAYFSTITTVAVAFFINA

SEQ ID NO: 172349 - protein, 118 aa, Oryza sativa
  unsure (1)..(118): unsure at all Xaa locations
  Clone ID: PAT_MRT4530_70494C.1.pep
PGALRLRMQCSQQLQHVTRESXCPPTRRMVRSSEESIPTPLEQGWSSSSSEYXAAEGSSSDQGYYAEGSPEEGYYGEQQHHPGMTRVRLPRASQYAAHPPSMCRVEPHQCSXFAPRPP

SEQ ID NO: 172350 - protein, 138 aa, Oryza sativa
  unsure (1)..(138): unsure at all Xaa locations
  Clone ID: PAT_MRT4530_70495C.1.pep
RVRRCSTAAHRPGEFHRCSPPGALGLRXQCCQQLQDVSRECXCXAIRRMVRSYEESMPMPXEQGWSSSSSEYYGGEGRRRSQGYYGEGXSEEGYYGEQQQXPGMTRVRLTRAXQYAAQLPSMCRVEPHQCSIFXAGQY

SEQ ID NO: 172351 - protein, 123 aa, Oryza sativa
  unsure (1)..(123): unsure at all Xaa locations
  Clone ID: PAT_MRT4530_70496C.1.pep
QDQCCHKLQDVSQRVPAAASHPARMVRSYEESMPDAPXEQGWSSSVSQEYYXGGEGSVSQEQGYYRRGVSQEEGYYRRASKQAAQGMTXVRLTRARQYAAQLHVRCARVEPXQQCSIFAAGQY

SEQ ID NO: 172352 - protein, 54 aa, Oryza sativa
  Clone ID: PAT_MRT4530_70497C.1.pep
MEVDSPATGDEEDGDNGNGLHLRLLSIGTQPKSPEVNRKELKKGEMGQIPNFCR

SEQ ID NO: 172353 - protein, 83 aa, Oryza sativa
  unsure (1)..(83): unsure at all Xaa locations
  Clone ID: PAT_MRT4530_70498C.1.pep
LPLGTKLSSSSRSTTARGVFSDRGIYGEGSSEEGYYGDQQQHPGMTRVRLTRASQYAAQLPSMCXRVEPQQCSIFASPAKYLG

SEQ ID NO: 172354 - protein, 150 aa, Oryza sativa
  unsure (1)..(150): unsure at all Xaa locations
  Clone ID: PAT_MRT4530_70499C.1.pep
RVPQVLDRQLTGRERFQPMFRRPGRSSGLXRMQCCQQLQDVSQRVHSCASHPARMVRSYEESMPXMHLEQGWSSSSSXEYYGGEGSSXSEQGYYRRGVSQEEGYYGEQXQQQPGMTRVRLTRARQYAAQXPSMCXRVEPQQCSIFAAGQY

SEQ ID NO: 172355 - protein, 64 aa, Oryza sativa
  Clone ID: PAT_MRT4530_7049C.1.pep
RELNTPLVESNQSDALSCRPMWHAATMHILTLTCHEDMFLHLATLYTTSMTRDVHVSIILLGCI

SEQ ID NO: 172356 - protein, 535 aa, Oryza sativa
  Clone ID: PAT_MRT4530_704C.1.pep
MATEDTSHISGSSKLDVHGLKHKKVGISTKDMNALFSLEENTTASGLGEPSEASPVDVKPRPVLKQLCEQMDTAGLLKFLSENWKKLSSLRDELSAALRCATDPARFVLGSLEGFFPSDHTSSPGNKQIILQGQRRSCIILMEAITPALATKEPGDNHPWSSEIRELAKAIAEEWKSKLAEVDLDASDGYSLEAQAFLQLLTTFNVDSVLDEDELCKLVVAVSRRKQTAELCRSLCLNERIPDIIKELVNRHRQIDAVQFIHAFGLSESFPPAPLLKTYVEELKDSLGNNGDGNAASLKDDPKTRELLALRAVIKCIEEYKLQKDYPLGPLQKRVAELKSKGEKRPLEAGRHNAKKPRTFGNSAARRPPNPVGSAGRRPSGPAGTWQRPPPPMPSYPDRYGHADRYHYTAPSATYDPPAYASYSEPYSASKPYQYTPGSVAPASYNSNQFKVAYGGPGAPPTAGGYGSYNDAAGQSTSSSYSGYSGYHPSLPRVQTPDVTFRYTLVDFVAVTGVDLDLPRLVVAYNLARFKDAKI

SEQ ID NO: 172357 - protein, 119 aa, Oryza sativa
  Clone ID: PAT_MRT4530_70500C.1.pep
RHRNTRYLLTRFSRNLHPRGSDYGRSSPTNIAPSRYESMATPPSSPCVSTLHCSRHGYIVVPPALFKRDAGLQSLTLTPPPNTYYNSKSNCNQIELVYSTPILTTSMPQDTLISCQLLA

SEQ ID NO: 172358 - protein, 132 aa, Oryza sativa
  Clone ID: PAT_MRT4530_70501C.1.pep
QLPGPERVPPMVPRPGAPGLRNQFFPQLQDVNPEGPWAPHPRMVRSFQESKPMPLEPSWSSSSSEDYRRQGLSSEQGDFRQGSSEEGYFGEQQQQPGMTRVRLTRARQYPAQLPSMCRVEPQQCSIFAAGQY

SEQ ID NO: 172359 - protein, 92 aa, Oryza sativa
  unsure (1)..(92): unsure at all Xaa locations
  Clone ID: PAT_MRT4530_70502C.1.pep
SPGLVRIYEDDHPDAPGPSCSSSSSEYYXGEGSSSDQGYYGEGSSEEGYYGDQQXPGMTRVRLTRASQYAAQXPSMCRVEPXQCSIFXAGQY

SEQ ID NO: 172360 - protein, 426 aa, Oryza sativa
  Clone ID: PAT_MRT4530_70503C.1.pep
HNSINTNLTNFQLWWTVLSSLGLPHCFLSSDVSFHEWHCSRRLKVPREHRCGFDTVVTLGAWSIWKERNNRVFNNCSWPWSEVAAADAAEEKQNSSIFISKNSHIAGREGEAGSHRLPPLPHGRAPPSSAAAATARPHSAVIRAAGHRPPPTPSGQIWEGGAGSRAASTLLAGRRRHRPSPLPPGARAATAASGRRPGEVRGGEGPMREERCGGEAGRRSGPHKGGYLVPKVMSACEKRPRVGKNAFSSNGLRAMVVVTGTREGLCDGLPLVPERGLGECRATGVGEGFLFHRTPNPSPSSVAGDAKLSGKAAGVDLVLGSRAKNERAKERNCGGDCCCDDDVDNRGLQEDERQEDCRRRDGGMGAACPLRLLSRPAPAAHTLPLGARCSHGQPLSSPTHGRCRLPPPQPPLLTAQPPLSPLPLRW

SEQ ID NO: 172361 - protein, 58 aa, Oryza sativa
  Clone ID: PAT_MRT4530_70504C.1.pep
MESLLASRPPLIANRGLNYSKAFLLMCKWNFSLQLIHSFLRCAYHRFPNYPHIKLSTI

SEQ ID NO: 172362 - protein, 496 aa, Oryza sativa
  unsure (1)..(496): unsure at all Xaa locations
  Clone ID: PAT_MRT4530_70505C.1.pep
MAAEAPAGAQNGCVFGTGPLPPASLSPPPAWFDPDLSSGEGAHVGNIPYDGTQEQLVQICEEVGPVVSFRLVIDKETVKPKGYRFCQYKDEETALRARRNLQGYEINGRQLRVDFAESGRKADRNREKVEDPQFLTXRNTYSNFQFRSWTPVVGDTGLHQPVGLPSAIHAASVMAGILGGSQTANVQNGLPVQYGLGNDPLTHYLARMSKHQLYEIMSELKSLTSQNKDVANKLLQGIPQLSKALFQMQMAKSQQPSSSLAQSSSHISEPFPQPDAMISSVPRPSASLPNPNVLQDPSAQLHNFPQYPHSSQPAGTIFPHGSQSGVGIHPPIVSQLLGASSSVPPLPLATSGSLISQVQPPFMPHHPRPPAMPAGMQQLPLTHPHVPQVPAIPDIAQKEMRFPEQANRSTEFAHHPKLRKLEDGTSTPGIVNNNPAVYPAPSQGMLPVPQLTPDVESALLQQVLQLTPEQLSSLPVEQQQQLLQPVSDFWKNILLD

SEQ ID NO: 172363 - protein, 85 aa, Oryza sativa
  unsure (1)..(85): unsure at all Xaa locations
  Clone ID: PAT_MRT4530_70506C.1.pep
EESKPMPLEQGWXKKSSEKYGRQGLSSKQGXYGQGSSQEGYYGEQQQQPGMTRVRLTRARQYAAHLPSMCRVEPQQCSPPPPGQX

SEQ ID NO: 172364 - protein, 88 aa, Oryza sativa
  Clone ID: PAT_MRT4530_70507C.1.pep
MAGCDEAKSLASMEEEACIEKKYGGIAPKKPLISKDHERAYFDSADWVLGKQAANSNGSKAAVETLKPKLKRTPHHQLPPRKPTCASS

SEQ ID NO: 172365 - protein, 121 aa, Oryza sativa
  unsure (1)..(121): unsure at all Xaa locations
  Clone ID: PAT_MRT4530_70508C.1.pep
PAARGALGLRMQCCQQLQNVTRECRCPPIRRMVRSYEESIPMPLKQAWSLSSSEYYGARGSSSNQGYYARGSXEKGYYGKQHQHPGMTRVRLTRARQYAAQLPSMCRVEPQQCSIFAAGQY

SEQ ID NO: 172366 - protein, 156 aa, Oryza sativa
  unsure (1)..(156): unsure at all Xaa locations
  Clone ID: PAT_MRT4530_70509C.1.pep
ASAHRKSPQDSPLNAXAQVLDRQLTAREXFQPMFRRPGALGLRXQCCQQLQDVSRECRCAAIRRMVRSYEESMPMPXEQGWSSSSSEYYRPAEGSSSEPRGTXAEGSSEEGYYGEQQQQPGMTRVRLTRARQYAAQLPSMCRVEPQQCSIFAAGQY

SEQ ID NO: 172367 - protein, 2012 aa, Oryza sativa
  unsure (1)..(2012): unsure at all Xaa locations
  Clone ID: PAT_MRT4530_7050C.1.pep
LQDQINWHAHTSEGEFWTCTGVKQISQASCFLSTRFWHARWDRLEVRKXIFLMAEKPPPLPSSASPGSVKEKIQQLDQSEVNEGNVMTISPDKLTPDQKELEAIMQQAQNQFLNSFMQTHKGTVVQKYQVRVVADVPGTGSSNDGRLKEALDSSAQPSDRGTTDGSAQESDGNHSQGVHRIQGDGTQGPQDRVDYAVHNALINQYGVLVNTLSNMMKLIADGSIAEHQATGPVYLPGGTFPNYRPLVTDIHPSIQAVPHIASPAQPTAPTLIPPPAPSTPAPGXLVNPRLLMRERPQHNEQVANRLTQDQVAAMFLPPQSTVDPVQXSRFNKHPQSNRLCSQFXNATKAADCATXSESGCPRAFGPSRAAGPHDVMREQFGLKTKDTGNLYRQPYPEWFERVPLPNRFKVPDFSNFSGQDSTSTYEHISRFLAQCGEASAVDALRVRLFRLSLAGSAFTWFSALPCGSINSWAYLEKQFHSYFYSWVHEMKLSDLTAIRQKHGEPVHEYIQRFREMRNKCFSLSLTNAQLADLAFQGMIAPIREKFSSEDFESLSHLTQKVTLHEQRFAKARRNSRKVNHVFSYMCGSDDEDDDDPEIATAEWVRSKKVIPCQWVKNSGKEERYDFDITEADKIFDLLLREKQIQLPAGHTIPSAEELGKKRYCKWHNSGSHTTNDCKVFRQQIQVAIEGGKIKFDDSKKPMKVDGNPFPVNMVHTAGRIADGGRARGFQVNSAKVINKYQRRYDKQQKRHYEEDNSGMRLPSIKDCPGXGGDTRGSSRPYIKINRLEHARVPVHQRLGPVNQDHDPKDDEDRKIQWCPTGIFTKNQKRRKTKPKQEWRVKKQVPVADEAVVDEAKRLAKGKSVVIASVNMVFILPAEFRVDQADVDEIEEESAKLVLSPEQAVFEKPEGTENRHLKPSXPLYINGYVNGKPMSKMMVDGGXLMPYATFRKLGRNAEDLIKTNMVLKDFGGNPSETKGVLNVELTVGSKTIPTKFLVIDGKGSYSLLLGRDWIHANCCIPSTMHQCLIQWQGDKIEIVPADSQLKMESTSYYIEGVVEGSNVYSKDTVDDLDDKQGQGFMSADDLEEIDIGPEFRTKLIELLKEFRDCFAWEYYEMPVLSRSIVEHRLPLKPGVRPHQQPPRRCKADMLEPVKADIKRLYDAGFIRPCRYAEXVSSIVPVIKKNDLNKATPKDEYPMPVVDQLVDAASGHKIFSFMDGNAGYNQIFMAEEDIHKTAFRCPGAISLFQWVVMTFGLKSAGATYQRAMNYIYHDLIGWLVEVYIDDVFVISKEIEDHIANLRKVFERTRKYGLKMNPTKCAFGVSAGQFLGFLVHERGIEITXRSINAIKKIKPPEDKTELQEMIGKINFVRRFISNLSGRLEPFTPLLRLKADQQFTWGAEQQKALDNIKEYLSSPLVLIPPQKGIPFRLYLSAGDKSIGSVLIQELEGKERVVFYLSRRLLDAETRYSPVEKLCLCLYFSCTILRHYLLSNECTIICKADVVKYMLSAPILKGRVGKWIFSLTEFDLRYESPKAIKGQAIAGFIVEHRDDSIGSVEVVPWTLFFDGSVCTHGCGIGLVIISPQGACFEFAYTITPYATNNQAEYEAVLKGLQLLQEVEADTINIXGDSLLVISQLAGEYECKNDVLLVYNEKCQELMKKFRLVTLKHVSREQNIEANXASGYKPMIKDVQIEVATIIADDWRYDVYRYLWDPSQSASWKLRYKALKYTLLDDELYYRTIDGVLLKCLSIDQVKVAIGEVHEGICGTHQSAHKMKWLLRRAGYFWPTMLEDCFRYYKGCQDCXKFETIQREPASAMNPIIKPWPFRGWGIDMIGMINPPSSKGHKFILVATDYFTKWVETIPLKKVDSGDAIQFVQEHIIYRFGIPQTITTDQGSIFVSDEFVQFVDSMGIKLLNSSPYYAQANGQAEASNKSLNKLIKRKISHYPRQWHTHLAEALWSYQMACHGSIQVPLYKLIYRHEAVLPWEVRIDSRRTELLNGKYLKKYYPSVWINA

SEQ ID NO: 172368 - protein, 231 aa, Oryza sativa
  unsure (1)..(231): unsure at all Xaa locations
  Clone ID: PAT_MRT4530_70510C.1.pep
MANLVFFSLLLCMAGFDLTKNFQDNSDAFFRSVKPRVVPLQKALSTKKATIPVSPSFKNMAEKTLRYFTAPSTDNVPVGPQINLGDGDFDLNTSLITMAQASPFCGKPNENAKCLSSTVPGDLQHSEERLQTRQCGMHTVKEIEMLAAKLDLLMNRLEDQEKNMPQGTVKALDAHITCEVYGNSGHSETDCLETREEAVFMNNGYHPQGGQGWNQAXPFYQGGNNNNSVPP

SEQ ID NO: 172369 - protein, 185 aa, Oryza sativa
  unsure (1)..(185): unsure at all Xaa locations
  Clone ID: PAT_MRT4530_70511C.1.pep
SGSPGCRLRRKGSSLLCGGQTMHRRKRSSGXSKCAYLTKSSQGTPLLDDSCHFAYSSFDSTSDEVSTIFGELDLEALSRWDGRRWSSCKSQDGIALPMSGADHAVSDQRSLSQKYRPRSFNELVGQSFVVQSLNNAIIRERIAPAYLFHGPRGTGKTSAARIFSAALSCVAIGENKPCGACMECT

SEQ ID NO: 172370 - protein, 61 aa, Oryza sativa
  Clone ID: PAT_MRT4530_70512C.1.pep
FASSHLNQFLLDIFIFRSELQLFWKNYFHFYNRTFPVIFLNFVFVFLSILNLFIAILFIPS

SEQ ID NO: 172371 - protein, 46 aa, Oryza sativa
  Clone ID: PAT_MRT4530_70513C.1.pep
FTLLLGDRDGPLIEETHFGGNKSNGTFPLFIWGVLDFVYKGLEPGG

SEQ ID NO: 172372 - protein, 261 aa, Oryza sativa
  Clone ID: PAT_MRT4530_70514C.1.pep
MEGKSGAVTVKLGRQRSNNMLLRGAWVPDRWEPGPPSWAHSTDYKTQYDRGCPLHEREFWRFNSYNAETPQDSVQIQSGEEAKRFKKSRNHSTYLLDLPLQVDLALGLMIALKAANLQLQQCTILLLDTDPALSLEVAFLAVNPELLSSTYLLVPALQIDPDLRLMAAFQAEIPELPLNLQDLQLNVVKFLDFVGQGGLLFGNNVINYNSGGSGEGCILWSEVSSTEADCCLSGCTSRAVSLLRVAAVKSQQSVSQARLIN

SEQ ID NO: 172373 - protein, 122 aa, Oryza sativa
  Clone ID: PAT_MRT4530_70515C.1.pep
MSNLGKVDFSNKVNKPRMSFSPLGLLPPPDPQQQKPLRQERQPEMAIGADKIVIPQQERLRPWGNADEQPEAWIGDPSVCWIVGLSTNNSHQSEKAPLVGQRMKHMYLILISTIKCSVRQIQ

SEQ ID NO: 172374 - protein, 2630 aa, Oryza sativa
  Clone ID: PAT_MRT4530_70516C.1.pep
MWKTQPGGTSRDGRGGGSTARANAGTGYPTRSRTSGNPQFSAPTNGANQRAMASLRSPLRGGPDMPTSRRCSPRLSGTQQDEVAEVARVGMLKRASNNASNSSTSRAPTRSSSTTTASSKDVAEEHSSGVGSTSSLSKKRKRMTAKSYRSLFKRSKKASSTERARKILPMGMWQRATLVHQHISIETCPQNKVAESRLEVEGRDRPTGHSRQNSISSLQSAPIPPIHYEEPESGHGDGEPLSIQKEVASSQFKVTASDEMEGNSNICVACGTPGDLNRVCDSGPVMEKAAKEATMFLVWIIGWNICLLRLLFGIHSVADGIESLWNVKEGMQNGKQYLVKYKNLAHVHNRWVPEGVINDTPGGCDLLSLFNKRDHKEKTNWKKEWTEPHHLLRKRPLMPPKEADDFFCSSRANIEHCNVEWLVKWRDLGYEHATWELETACFLRTPQADELKRKYENRRKAAKQSSIPVETKVKHKTFQKLQRLPDEWPPGFDNDHLFSINQLLEFWCKSHGAVLVDDKEYVTKTILFTLTVLPDVCQPLLIVTTPASLSAWEIQFNHLAPFINVVVYDGQKDTLKLIQDLEFYDNRRCMMLQVLLSHPDAILEDIETIERIRWEAVIVDYYENSAFKYFEQLKKISTDFRMVLLGSPIKDNVPEYMNLLAFLNSEDKGYSDYVNADDALVMSKARFTHHIAYERKTDSSKFLEYWVPSCISQPQLEMYCSILLSKSSVLRSEMETDSVGALHDIYLSLKKCCDHPYIVNEFLRSSLSNNSNVTENIDTVVHASGKLLVLDKMLNEIKKKSLRVILLFQSDRAGGNKMGNILEDLMHHRFGPESYERVEYRAVLSRKQAAIDKFNNKTNGRFVFLIENRACLPSIKLSSIDAIIIYGSDNNPLNDLKALQKIKIESQFERVSIFRLYTPFTVEEKSLVLARQGIVIDNNIQDLRTSLKHSLLRWGAAFLFSRLDEVQQDDHASKSSEMERHFIDEVIVEFLTKLSTTVEDSTEVHRKSISKANMSGELYSRNITLMGEKEGISVLEDNPAEFWLNLLDGRSPHVSCISEPLQSRVTKSQTMDEVNAPAEEINEARKKHRKVGEIMGSSSKVVSDKSNDDALPDICTTSGPALQPVDVTQQKSVQSEGSESLMSTPKNLHAQMKQELSKLIKVLQLPNTIQFNGAKIAGQVLIEVDNVTLLVEQFFEYLLNNHVVVQEPKYIFHALNIALCWRVASIHNFKVDHKESLALAEKRLKYECNEELARLVYDSLKRKFPKKAGATGSNCQSTSVEKTKPSQQETSNILRNDHIFPKQRMDLHDNFMNGALQEGSFVAAQMVSEEQELIAVPGTHMECHFSTDELPDIVEKRINLIDNVFSVREYRIFDKQQSQISELEKYTQNKTARLKTVCNLVLEHICRSHADVETRNDTIKQTVQWFTMLMYAFLEHMRLQHSKLESLQSNTWAEERQLKEKLCLEAKSGQLDHTFDQQIALPDSNFVMQEFIHLKEQSSNSHVSGSAVSDCQQLCHDRLKMVNTLVRNVVPSEPISAQTVRNGSVEVVMVAGQPAPEVVDFPENNTCYSPDGIGLQKAKSPSIRPSNDDSINQESSASEYTSTENVERDNANPSTLPGVATSPAIGIYANLESTMVASTQNLTIFPASKEVATQSNLSTLPGSQTVETSQQPPAEAKLTENLGVTAWDVQPEMQTTTSTLDSPSARMCPDNNNQTVHQPDTSTSPLQEGSTSCHLTSVDATAGVTAKVDDTAAADPLDSETQSYTAAHKPAALLVSTEVETQTDQSSMLERQSISVPLVQSSLSSQNPPAEAEPASTLSRETARDVQPERQQSASVLETSLQRMHPDDDSQTKHQLETVLSQRGETCGHLGDAREIVDANDSNTVCDVRAHLESPIFATPQSLVICQGLSEVGSQGNISNMSSQQSTDLSAQQNLAPSPLPPAEAERTGLLTTQPAQNFQPELQPSTSLFDASLESNNISQTDCQSDRAVVFLQEGATTQQHLLDTGVVVDDIVAEEPSHSESPTYIIHETAALVVSTEVETQTCQSNIPIQQNTSHPAQQSPETSRHSIASPVGLEATQEFQPEMQPSTSGQDQSEELEQEGMSSSAIQDLQPEMQPPNSVQGQYPGAVLCIAAAEDLQPLMQSSTPVPNQLAEANQEGMLSAAAAQNLQCETQRLTSTQDAPFERTDLSGIPVPRSITTAHQSVVPSWDLQTGVEPTGALCMETTHERQSELPSGSMQERSAETRANLVQRSCTTETCDLQPQLDLSSTIQTVQLEGIRSEDMNQIGVQSNSALSSEQLTQPLPVAPLVFNYQRFSDEPLKNELERLKHTSNVLSKVHEQKRKQLLVEYNQEMEKLKQKYDSLLQKEDSFYAQKEAELDTIYRKVFINQSLAENFRRKFLPLSAAQGGSTRPTIGQLVQSSQEPSARIVAEQVTASPVTLSSAVRPQVLHSSGPYVQPSLVVQPSSQATQPQSILPGNMYRAMSSSPFSSTPMPMPHGTYRAAGAQPHAPSPHLQQLRMPSPYATSHGNQHQRPSILASLLPFVLPSSSNPSLTAPLSLNTVVHRTSGPLNAGAGSQHAGSQISGVNPSGSSASASLNTWLTARLALTSEARGTVSSTEVVCLSDDES

SEQ ID NO: 172375 - protein, 122 aa, Oryza sativa
  Clone ID: PAT_MRT4530_70517C.1.pep
LGIFRAYFSFLCKNPREWLNPPVSPLLGPAVVASGYTNQYGLLFPSQITKIFTCRCNHCTLAAVRRRRRAVPCGRRSEAALWDDHAGRRPAGVLAKGPRRLAGAAVLRQVDVSDPDPRAWVG

SEQ ID NO: 172376 - protein, 181 aa, Oryza sativa
  Clone ID: PAT_MRT4530_70518C.1.pep
MGVRRHKQRESEAAVTLSVREVEAAEAASLRQEPSRSGGGEGAQAPPSPCEAGAAFAALPSAGSVGGRAPPGSRRSSRRAPLTPSMPPHAAPLVAASDEREERVLKREGKERRENERDREETREFERASGRCGPYLLDALWWGLSAHRRFLILKSQVSILGPVGYGPTTLPLRHSDIVVQS

SEQ ID NO: 172377 - protein, 342 aa, Oryza sativa
  Clone ID: PAT_MRT4530_70519C.1.pep
MTSPQRKMICHRQLADRLSFMVLTAVYLSLFLVYCWTKSTGTLTNLKGKIFGPALKLSRSSRPRVFASTRFWHAQRDPINLSGDKQALKSTDPQNKPPNPAGSEVHEGNIILVTLDKLSAEHRQELEQMMSSMKDKFMNSFKETRQGTIVQKYKLKVVAADEVGSSSAQGDKGTAGEPGDKDGSGLQPQFDNFQDRIDYAMQHALINQSGVLVNTLTNMVKTMVDGTIAEHQVTEPVYLPGGVFPNYKPLVTGNQQGSSNTPSTLLMAPVTTSAPAAPSSAQRQMTNPRLYTREQPQHGGQNINRLTQEQVAAMFFPNPPAANPALPSQHMPPRQQITQPIQ

SEQ ID NO: 172378 - protein, 821 aa, Oryza sativa
  Clone ID: PAT_MRT4530_7051C.1.pep
MAEKQPPPPSSPGFVKDKMLKLGLTDVNEGNVVPIDPEKFTPEQKKEFEAMLQQKYKIKVVADDPGTSSFKDGDGKQAPDGSAQPSIKGATDGFLGNQGDNSQGVHGVQGDGVHGVQGDGAQGLQGGNLNQNSDVAQDFFNNFQDRVDYAVHHALINQSGVLVNSLSNMMKSIADGSIAEHQAAGPVYLQGAADSTDTPNSAGCTTNPATGHATIQQTPPRQQPLQPIQQTLLRQQIVQPIQHQGSISASAGFATPGGQPVQQFLNQVVPEHLVHHVQPGGTVMPQVIPEHLVRNIQPNLHNYQGGNLNYQYQPPSPQAQYQLGALAQPQFASQYGQFEPMQQQSQGAAQQQPWANVIADVMREQFGLKPKETGSLYRQPYPEWFERVPLPNWFKVLDFSKFSGQDGVSTYEHISRFLAQCGEASAVDALKVRLFRLSLYGSAFTWFSSLLYGSINSWADLEKQFHSYFYGGVHEMKLSDLIAIKQRHDEPVQEYIQRFREMRNKCFSLSLTDAQLADLAFQGMIAPIREKFSSEDFDSLSQLIQKLTLHEHRSAEVRKSSKKVNHVCLYMYGSDDDEDDSEIAAAEWVRSKKVIPCQWVKSSGKEEKYDFDITKANKIFDLLLREKQIQLPAGHTIPSAEELGKKRYCKWHNSRSHSTNDCKVFRQQIQVAIEGGKIRFDYSKKPMKVDDNPFPVNMVHTAGQIADRVRARGFQANSAKIIDKYHEEYDDGFDPHWGCEFFRFCWNEGMRLPSIENCPGCSDIVESSSRSYNRGNRLRQTRVSVHQRLGPVNQDHGQEDNVIRKNQWCPSGIFTKNQKNI

SEQ ID NO: 172379 - protein, 553 aa, Oryza sativa
  unsure (1)..(553): unsure at all Xaa locations
  Clone ID: PAT_MRT4530_70520C.1.pep
TTIAGHLRLHRPAGVRRRRLVFPPARLAYYAAVVGHLRLHHRHASVAANWCPHLYSXLVTPPFMDVHVFTDWLAFATADWCFRLHGWYIMPPLLGVYDFTXQPASVAADWCSRLYGWLVTPPLMSIYFFTXRLAFVTADWCXRLYGWLVTPPSMGFIIYTTSLVPLVPTGVFVSKAYLLCFRNRSIRTSPXGLLSPPPTGVLAYTVGWSHHHCWASTPSPTGSSSPPLTGVSAYTVGWSHHSCWASTSSLIGLPLPAPTGVSACMASLLCHRCWASMSSPPACPXAADWCLRLHGWPIMPLLSGIYVFTTGSSSPPPTGVFTYTVGWLQHCCWASMSSPLACLRRHRLVYPSARLAYYAAVVGRLYLHRPAASYDANLCYRLHGXTPPPPPLIGVIIFNASCLLTRALASTAGLYHYLPSPTGYATVGWCFYLHNHASLLPVCLXCRRLVFTSSWLCNFVIMVELLHLHCLRHQQTLLPVLRKFCYFTSHDVSKSLDISVCVTXNMMPCYYNKWCSSIQDFYPDMLNTYLHSSYGYSTTRSYSSRLYVQLFPN

SEQ ID NO: 172380 - protein, 539 aa, Oryza sativa
  Clone ID: PAT_MRT4530_70521C.1.pep
SHSSLPVPSHQACGAPLPPPSTRARPPPPPPSTRAAERGSARAATVLGGGADGGGASAGRRVERRRRNPWPEKGRARVATALGGGADGGGAGGQPERQPHQQPHLRHSPTMGITPPLLRQPAALLPRPATRIWWYGTTTERPASSRRRGGDSSSTASPSLSPTPPSPLPPHHRVTPSPPDLATGSRRRRRSRRRILPPTFLSGGGGGGEGGLGLVASRRPTAMWLYGEGRPTACSSTASDVPPYISGQLSLPISIQIQCFLHDQYLSNLNEDRQIVIPVESEMVPAIRFESEMILVVEVRWAAGGQWRSGRSAASAAEAEHTRAAGGGGGGGGRWCTGLPGRRRSSPRRPVAEANRELRHTPMWEEGDGDGATCGGEQLQLQGGHEGVTREEDVAAAPSILPETGGIMHLVLNLRRFGLGVAELERLNCGGDPLHDLNVAMAALESSASAAAAVRASSVSATDCSLHHWPPAARESSVSAADCPLPLAAHRPGKLRHRPVHLRLRCACLARGCAREREREQIEELGMTCGSRHYFKRKC

SEQ ID NO: 172381 - protein, 90 aa, Oryza sativa
  unsure (1)..(90): unsure at all Xaa locations
  Clone ID: PAT_MRT4530_70522C.1.pep
VLIEHYTYKICMRKHMGGKSLLKPQVNVHIHHICGSGDQIMLRCHSFQIYRYIMIPIKSYENFIETDXQIIKFIWKCKRLRLPKPVLKNK

SEQ ID NO: 172382 - protein, 402 aa, Oryza sativa
  Clone ID: PAT_MRT4530_70523C.1.pep
MLSSASPSTAPSAEYAELSIGPSVTEAEFPMPEPIVEDDGEERTHRRCMSYGEYASTPTDAGAKLSAELLKDWFCSFYEGFQKDAWVWFPYEDSADLELPSDFRFEDINHERYQKAREVLSTAISPCILPVGIHQGRNIQVSYEFYHPMSSTKQLGLGQLPIGLFFADKIQCRGEISSTLMMDWLLNLQGPPLGCIENIELAGFKSRNFDRWWGEWKLHLFHQSASMYMTDLFPNVIPQTTESSPPHQSNSGINIQYAPGLIPNGGGPSPPVIGYNAPKTSTLLQGLIREPADTGKKRRTRSSAADTLTLASKKKAKLKKPKPTDDLLVLDPSIEQALDEEDIEDDVDQLQKKKIAVKKKSAAPIFNPAPPVLADLFSFDIRDYLDEETEEDTTNKSLVLLM

SEQ ID NO: 172383 - protein, 167 aa, Oryza sativa
  unsure (1)..(167): unsure at all Xaa locations
  Clone ID: PAT_MRT4530_70524C.1.pep
QTXXXXDARRXXFGVRIXVNNXLSACNTHPHRVGTGGXXGKSFQWAREDEEHSXXXAXPFXXXQYXGLGXGFXQXQSTXXRATXPXXIXAPNXLLXGSCXXXXXXXGXXTXXKLXXXLXXXRXXXXFFFFXXXXXXXXTXGRXXXPXXXXXXQXAXXXXXFXIFFXP

SEQ ID NO: 172384 - protein, 70 aa, Oryza sativa
  Clone ID: PAT_MRT4530_70525C.1.pep
VVSVLKVCLPISSERQSATSTPRKKNVMDAEIPRQFQLMISGASTTSYEGSSFQSGYTGGVSEISHISGR

SEQ ID NO: 172385 - protein, 184 aa, Oryza sativa
  Clone ID: PAT_MRT4530_70526C.1.pep
MGIVTEDVDIDRVSVSQLGRNSKHINDAVFQTPSAQHLPQAIPTRSWPRTGGAARGWPEKTNPGDGDRKSVDERDLGAASPPHRLLPQPQPPQVRKKRDSTVEIGKVPLAGGGELAELFRRIAATASCCIPRRDNEEEEEATNHVSVLEIGPPAIEKGARGGRDCRTGKWKGRGERDGGIILVL

SEQ ID NO: 172386 - protein, 76 aa, Oryza sativa
  Clone ID: PAT_MRT4530_70527C.1.pep
LTSLLSLTSEQKNQQPSITDFKNTENGNIQFSCRFGGNFPMSAQHDQHVNFVIAPCYYFVLQNLFSNCPKDGPYQI

SEQ ID NO: 172387 - protein, 237 aa, Oryza sativa
  Clone ID: PAT_MRT4530_70528C.1.pep
MVMNPDAVRNVVGIIGNLISFGLFLSPLPTFVTIVKKKDVEEFVPDPYLATFLNCALWVFYGLPFIHPNSILVVTINGTGLLIEIAYLAIYFAYAPKPKRCRMLGVLTVELVFLAAVAAGVLLGAHTYDKRSLIVGTLCVFFGTLMYAAPLTIMKQVIATKSVEYMPFTLSLVSFINGICWTIYAFIRFDILITIPNGMGTLLGAAQLILYFCYYDGSTAKNKGALELPKDGDSSAV

SEQ ID NO: 172388 - protein, 69 aa, Oryza sativa
  Clone ID: PAT_MRT4530_70529C.1.pep
MYHLDNQDLVMEFLFEGVNTLGTKSFLDYFPEYARDDGSVNKKRSMIGKSFETRPWDANGEFIGDAEAQ

SEQ ID NO: 172389 - protein, 133 aa, Oryza sativa
  unsure (1)..(133): unsure at all Xaa locations
  Clone ID: PAT_MRT4530_7052C.1.pep
QTKPREKEKKKNFPENLFGPGGGGTKTPPFKLGGRGGKGNPKKTGEXFQRGQKNSFPLKNGQKAWGGHPPNGGPLTPKGKRNQPLQLGAGDPGVVPKAPKREGGKGPPNRKSPPGGLGKQDKDFKGGKGGHPP

SEQ ID NO: 172390 - protein, 69 aa, Oryza sativa
  Clone ID: PAT_MRT4530_70530C.1.pep
QTASFSCKTSTLSVVPGILFQVRALMSGREDSGRRPKCVYSSFQGGLPCINLVQVLLFMNVEGTAHGSK

SEQ ID NO: 172391 - protein, 106 aa, Oryza sativa
  Clone ID: PAT_MRT4530_70531C.1.pep
NKISSSQKSAGHRWPKQTRHQHRRTRGCHGWTQAPLALDPPPPSIAAACASRHPSYLLPPPVGREEETPDPLPPPPPSPRRSRGLAAADPPSGGPPVPEDRRRRCE

SEQ ID NO: 172392 - protein, 399 aa, Oryza sativa
  Clone ID: PAT_MRT4530_70532C.1.pep
MAMATATPAAQNEQQEKGGLEYVYLSGLGNSLSSEAVAGTLPRGQNSPLVCPLGLYAEQLSGTPFTAPRARNLRTYAANKSMDGCAFCNADGDFLIVPQQGIMPTFYRNIPELLITTECGKLLVPPGEIVVIPQGFRFAVDLPDGPSRGYVSEIFGTHFQLPDLGPIGANGLASARDFLSPTAWFEQVHRPGYTIVQKYGGELFTATQDFSPFNVVAWHGNYVPYKYDLSKFCPFNTVLFDHADPSVNTVLTAPTDKPGVALLDFVIFPPRWLVAENTFRPPYYHRNCMSEFMGLIYGIYEAKADGFLPGGASLHSCMTPHGPDTKTYEATISRPDANEPSRLSGTLAFMFESALIPRVCQWALDSPSRDLDYYQCWIGLKSHFSHDNGGATSEEPCRK

SEQ ID NO: 172393 - protein, 103 aa, Oryza sativa
  unsure (1)..(103): unsure at all Xaa locations
  Clone ID: PAT_MRT4530_70533C.1.pep
PRVPCAAIRRMVRSYXEESMPMPLEQXWSSSSSEYYAAEGSSSDHGVXYAEGSSEEGYYGEQQQQXPGMTRVRLTQGEQYPAQLPSMCRXEPXQCSIFAPGQY

SEQ ID NO: 172394 - protein, 70 aa, Oryza sativa
  unsure (1)..(70): unsure at all Xaa locations
  Clone ID: PAT_MRT4530_70534C.1.pep
METLXSAMRXXNRRFKPPSFXSXXXSAALSSGRVPLVRPSSLPRGLTRRRWADRNRIPAGSRKLALQVCG

SEQ ID NO: 172395 - protein, 166 aa, Oryza sativa
  Clone ID: PAT_MRT4530_70535C.1.pep
SFVQVRQTSQTKFFFLFLLVSFGINCASFTNTSDDQLLYLGFTSANLITDDTTVVTSNGLLELTNGTINRKGHAFYPSPLHFRKPHNNKVHSFAVSFVFAIRSSYPRMSLHGLAFVVSPSINFSNALAIQYLGLLNSKNRGSKSNHILAIEFDTILNIEFEDIDDN

SEQ ID NO: 172396 - protein, 65 aa, Oryza sativa
  Clone ID: PAT_MRT4530_70536C.1.pep
DDKGSSSEQGYPGEGSSEEGYYGEQQQQPGMTRVRLTRARQYAAQLPSMCPPPPQQCSIFAAGQY

SEQ ID NO: 172397 - protein, 119 aa, Oryza sativa
  unsure (1)..(119): unsure at all Xaa locations
  Clone ID: PAT_MRT4530_70537C.1.pep
HAYGPGALGLRMQCCQXLQDVSRECRCTDIRRMVRSYEESMPMSLXQGWSSXSSEYYGSEGSSSEQGYYSKGSSEEGYYGEQQQQPLMTLVRLTMARQYAAQMTSMCRVEPQQCNIFAD

SEQ ID NO: 172398 - protein, 144 aa, Oryza sativa
  unsure (1)..(144): unsure at all Xaa locations
  Clone ID: PAT_MRT4530_70538C.1.pep
PRASPWRPPALPRRRGPPMFRRPGAXGLRISSASSLQDVXRESRCPAIRRXMVRSYEETMPMPXEQGWSVCRQSEYYXGEVFVCQEQGYYGEGSSEEGYYGEQQQXQPGMTRVRLTRARQYAAQLPSMCRVEPQQCSIFAAGQY

SEQ ID NO: 172399 - protein, 1037 aa, Oryza sativa
  Clone ID: PAT_MRT4530_70539C.1.pep
MDSKAAGSSEIERAWHLLTVVIRLGRPAAASDVARFATADDVERLCRIPGSPLRLSGGVVAASETAFVAFLRYVGLDVPPPRVSPRAPDDVMRWLRRRVPVTYERKRKASDAGRFVARKRLLAAPDADLPEHELRQSQQLIVQSCAPVATGEVHQEATQELQDRLPSLNIFTAQRSFEVSIGSNVFSDIEISMPSLPSKIDQFIGGNDGSVLVSMASALVPKEVTDMSGCINIFHATVDRESTRIGEPEGSASLCCSRVEDREELEKESTLLTMAVGLAVGKKNGIEQDLNLRPSSPRNCSTKATDDMETFDVISKEAEALQYCSPNAQYPQKILTCGQDSDALVVNAHVAIHENKIEDITFQPPEGTKTEAIVHEMVHETMGSLCQPSSNTKVEHAVLPLQAPTYGCISNENLNIAAENRASTHQNHVEPSTQNEVAVRLSKKEQDRKIMKQRDKGKKKEALPKEDKDQVAAKVQKGHTEPKPLPNFKNFEIEEEEGSGGYGTVYRARRKSDGRLFAIKCPHANAHSHHVYNEQKMLERFGGKNFVIKYECSLRSGDLECFVLEHVEHDRPENLRKEIGLFDLRWYGFCLFKALASLHKQGIVHRDVKPGNFLFSRKLAKGYLIDFNLANDLHQKFFRNSKSETISRGKDTISQPALKSTPVVQAKEPVADSKQLLGSKRKRSNRSPVGSAPKNDNKSRHGIQAADVSGVTSAKDPTSTKTSLDRLKQPMPYKGRKELMNFLHDAMQSPDKNTSTAPVSQRKRVAAPLGNVDQKLFILTPMPLCSGGSAIAGSGMLNSKGNGKHRREGPCVGTKGFRAPEVLFRSFHQGCKVDVWSAGVTLLYFIIGKSPFGGDPEQNIKEIAKLRGSEELWEVAKLHNCESSYPSDLFDAKSLRSVDLREWCAANTRRPEFFKSIPDSLFDLVDKCLSVNPRCRITSEDALMHDFFAPCHDLIRQHRLARRPAPSNNLPCLPQDKSVKANESKRSSSTVPTTVNSTDSGSLTCGPNFCGTWVTDALLCGTWVIEVWAQPLWDVGH

SEQ ID NO: 172400 - protein, 1381 aa, Oryza sativa
  Clone ID: PAT_MRT4530_7053C.1.pep
GALVQKYKIKVVADSPGTGSSKDGEVKQAPGGSGQPSTKGATDGSPSDHGDNSQGVRGVQGDGAQEPQGGNLDQNSELAQDFFNNFQDRVDYAVHHALINQSGVLVNTLSNMMKTIAGGSIAEHPAGPVYLQGGVFPSYQSLITDVQPSVQAVPSVAPTTQPTAPASTPLPAILAMSPGQPVNPRLLTREQPQHGGQATNRLTKNQVAAMFLPPPPIVDPVQQQPIQQAPPIQLVVQPIQQQVIQPAQQTPPRQQPLQPVQQTPPRQQPQQPIQQTPLRQQIVQPIQHPGSVNASASLLPRKPNISQGDWLSPSSHLSMGMIPSIREKFSFEDFDSLSHLIQKVTLHEHRSAEVRRSSKKVNHVCPYMYGSDDEEDDSEIAAAEWVRSKKVIPCQWVKSPRKEEKYDFDITKAEKIFDLLLREKQIHLPAGHTIPSAEELGKKRYCKWHNSGSHSTNDCKVFRQQIQVAIEGGKIRFDDSKKPMKVDGNPFPVNMVHTAGQAADRVRAKGFQVNSAKIINKYQRKYDKQQERHYEEYDDGFDPHWGCEFFRFCWNEGMRLPSIENCPGCSDIVENSSRSYSRGNRLRQARLPVHQRLGPMNQDCGQEDEVIRKNQWCPSGIFTKNQKRRVQRLRNRERFQEVEEEINHRLRKPKPRQEWRVKNQVPVADDAAADEAKRLAKGKSVVAAPINMVFTLPAEFGIDQADVDEVEEGSAKLVLSPEQAVFEKPEGTENRHLKPLYINGYVNGKPMSKMMVDGGAAVNLMPYATFRKLGRNAEDLIKTNMVLKDFGDNPSETKGVLNVELTVGSKTIPTTFFVIDGKGSYSLVLGRDWIHANCCIPLTMHQCLIQWQGDKIEIVPADSQSKMENPSYYFEGVVEGSNVYAKDMVDDLDDKQGQGFMSADELEEIDIGPGDRPRPTFISKNLSPEFRTKLIELLKEFRDCFAWEYYEMPGLSRSIVEHRLPIKPGVRPRQQPPRRCKANMLEPVKAEIKRLYDADFIRPCRYAEWVSSIVPVIKKNGKVRVCIDFRDLNKATPKDKYPMPVADQLVDAASGNKILSFMDGNAGYNQIFIAEEDIHKTAFRCPEVEDHIADLKKVFERTRKYGLKMNPTKCAFRVSAGQFLGFLVHERGIEVTQRSVNAIKKIQPPENKTELQEMIGKINFVRRFISNLSGRLRHYLLSNECTVICKADVVRYMLSAPILKGRVGKWIFSLTEFDLRYESPKAIKGQAIADFIVEYRDDSIGSVEIVPWTLFFDGSGGMFRVCYTIKPYATNNQVEYEAVLKGLQLLKEVEADTIEIMGDSLLVISQLAGEYECKNDTLMVYNEKCLELMKEFQLVTLKHVSREQNLEANDLAQGALGYKPMITDVKVEIAAMSANDW

SEQ ID NO: 172401 - protein, 85 aa, Oryza sativa
  Clone ID: PAT_MRT4530_70540C.1.pep
KESMPMPLEQGWSSSSSEYYAGKGSSSEQGYYGKGSSKKGYYGEQQQQPGMTRVRLTRARQYAAQLPSMCRVEPHQCSIFAAGQY

SEQ ID NO: 172402 - protein, 76 aa, Oryza sativa
  Clone ID: PAT_MRT4530_70541C.1.pep
SLGQRIRPLPRAAPLDPQPSSPAAATHRCRRRPSKPLPQPLPRSRQSSPLPLPPAAATRRCPPRRSSPPATRPDPR

SEQ ID NO: 172403 - protein, 120 aa, Oryza sativa
  unsure (1)..(120): unsure at all Xaa locations
  Clone ID: PAT_MRT4530_70542C.1.pep
PPGRARLGNQFFQQLQEVNREVPLAANRRXMLRTYKKTIPMPLNQACSSSWWKYYGGEGSSSEQGYYGEGSSEEGYYGEQQQQPGMTRVRLTRARQYAAQLPSMCRVEPQQCSIFAAGQY

SEQ ID NO: 172404 - protein, 175 aa, Oryza sativa
  Clone ID: PAT_MRT4530_70543C.1.pep
MSRDIPSLHIAGVITILLITMTIGVITTAGFIFAIPAASFLARTSTLIIIIGICWCWNAPARGGKKPPSPSTKKGRRREPERPRCESPASRCEDSIDRSARTTTAADAPRLPCRGSVMVHRGRLAVGGKGERAVEAGDKPPLLGSAASMEAAGVILGREAGVGVLPRVAEGGERR

SEQ ID NO: 172405 - protein, 132 aa, Oryza sativa
  unsure (1)..(132): unsure at all Xaa locations
  Clone ID: PAT_MRT4530_70544C.1.pep
QLTGRERFQXMFRRPGALVLLMQGCQQLXDVSRECRCAAIRRMVRSYEESMPMPLEQGWSSSSSEYYRGEGSFSEQGYYSEGSFEEGYYCEQKKQPGITLLKATRARQYSAQLPSMCRVEPQQCSIFAAGQY

SEQ ID NO: 172406 - protein, 330 aa, Oryza sativa
  Clone ID: PAT_MRT4530_70545C.1.pep
MEACLLPPPPFPPSLRLPVYLGGPSLTPCTASEVHLPPLWSSPSDRWSPHIGTPGSHIGAVQAPASSLSSCSETAVSFLPAPALPTSMESTFPSPRPPSTPSSSTPPSSPVPPPSARSPTVPAPADADDDDQGGGSGQEAGGGNGEDEAGGGDDSNGHGDEQDGDYSSDVQRRDVPRHESADGSEIHDEHHVIITGEEPPVSPVPREPPVAHVRNRRPISLLCAVPMFFLYGAYHFTIGGSAFGIDKHVTHDRLMAGGILAGIWLFLLPFLILGHVYFSHRIRVRVLRNNAPSAGEAQVPATDVQDEGYFPRKIKASVSLMVLRASTMCI

SEQ ID NO: 172407 - protein, 137 aa, Oryza sativa
  unsure (1)..(137): unsure at all Xaa locations
  Clone ID: PAT_MRT4530_70546C.1.pep
RQAHRRERFQPMFRRPGALGLRIQCCQQLQDVSRECRCAAIRRMVRSYEESMPMPLEQGWSSSSSEYYXGAEGSSSEPRGNYRPRGPPEEGYYXGTSNSSPGMTRVXLTRARQYAAQLPSMXRVEPQQCXIFAAGQY

SEQ ID NO: 172408 - protein, 220 aa, Oryza sativa
  Clone ID: PAT_MRT4530_70547C.1.pep
MGTRSSVVATISDGGANPAHRPFRRLPPAILKPPLRRPQPVCFRASPLQSIHLPPCRCARPDGLSVKLGTKWKDRAPAGSLLSLDCLMADDHYDIAPQLLHLNQPLSAESAVSRGSWTGGVRDPARLRAESLGCCSVMPCSRAFRWRMERYKLLSVMVAHMRWKILQNCMINIPSTSKAAVDIFAKFLIEREKKLATISELLMMKIELEKVFIDDYSFVS

SEQ ID NO: 172409 - protein, 86 aa, Oryza sativa
  unsure (1)..(86): unsure at all Xaa locations
  Clone ID: PAT_MRT4530_70548C.1.pep
YEESMPMPLEQVWSSSSSQYYGGKGSSSDQGYYVEGSSKXVYYGEQQQQPGMTRVRLTRTRQYAAQLPSMCRVEPQQCSIFAAGQY

SEQ ID NO: 172410 - protein, 60 aa, Oryza sativa
  Clone ID: PAT_MRT4530_70549C.1.pep
MTREGAQSSKTAEQVVGNADEVGEGEVAGMGCQRAELERARLPKLELDTSSSRAIAPSSF

SEQ ID NO: 172411 - protein, 375 aa, Oryza sativa
  Clone ID: PAT_MRT4530_7054C.1.pep
MRPRVKDQPAGVGGIRRSRAVHAEAVLPVRAHAHAGADVGADVGTDVGADARTSASAGASADVGTDVGTDAGASADSRTSASTSTSTSADAGADVGTDVSSDASASSSADSRTSASASTSTSADASADVRTDVSTDAGASASADSCASASASTSADARTSASTDVSTDANASSSADAGADASTNASADLRTNASTDLRTDASTSANADASTDLRTDASTSANADASTNLRTDASTDVRTNASACSNAGASTDLRTDASTDLRTYASADASTDAGASANADVSSDASADASASASTSASASTGAGAGAAVQAEAGLAGDADVGLDGRRVVAEQQKQRQHRHAQHRRPHLAGPRRHRRCFLLRRIGSFIELGLLLQS

SEQ ID NO: 172412 - protein, 128 aa, Oryza sativa
  unsure (1)..(128): unsure at all Xaa locations
  Clone ID: PAT_MRT4530_70550C.1.pep
RRVRQPMFRRPGALGLRMQCCQQMQDVSRECRCADIRRMVRSYEESMPMPLEQGWSSTSPEYYGGEGTXSEQGYYSEGSSEEGYYGEQQQQPGMTRVRLTRARQYAEHLPSMCRVEPQQCSIFDAGQY

SEQ ID NO: 172413 - protein, 142 aa, Oryza sativa
  Clone ID: PAT_MRT4530_70551C.1.pep
MWKKIAAGAAEGWRGLLPKTASATTKLVPDSSPKSATPTAALNLVADAVAAWRRWLRSPSASPTASVGGVASLATRVDAALALLVHGSSFVGDSRAPTNSTAVSTTCSPASSIVCCTEGEGVSHCCFVGISVTQLLDVVDEL

SEQ ID NO: 172414 - protein, 224 aa, Oryza sativa
  Clone ID: PAT_MRT4530_70552C.1.pep
RDSVGEGRLSTSRARASSSAQARARHKLEPSHCTFELLGKLGSSSSLVPSSAISRPRAEAKCGRRSRPARRRGGAAAAEDGVRHHQARARFFPKSATPTAALNLVADAWRRGAAGFALHQRVPPQVCIPSSSAAVEGTAGEQAPPSPTQRWRCGVVGTRVDAALALLVHGSSFAETHAPPPTPRPSPPRVSRLLHCLLHGGRRGVACCFVGISVTQLLDVVDDS

SEQ ID NO: 172415 - protein, 709 aa, Oryza sativa
  Clone ID: PAT_MRT4530_70553C.1.pep
MADDLFEQLQKFNIGSHYAYDNEMDLALERAFCSLLVGDVSKCRMWLGIDNESSPYRDPKILEFIVTNSSISEENDLLPGLCKLLETWLIFEVFPRSRDTRGMQFRLGDYYDDPEVLSYLERMEGGGASHLAAAAAIAKLGAQATAALGTVKSNAIQAFNKVFPLIEQLDRSAMENTKDGPGGYLENFDQENAPAHDSRNAALKIISAGALFALLAVIGAKYLPRKRPLSAIRSEHGSVAVANSVDSTDVVGCCCCGQHLLAAAASPDNVAAAQDAALLPPPSFAATAAAAQAEVACSSDRQNTHCLPVAARRHQNPLALSLPWMRGFEIYESQEQARKRDTVTVPFSRGVISTVRLELNGRDHQLQQQLQEKKGSHSKQNQKASEANASPPLPEPPTLQNLPPPAGAGAADSAAETLACARARPRSPATSGLRLLRLLLVSGPSAAVDRSDLDAVKPRWRTGPAVPSAKAEPLKSKWADEDVEEDDVKESWEEEEEEKPKPPPVEKTAPKPSGKGAAKKGKQQASTSSEVVQDEALDDPALEKLRQQRLVEEADFKSTTELFGKKDGSEKSLDTFIPKSESDFAEYAELIANKLRPYEKSFHYMGLLKNVMRLSMASLKGADAKDISSSIAAIANEKIKAEKEAAAGKKKQGAKKKQLHIENKDDDFIPGKEAPEHLKRLHGNNAHLFDVDFDSHRIGKSTCVLELDT

SEQ ID NO: 172416 - protein, 480 aa, Oryza sativa
  unsure (1)..(480): unsure at all Xaa locations
  Clone ID: PAT_MRT4530_70554C.1.pep
HKKRQEGLQGARNILWSVGRGGIATVGGGFSREAFMNEAFLRMTSIEQMDFFSKTPNSIPPEWFEIYNVALAHVAQAIISKRPQFIMMADDLFEQLQKFNIGSHYAYDNEMDLALERAFCSLLVGDVSKCRMWLGIDNESSPYREPANLEFIVTNSSISEENDLLPGLCKLLETWLIFEVFPRSRDTRGPRAPTRREPSASRRRRRRRLGRGNPSVRSRPPSLAGHLRTPPPPPAPLGTVKSNAIQAFNKVFPIDRTVRXSAMENTKDGPGGYLENFDQENAPAHDSRNAALKIISTGALFALLAVIGAKDLPRKRPLCALRREHGSVAVANSVDSTDDPALDEDPVHIPRMDAKLAEDIVRKWQSIKSKALGPEHSVASLQEVLDGNMLKVWTDRAAEIERHGWFWEYTLSDVTIDSITISLDGRRATVEATIDEAGQLTDVTEPRNNDSYDTKYTTRYEMAFSKLGGWKITEGAVLKS

SEQ ID NO: 172417 - protein, 234 aa, Oryza sativa
  unsure (1)..(234): unsure at all Xaa locations
  Clone ID: PAT_MRT4530_70555C.1.pep
MADAASSSASASAAVAGTLPVAAAATGKDKEDRRRLVGRCGFAVVGIMSTLLIYGLLQILINSLVXMRVPYGAEKEFFRYSLFLVFCNRITTSTVSALVLTASKKSLDPVAPLQKYCVVSVSNILTTTCQYEALKYVSFPVQTLAKCAKMIPVMIWGTIIMRKKYGGKDYFFAVVVTVGCSFFILYPASMDASPFNRGRENTIWGVSRRRGHLRIASNSANYNYPNVKRSDPAL

SEQ ID NO: 172418 - protein, 231 aa, Oryza sativa
  Clone ID: PAT_MRT4530_70556C.1.pep
MEDWDSEDFQPAVPSAKAEPLKSKWADEDVEEDDVKESWEEEEEEKPKPPPVEKTAPKPSGKGAAKKGKQQASTSSEVVQDEALDDPALEKLRQQRLVEEADFKSTTELFGKKDGSEKSLDTFIPKSESDFAEYAELIANKLRPYEKSFHYMGLLKNVMRLSMASLKGADAKDISSSIAAIANEKIKAEKEAAAGKKKQGAKKKQLHIENKDDDFIPGKGNFDDPDEYDFM

SEQ ID NO: 172419 - protein, 90 aa, Oryza sativa
  unsure (1)..(90): unsure at all Xaa locations
  Clone ID: PAT_MRT4530_70557C.1.pep
MNGREFGDGSSEIVPAYALTLGRWLQTERLKTINVETMFGSXRDRQDKASRQKFLVAATDVQRMDKDGHASRVGVYPIPHRRQAGRQVHS

SEQ ID NO: 172420 - protein, 59 aa, Oryza sativa
  Clone ID: PAT_MRT4530_70558C.1.pep
TGAHAPLTIATSTHKIFPELPVTAHTRSSTKRLQYMKKSQGFIRPYVYFFYRHMFPQIH

SEQ ID NO: 172421 - protein, 422 aa, Oryza sativa
  unsure (1)..(422): unsure at all Xaa locations
  Clone ID: PAT_MRT4530_70559C.1.pep
QHDMNIRNKLTPITNSNTGRVYLSLTCHTLSMDEKIWMXSCFKDIKMASSYSSRMFISIDDLKLVGMKFHDCHVLITXVLSIAIRSILPIKIHHTIMRSYAFFPPFFDIMVYFHVHLVEKNKVCGLAFLREMYPLERYMGILNSYVRNRSKREGSIIEGHTGHTTKEFIDIYIDYMSETNPIRVXLISSCSRLSGIATLGRKRTVSDQDEYGQAHFTILYHMTEVAPYFEDNLARVGHENKSQQDIXINKEHICCFNEWSKHRIRPLWDIDTSHGYAINGYIFYTIKQDVKSIVRNNXVRIEAFQDQLGINSYYSHIKQIXELNYVKFKVSFLCXWVNLCGVKVDKKGLKNDDLSKVRYMDEPFVLAKQVVQIFXIKDPVNKTLQIIREGKRRYAGVDNIVDEDGYNXNLHRRPCLHLLEAP

SEQ ID NO: 172422 - protein, 376 aa, Oryza sativa
  Clone ID: PAT_MRT4530_7055C.1.pep
MATAAAASLQYALHGAASASAKPRSAAPGRSVRVVAARRSASADATAESKSGGHEVLLFEALREALIEEMKEDPTVCVFGEDVGHYGGSYKVTKGLAEMFGDLRVLDTPIAENSFAGMGVGAAMKGLRPIVEGMNMGFLLLAYNQISNNCGMLHYTSGGQFKIPIVIRGPGGVGRQLGAEHSQRLESYFQSIPGLQMVACSTPYNAKGLMKAAIRSENPVVLFEHVLLYNLKEKIPDEEYICCLEEAEMVRPGEHVTILTYSRMRYHVMQAAKTLVNKGYDPEVIDIRSLKPFDLHTIGNSIKKTHRVLIVEECMRTGGIGASLRSAIIDNFWDYLDAPIMCLSSQDVPTPYAATLEDATVVQPAQIVAAVEQICQ

SEQ ID NO: 172423 - protein, 71 aa, Oryza sativa
  Clone ID: PAT_MRT4530_70560C.1.pep
LWAPYPPPTSRCRRSGTLRLRRDDDIVNNYHGVTVPDPYRWMEELESEEVKGFWNAQAAWADAVLSTCDDH

SEQ ID NO: 172424 - protein, 881 aa, Oryza sativa
  Clone ID: PAT_MRT4530_70561C.1.pep
MEPAERHRRRRRRAHTADEAAAVLRKAWCRLRLSARDPSRVPPWDAVVLTAASPEQAALYDRQLARARRLGRFPASTAALAVPDPDAARIGSGAATLHAVASLVRHLIAQASKEEIAELLPEASDSSADDIPLSSVVRFMANKHVLLLHAGGDSKRVPWANPMGKAFLPLPYLAGDNPDGPVPLLFDHILAISSSARQAFKNQGGIFIMTGDVLPCFDASNLVLPDDAACIVTVPTTLDVAANHGVVVAAKDGTDGENYSLCLVDNLLQKPTVHELVEGQAIRDDGRALLDTGIISARGKAWQELVRLAYSSSHVMIKELITGRKEMSLYEDLVAAWVPSRHEWLRTRPFGMELIAALGKHRMFSFCSYDFSFLHFGTSAEVLDHLAGSYSGLVGRRHMSSIPETTACDIAATAVILSSKISAGVSVGEDSLVYDSSLSGRIRIGSQCIVVGVNIHELHGNSHGDQYSGVLPQSRRYQVKMDLLTASGDLSTAAIVEDKVWASIASETASAIKYGSKEPSSDSKCSSNGNLHPKKAIVELPVRVDFVGGWSDTPPWSLERPGCVLNMAIRLEGNLPVGAMIETTMDHLGVLIEDDAGRNVCIDDLSSITSPFKENDSFRLVKSALIVTGVLNHERLSKLGLNIRTWANVPRGSGLGTSSILAAAVVKGLFQLIEGDESDATVARAVLVVEQVMGTGGGWQDQIGGLYPGIKCTQSFPGQPLRLHVVPLLASPQLIQELQQRLLVVFTGQVRLAHRVLQKVVTRYLRRDSLLISSIKRLAELAKIGREALMNGEIDELGGIMSEAWRLHQELDPFCSNKLVDELFAFADPYCCGYKLVGAGGGGFALMLGKNLNSAKELRQALENSATFDVKVYNWNVAMTP

SEQ ID NO: 172425 - protein, 161 aa, Oryza sativa
  Clone ID: PAT_MRT4530_70562C.1.pep
MARRDGHHTHDATDWCVVADRCVAAVGSCWCGCGDGGADLAELCAVAAAAALQSGCSSGFEVDPWRRVGGEQDLQSGGGAVRLSFETHHGGGVAPSPEFAACAASSCSAEIMVLLLLQRGELLVHHDRPSHHHRRYFPTPQPVEAAAAVEVGWGFQGLGQR

SEQ ID NO: 172426 - protein, 68 aa, Oryza sativa
  unsure (1)..(68): unsure at all Xaa locations
  Clone ID: PAT_MRT4530_70563C.1.pep
MMDPGMMSLAQEQMTKMSPVDLAMMQQXLLSNPNLLKVAXESMTNMTADDFKRAAQLMNHTGPDEMLD

SEQ ID NO: 172427 - protein, 1072 aa, Oryza sativa
  Clone ID: PAT_MRT4530_70564C.1.pep
MEPAERHRRRRRRAHTADEAAAVLRKAWCRLRLSARDASRVPPWDAVVLTAVSPEQAALYDRQLARARRLGRFPGFFAALAVPDPDAARIGSGAATLHAVASLVRHLIAQASKEEIAELLPEASDSSADDIPLSSVVRFMANKHVLLLHAGGDSKRVPWANPMGKAFLPLPYLAGDNPDGPVPLLFDHILAISSSARQAFKNQGGIFIMTGDVLPCFDASNLVLPDDAACIVTVPTTLDVAANHGVVVAAKDGTDGENYSLCLVDNLLQKPTVHELVEGQAIRDDGRALLDTGIISARGKAWQELVRLAYSSSHVMIKELITGRKEMSLYEDLVAAWVPSRHEWLRTRPFGMELIAALGKHRMFSFCSYDFSFLHFGTSAEVLDHLAGSYSGLVGRRHMSSIPETTACDIAATAVILSSKISAGVSVGEDSLVYDSSLSGRIRIGSQCIVVGVNIHELHGNRSQIISTSSYFTLPDRHCLWEVPLVNSVERVMVYCGLHDNPKVSMKKDGTFCGKPWRNVLEHLKIQDTDLWSSTNEDNCLWNAKLFPVMSLPETLKVGMWLMGSTCDLDGKVASLWKESRRISLEELHRSIDYHQLCVNSSKHQADLATNIAKACMTYGLLGRNLFQLCEEMLQKENSCVEVCNELLSLCPSHGDQYSGVLPQSRRYQVKMDLLTASGDLSTAAIVEDKVWASIASETASAIKYGSKEPSSDSKCSSNGNLHPKKAIVELPVRVDFVGGWSDTPPWSLERPGCVLNMAIRLEGNLPVGAMIETTMDHLGVLIEDDAGRNVCIDDLSSITSPFKENDSFRLVKSALIVTGVLNHERLSKLGLNIRTWANVPRGSGLGTSSILAAAVVKGLFQLIEGDESDATVARAVLVVEQVMGTGGGWQDQIGGLYPGIKCTQSFPGQPLRLHVVPLLASPQLIQELQQRLLVVFTGQVRLAHRVLQKVVTRYLRRDSLLISSIKRLAELAKIGREALMNGEIDELGGIMSEAWRLHQELDPFCSNKLVDELFAFADPYCCGYKLVGAGGGGFALMLGKNLNSAKELRQALENSATFDVKVYNWNVAMTP

SEQ ID NO: 172428 - protein, 135 aa, Oryza sativa
  unsure (1)..(135): unsure at all Xaa locations
  Clone ID: PAT_MRT4530_70565C.1.pep
PRPASPQPPPPPPAPGPSRRPRRSPPPPGPSRRPRRSXSVASEEAPSPPPTNSSSSPPAPPPPPPRQHPWRGDGKNSYMAFCSTKMRSRLRATSRVMPSSGSSSTTSSSRSFSARLRNSAARARRAEAVVVASAA

SEQ ID NO: 172429 - protein, 430 aa, Oryza sativa
  Clone ID: PAT_MRT4530_70566C.1.pep
MELDEESFLDELMSLRRDGSAPWQAPPYPGGGGGGGGGGMMMSDLLFYGGDGGSAEARGGMDASPFQELASMAAPPPQHPHEEFNFDCLSEVCNPYRSCGAQLVPSEAASQTQTQLTPLRDAMVAEEETSGDKALLHGGGGSSSPTFMFGGGAGESSEMMAGIRGVGGGVHPRSKLHGTPSKNLMAERRRRKRLNDRLSMLRSIVPKISKMDRTSILGDTIDYVKELTERIKTLEEEIGVTPEELDLLNTMKDSSSGNNNEMLVRNSTKFDVENRGSGNTRIEICCPANPGVLLSTVSALEVLGLEIEQCVVSCFSDFGMQASCLQEDGKRQVVSTDEIKQTLFRSAGYGGRNYSRSSTIYEFIFISSGSTSFLNTPESKLKICSSIVSFAFVNRYGNRPCDLSNIGFELNAKKWFIWFCPELYIICARI

SEQ ID NO: 172430 - protein, 86 aa, Oryza sativa
  unsure (1)..(86): unsure at all Xaa locations
  Clone ID: PAT_MRT4530_70567C.1.pep
SSGRAKTARCLWTRLADPSSYSETIVARLRFGPDKKSVPNNAARAPSPTTDTPLXPPGPAAPYYLHGSFTMHYWYDPMGLTKTREH

SEQ ID NO: 172431 - protein, 92 aa, Oryza sativa
  Clone ID: PAT_MRT4530_70568C.1.pep
SRLRSQLVKPDVDAAVADTDTEPLVLQATWCIGLPSQGLLRSLGLYASRDQGRGSSWHLLIERIFSHWKRQVHEESHIIRRNIKKRNSAVQR

SEQ ID NO: 172432 - protein, 115 aa, Oryza sativa
  Clone ID: PAT_MRT4530_70569C.1.pep
IEQCVVSCFSDFGMQASCLQEDGKRQVVSTDEIKQTLFRSAGYGGRNYSRSSTIYEFIFISSGSTSFLNTPESKLKICSSIVSFAFVNRYGNRPCDLSNIGFELNAKVPLFVHLH

SEQ ID NO: 172433 - protein, 1748 aa, Oryza sativa
  unsure (1)..(1748): unsure at all Xaa locations
  Clone ID: PAT_MRT4530_7056C.1.pep
MAEKPPLSPSPASLGTVKEKIQKLGLTDFNEGNVVPIDPKKFTPDQKKDFDAMLQQARDQFLNSFMQTRKGTLVQKYKIKVVANDPGTSSSKDGDGKQALDGSAQPSIKGATDGSLGNQGENSQEVHGVQVWGVSQYPIKHDEVNSDGSIAEHQAAGPVYLQGGVFPNYRSLITDVQPSIQAVPSVAPTTQPTAPASTPLPATSSMAPGQPMNPRVLMREHPQHSGQVSSWPTQDQVAAMFLPPQPIVDPIQQQPIQQQPIQQTPQIQQVVQPNQQQPYPEFVERVPLPNRFKVPDFSKFSGQDGVSTYEHISRFLAQCGEASTVDVLKVRLFRLSLSGSAFTWFSSLPYWSINSWADLEKQFHSYFYGGVHEMKLSDLTAIKQRHDEPVHEYIQRFREMRNKCFSLSLTDAELADLAFQGMITPIREKFSSEDFDSLSHLIQKVTLHEHRSAEVRKSSKKVNHVCPYMYGSDDDEDDSEIAAAEWVRSKKVIPCQCVKSSGKVEKYDFDISKADKIFDLQFREKQIQLPAGHTIASAEELGKKRYCEWHNSGSHSTNDCKVFRQQIQVAIEGGKIRFDDSKKPMKVDGNPFPVNMVHTAGQTADRVRAKGSQVNSAKIINKYQRKYDKEQEKHYEEYDDGFDPHWGCEFFRFCWNDGMRLPSIENCPGCSDIVGSSSRSYNRGNRLRQTRVSVHQRLGPVNQGHGQEDNVIRKNQWCPSGIFMKNQKRRVQRLRNRERLQEVEQEINHRLKKAKPRQEWRVKSQVPVADDVAADEAKRKLGRNAEDLIKTNMVLKGFGGNPSETKGVLNVELTVGSKTIPTTFFVSDGKGSYSLLLGRDWIHANCCIPSTMHQCLIQWQGDKIEIVPADRSVNVASADLALWEMDGLDCLSGKVWDGDFLKMENPSYYFEGVAEGSNVYTKDTVDDLDDKQGVRPRQQPPRRCKADMLEPVKAEIKRLYDAGFIRPCRYAEWVSSIVPVIKKNCKIRVCIDFRDLNKATPKDEYLMPVADQLVDAVSGNKILSFMDGNTGYNQIFMAEEDIHKTAFRCPGAIGLFEWVVMTFGLKSAGATYQRAMNYIYHDLIGWLVEVYIDDVVVKSREIEDHIADLRKVFERTRKYGLKMNPIKCAFGVSAGQFLGFLIHERGIEVTQRSVNAIKKIQPLENKTELQEMIGKINFVRRFISNLSGRLRNYLLSNECTVRCKADVVKYMLSAPILKGRVGKWIFSLTEFDLRYESPKAIKGQAVADFIVEHRDDSIGSVEIVPCTLFFDGSGACFEFAYTIKPYATNNQAEYEAVLKGLQLLREVEADTIEIMGDSLLVISQLAGEYECKNDTLMVYNEKCQELMKEFRLVTLKHVSREQNFEANDLAQGASGYKPMVKDVKVEIATITADDWRYDVHQYLSNPTQSASRKLRHKALKYTLLDDELYYRTIDGVLLKCLSADQAKVAIGEVHEGICGTHQSAHMMKWLLRRAGYFWPTMLEDCFRYYKGCQDCQKFGAIQRAPASAMNPIIKPWPFRGWGIDMIGMINPPSSKGHKFILVATDYFTKWVEVIPLKKVDSGDAIQFVQEHIIYRFGIPQTITTDQGSIFVSDEFVQFADNMDIKLLNSSPYYAQANGQAEASNKSLIKLIKRKISDYPRQWHTRLAEALWSYRMGCHRSIQVPPYKLVYGHEAVLPWEVRIGSRRMELQNDLTADKYYNLMADEREDLVQSRLRALAKVTKDKERVARHYNKKVVPXIFRKESLYGS

SEQ ID NO: 172434 - protein, 100 aa, Oryza sativa
  unsure (1)..(100): unsure at all Xaa locations
  Clone ID: PAT_MRT4530_70570C.1.pep
LVFLPPSAAAAVALLFAPPRXKKEXRRNCEHHNVXPNXHXKKHWQTMSRHWXTKPPANRXAHXSARRXLLKFSPAQHLASSNHVHGQLLKYXMNRRLGEL

SEQ ID NO: 172435 - protein, 211 aa, Oryza sativa
  Clone ID: PAT_MRT4530_70571C.1.pep
DSIDVHGRRRSIAIDVHGHVAIHRSAIDQVIVELNNRFAERSTQLLRCIACLDPRNSFANYDEDKLIELAKIYADDFSEYDCLVLRDQLDTFISNVRSDLDFSSCSDLGKLAAKMVQTDRHTVFPLVYRLIELALILPVATATVERAFSAMNVIKTELRNKMNDEWMNHCMICYIERDVFTSIEDHQIIEHYHALRTRKHKLPRGMSCIAL

SEQ ID NO: 172436 - protein, 101 aa, Oryza sativa
  unsure (1)..(101): unsure at all Xaa locations
  Clone ID: PAT_MRT4530_70572C.1.pep
PRVPAPHPRMVRSYEESMPMPXDQGWSSSSVGVLRCRGVSSDQGYYGEGXSEEGYYGEQQQHPGMTRVRLTRASSTRRSCQSMCRVEPQQCSIFAAGQVLG

SEQ ID NO: 172437 - protein, 129 aa, Oryza sativa
  unsure (1)..(129): unsure at all Xaa locations
  Clone ID: PAT_MRT4530_70573C.1.pep
SSPPEEFHPMSPRPGALASDQCSSSSGRDRESRCXAIRRMVRSXKESMPMPLEQGWXSSSSEYYGGKGXSSEQGYYGEGSSEEGYYGEQQQQPGMTRVRLTRARQYAAQLPSMCRVEPQQCSIFAAGQY

SEQ ID NO: 172438 - protein, 33 aa, Oryza sativa
  Clone ID: PAT_MRT4530_70574C.1.pep
LTACTCAGLKYGELCKCACMLDYALYPRVFKGP

SEQ ID NO: 172439 - protein, 112 aa, Oryza sativa
  Clone ID: PAT_MRT4530_70575C.1.pep
MVSEDAHESDGIWVQVEKMKAVKIQKKTNDIRMTTDKVNDITTSHDDEKTQDPQTYRGPEDEVVGPGAEPQTTIIPHSFVVIKRQFSQVARMKVLFNIVEDSVSLRFYTGID

SEQ ID NO: 172440 - protein, 98 aa, Oryza sativa
  unsure (1)..(98): unsure at all Xaa locations
  Clone ID: PAT_MRT4530_70576C.1.pep
MPCXAIPXIVRSYEESMPMPLGARLLYCXSEYYGGEGXSSEQGYYGEGXSEEGYYGEQQQQPGMTRVRLTRARQYAAQLPSMCRVEPQQCSIFAAGQY

SEQ ID NO: 172441 - protein, 52 aa, Oryza sativa
  Clone ID: PAT_MRT4530_70577C.1.pep
TLKCHDARQSENMITCNSTTAYTQIQDAWAYALQLSPVLLNFVIISCALLVT

SEQ ID NO: 172442 - protein, 123 aa, Oryza sativa
  Clone ID: PAT_MRT4530_70578C.1.pep
RPGGSCPALGLRMQCCQQLQDVSRECRCPPIRRMVRSYEESMPMPLEQGWSLSSSEYYGGEGSSSEQGYYGEGSSEEGYYGEQQQQPGMTRVRLTRARQYAAHLPSMCRVEPHQCSIFAAGQY

SEQ ID NO: 172443 - protein, 150 aa, Oryza sativa
  unsure (1)..(150): unsure at all Xaa locations
  Clone ID: PAT_MRT4530_70579C.1.pep
SEIERVQGATGGRPDSRCGRVGSSDRRGGPTGIRARGAGLGRSGPQWRGDXECRCAAIRRMVRSYEESMPMPXEQGWSSSSSEYYGGEGSSSEQGYYGEGSSEEGYYGEQQQQPGMTRVRLTRARQYAAQLPSMCRVEPQQCSIFAAGQY

SEQ ID NO: 172444 - protein, 161 aa, Oryza sativa
  Clone ID: PAT_MRT4530_7057C.1.pep
MATAAAASLQYALHGAASASAKPRSAAPGRSVRVVAARRSVRARGGAVVARAAVTACADATAESKSGGHEVLLFEALREALIEEMKEDPTVCVFGEDVGHYGGSYKVTKGLAEMFGDLRVLDTPIAENSFAGMSVGAAMKGLSAILEGMNIVLLLPAYDQI

SEQ ID NO: 172445 - protein, 89 aa, Oryza sativa
  Clone ID: PAT_MRT4530_70580C.1.pep
GAAPRGRRRRGGGRRRWIRVGGGLGSRQQRRKEVEAADPCAPPAGTGSSSPSGHQVRGRSRPPAPPPRAAPLSAAATPSSRSSKAPLLV

SEQ ID NO: 172446 - protein, 101 aa, Oryza sativa
  unsure (1)..(101): unsure at all Xaa locations
  Clone ID: PAT_MRT4530_70581C.1.pep
PGCRCAAIRRMVRSYEESMPMPLXEQGWSSSSSEYYGGEGXSSEQGNNGEGSSEEGYYGEQQQQPGMTRVRLTRARQYAAQLPSMCRVEPQQCSIFAAGQY

SEQ ID NO: 172447 - protein, 167 aa, Oryza sativa
  Clone ID: PAT_MRT4530_70582C.1.pep
MIKETNGFRGKLVHGIPWYYGSHGIIKTPKRFNLSPTLSTRFPLLPCRFRTRNLSSTPSTAKQTAHRRTQYLAGGAHSRINYSEQECAIDSKELARLHMRYLASGAERHRINYYEQDSPSTARNQLGIAHRRNNYTKQECAVSSSRGSSQGKEEEETKCWYLILDTS

SEQ ID NO: 172448 - protein, 126 aa, Oryza sativa
  Clone ID: PAT_MRT4530_70583C.1.pep
RFHSMFHRPGALGLRIQFCQQLQNVSRECRCAAIRRMVRSYEESMPMPLEQGWSSSSSEYYGGEGSSSEQGYYGEGSSEEGYYGEQQQQPGMTRVRLTRARQYAAQLPSMCRVEPQQCSIFAAGQY

SEQ ID NO: 172449 - protein, 266 aa, Oryza sativa
  Clone ID: PAT_MRT4530_70584C.1.pep
MRMGTRSVALVLLAAVLLQALLPASAAEGLVRIALKKRPIDENSRVAARLSGEEGARRLGLRGANSLGGGGGEGDIVALKNYMNAQYFGEIGVGTPPQKFTVIFDTGSSNLWVPSAKCYFSIACFFHSRYKSGQSSTYQKNGKPAAIQYGTGSIAGFFSEDSVTVGDLVVKDQEFIEATKEPGLTFMVAKFDGILGLGFQEISVGDAVPVWYKMVEQGLVSEPVFSFWFNRHSDEGEGGEIVFGGMDLVACNTATGVILLAMRQAS

SEQ ID NO: 172450 - protein, 490 aa, Oryza sativa
  Clone ID: PAT_MRT4530_70585C.1.pep
MDDDDDKMGTHAQVQQLPDELLLEILLRLPPRAIARCLAVCSAWSSAVSAAAFRRAHADRPAAVCKATATAIDCCDRDAVVLDAFLGRWHRGNVHTTPRSPRGLVFPAAMAPEPDTPWVLDTLVVGSWDGVLCVERGAPLLRGSRWDAGVHHWPKSGRLREYVLWNPLAMTRATVSPPPGRGAVIGGYAHPATMRFHLLHAAGEAARRPGSLGLFVPTVFRVQRVGDGAWREVPLPLLEQQDDHAHAQLQMHGARSVALHGNLHWLVQRGGSAGPGRLQVLVFEPARERFRLMEAPPRRHGEEDDLARSRIVVLSNGKLCAVAVRPATSTMEMWVLDSSSSDAPRRWRLDAYSLRRRKWTRVCAARPRSGSVGVALLPHRESVADDQPSFGEASRLLDHTIDIDVDDHPPGSPPSPLAVRRCHAPVPRPDPSSATLQQPDPPFPRPSRAGICGPSPSQVVVVTAVSVAEMLAMVVDDELKPPLLGIVPHY

SEQ ID NO: 172451 - protein, 203 aa, Oryza sativa
  Clone ID: PAT_MRT4530_70586C.1.pep
NFYQRNRRKPERIIFYRDGISESQFSQVIIHEVDAIRKACLSLQEDYLPPITLVIVQKRHHTRIFPHTLCSNYTEQVAQIPSGTVIDQDICHPSGFDFYLCSHTSQGNSRPTHYTVIFDENHFTADGLQLLTHNLCYMYARCTRAVSIVPPVYYAHLAAARGRSYLGKFGDGSSIRNEVSSELPEFLNVPKIADRVLGVMFYC

SEQ ID NO: 172452 - protein, 198 aa, Oryza sativa
  unsure (1)..(198): unsure at all Xaa locations
  Clone ID: PAT_MRT4530_70587C.1.pep
MASKVVFFAAALMAAMVAISGAQLSESEMRFRDRQCQREVQDSPLDACRQVLDRQLTGRERFQPMFRRPGALXGLRMQCXCSSFKDVSRECRCAXAFRRMVRSYXEESMPMPLEQGWSSSSSEYYAAXGSSSKQGYYGEGSSEEGYYGEQQQQPGMTRVRLTRARQYAAQLPSMCRVEPQQCSILAAGPALGLAGLAS

SEQ ID NO: 172453 - protein, 37 aa, Oryza sativa
  Clone ID: PAT_MRT4530_70588C.1.pep
KAWLLQKGSSWFSHWLKIKINNTHKLYASHSLGKSGS

SEQ ID NO: 172454 - protein, 142 aa, Oryza sativa
  unsure (1)..(142): unsure at all Xaa locations
  Clone ID: PAT_MRT4530_70589C.1.pep
GQPRAEPVKAGSVDRSYRRGSSSEFPPRGLPGSMCQQLQEVSRXCRCAAIRRMVRSYEESMPMPLEQGWLLSSSEYYGGEGSSSEQGYYGEGSSEEGYYGEQQQQPGMTRVRLTRARQYAAQLPSMCRVEPQQCSIFAAGQY

SEQ ID NO: 172455 - protein, 897 aa, Oryza sativa
  Clone ID: PAT_MRT4530_7058C.1.pep
MMVDGGATVNLMPYTTFRKPGRNAEDLIKTNMVLKDFGGNPSETKGVLNVELTVGNKTIPTTFFVIDRKGSYSLLLRRDWIHANYCIPSTMHQCLIQWQGDKIEIVPADNQLKMENPSYYFEGVVEGSNVYTKDTVDDLDDKQGQGFMSADDLEEFDIGPGGRPRLTFISKNLSSEFRTKLIELLKEFRDCFAWEYYEMPGLSRSIVEHRLPIKPGVRPHQQPLRRCKADMLEPVKAEIKRLYDVGFIRPCRYAEWVSSIVPVIKKNGKVRVCIDFRNMNKATPKDEYPMPVADQLVDAASGHKILSFMDGNARYNQIFLAEEDIHKTAFRCPGAIGLFEWVVMTFGLKSAGATYQRAMNYIYHDLIGWLVEVYIDDVVVKSKEIEDHIADLRKRGIEVTQRSVNAIKKIQPPENKTELQEMIGKINFVRRFISNLSGRLRHYLLSSECNVICKADVVKYMLSAPILKGRVGKWIFSLTEFDLRYESPKAIKGQAIADFIVEHRDDSIGSVEIMPWTLFFDGSGACFEFAYTIKPYATNNQAEYETVLKGLQLLKEVEADAIEIMGDSLLVISQLAGEYECKNDTLMVYNEKYFWPTMLEDCFRYYKGCQDCQKFGAIQQAPASAINPIIKPWPFRGWGIDMIGMINPPSSKGHKFILVATDYFTKSVEAVPLKKVDFGDAIQFVQEHIIYRFGIPQTITTDQGSIFVSDEFVQFANSMGIKLLNSSPYYAQANGQAEASNKSLIKLIKRKISDYPRQWHTRLAEALWSYRMACHGSIQVPPHKLVYGHEAVLPWEVRIGSRRTELQNDLTNDEYYNLMADEREDLVQSWLRALAKVTRDKERIARHYNKKVVPKDFSEGELVWLLIWPIVEIMGTPYPHGMVIRLVIGDSLYIWNM

SEQ ID NO: 172456 - protein, 262 aa, Oryza sativa
  Clone ID: PAT_MRT4530_70590C.1.pep
MATAATTTTGGDVQIPIGQQATVAATATATSDGIRDSPGTSSPFRGGGGSTTPTPQRPVKAGSSSSPPPPPTTAMDKTLSSVANLAKLLPTGTVLAFQSLSPSFTNRGACLTSNRYLTAALLYLCVLSCIFFSFTDSFVGGDGKLYYGVATAKGFLVFNYDAGSSSDGDDDDQRRRREVFKDLRRLRIRWVDYVHAVFTALVFMTVAFSSTAVQSCYFPEAGDNVKQLLTNLPLGAGFLSTTVFLVFPTTRKGIGYGGQSTN

SEQ ID NO: 172457 - protein, 336 aa, Oryza sativa
  Clone ID: PAT_MRT4530_70591C.1.pep
MAPTMAPTAAAGLAARDASGHLSPLTISRRSTGDDDVVIKILYCGICHSDLHSIKNEWKNATYPLVPGHEIAGVVTEAGKNVTKFKGGDKVGVGCMVNSCHSCDSCNQGLENHCPGVIFTYNSVDKDGTVTYGGYSSMVVVHERFVVRFPEAMPLDKGAPLLCAGITVYSPMKYHGLNVPSKHVGVLGLGGLGHVAVKFAKAFGMTVTVISSSPGKRQEALERLGADAFVVSKNADEMNAATGTMDGIINTVSANIPIAPLLGLLKPNGKMILVGLPEKPMEIPPFALVASKHGVTAEIEVIGADYVNTAMERLAKADVRYRFVIDIGNTLKDAIE

SEQ ID NO: 172458 - protein, 88 aa, Oryza sativa
  unsure (1)..(88): unsure at all Xaa locations
  Clone ID: PAT_MRT4530_70592C.1.pep
LLKSAVHQLVEIVKVFATPXLREEILHMNPLYTETRFSQIRSHLRHKDFHKRMPSDALDFASLLLQYLHSLRCTGFDACAHPFFDGLQ

SEQ ID NO: 172459 - protein, 50 aa, Oryza sativa
  Clone ID: PAT_MRT4530_70593C.1.pep
RPLWIEFLPTGKMFVKPLITPQFGLSRENVEEVFEFRAMVRDAIKGMFNL

SEQ ID NO: 172460 - protein, 148 aa, Oryza sativa
  Clone ID: PAT_MRT4530_70594C.1.pep
MTRVQRKTPSKHPGPPGSGTHGAAASHREMGSTSTGPLPDSGPACLSRWSQTGHVENRGSARSGRGSGAATKSGRAGVDSTQLRAAASDRWRNFNWVAAWSGRWRNFGQQLGAGGGRLGSGTIPILARRLCRRRGGGGRSPCCHPHDG

SEQ ID NO: 172461 - protein, 43 aa, Oryza sativa
  Clone ID: PAT_MRT4530_70595C.1.pep
YISATQLLAIYLFIYLVILYPQCQLQRIPPHYNRLGSSCIVEE

SEQ ID NO: 172462 - protein, 65 aa, Oryza sativa
  Clone ID: PAT_MRT4530_70596C.1.pep
PKFPVDAFRHLSFQSKESNAHYDLTYMIRNFHSYYIRGEVLIAIDSYPRQPLLLLTYPKYQLFST

SEQ ID NO: 172463 - protein, 142 aa, Oryza sativa
  Clone ID: PAT_MRT4530_70597C.1.pep
MVDGREKAKRGRGKGALLLAVFGRAEGGESAWEREALPPHLGRTRAVAQRWVRRQSGRGRLRGAGGPGRTATEGGRPPRGSARAEQGRGGIQRRRQESVPEHRVESRNWFKEDSDILESRQVFGEDSKEAIEFRRLELELES

SEQ ID NO: 172464 - protein, 54 aa, Oryza sativa
  Clone ID: PAT_MRT4530_70598C.1.pep
RIAIGLKFSFLNDLVPHQKNVSIVLPVFMLPIKIRYLEYFRVKCYSGISVRLQI

SEQ ID NO: 172465 - protein, 355 aa, Oryza sativa
  Clone ID: PAT_MRT4530_70599C.1.pep
MESRTPRSSVARSTCNVPGLVLGFSKLCKITKICAAPEFADTKTEFGDYCGGYDQRLIITRLFEEIGALKSAYIKLQKAHIPYNPPKIAFADEIITSELDSVTALQSLCSWNGSVGSLINDRWSLVQELEAETRKKDSDIMLLRRELDVLELFKVASTSVHDFAELIFSLISSSDHHCTNNADEHSPYKRYSLEAYLSRTMLAVHDGAEDDDELDLARFDRIMRCCDPLDALMAHPNSSFARFCRTKYLAAVPSEMEAAMFRNNLDVRAFVSRGGHLRTWFYRAFATMARSAWALQVAVTAHRRCCGRGSVRMLYARRGSRYAAEYMDSVVAAAAADAGRGGGDGVAFTVTPGMK

SEQ ID NO: 172466 - protein, 1430 aa, Oryza sativa
  Clone ID: PAT_MRT4530_7059C.1.pep
MQQQSQGTAQQRPWANVIADVMRERFGLKPKETGSLYRQPYTEWFERVPLPNRFKVPDFSKFSRQDGVSTYEHISRFLAQCGEASAVDALRVRLFQLSLSGSAFTWFSSLPYGSINSWADLEKQFHSYFYSGVHEMKLSDLTAIKQRHDEPVHEYIQRFREMRNKCFSLSLTDAQLADLAFQGMIAPIREKFSSEDFDSLSHLIQKVTLHEHRSAEARKSSKKVNHVCPYMYGSDDDEDDSEIAAAKWVRSKKVIPCQWVKSSGKKEKYDFDITKADKIFDLLLREKQIQLPVGHTIPSAEELGKKRYCKWHNSRSHSTNDCKVFRQQIQVDIEGGKIKFDGSKKPMRVDGNPFPVNMVHTADRTADTGRMRDYQVSSARIINKYQRKYDKQQERHHEEDNGGFDPYWGCEFFRFCWNEGMRLPSIEDCPGCSDVAGGSSRLYDRGNRPKQTRVPVHQRLGPVNQRGDSEDDENRKTQWCPSADEAKRLAKGKSIVTAPVNMVFTLPAEFGIDQADVDEVEEESAKLVLSPEHAVFEKPEGTENQHLKPLYINGYVNGKLMSKMMVDGGAAVNLMPYATFRKLGRNAEDLIKTNMVLKDFGGNPSETKGVLNVELTVGSKTIPTTQLKMENPSYYFEGVVEGSNVYTKDTVDDLDDKQGQGFMSADDLEEIDIRPGDRPRPTFISKNLYPEFRTKLIELLKEFRDCFAWEYYEMPGLSRSIVEHRLPIKPGVRPHQQPPRRCKADMLEPIKAEIKRLYDAGFIRPCRYAEWVSSIVPVIKKNGKVRVCIDFRDLNKATPKDEYPMPVADQLVDAASGNKILSFMDGNAGYNQSFMADEDIHKTDFRCPGAIGLFEWVVMTFGLKSAGATYQRAMNYIYHDLIGWLVEVYIDDMVVKSKEIKDHIADLRKVFERTRKYGLKMNPIKCAFGVSASQFLGFLVHERGIEITQRSINAIKKIKPPGNKTELQEMIGKINIVRRLRHYLLSNECTIICKADVVRYMLSAPILKGRVGNWIFSLTEFDLRYESPKAIKGQAIADFIVEHRDDSIGSVEMVPWTLFFDGSGACFKFAYTIKPYATNNQAEYEAVLKGLQLLKEVEADAIEIMGDSLLVISQLAGDYECKNDTLMVYNEKCQELMKKFRLVTLKHVSREQNIEANDLAQGASGYKPMIKDVKVEIAAITADDWRYDVHQYLHNPSQSASRKLKYKALKYTLLDDELYYRMIDGVLLKCLSADQAKVAIGEVHEGICGTHQSAHKMNWLLRRAGYFWPTMLEDCFRYYKGCQDCQKFGTIQRVPTSAMNPIIKPWPFRGWGIDMIGMINPPSSKRHKFILVATDYFTKWAEAIPLKKVDSRDAIQFVQEHIIYRFGIPQTITSDQGSIFVSDEFVQFADSVGIKLLNSSPYYAQANGQAEASNKSLIKLIKRKISDYPR

SEQ ID NO: 172467 - protein, 290 aa, Oryza sativa
  unsure (1)..(290): unsure at all Xaa locations
  Clone ID: PAT_MRT4530_705C.1.pep
MATEDTSHISGSSESTIPLLEQLAEVFGKLKSHTETSLQLQNGINWEDIKAHFLNLEKSYKSKCDELAEKQKALEEKKAESCRLIAEKEANVSAKERAFLNQFQELRDTAVSALSEVRQKYKVELAGILDANGSKDKKVRTSTNDMNALCASEENTTASGLGEPSEASPVDVKPRPVLKQLCEQMDTAGLLKFLSENWKKLSSLRDELSAALRCATDPARFVLGSLEGFFPSDHTSSPGNKQIILQGQRRSCIIXMEAITPALATKEPGDNHPWSSELGSWPSDCRRVEE

SEQ ID NO: 172468 - protein, 200 aa, Oryza sativa
  Clone ID: PAT_MRT4530_70600C.1.pep
ALQSLCSWNGSVGSLINDRWSLVQELEAETRKKDSDIMLLRRELDGLKSANSRLNKQISSSKPSVNHHKDYSIVLKKLTTPSAVLELFKVASTSVHDFAELIFSLISSPDHRCPNNADEHSPYKRYSLEAYLSRTMLAVHDGAEDDDELDLARFDRIMRCCDPLDALMEHPNSSFARFRGRGSTGRSRRWRGRRGRCGWR

SEQ ID NO: 172469 - protein, 423 aa, Oryza sativa
  Clone ID: PAT_MRT4530_70601C.1.pep
MESRTPRSSVARSTCNVPGLVLGFSKLCKITKICAAPEFADTKTEFGDYCGGYDQRLVITRLFEEIGALKSTYIKLQKAHIPYNRPKIAFADEIITYELDSVTALQSLCSWNGSVGSLINDRWSLVQELEAETRKKDSDIMLLRRELDGLKSANSRLNKQISSSKPSVNHHKDYSIVLKKLTTPSAVLELFKVASTSVHDFAELIFSLISSPDHRCPNNADEHSPYKRYSLEAYLSRTMLAVHDGAEDDDELDLARFDRIMRCCDPLDALMEHPNSSFARFCRTKYLAAVSSEMEAAMFRNNLDVRAFVSRGGHPRTWFYRAFATMARSAWALRVAVTARRRCCGRGSVRMLYARRGSRYAAEYMDSVVAAAAAADAGRGEGDGVAFTVTPGMKVGETMVACRVLLCHDQHDTISDETDPKFR

SEQ ID NO: 172470 - protein, 527 aa, Oryza sativa
  Clone ID: PAT_MRT4530_70602C.1.pep
MLPTDFDIKVLIERHEALTDDVQEMLQHQRRRHQKTASGGRERIATVDHLRRLCMDHYFQDEVDDAMDACLLEELAHGGDLLDATLAFRLMREAGHHVSADEVLGRFTDDNGEFRLDYRKDIRGLLSLQDISHMNIGQEASLCKAKEFSTRNLESAINYLEPNLARYVRQSLDHPYHVSLNQYKARHHLSYLQTLPIRCTAMEELALADFQLNKLLHQMEMQEIKRWWMDLGLAQEIPVARDQVQKWFVWMMTAIQGASLSRCRIELTKIVSFVYIVDDIFDLVGTREELSCFTQAIRMWDLAAADSLPSCMRSCFRALHTVTNDIADMVEREHGVNPINHLKKAWAMLFDGFMTETKWLSAGQVPDSEEYLRNGVVTSGVPLVFVHLLFMLGHDVSQNAAEFVDHIPPVISCPAKILRLWDDLGSAKDEAQEGLDGSYKELYLKENPGLAAGEAEEHVRRLIAGEWEELNRECFSASPSRSSPATTFPAGFTQAALNAARMVGVMYGYDGERRLPVLDDYVRMLLF

SEQ ID NO: 172471 - protein, 126 aa, Oryza sativa
  Clone ID: PAT_MRT4530_70603C.1.pep
MVDGSRLEEDSGMSPLTLTRQPPLSVDVLPSSVGSSIGGWRKEVDGQRGGGSPAAQLSVAREWQRVEGDGSGVKWKSCGGRTGSRSAVGRWTGAVEATRYRCLAGGNRVGGRRTTATGRRGSQAKA

SEQ ID NO: 172472 - protein, 207 aa, Oryza sativa
  Clone ID: PAT_MRT4530_70604C.1.pep
MAADAATALLLRCVVITTLLLPRAIAAYVYGDSGFGIPRNSTERFLYLQNQARADVGVAPLAWDGTVAAYAEKYAAARKGDCDLKHSGGPYGENIFWGSAGANWTATDAVASWASEKQWYNCSDDSCDAPGGRGCTHYKQMVWAKTTKVGCASVSCDANRGTFMVCEYDPPGNVPGVQAYAGCGHFNQTGRFTALDPQPINDSTRYT

SEQ ID NO: 172473 - protein, 388 aa, Oryza sativa
  Clone ID: PAT_MRT4530_70605C.1.pep
MAQAPDLRPCMTTDLLALPVVLPVGLSSFVLCEDGASGASDETVAPCCSPLPFERRHPWSRSPAAARLPLHPAAIALYPLPLPRNAELGCWATSTPLSIDLLSESGKGSPEMDDPRCRIRTRRARRSATPLWWPKPSLAVKPLPPSSNGAPHRGGEDVHRERGLPGQRQRRHPTVLLKSAAIHHGQTTTRVYLCSWPSPAALSCCGGCRGDGGTSRDARTTGRRRCWPHLQPLLLPVGHASCRFCLRPDAPQPPLLPTGHADAGHPLSPPLPPRASPVVADAVAATALRLPRPIWPLGGQIRLRRGRIRLRRSRIRPAVTIPQPDAGLVAFTAVALGGSSGRPRRREAKSPAAAVLAAAQLCRWPLKRRRGGGGRWGRGGSRSSSPPE

SEQ ID NO: 172474 - protein, 513 aa, Oryza sativa
  Clone ID: PAT_MRT4530_70606C.1.pep
MVSDEWKNSEWREEEDHAFTYDCLTNRRWWRDMELVLTAVKPIYIVLRFADQQRNATISGFLPKMISVLGDIRANLCQKQNLRDRVLQVVNKRLRYLLNETLITAAAALDPRVLYTSNMGRQRNSRFAVTLALKKIARSSLEASNAIEQFNFIAKRGLFGGDEARRSALNGRMSAAEWWDSYGGEHKELQNLARRLVSQCLSSSGCERNWSTFALVHTKVRNRLGYEKIHKLVYVHYNLKLRIQHFQNDMQLLDGNPIMDWLCNSRSESVPILDEFDDNEPELSSPRKARLEDVEEDSAEDYVSDSPRGSPTYAESGDSSSSDGEANDDVDAVVDVGSEEDHGEPTARGAPVGEQPAPLHPKSTRKRKVSVKVLLDKTSKKKSDLSLQGLWIDVLDQNLSICPSSILPIGSYAYINLYCQLSTCFWITNKNPGRCPIASQKTDKISRTNTRKYGLYALTSGVQRAGRCSLAELPGLLQYEEAVNQQRRQQAHAGNETVNLIKSKKIVHVMPFI

SEQ ID NO: 172475 - protein, 150 aa, Oryza sativa
  Clone ID: PAT_MRT4530_70607C.1.pep
MPPEERRGRAHRPATYKEAMVANMASIMADIGELAADAAPRRGPPSWICISRDLVPPTPPTRIPPPPPNPRVAWPPGERGLHGLAMDASGAAEIPALPSRSLRPPPPTGFQKILEGVGGGGGRGERKAATLKVNARNKLRRIKINSEIKI

SEQ ID NO: 172476 - protein, 188 aa, Oryza sativa
  unsure (1)..(188): unsure at all Xaa locations
  Clone ID: PAT_MRT4530_70608C.1.pep
MASKVVFFAAALMAAMVAISGAQLSESXMRFRDRQCQREVQDSXPLDACRQVLDRQLTGRERFQPMFRRPGALXGLRMQCCQQLQDVSRECRCAAIRRMVRSYEESMPMPLEQGWSSSSSEYYGGEGSSSEQGYYGEGSSEEGYYGEQQQQPGMTRVRLTRARQYAAQLPSMCRVEPQQCSIFAAGQH

SEQ ID NO: 172477 - protein, 210 aa, Oryza sativa
  unsure (1)..(210): unsure at all Xaa locations
  Clone ID: PAT_MRT4530_70609C.1.pep
FSHWTWELVTELINVVQDEILSLVLCKLVLHPYNSHLTGIAHGTALESESEMRFRDRQCQREVQDSPLDACRQVLDRQLTGRERFQPMFRRPGXALGLRMQCCQQLQDVSRECRCAAIRRMVRSYEESMPMPLEQGWSSSSSEYYGGEGSSSEQGYYGEGSSEEGYYGEQQQQPGMTRVRLTRARQYAAQLPSMCRVEPQQCSIFAAGQY

SEQ ID NO: 172478 - protein, 577 aa, Oryza sativa
  Clone ID: PAT_MRT4530_7060C.1.pep
MAANDRLYPPIDPYALEPPQFGDDAACGGGGGGGEVRVRDPSAVMWDEEPEASPSSPEEPVTEGTHTFEQGPKVHLAENNVVGSAGVGDVYEYSREMTTMQELVENTYYDCALRDQTGMWVPPSVPPMTKHDHEEWQKGFGANGGYFAEEDLWDIDEENKEMTMWDVLAAMVSAGKDKVLSVVSYDFGRQGMSLISHLLLEEACKDKADTLEDASVGLEHALLEAEPTVWLPDSAAPSCMLCGARFHPIICSRHHCRFCGGLFCGGCSKGRSLMPPKFSTSEPQRVCDVCGVRLECIQPYLMNKISRACQIPTNDLTDLSTLRSWLNLPWARTMEYEIYKAVNSIYGYFKVGSLKPEKSIPDSILRQAKGLAIITVVNVGMMVTYKIGTGLVVARRADGSWSPPSAISTYGVGYGVQAGGELADYIIVLRNTDAIRTFSGNAHLSVGAGISASAGHLGRVAEADFRAGDGGYAACYTYSCSKVKRKPAATGLVSSSADADERSRQRKEESHAAWSSPTPTLKPRRAPPWKQIERWRARHACGVVALLPLVLGVARVRVEEDRHVAGEDDGVECRPRV

SEQ ID NO: 172479 - protein, 59 aa, Oryza sativa
  Clone ID: PAT_MRT4530_70610C.1.pep
NHIRVQRVNYFASHVERHRRSRRRIAAARGGGGELERGEHARALVVPLRCGVRPRQVRV

SEQ ID NO: 172480 - protein, 166 aa, Oryza sativa
  Clone ID: PAT_MRT4530_70611C.1.pep
MQQMRSAAAAPCSLAAMLLRRFAYTSYSSSCGPIRRHAAVALSSTTTTTTRFAAWSPPPPSGGARSRGFAAWASAPGPAGSTDSPAMQALETKIKEQLEADTVTVVDTSGDGRHVCIDVVSKVFEGKSAVNRQRMVYKAIWEELQSTVHAVDQMTTKTPSEAAANQ

SEQ ID NO: 172481 - protein, 154 aa, Oryza sativa
  unsure (1)..(154): unsure at all Xaa locations
  Clone ID: PAT_MRT4530_70612C.1.pep
PGLDPPQSEHFVYLRAATKDWGGILKMTGLLDPHLSMDSCTIDGYTVPVGVQALINSWAIGRDTRYWGDDAEEFVPERLMDGGSALHVXLKGSDFQFLPFGSGRKMGAGVNLPMVTGELMLANLGHPFDWDLPPGQEGRDTEGSQVFRLGFPPK

SEQ ID NO: 172482 - protein, 278 aa, Oryza sativa
  Clone ID: PAT_MRT4530_70613C.1.pep
MTYLPLDLKGRVGDGSSGGRNDGDDHRLPPYARLLSKRSVSHFAYHRGLAVSTLLVASLAARGLSLPPTISIVAVGSEVLESGDAPSRPSAATVEPAPSRRTAPVAGLATPPRPSWSTDEDATAGKGVDWEEEPLGFEVSTTPIPELPDPEMTTGRPPLVSSPRRRVEPPPRPRRGARRPSLPPAPTSPPSRASDTVGCLPIQRPTASCLALHRRCSPVVPRPMPLQSDTARVGAPAVSTAPCTRRRRARPSPLMSRRQQRHGGCDDCGTKLDQNVKL

SEQ ID NO: 172483 - protein, 59 aa, Oryza sativa
  Clone ID: PAT_MRT4530_70614C.1.pep
MSNPTVAGSNARSVLLHQFSPFPFGDLLRVRMNRSSGNEKNLEEFCWIIGGTEGISPEF

SEQ ID NO: 172484 - protein, 69 aa, Oryza sativa
  Clone ID: PAT_MRT4530_70615C.1.pep
FSVVYRHRMMSELVFALPLHPASSLSKHHNVSLVINSILAPCKPTCTRLCITLCRLCCSYICVKINFSP

SEQ ID NO: 172485 - protein, 970 aa, Oryza sativa
  Clone ID: PAT_MRT4530_70616C.1.pep
MGDYKLGMDPAGLSHPAGLSQFIVWEGCNRQTKLQCSSDEFFEIPNLDGCSLWYGDLMNLQDGYDVHGAGTLCLRLAASEVESGRNSGCCIQGEEKILIYEYMPNKSLDFFLFGVFSFPFLIGYMAPEYAMQGIFSVKSDVFSFGVLLLEIVSGMRNAGSHRRGRSLNLLGHAWELWREGRWFDLVDPSTRDAYPEHRVLRCVHVGLMCVQENAVDRPTMSDVISMLTSESITLPDPRQPAFLSIVLPAEMDAHDGSFSQNAMTITDLEDGQTIVSANETFTLGFFSPGTSTYRGSSFTVAYGSGAKDTEATILDSGNLVLRSVSNRSRLRWQSFDYPTDTWLQGMNLGFVGAQNQLLTSWRSSDDPAIGDYSFGMDPNEKGDFFIWERGNGNSNSLNEWTLFYTSGLCLGAGQREAAKHIVHVELLASVPEIKTGKTVANAQKDLIQEMGLDGLVEIPGEDDKCSLWYGNIMNLREGESGDAVGTFYLRLAASELESRDATCKFSLENKLGEGGFGPVYKDVCNACFRELEDQLVACFPETVRTSSKACRPSRFLVFWQGMGTMERRKESPINRPTMTEIISALDNESTTLPEPKQPAFVSAGIWTEAGNKCRDGVKTPPAGSCNLQTRVTKPEIKGLFAHGQALRQPNLGENDPTIVGKIPGKRPECDRCFRRVDHRAHNDKDAATLEITDDLRGRVGDGSSGGRNDSDDHRLPPRARLLSERSVSHFAYHQGLAASTLLVASLAARGWDLRRHMVVGAPAFALLFAASLAGVANGDIPSLAADPAAAASPRSPPTSLLASLCGALSSLSLPPTISIVTVGSEVLESGDAPSRPSAAAVEPAPSRRTAPVAGLAAPPHPSCACRSADEDATAEEGMDWEGEPLGFEVSTTPIPELPDPETTTGRPPPVPSPRRRVDDGTALLTAASNRLHGHVGVHDGILFHRRRRLRRVEPATPPAASPSGARPPPA

SEQ ID NO: 172486 - protein, 72 aa, Oryza sativa
  Clone ID: PAT_MRT4530_70617C.1.pep
LRGNKRDIYLGILLPQGMNHEFDLGEQFANGPISTYICNFLENPRRFFWEAYKKKLRGINRNGHALYPLEKG

SEQ ID NO: 172487 - protein, 774 aa, Oryza sativa
  Clone ID: PAT_MRT4530_70618C.1.pep
MASRAVIRRRKYLLDHVNAPTLSLSPFSTFQHGRSGSEDESRIGQRFLEQSSGDSKWEQGQYGVKLIKGDLLALGNGLLRRPAHGISLPAYGIGRKEFGLPMGARHLLQSVRTASTATAGQPKLDIEDEQSEDQKQNKRKKEASPEECDQAVEGLSSAKAKAKAKQVQESVKAGQSIVRKFWARLLGIGPALRAVASMSRADWAAKLKHWKDEFVSTLQHYWLGTKLLWADVRISSRLLVKLAGGKNLSRRERQQLTRTTADIFRLVPFAVFIIVPFMEFLLPVFLKLFPNMLPSTFQDKMKEEEALKRKLKARMEYAKFLQDTAKEMAKEVQTSRSGEIKQTAEDLDEFLNKVRRGEHVSNDEILNFAKLFNDELTLDNMSRLPFLIYLPRLVNMCKYMGIRPFGTDHYLRFMLRKKLQDIKNDDKMIQAEGVESLSEEELRQACRERGHLGLLSTEEMRKQLRDWLDLSLNHAVPSSLLILSRAFTVSGKMKPEEAVVATLSSLPDEVVDTVGTVLPSEDSVSERRRKLEFLEMQEELIKEEEKKKEKEEKAKQEKEEKAKLKEPKAAEEDLALKEMTGPTAREEEELREAKQHDKEKLCNFSRALAVLASASSVSKERQEFLSLVNKEIELYNSMLEKEGTEGEEEAKKAYMAAREESDKAAEVDEEEKVSSALIEKVDAMLQKLEKEIDDVDAQIGNRWQILDRDLDGKVTPEEVASAAAYLKDTIGKEGVQELVSNLSKDKDGKIRVEDIVKLASQTDENNEDEEEGRQ

SEQ ID NO: 172488 - protein, 97 aa, Oryza sativa
  Clone ID: PAT_MRT4530_70619C.1.pep
MEACNIGGDPHSPVESRAPPTLMEEAVNGNDLAWLFQEAVLNLKRNANEVLARLLLAIHHRHLCAHRYSAALAVFGHIGNCRQGDSGGLVSSSSSRA

SEQ ID NO: 172489 - protein, 1906 aa, Oryza sativa
  unsure (1)..(1906): unsure at all Xaa locations
  Clone ID: PAT_MRT4530_7061C.1.pep
MDQINWHAHTFEDELWTFTGVKQISQASCFLLTRFWHAQWDRLEVSKQFFLMAEKPPLSPSSASPSTVKEKIQKLGLTDVNEGNVVPIDPEKFTPEQKKDFEAMLQQARDQFLNSFMQTRKGTLVQKYKVKVVADDPGTSSSKSEDGKQAPDGSVLTKKSNTPAXGDLLSSSAGSQGDNSQGVRGVRGDRVHGVQXPSIQAVPPVAPSAQPTAPASTPLPAPSALAPGQLVNPQLLMREQPQHSGKVVNRSTQDQVAAMFLPPQPAVDPIQQQPIQQTLPIQQGGNLNYQYQPPSPQDQYQPGGLAQPQFASQYGQFEPMQQQSQGAAQQRPWADVIADVMRKQFGLKPKETGSLYRQPYPEWFERVPLPNRFKVPNFSKFSGQDGVSTYEHISRFLAQCGEASAVDALRVRLFRLSLSGSAFTWFSSLPYGSINSWADLEKQFHSYFYSGVHEMKLSDLTAIKQRHDEPVHENIQRFREMRNKCFSLSLTDAQLADLAFQGMIAPIREKFSSEDFDSLSHLIQKVTLHEHRSAEARKSSKKVNHVCPYMYGSDDDEDDFEIAAAEWVRSKKVIPCQWVKSSGKEEKYDFNITKADKIFDLLLREKQIQLPAGHTIPSAEELGKKRYCKWHNSGSHSTNDCKVFRQQIQVAIEGGKIKFDDSKKPMRVDGNPFPVNMVHTAGRTADTGRMRGYLVSSARIINKYQRKYDKKQERHHEEDNGGFDPHWVVISSGSVGMKTRVPIHQRLGPVNQRGDSEGDENKKTQWCPPDIFTKNQKRRVQRLRSRERFQEVEQEINHRLKKAKPRQEWRVKNQAPVADDVAADEAKWLAKGKSVVTTPVNMVFTLPAEFGIDQADVDEVEEELAKLVLSPEQAVFKKPEGTENRHLKPLYINGYVNGKLGRNADDLIKTNMVLKDFGGNPSETKGVLNVELTVGSKTIPTTFFVIDGKGSYSLLLGRDWIHANCCIPSTMHQCLIQWQGDKIDIVPADSQLKMENPSYYFEGVVESSSVYTKDTVDDLDSKQEHRLPIKPGVRPHQQPPRRCKADMLEPVKAEIKRLYDAGFIRPCRYVEWVSSIVHVIKKNGKVRVCIDFRDLNKATPKDEYPMPVADQLVDAASGNKILSFMDGNAGYNQIFMAEEDIHETAFRCLSAIGLFEWVVMTFGLKSAGATFQRDMNYIYHDLISWLVEVYIDDVVVKSKEIKDHIVDLRKVFERTRKYGLKMNPTKCAFGVSAGQFLGFLVHERGIEITQRSINAIKKIKPLENKTELQEMIGKINFVRRFISNLSGKLEPFTPLLRLKADQQFTWGAEQQKALDNIKGYLSSPPVLIPPQKGIPFRLYLSAGEKSIGSVLIQELDEKERVVFYLSRRLLDAETRYSPVEKLCLCLYFSCTRLRHYLLSNECTIICKADVVRYMLTAPILKGRVGKWIFSLTEFDLRYESPKAIKGQAIADFIVEHHDDSIGSVEMVPWTLFFDGSVCTHGCGIDLVIISPRGACFEFAYTIKPYATNNQAEYEAVLKGLRLLKEVKADAIEIMGDFLLVISQLAGEYECKNTLIVYNEKCQELMKEFRLVTLKHVSREQNIEANDLAQGASGYKPMIKDVKVEIAAITADDWRLSEVWGNSTSAGVGYESFMNPSTSAGVGYESFNERRRRRRPFRGWGIDMIGMINPPSSKGHKFILVATDYFTKWVEAIPLKKVDSGDAIQFVQEHIIYQFGIPQTITTDQGSIFVSDEFVQFADSVGIKLLNSSPYYAQANGQAKASNKSLIKLIKRKISDYPRQWHTRLAEALWSYRMACHGSIQVPPYKLVYGHEAVLPWEVRIGSRRIELQDGLTADEYYNLMADEREDLVQSRLQALAKVNKDKERVARHYNKKVVPKDFLEGELVWKLILPIGTRDNKFGKWSPNWE

SEQ ID NO: 172490 - protein, 61 aa, Oryza sativa
  Clone ID: PAT_MRT4530_70620C.1.pep
DSVMWGKTYTRRHRARDVRRAAERAGARMDAERAVIAGTAHATEDEAISASGFIFHARRRH

SEQ ID NO: 172491 - protein, 55 aa, Oryza sativa
  Clone ID: PAT_MRT4530_70621C.1.pep
SWSPLKWIILLQTLPLLTMSAILRLDQKQRDIGVNKKRAMISDSCILLRYIRSNF

SEQ ID NO: 172492 - protein, 157 aa, Oryza sativa
  Clone ID: PAT_MRT4530_70622C.1.pep
MDGPEKTNRKLEDGDIVNVDVTVYYKGVHGDLNETYFVGNVDEASKQLVRCTYECLDKAIAIGDSFSFSLVLVAIYLALCLGYVSLQLLFLNSKHMIAHLSEVFVTFIGTSRQVSAQDHRYTYQISNMSIRHKIEELRPNWILASCNDSTHGKIYQT

SEQ ID NO: 172493 - protein, 175 aa, Oryza sativa
  unsure (1)..(175): unsure at all Xaa locations
  Clone ID: PAT_MRT4530_70623C.1.pep
LVDPRAAGLPPSDHPPYSTDDLLDRTTXDSYGFLDLATSSDSAWACFVNCSRPIQDTTSPWYRPVSCLPTNNSWVYLNEFYGCTIGELQPSCRYLSMIPFDTQHISVSQLQNASYTDIIGFIGKGSRVRFPMDHSSLNHHISTKECLNNSVRYFNEHITGASIPNIARAIFGANC

SEQ ID NO: 172494 - protein, 107 aa, Oryza sativa
  Clone ID: PAT_MRT4530_70624C.1.pep
TPPRGRRSPAPSTTAATAPAASVDRRRHRQAAPGTSSPPPAASPSPAWLPRRVAAAGSAAGAAALSPERRRPGWRSTRTRSSGRSSSRRRRRRRRRNATRSRSRSPP

SEQ ID NO: 172495 - protein, 112 aa, Oryza sativa
  Clone ID: PAT_MRT4530_70625C.1.pep
MNRVQQRQQYEDEEARLDDKRPCFLQQQVKTIPAHARPQRRATTPRGGGGGGSGATQRRRLNRRLAATNTESHDGSEREDRVEVARRRVAGGKPARRPVDYQESAARVQTML

SEQ ID NO: 172496 - protein, 48 aa, Oryza sativa
  Clone ID: PAT_MRT4530_70626C.1.pep
LPRDSKGVTSSSVQRVCAQLGLLPGGKPLPQHHARLHESAHRHHTDAS

SEQ ID NO: 172497 - protein, 651 aa, Oryza sativa
  Clone ID: PAT_MRT4530_70627C.1.pep
MLAGSDDHRAGPRRGRGHCRRRVGEKMRRMPPRDARERKRQPHMDFVVPSLWWPEMIVLEFVLAESSGRHARLRRGRGLLEDRNDGKSLSVGSQTNTRKNVNGDITKNSTMSSTLPPPIRPDKIVFSSLWFGGPFDEAWLRGGEGLVSAMAYNLALSTWARAKAYLILGYSIESIRSLYLSPSPTFVPRSQNRVLVQRGIDVANESRKNNKKTWDPHVSYTKNYKKRMASGGAEGGRWVQRPGDKGQLAAAQRGGGGMSGAWCPACAANPLPPAAAHRRFSLALPPVADPNALPLLSLPPVGRRALPLLSRRSVGRGPVAAETRERRRWRAGEGRSGGGGDRDRRGRLAVGRKKTGHQNGRVLATLGPATALSSTVLHALSAGHDAPASAVLPPRPRTCKGRLRLATATRVGIPSKMAASGGGFFCTCGGGGVEGGRSGAGGGGGAAADGRGRRAEPADNDVTTRVLGGICMHTAWSSSPYCVSIVSFTVGYNIRCEKEEQRVPVEAAGADGVADRLRAAAAPELSFTAAKTKETTTVAVGAAAARRSLRQPPRHPEHLSGFEGSSAADDISMPAVGWCGWWWCERNGERRDMDSSLPLPPPLKLPLAAIASALARRRSLPADGRQYRHISATSAKPPSKTAEGVKLHRFQ

SEQ ID NO: 172498 - protein, 1408 aa, Oryza sativa
  Clone ID: PAT_MRT4530_70628C.1.pep
MGSNLKEILDNVSYPEIFLSFPNAKEKKRIESKEKAILEFYQQFACVGGDLVFSESLCEELQKKFFQQKCELGRIGRRNMNRRLNLDIPQNSTFLLPRDVLAATDHLIGMKFETGILDDDDMNHLKNKRIRSVADLLQDQFGLALGRLQHAVQKTIRRVFIRQSKPTPQTLVTPTSTSILLITTYETFFGTYPLSQVFDQTNPLTQTVHWRKVSCLGPGGLTGRTASFRSRDIHPSHYGRICPIDTSEGINVGLTGSLAIHVRIDHWWGSVESPFYEISEKAKKKKERQVVYLSPNRDEYYMIAAGNSLSLNRGIQEEQVVPARYRQEFLTIAWEQIHVRSIFPFQYFSIGGSLIPFIEHNDANRALMSSNMQRQAVPLSRSEKCIVGTGLERQTALDSRVSVIAEREGKIISTNSHKILLSSSGKTISIPLVTHRRSNKNTCMHQKPRVPRGKSIKKGQILAEGAATVGGELALGKNVLVAYMPWEGYNFEDAVLISERLVYEDIYTSFHIRKYEIQTDTTSQGSAEKITKEIPHLEKHLLRNLDRNGVVKLGSWVETGDILVGKLTPQIASESSYIAEAGLLRAIFGLEVSTSKETSLKLPIGGRGRVIDVKWIQRDPLDIMVRVYILQKREIKVGDKVAGRHGNKGIISKILPRQDMPYLQDGTPVDMVFNPLGVPSRMNVGQIFESSLGLAGDLLKKHYRIAPFDERYEQETSRKLVFSELYEASKQTKNPWVFEPEYPGKSRIFDGRTGDPFEHPVLIGKSYILKLIHQVDEKIHGRSTGPYSLVTQQPVRGRAKQGGQRIGEMEVWALEGFGVAHILQEILTYKSDHLIARQEILNATIWGKRVPNHEDPPESFRVLVRELRSLALELNHFLVSQKNFQRVIRRNNNLAYLLKRSELAPADLVMCQEKLVQEAVDTLLDSGSRGQPTRDGHNKVYKSLSDVIEDFDGDQMAVHLPLSLEAQAEARLLMFSHMNLLSPAIGDPICVPTQDMLIGLYVLTIGNRRGARGNASQVHQLVGMRGLMADPQGQMIDLPIQSNLREGLSLTEYIISCYGARKGVVDTAVRTADAGYLTCRLVEVVQHIIVRRRDCGTIQAISSQDILHSVTIPSKSLILVQNDQYVESEQVIAEIRAGTSALHFKEKDQDQMNTYSFSVDGRNTIVAYFDDPRYKKDKKGSGIVKFRYRTLEDEYRTREKDSENEYGSPENEYRTREEECKTLEDEYRTREEEYETLEDEYGIPENEYETLEDEYGILEDEYRTREEESEDEYGSPENKYRPREDKYGTLEEDSEVEHGTLEEDSEEDSEDEYGNPGEDSVLKKGVLIEHRGTKEFSLKYQKEVDRFFFILQELHILPRSSSLKLNWHFLPHDSWEETSAKIHLGQFICENEQLFMVIMEKSFTKGIG

SEQ ID NO: 172499 - protein, 382 aa, Oryza sativa
  Clone ID: PAT_MRT4530_70629C.1.pep
MTSEENKAVAHNEPLPMEQTLSSGAKRKRGRPRKYEYGMHELPYSVQHIQSVPPLHSTQDSSNIRQDGIQINHTSGGSFGPNIGTIQALPTKQGPANRSSGPRDSVNLVKTSLSQASIYTSAPLQANQVLKGWIQDENNLRPITPKDDLAPDLPMLRPSQVRKRPFTVYRQASGHIPVPLKDVTFAKPLQMRRPVEKSFTKHTVPSVPRPHMGSGVVAAVPISVSPSNAESRIFSEQGTEHVNPQPLSAVVPIKSGQPVLASCKEVAGGKTVNEIQTVSESSKHTEESSGERHLLNVPVMDAIKESLGPKEQPNATNSKQQTFMEPPESTEQAVQLDTERDISKGADDSKSEASGGTAPPVEASTAVHNPQDDSHEMKVDNK

SEQ ID NO: 172500 - protein, 1496 aa, Oryza sativa
  unsure (1)..(1496): unsure at all Xaa locations
  Clone ID: PAT_MRT4530_7062C.1.pep
LQDQINWHANIPEGKLWTCTGVKQISQATCFLSTRFWHARWDLXEVRRQFFLMAEKQPPPSSPGSVNGKVLGLTDIIEENVMPIDPEKFTPEQKEEFEATLQHAWDQFLNSFMQTRKGTLVXKYKIKVVPDSPGTGSSKDGEVKQAPGGSAQPSSKGVTDGSPSDQGDNSQGVHGVQGDGAHNFQDRVDYAVHHALIIRQXRVDHQSRVLVNTLSNMMKTIADGSIAEHQAAGPVGVFPNYRSLITDVXPSVQAVPSIAPTTQPTAPASSPLPATLAMTPGQPVNPRLLTREXPQHGGQAANRLTQDQVAAMFLPPPPVVDPVXNSRFSRHPQSSRLYNQSNNTWWSACTAVCKSGHPRAFGSPCTAGWHDVMREQFGLNPKETGSLYRQPYPEWFERVPLPNRFKVPDFSKFSGQDGVSTYEHISRFLAQCGEASAIDALKVRLFRLSLSGSAFTWFSSLPYGSINSWADLEKQFHSYFYSEVYEMKLSDLTAIKXWHDEPVHEYIQRFREMRNKCFSLSLTDAQLADLAFQGMIPPIREKFSSEDFDSLSHLIQKVTLHEHRXGEVRKSFKKVNHVCPYMYGSDDEEDDSEIAAAEWVRSKKVIPCQWVKSPGKEEKYDFDITKADKIFDLLLQEKQIQLPAGHTIPSPEELGKKGYCKWHYSGSHSTNDCKVFRQQIQVAIEGGKIRFDDSKKLTKVDSXAGQAADGVRAKGFQVNSAKIINKYQRKYDKQQEKHYKKYDDGMRLLSIENCPRCSEIIESSSRPYSRGNRPRQARLSVHQRLGSVNQDRGQEDEAIRKNQWCPSGIFTKNQKRRETKTRQEWHVKNLVPVADDAAADEAKRLAKGKSVVAAPINMVFTLPAEFGIDQADVDEVEEESAKLXXXXXXXXXDKHEGTENRHLKPLYINGYVNGKPMSKMMVDGGVAVNLMPYATFRKLGRNAEDLIKTNMVLKDFGGNPSETKGVLNVELTVGSKTIPTTFFVIDGKGSYSLLLGRDXIHANCCIPSTMNQCLIQWQGDKIEIVPADSQLKMENPSYYFKGVVEGSNVYAKDTVDDLDDKQGQGFMSADELEEIDIGPEFRTKLIEFLKEFRDCFAWEYYEMPGLSRSIVEHRLPIKPGVRPRQQPPRRCKANMLEPVKAEIKRLYDAGFIRPCRYAEWVSRIVPVIKKNDLNKATPKDEYPMPVADQLVDAASGNKILSFMDGNAGYNQIFMAGEDIHKTAFGCPGATGMFEWVVMTFGLKSAGATYQMAMNYIYHDLIGWLVEVYIDDVVVKSKEVEDHIADLRKVFERTRKYGLNMNPTKSTFGVSAGQFLEYLVHERGIXVIQRSVNANKKIQPPENKTELKEMIGKINFVKRFISHLFGRLEPFTPLLKLKADQQFTWGAEQQKALDNIKEYLSSPPVLIPPQKGIPFRLYLSAGEKSIGSVLIQELEGKEQVVFYLSRRLLDAETRYSPVEKLCLCLYFSCIRLRHYLLSNECTLICKADVVRYMLSAP

SEQ ID NO: 172501 - protein, 156 aa, Oryza sativa
  Clone ID: PAT_MRT4530_70630C.1.pep
MGYIRCEKEEQRERVEAAGADGVADRLRAAAAPGLSSTTVKMEETTAAAAGGTRGGAAAPHLRLRRSGLRAAAAARRSLRQPPRHPQNLSGSEGSSAADDISMSAVGWCGWWWQRHDMDSSLPPPPPLQLPPSAAASAPARRRSLPADGCRGEGEK

SEQ ID NO: 172502 - protein, 154 aa, Oryza sativa
  unsure (1)..(154): unsure at all Xaa locations
  Clone ID: PAT_MRT4530_70631C.1.pep
RVHRRRREKRARRERRCRCRPRWPXPXTDPPWDEVVAGYAAVEKAPVAIEPTGRGRGIXPRRPPXPPPPARSIAAGXRLGGRRERRRDRRRPPLPTATPPTLQPPPPPPQPPAAIAAPPPPPVDLPREGPPPTRPHPRIPRRFRGSKLTTRACD

SEQ ID NO: 172503 - protein, 328 aa, Oryza sativa
  Clone ID: PAT_MRT4530_70632C.1.pep
SKLPKMTSEENKAVAHNEPLPMEQTLSSGAKRKRGRPRKYEYGMHELPYSVQHIQSVPPLHSTQDSSNIRQDGIQINHTSGGSFGPNIGTIQALPTKQGPANRSSGPRDSVNLVKTSLSQASIYTSAPLQGNSVKDDIVGKYFVGKMSKKFPGFSLITVKVKDNQVLKGWIPDENNLRPITPKDDLAPDLPMLRPSQVRKRPSTVYRQASGPIPVPLEDVTFAKPLQMRRPVEKSFTKHTVPSVPRPHMGSGVVAAVPISVSPSNAESRIFSEQGTEHVNPQPLSAVVPIKSGQPVLASCKEVAGGKTCNEIQTVSESSKHTGESSDH

SEQ ID NO: 172504 - protein, 870 aa, Oryza sativa
  Clone ID: PAT_MRT4530_70633C.1.pep
MGSNLKEILDNVSYPEIFLSFPNAKEKKRIESKEKAILEFYQQFACVGGDLVFSESLCEELQKKFFQQKCELGRIGRRNMNRRLNLDIPQNSTFLLPRDVLAATDHLIGMKFETGILDDDDMNHLKNKRIRSVADLLQDQFGLALGRLQHAVQKTIRRVLIRQSKPTPQTLVTPTSTSILLITTYETFFGTYPLSQVFDQTNPLTQTVHGRKVSCLGPGGLTGRTASFRSRDIHPSHYGRICPIDTSEGINVGLTGSLAIHARIDHWWGSVESPFYEISEKAKKKKERQVVYLSPNRDEYYMIAAGNSLSLNRCIQEEQVVPARYRQEFLTIAWEQIHVRSIFPFQYFSIGGSLIPFIEHNDANRALMSSNMQRQADSRVSVIAEREGKIISTNSHKILLSSSGKTISIPLVTHRRSNKNTCMHQKPRVPRGKSIKKGEILAEGAATVGGELALGKNVLVAYMPWEGYNLEDAVLISERLVYEDIYTSFHIRKYEIQTDTTSQGSAEKITKEIPHLEEHLLRNLDRNGVVKLGSWVETGDILVGKLTPQIASESSYIAEAGLLRAIFGLEVSTSKETSLKLPIGGRGRVIDVKWIQRDPLGIMVRVYILQKREIKVGDKVAGRHGNKGIISKILPRQDMPYLQDGTPVDMVFNPLGVPSRMNVGQIFESSLGLAGDLLKKHYRIAPFDERYEQEASRKLVFSELYEASKQTKNPWVFEPEYPGKSRIFDGRTGDPFEQPVLIGKSYILKLIHQVDEKIHGRSTGPYSLVTQQPVRGRAKQGGQRIGEMEVWALEGFGVAHILQEILTYKSDHLIARQEILNATIWGKRVPNHEDPPESFRVLVRELRSLALELNHFLVSQKNFQVNREEV

SEQ ID NO: 172505 - protein, 356 aa, Oryza sativa
  Clone ID: PAT_MRT4530_70634C.1.pep
MDAVGVLSQPTTTQPHASWEASALSILLLVAEAIGKGRQMRTGWTAASKHKRCTHAVSSASGGHTARSSSPYCASSFTMGYICCEKEEQRERVEAVGADGVADRLRAAAVPGLSSTTAKMEETTAAAAGGTRGGQGYENPREATGRIVCANCHLANKPVDIEVPQAVLPDTVFEAVLRIPYDMQLKQVLANGKKGGLNVGAVLILPEGFELAPPDRISPELKEKIGNLSFQSYRPNKKNILVIGPVPGVVRKILRKEKGGYEISIVDASDGRQVIDLIPPGPELLVSEGESIKLDQPLTSNPNVGGFGQGDAEIVLQDPLRVQGLLFFFASVILAQVFLVLKKKQFEKVQLYEMNF

SEQ ID NO: 172506 - protein, 109 aa, Oryza sativa
  unsure (1)..(109): unsure at all Xaa locations
  Clone ID: PAT_MRT4530_70635C.1.pep
HELMYTTWSRTHITYIHTDILLSACTQYTTRRVVDRLHELWMXCWTVSGVERAAREEVFPGLCCCLCCCCKLGCLVCLVHQTAQPXVALGTAPLPVHCPVHXLSLASSA

SEQ ID NO: 172507 - protein, 1077 aa, Oryza sativa
  Clone ID: PAT_MRT4530_70636C.1.pep
MLRNGNEGMSTIPGFSQIQFEGFCRFINQGLAEELEKFPTIKDPDHGISFQLFAKGYQLLEPSIKERDAVYESLTYSSELYVSARLIFGFDVQKQTISIGNIPIIDRNSLGTFIINGIYRIVINQILLSPGIYYRSELDHKGISIYTGTIILDWGGRSELAIDKKERIWARVSRKQKISVLVLSSAMGSNLKEILDNVSYPEIFLSFPNAKEKKRIESKEKAILEFYQQFACVGGDLVFSESLCEELQKKFFQQKCELGRIGRRNMNRRLNLDIPQNSTFLLPRDVLAATDHLIGMKFETGILDDDDMNHLKNKRIRSVVDLLQDQFGLALGRLQHAVQKTIRRVFIRQSKPTPQTLVTPTSTSILLITTYETFFGTYPLSQVFDQTNPLTQTVHGRKVSCLGPGGLTGRTASFRSRDIHPSHYGRICPIDTSEGINVGLTGSLAIHARIDHWWGSVESPFYEISEKAKKKKERQVVYLSPNRDEYYMIAAGNSLSLNRGIQEEQVVPARYRQEFLTIAWEQIHVRSIFPFQYFSIGGSLIPFIEHNDANRALMSSNMQRQAVPLSRSEKCIVGTGLERQTALDSRVSVIAEREGKIISTNSHKILLSSSGKTISIPLVTHRRSNKNTCMHQKPRVPRGKSIKKGQILAEGAATVGGELALGKNVLVAYMPWEGYNFEDAVLISERLVYEDIYTSFHIRKYEIQTDTTSQGSAEKITKEIPHLEEHLLRNLDRNGVVKLGSWVETGDILVGKLTPQIASESSYIAEAGLLRAIFGLEVSTSKETSLKLPIGGRGRVIDVKWIQRDPLDIMVCVYILQKREIKVGDKVAGRHGNKGIISKILPRQDMPYLQDGTPVDMVFNPLGVPSRMNVGQIFESSLGLAGDLLKKHYRIAPFDERYEQEASRKLVFSELYEASKQTKNPWVFEPEYPGKSRIFDGRTGDPFEQPVLIGKSYILKLIHQVDEKIHGRSIGPYSLVTQQPVRGRAKQGGQRIGEMEVWALEGFGVAHILQEILTYKSDHLIARQEILNATIWGKRVPNHKDPPESFRVLVRELRSLALELNHFLVSQKNFQVNREEV

SEQ ID NO: 172508 - protein, 345 aa, Oryza sativa
  unsure (1)..(345): unsure at all Xaa locations
  Clone ID: PAT_MRT4530_70637C.1.pep
MAASGSLSGGGSGRLESMSRRSPFLSHHHHPHHPTAGIEMSSAAELPSKPERXPGVAAAGGDCGERRRLHGVPSGGGAGVERQPASGAAETRMWRRRPAGRAGRGRARRTPPRVPPTATVVVSFVFAAVKLSSGAAAARRRSATPSAPAASTGTRCSSFSQRILYPTVNDTMDTQYGDELQAVCLPDAEETAWAHLDHGSPGRCWLFNLDHWALISEAATRQMVEDNAVNQSALCLLACRLTLVXHADASQHACGHVVVGRLGTPTASIGGGAASPACATPPAFNAAAAAGAEEATTRCRHLRGDADASRGGETXAALTRSWARRENSGGGCIVAGREGVEHSGG

SEQ ID NO: 172509 - protein, 57 aa, Oryza sativa
  Clone ID: PAT_MRT4530_70638C.1.pep
KWSNGSCKANISLLLGPKIFTPKKTSNWNPLIEYLHKYVTLQVTLERFPFLTFFKNC

SEQ ID NO: 172510 - protein, 94 aa, Oryza sativa
  Clone ID: PAT_MRT4530_70639C.1.pep
GPNPQNDGEGVLQGLPPSPPPLYPIHSEDEAEETPSAMDISEPSQELEVARGTRMFHINDLNVPPIWIETPEEEDDPEEQVFEMQEHISMYADD

SEQ ID NO: 172511 - protein, 178 aa, Oryza sativa
  unsure (1)..(178): unsure at all Xaa locations
  Clone ID: PAT_MRT4530_7063C.1.pep
GPRCLSLPGYGLAGLAIAASTDADEVVISDGNPQVVGYIQQNISINTETFGQTKVKSMVLHXGXGQASEIISSFDIIVASDCTFFKQFHQSLARVVKSLLKHSETSQAIFLSPKRGDSLSKFLEVIKKNGLSCELIEKYDPTVWDMHKKYVSDDNRSWPLHEEEHCYPLLVRINSHSK

SEQ ID NO: 172512 - protein, 546 aa, Oryza sativa
  Clone ID: PAT_MRT4530_70640C.1.pep
MWCLRGSIDSVFCPRGVDMAPPPPFSRRAHERVRAACVSPPRLASASPRRWQHPAAASPALATAAALKAGGAARAGEAPPPPMDAVGVLSQPTTTQPHASWEASALSILLLVAEAIGKGRQMRTGWTAASKHKRKKAFFHFSKILFFYFYLLKQGYENPREATGRIVCANCHLANKPVDIEVPQAVLPDTVFEAVLRIPYDMQLKQVLANGKKGGLNVGAVLILPEGFELAPPDRISPELKEKIGNLSFQSYRPNKKNILVIGPVPEGESIKLDQPLTSNPNVGGFGQGDAEIVLQDPLRVQGLLFFFASVILAQVFLVLKKKQFEKLKKGSGIVKFRYRTLEDEYRTREKDSENEYGSPENEYRTREEECKTLEDEYRTREEEYETLEDEYGIPENEYETLEDEYGILEDEYRTREEESEDEYGSPENKYRPREDKYGTLEEDSEDEHGTLEEDSEEDSEDEYGNPEEDSVLKKGVLIEHRGTKEFSLKYQKEVDRFFFILQELHILPRSSSLKLNWHFLPHDSWEETSAKNHLGQFICKKCMSI

SEQ ID NO: 172513 - protein, 73 aa, Oryza sativa
  unsure (1)..(73): unsure at all Xaa locations
  Clone ID: PAT_MRT4530_70641C.1.pep
XFILFIKVHYTVSFFFXFFXFXCNNCDITYAIRLKAKIIRERHMHHFSFSAFSKDHTHIPCLSFFLCLILVHG

SEQ ID NO: 172514 - protein, 172 aa, Oryza sativa
  Clone ID: PAT_MRT4530_70642C.1.pep
MVNEDAQYGDELRAVCPPDAEETAWVHLDHGTPGELDSQCYVQERARREAAVQPVLICRPLPIASATSRRMLDADASQLACGRVVVGRLSTPTASIGGGGASPARAAPPAFNAAAVAGAGEATAGCRHLRGDADASRGGETQAALTRSWARRENGGSGCVVAGKEGVEHSGG

SEQ ID NO: 172515 - protein, 73 aa, Oryza sativa
  unsure (1)..(73): unsure at all Xaa locations
  Clone ID: PAT_MRT4530_70643C.1.pep
AILFTYPTSGSFNRTGLVISSKSPSLSVVYTLTIASADTHFKSASDSVHFTESVTQXFRKHRVPVEGLFCIVC

SEQ ID NO: 172516 - protein, 210 aa, Oryza sativa
  Clone ID: PAT_MRT4530_70644C.1.pep
MIRGERRANKQRKPEWWCRGGGGGARGPARHRRDTTCTSRVHRAQQQLHICRRLAGATATAGTIHIAIDISRRSVTRVHGYASSSGRSLKKGRHIAFGPCHVPCLQKSWNILMTVHIAFFPSPRSSARISPPVPPLCATPPPASSRPGAPLCRCVLLPRRRRPPPLSFAASAAPLRHPSVVVFCYQGRPSAVVFSLLLPKPPLTAADRTC

SEQ ID NO: 172517 - protein, 50 aa, Oryza sativa
  Clone ID: PAT_MRT4530_70645C.1.pep
VHNVKSINKSPGLPCAFTSLVAYKITKLYTCRIVFLNIKHKLIPMMGTYS

SEQ ID NO: 172518 - protein, 445 aa, Oryza sativa
  Clone ID: PAT_MRT4530_70646C.1.pep
MEIPNQISGGGGGGSVVIEIPAATEIAGVDTAPAKVCDDDPRAQPLRDREWVSQLPPDHPLRYTCGLPNGVFLSMSFVTIIYAVIAPWMLWRVATDHVSLMWTSSILACSYGALWTIALSERLAGAFLAIIFRVSYVALVAFASTHLIGTANGISIVYLDTFYVAGMLGYAVAEYRLRRGTEQCPSAILAAKPPPLEDQERGDEEAGLYYMGFLFGSVSLCLVGRMAWLLLYPCGGKCLISYVIEELSFEASMLIYIWVIFVSLTQLEGALVCYNTLFCKMPICFGAWFVLGVLLGVPVSGAIEMLIFWIGTMALAGFFGYCLAVHAYCKSCNYGALTKNGNNSRQSSTDLGLALQAGRSRRINSIILSVLGYKMRVLSHEMLLANQSMQWITLVKAPNQIRPHEQKMTMYLASSICFFRKCTMPIPFSVTKCFFRPHKVWDCHD

SEQ ID NO: 172519 - protein, 75 aa, Oryza sativa
  Clone ID: PAT_MRT4530_70647C.1.pep
MEDEGNTVWTSEFSVSGVVQKKRLKRDLWSCAFAVNKDMKEGANRSLAKTANGGGGGLEAGWLLGDLFSTSLLIY

SEQ ID NO: 172520 - protein, 561 aa, Oryza sativa
  Clone ID: PAT_MRT4530_70648C.1.pep
MVAAMEKRREIRELRDRMDRTLALPDLADEELLRSLVKRQILASSLSAGNDEGNIDLIAEARSKEISNFLEMLNTSGNERSSKIHEASHKEWKVKQDTDQLRVMYREGPEGTPFHTLLAEGFADGPIDVCTCVSWESSLYKKWFPQYNLPTFKVAQSGCLKKVRVGEEISLVSWIFSLMDVVTNICIHYLEERVKVPWPVSEREALLHYFELEYLKEDLVIVIMKTISDTDNINIETHGFSRDGIPEAGDTVRIDVVGGFVLQRITKEKSFSVNFSLLSHVIPVLIVIKSRLNFKKDIIAVSTVANCDEDYKKALREPLYVRIREHRGSTDIANVTPVEERATEALPDNPTLQNVLAVTNITSNSEIVEEESEQKALFKLDHHAIGPSNPPAEQEQHVENKPYISPEVEQALNILDKAIAIIRGNNAGSASVVQKFIGYDVTLDGSTTDSRNSHNIPNEHPATLPPRDSRETQHTYSLSNENVNHREKDALDSDSQRYTTASTVTKTMSMTRRSTTRVHGEESLDTNGLHQNGFHKDKESKRTRKRKTNSWLCCLTPSTTG

SEQ ID NO: 172521 - protein, 117 aa, Oryza sativa
  Clone ID: PAT_MRT4530_70649C.1.pep
MYIYRCIYIYICIYIYVYIYMYVYIYVCMYIYMYVYIYVCIYMYIYIYVCMYIYIYVYIYIYVCVYICIYIYIYICMYVYIYMYIYIYVCVYIYIYVCVYIRILCSLLCTSRLQLCP

SEQ ID NO: 172522 - protein, 134 aa, Oryza sativa
  Clone ID: PAT_MRT4530_7064C.1.pep
GPSAHFPSPFCPASGPAAAPRPLLSPGHRQVGPTCRARPQPSAGAARARHPLPALALHSPATAAPLSRPRPRSRWLGFKNKSHHSPSLSTSPTSPATPCLSRPRPTSPDLYKAPPLPPPLFSLFRHPLPSSPSP

SEQ ID NO: 172523 - protein, 106 aa, Oryza sativa
  unsure (1)..(106): unsure at all Xaa locations
  Clone ID: PAT_MRT4530_70650C.1.pep
LKERERGRGYWQAGPTGRXAHGEEVALAGLSSAASRPTGXASGGGDRREDGGGRXRGRRRIVATRMRGAAARARGREGEGVLTGVRPAREETTTNGDGEQPDGDCE

SEQ ID NO: 172524 - protein, 109 aa, Oryza sativa
  Clone ID: PAT_MRT4530_70651C.1.pep
MELARRDPNSRRTSGGSRQGGQRRLGPEAVVLHALAVGGPRAIAVMSDYRKCRRAAASRLAGVVTKSAVKAVAEEDRREKKRSSPWTSAAAVSSYERAHRPLPLPWKRR

SEQ ID NO: 172525 - protein, 46 aa, Oryza sativa
  unsure (1)..(46): unsure at all Xaa locations
  Clone ID: PAT_MRT4530_70652C.1.pep
FFFFFFFFFFFXFFFFFFFFFFTRENYPLLFIFACIEESYTLVSEL

SEQ ID NO: 172526 - protein, 920 aa, Oryza sativa
  Clone ID: PAT_MRT4530_70653C.1.pep
MDERKTDRYRWRRADAMSMARQPAGCMDRINLVSIPYSVLNREIHREASTPATHPTRVAGHQIRRRRIAVHRIRAEMDPNGFDFFSQDPISSAAGNIWSSQPSASGPSHGSVPRAGVDTLDLNTQAASGQEFPHLHEYGAFLQGGGEEGAGRGRGSGLPPIRAPRSLGVRAGRGGAGPSRAAPRARQLNFGAVGGRAGHGGNGGSSSGIGGGGPGRGSSSSGATGRRRQRAMATNRGRDRGRGGRGWRVPRSVGTQEAPIGDYVDLDEEGAWDDEVEELGSFGGPPVSIADRANWTDRNNSILLALCIEQVRAGHYNGSQMNSDGYNAIAEGYHAKTGLMHSRLQLKNQIGILKSTYSFWRYLQTHTGLGRKPDGTVDADSDFWSSHIEGKPYLKKVLKGLPANLDQLEEMFSGSTVDGSTAFAAGDDFGEAQEGAEDEWAEETEEFLQTPQSTSSQKSKRSLDSTTSTCSTPVKKSKSPMVKYVKDISMSFKEAMQINSQELRKRTIEKQAASVRNCMKMAFECGIEQTTENIFAMSKMFENPYQREFFVGLPNHELRFNYFSKWSRDNNLMDVEQHGDGEMAEEEEVFDEGSTSSSDDEIISMCRKNMNMAQTMVAQLVPILGMYSEHYFVKLPKRVALESGIQWVQRTLTRENSCYNMFRVERQLFNRLHNILVESYGLQSTTKMSSVEALAIFLWIVGAPQSIRQADDRLVRSLETISRTFNKVLRCLLRLAPNIIRPRDPEFSELHPNLENPDFWPYFNDCIGAIDGTHVKLVVPKTKRIQYLNRYNETSQNVLAVCDFDMRFTFVLSGWPGSAHDMRVFKDATTTHAHKFPHPPQGKYYVVDAGYPNRPGYLSPYRCTRYHVEQWKNGPPPQVERAKLGIGNLLGVMRMQIIFQCLHHLTLTGQKMNLLLRIAT

SEQ ID NO: 172527 - protein, 164 aa, Oryza sativa
  Clone ID: PAT_MRT4530_70654C.1.pep
AGVERPHQLIIIIIIISFPAVRSSSRSRRRRRHLRLIDHFTSSRCRPWRLSLCCSRPRRGARCCRCSRRRASSSSPPTSPRRWPPTRPSPAAPTPPTGGTRTRNPPARRRRQAPAPGAPAAPPPASAKNPAAQRRRRQAAAGSPAEPTPASAGTRTRPRTRSSA

SEQ ID NO: 172528 - protein, 92 aa, Oryza sativa
  Clone ID: PAT_MRT4530_70655C.1.pep
MASMAKSLLCISLVAILLLVETTAPHGQAYAIDCGAKCGYRCSKSGRPKMCLRACGTCCQRCGCVPPGTSGNENVCPCYANMTTHNGRHKCP

SEQ ID NO: 172529 - protein, 128 aa, Oryza sativa
  Clone ID: PAT_MRT4530_70656C.1.pep
MLPVSAVSSGAGAGGGKAALGELDISALPVFVHVAGCEAAAAVECAVCLGEVRDGERGRLLPRCGHRFHVECIDRWFRANSTCPFCRAAVVAGEPGGAAAAAGDKGDAVAVAVVGVPDVVVHVQVEEG

SEQ ID NO: 172530 - protein, 846 aa, Oryza sativa
  Clone ID: PAT_MRT4530_70657C.1.pep
MASDGAQMEVERRLRDIGARFTSLPDADDELLRLIEEAETWLARVDQSPPESMHKALRPTMSALIKKELLDHSVPDIKLAVASCLTEVTRITAPEAPYDDDVMKDVFTRVVEAFEKLDDMESPSYARRVAMLETVAKVRSCVLMLDLDCDDLIRDMFHHFFRTISNTHQENVITSMETVMKFVIDESEDVQQDMPSCLLQDLASYLLKNLKKEEKETLPASFELAEKVINKCYEKLKPVFTPLLRGTPLDEYSEVVTSLFEDALDAGVADNSDAPGKDMVADGKLSHKIVSDESAQESSKLEQDANCPGKDGTPPNNTSTSAVSNGCALIDRVKSPSGPSSSDKKAELPSDDNQAKDTDDLISGAKEIPEPITTEPEKPSDHNLKKSHKLDTSTDSEVVDHSKAVNNNEDILVSRELSPETDDGDNKLPPETGNRAADDKSKHVDNTPAGKGKRGRPPASKSHEKKNVGKGKVSGLESKKADAVSDSGGRATRRLAKDDDIKSSFKKTGEGESSKKKQKENLKQQEDTPPDEDTDEDLSLKDIVSPKSSAKTGKNKGQAGDSGGSKRKRAQEAEETPQPKKNKILKGNLVGSRIKVWWPDDRKFYKGVVESFDVASKKHKVVYDDGDVERLHLKNEKWEFIDEGRDNNPDASSDMPHGRRGRVSLGEQTKEGKIETPSSGKHRGTDVADPPKKRGRPKGVRSSNSSQNDDSPLKGKSAENDDEDISKTPKSGSALKNEGGRSSRSTGKTKDGLLKGSNKDETGNTKSASKSKNDGGSKHKDSKDEAKSSGSNPKGASTPKAADGSKTNGLSTKRKQKEKEGESSEEEEHVSAKISTGKKRRRKAHN

SEQ ID NO: 172531 - protein, 52 aa, Oryza sativa
  Clone ID: PAT_MRT4530_70659C.1.pep
MALSGPSGGDGIKWASHVEDLTLNMQFLTLRLNAMEAHCEHPKSKDERGFEK

SEQ ID NO: 172532 - protein, 55 aa, Oryza sativa
  unsure (1)..(55): unsure at all Xaa locations
  Clone ID: PAT_MRT4530_7065C.1.pep
LLARGLPISMGGISLLWTLYFNKVKAFSRIPSPPLFGSRDGWRSPPLPLLSPXAW

SEQ ID NO: 172533 - protein, 42 aa, Oryza sativa
  Clone ID: PAT_MRT4530_70660C.1.pep
TNQPPTYYHKAKSQERPAILLGVQRFTSRRASRRRQHLHIVS

SEQ ID NO: 172534 - protein, 81 aa, Oryza sativa
  Clone ID: PAT_MRT4530_70661C.1.pep
KGRLLVPLERATQTSPGRWLSPSSGKSLLPKNSLSEAFALSQYGVLFPPCPAFLFLTCPPLPFMPMHATFLKIRTYKGIVF

SEQ ID NO: 172535 - protein, 72 aa, Oryza sativa
  unsure (1)..(72): unsure at all Xaa locations
  Clone ID: PAT_MRT4530_70662C.1.pep
NCADMSLFVKKGTSCGVRVVEAXKSHLEEVVVCXVNSKCNCGACCSCTHCGKGRGSPEVTEHSPPASYLLWL

SEQ ID NO: 172536 - protein, 67 aa, Oryza sativa
  unsure (1)..(67): unsure at all Xaa locations
  Clone ID: PAT_MRT4530_70663C.1.pep
YSIKKLILQLAVLGKIHHPNLPMLLGACVERGCLVFXYMENGSLXDRLWCESRPVVLPWRDRLQIVW

SEQ ID NO: 172537 - protein, 62 aa, Oryza sativa
  Clone ID: PAT_MRT4530_70664C.1.pep
NDQIQYIKDMYQTSVNFCHIICIQTVLINVKFPSRNFCHEFICNECTYLHPHLQHYAICYLS

SEQ ID NO: 172538 - protein, 169 aa, Oryza sativa
  Clone ID: PAT_MRT4530_70665C.1.pep
MAVAVGKADTGEVVVAGSLDGDSLSRGPLPCSLWARWWPAQRPGEVVVATWRTGDVVVVVEKADMGKVVAGDPKSARGVRQSADGRNNTAAVVPLGSAWRREELGGGGWAAGIHRGAVGVEAGEGHVAGGGTRRQQRLSPPTSMRIRRWREELNGGGRSTAGAAGGQRV

SEQ ID NO: 172539 - protein, 255 aa, Oryza sativa
  Clone ID: PAT_MRT4530_70666C.1.pep
MIFSNKKEKCLSRKKKKNVARLLLLVVQLTVGWPMYLVFNTWGRQYPRFASHFDPSGPIYKGRERVFIAISDIGMLAVSLALYRLAEGYGFWWVVRVYGVPLLVVNAWLVVVTYLHHTHRAIPHYDSSEWDWLRGALATVDRDYSFLNRVFHNITDTHVVHHLFPTIPHYHAVEATKAIRPILGEYYQFDPTPIVKAIWREAKECIYIQSEDHKGVFWSSIPPALISYALATPLQDPTDPSPPRPTPARRSATYG

SEQ ID NO: 172540 - protein, 126 aa, Oryza sativa
  Clone ID: PAT_MRT4530_70667C.1.pep
AYSMFDSCSEDEDNMSVPVSLAKKENTKDVDETKYPNSELNDDTTKKSNGAKKRKGDAISQDHAPLMDLTNADEPLVSKEGRTKKKSKKKGGKQLEVGDGKHSNKIRTLEDGLIVKDLSTGNLDAE

SEQ ID NO: 172541 - protein, 51 aa, Oryza sativa
  Clone ID: PAT_MRT4530_70668C.1.pep
FFFFLIEDDTNCKYVIHSPFSPYILLLQLCYRYTRTLDTSNKRNHFNGKHY

SEQ ID NO: 172542 - protein, 75 aa, Oryza sativa
  Clone ID: PAT_MRT4530_70669C.1.pep
MTYSLFTGEDEFPAVSRRNEDEAGDEEVSSMPRKVVACGSVLLPSTGRIGEWNGAGIGERRRWGVGHQWRWFTGD

SEQ ID NO: 172543 - protein, 1874 aa, Oryza sativa
  Clone ID: PAT_MRT4530_7066C.1.pep
MPIDPEKFTPEQKQEFEATLQQARDQFLNSFMQTRKGTLVQKYKIKLVADNLGTGSSKYGEVKKAPEGSAQPSNKGATDGSLGNQGDNPQGVHGVQGDRVHGAQGGGAQGPQGGNLNQSNELAQDFFNNFQDRVDYAVHHALINQSGVLVNTLSNMMKTIADGSIVEHQATGPVYLQGGVFPNYRSLITDVQPSVQAVRSVAPTIQPTAPASTPLPVQQQPIQQTPPIQPVVQPIQQQVVQPAQQTPPRQQPLQPIQQTPPRQQLQPIQQTLVRQQIIQPIQHPGSANASAGFAPPGGQLAQQFVNQVVLEHLVHHAQPDGIVMPQMVPEHLFKVPNFSKFLGQEGVSTYEHISRFLAQCGEASAIDTLKVRLFRLSLSGSAFTWFSSFPYGSINSWADLEKQFHSYFYSGVHEMKLSDLTAIKQWHDEPVHKYIQRFREMRNKCFSLSLTDAQLADLAFQADKIFDLLLREKQIQFPAGHMILSAEELGKKRYCKWHNSGSHSTNDCKVFRQQIQVAIEGGKIRFDDSKKPMKVDGNPFPVNMVHTVGQAADRARAKGFQVNSAKIINKYQRKYDKQEERHYEEYDDGFDPHWDCEFFRFCWNEGMRLPSIENCLGCSDIIESSNRSRNRDNRLRQARLPVRQRLGPMNQDRGQEDEVIRKNQWCPSGIFTENQKRRVQRLRSRERFQEVEEEINHRLRKPKPRQEWHVKNQVPVADDAAADEVKRLAKGKSVIAAPINMVFTLPAEFGIDQADVDELEEESAKLVLSPEHAVFEKPEGTENRHLKPLYINGYVNGKPMSKMMVDGGAAVNLMPYATFRKLGRNAEDLIKTNMVLKDFGGNPSETKSVLNVELTVSSKTIPTTFFVIDGKGSYSLLLGRDWIHANCCIPSTMHQCLIQWQGDKIEIVPADSQSKMENPSYYFESVVEGSNVYAKDTVDDLDDKQGQGFMSADDLEEIDIGPGDRPRPTFISKNLSPEFRTKLIELLKEFRDCFAWEYYEMPELSRSIVEHRLPIKPGVRPRQQPPRRCKADMLEPVKAEIKRLYDAGFIRPCRYAEWVSSIVPVIKKNGKVRVCIDFRDLNKATPKDEYPMPVADQLVDVASGNKILSFMDGNAGYNQIFMAEEDIHKTAFRCPGAIGLFEWVVMTFGLKSAGATYQRAMNYIYHDLISWLVEVYIDDVVVKSKEVEDHIADLRKVFERTRKYGLKMNPTKCAFGVSAGQFLGFIVHESGIEKGIPFRLYLSAGEKSIGSVLIQELEGKVRVVFYLTRRLLDAETPYSPVEKLCLCLYFSCTRLRHYLLSNECTVICKADVVRYMLSAPILKGRVGKWIFSLTEFDLRYESPKAIKGQAIADFIVEHRDDSIGSVEIVPWTLFFDGSVCTHGCGIGLVIISPRGACFEFAYTIKPYATNNQAEYEAVLKGLQLLKEVVADTIEIMGDSLLVISQLAGEYECKNDTLMVYNEKCLELMKGFRLVTLKHVSREQYLEANDLAQGASGYKPMIKDVKVEIAAVSADDWRYDVHQYLSNPSQSASRKLRYKALKYTLLNDELYYRTIDGVLLKCLSADQAKVAIGEVHEGIYGTHQSAHKMKWLLRRAGYFWPTMLEDCFRYCKGCQDCQKFGAIQRAPASAMNHIIKPWPFRGWGIDMIGMINPTSSKGHKFILVATDYFTKWVEAIPLKKVDSGDAIQFVQKHIIYRFGLPQTITTDQGSIFVSDEFVQFADRIQVPPYKLVYGHEAVLPWEVRIGSRQTELQNDLTANEYYNLMADEREDLVQSRLRALAKVTRDKERVARHYNKKVVPKDFSEGELVWKLILPIGTRDSKFGKWSPNWEGPFQIHKVVSKGAYMLQGHDGEVYERALNGKYLKKYYPSVWVNA

SEQ ID NO: 172544 - protein, 174 aa, Oryza sativa
  Clone ID: PAT_MRT4530_70670C.1.pep
LLFILFLPLAVVVKEEHKNVSHLERALQQPPSIAVEHPTKEADGGDATAAAACGGCGIGRMFRLPELGEDYSIMQALVSVEMVVLFVVSVFVIGGTLRAIDNMAQIGQLLGYPARSVNTFVSLISIWNYAGRVGAGYLSEMLLARYRFPRPLVLTAVLHASCVGHHCLPAEPRA

SEQ ID NO: 172545 - protein, 573 aa, Oryza sativa
  Clone ID: PAT_MRT4530_70671C.1.pep
MAGGEPTLMPVSAMCTPAFVARVVRSRWFVVFASMVVMAASGSTYIFALYSKELRSTLGYNQQTLNTLSFFKDLGTNVGVVSGLVQQVAPTWAVLLIGAAMNLAGYLMVYLALDRRHGGAAGVAHNFPESRGIVIGLLKGFVGLSGAIYTQLYLAIYGDDAKSLVLLIAWLPAAVYIFFVHTIRVLPYRRRGDGEELDSKPFFCFLYISIALAAYLLVMIVVQKQVRGFSHAAYVVGAAALLLILFLPLAVVVKEERKNASHLERALQQPPSIAVEHPTPTKEADGEPATSCVGRMFRPPELGEDYSIMQALVSVEMAVLFVVSVFGIGGTLTAIDNMAQIGQSLGYPAKSINTFVSLISIWNYAGRVGAGYLSEMLLARYRFPRPLALTAVLLASCVGHLLIAFGVPGSLYAASVIIGFCFGAQWPLLFAIISEVFGLKYYSTLFNFGSAASPIGAYVLNVRVAGRMYDAEAARQHGGVAVAGDKICKGVMCFKRSFLIITGVTFAGALVSLLLVWRTRSFYKGDIYARFKVAPATAATSAAAAAEASSPEVEEKKGTEKNKKDGVHEHVSN

SEQ ID NO: 172546 - protein, 54 aa, Oryza sativa
  Clone ID: PAT_MRT4530_70672C.1.pep
IWPRTQAVPVKPGREMSLGSKTWALLDQKVWSPRPQLNLKMGQGRFQLCFKKGG

SEQ ID NO: 172547 - protein, 65 aa, Oryza sativa
  Clone ID: PAT_MRT4530_70673C.1.pep
ALYKGDSIDLLGFGSFKRLNGAPRHWFPLSQLVGPVFFFHLVGGNTTWVCMDKCMDQHRFKSMHM

SEQ ID NO: 172548 - protein, 73 aa, Oryza sativa
  Clone ID: PAT_MRT4530_70674C.1.pep
DYHPYPSHHLLSVNQLPFILDHDIAPYLSLINHYNTYHIPLHCLHIPAATPSSMTLPRWPVSIQSTSPPTLTF

SEQ ID NO: 172549 - protein, 119 aa, Oryza sativa
  Clone ID: PAT_MRT4530_70675C.1.pep
MHDRSLRPSFVVPSYLSSRRSVRRKLAPAAVEQESVPGRSVNLGIKTEVVVDSRFPESRCWVSCSPTICTVRCPQPFTGNWRALVMLSSLPRMALVIAENFSYSVLVLSQDQRDTTVEY

SEQ ID NO: 172550 - protein, 122 aa, Oryza sativa
  Clone ID: PAT_MRT4530_70676C.1.pep
MWGGEEEEAIRSWPLRPLPPPHIHCPWPGPSSWSPSSSSPVAVVVVVVVIVVVVVAQCAVTVARKDGREVGEEEEKEIGIEVGGWSDSGKVGIIWDGNPDIPVGSTLPYPHPRSKIPLALVP

SEQ ID NO: 172551 - protein, 68 aa, Oryza sativa
  Clone ID: PAT_MRT4530_70677C.1.pep
MARDTEAATARDAEAATLNSSGREQWRRGTQRGWSGLLLHRQDGGGGGRRQARQHARRSGADGGRLDK

SEQ ID NO: 172552 - protein, 85 aa, Oryza sativa
  unsure (1)..(85): unsure at all Xaa locations
  Clone ID: PAT_MRT4530_70678C.1.pep
HAGHACAHAFDDAWRALDHMLSGIYRELVATEAVHPIAEAFPSXRTGDLERAAASLTAHCNVDILNGPCGVCYXXGYPTTPRTVH

SEQ ID NO: 172553 - protein, 112 aa, Oryza sativa
  Clone ID: PAT_MRT4530_70679C.1.pep
LPTRSCFCFHLLLSPLVAVSGHLKLHHHFHCVNRIEQYPGHRFLKAVHHQNPFGTIKAAGPSGRYPLLRAHITPSDCRRHRRPEALPPTPQATHPLTTSSSLRASLSLRGHG

SEQ ID NO: 172554 - protein, 83 aa, Oryza sativa
  Clone ID: PAT_MRT4530_7067C.1.pep
MRFLGLLSLVALIFLLSFRSLIHQQVLVGEGAAASGFLHGSGDDGRRQHAREWEEERKKMRWFMVRDYAHARRHEPRNNRLDP

SEQ ID NO: 172555 - protein, 61 aa, Oryza sativa
  Clone ID: PAT_MRT4530_70680C.1.pep
FSLLSQKNPVKKFTRGDVDILRRSFVYPMIIFRFTLHIEFALHIFPVIGFDQPLKVKKKKK

SEQ ID NO: 172556 - protein, 96 aa, Oryza sativa
  Clone ID: PAT_MRT4530_70681C.1.pep
QLKSRHTGDHYRLLLSLLYSCMHAASAPHDAATRLHRQILDDSASRAVAADAHAMRCLHEAAIQIIVILLLPCTHASTDKLTACAGATMPYTLNER

SEQ ID NO: 172557 - protein, 70 aa, Oryza sativa
  unsure (1)..(70): unsure at all Xaa locations
  Clone ID: PAT_MRT4530_70682C.1.pep
SKHGNSQWCGVACRRRIWKLVIVQGIFMCMETTIHCTSLIYHRFICLHWFSSSWHPLCFXGLVSHTTYCK

SEQ ID NO: 172558 - protein, 255 aa, Oryza sativa
  Clone ID: PAT_MRT4530_70683C.1.pep
NCPWYKGWEREIKSGKLSGKTLLEAIDSIEPPKRPNDKPLRLPLQDVYKIGGIGTVPVGRIETGIIKPGMVVTFAPSNVTTEVKSVEMHHEQLTEGQPGDNVGFNVKNVSVKDIRRGNVAGDSKNDPPMGAASFAAQVTVLNHPGQVGAGYAPVLDCHTAHIACKFAEIQEKIDRRTGKATEAAPKFIKSGDSAIVKMVPSKPMCVEAFTDYPPLGRFAVRDMRQTVAVGVIKAVEKSTGAAGKVTKSAAKAGKK

SEQ ID NO: 172559 - protein, 48 aa, Oryza sativa
  Clone ID: PAT_MRT4530_70684C.1.pep
HIYSELAQVAQSQLMQPSHTQFLPGIQHHLLIRSLFQLYQNINIETRV

SEQ ID NO: 172560 - protein, 201 aa, Oryza sativa
  Clone ID: PAT_MRT4530_70685C.1.pep
SFHPLEVPTTHISPQINTEAGPRNREPTSPKARQSDFCVLNDDGVRSPAKHTSLSNVELYEKSVSRSTGKGCTSLDRIADLYGSIANCDDDNMLLNNLSAHPKAVVTPCGNANASSSHEDEPLLTPDVAYLRTRNNILNETNEGPSFAALSLVKNVANKFRSRITHFNSRTPFLGEEMPSFKLLDSDDDISDCDKENEVAE

SEQ ID NO: 172561 - protein, 47 aa, Oryza sativa
  unsure (1)..(47): unsure at all Xaa locations
  Clone ID: PAT_MRT4530_70686C.1.pep
QPRGNSYLITMSVXDFTHWVNLGASXFFQHPAACXIPLTGFGARWSE

SEQ ID NO: 172562 - protein, 138 aa, Oryza sativa
  Clone ID: PAT_MRT4530_70687C.1.pep
MAGTAGAAAASYAQHRRRFCAIVATAAASPVPAAVEMVHTMSLVHDDLPCMDDDDLRRGKPTCHVVYGEPIAVLTGDALLSLSFHHMARFDSYPPDIDADKHPARVVRAIGELARCIGSEGLFAGQVINSSFSIRFLI

SEQ ID NO: 172563 - protein, 366 aa, Oryza sativa
  Clone ID: PAT_MRT4530_70688C.1.pep
MAAFPPLAASRVRISPLIPAAAMAGTAGAAAASYAQHRRRFCAIVATAAASPVPAAAAAAATGFDFNAYMGEKAAAVNRALDASIPADEPPAALHEAMRYALLAGGKRVRPALCLAACAVVGGREAWAMPAAAAVEMVHTMSLVHDDLPCMDDDDLRRGKPTCHVVYGEPIAVLTGDALLSLSFHHMARFDSYPPDIDADKHPARVVRAIGELARCIGSEGLVAGQVVDLEMTGSTETVPLERLEYIHLHKTAALLEASVVIGAILGGGSDEQIESLRMYARSIGLLFQVVDDILDVTKSSEELGKTAGKDLASDKTTYPKLLGLEKSREFAEKLLSDAREQLSGFDQETAAPLLHLANYIAYRQN

SEQ ID NO: 172564 - protein, 128 aa, Oryza sativa
  unsure (1)..(128): unsure at all Xaa locations
  Clone ID: PAT_MRT4530_70689C.1.pep
PGPKPELTLGVAPPPEHSPFPVLVPKDVQGLQVFKDGPWFAVKXVPDALFIPIGDQIEIFTPGRFKAVFPRTPVAKDRTRIFWPVFFKPPPEPFVGPPPQLFPHGSPAKFKAQKFKNFRPSKIHKPPL

SEQ ID NO: 172565 - protein, 108 aa, Oryza sativa
  Clone ID: PAT_MRT4530_7068C.1.pep
MEARSAAAGCHGLLAACLKMKGRMSLLGLVCCLETTTKKKTQIPSLVMPPYCSPTGSSRAHLPWEFGAPDSTAQAVVPNDLVRCSDGEDEQWREERKKEDGGNSAQKV

SEQ ID NO: 172566 - protein, 64 aa, Oryza sativa
  Clone ID: PAT_MRT4530_70690C.1.pep
LPEQLRKLRLLHELDVSNSRLSGGCPHHILWLPNIKYVDLRFNSLCGAAPAALFDKPLDAILLS

SEQ ID NO: 172567 - protein, 58 aa, Oryza sativa
  Clone ID: PAT_MRT4530_70691C.1.pep
LHTVSAVSIAETTVSSNARSFPFVLVEPFLNLEIIVLLIAFVPVHQFCRLHKIAHLVI

SEQ ID NO: 172568 - protein, 354 aa, Oryza sativa
  unsure (1)..(354): unsure at all Xaa locations
  Clone ID: PAT_MRT4530_70692C.1.pep
EVHNHKKERDMNEPPFPLFTVKFDAPPSFEXSIKGKLNGAEINQDEXPLVEPIVEIPSSQVNLFAILCDKXEMCDNTSLISLPQLVNEQVTFSASSLCADFKHIVHITNEVEEHELLSSLNTLGFVFINDFCKLDNLIEKLFDKSDLPCPINTIFHIFGTYNDRGIYLVHKVYICXSLEPPVYVDKISDSHIIVNYILSSLSCHDLKKHVGCHAIRKDCYMEKPMTVFHEEGENDVTIISMDTTIAHITCQLEDIEIKPYKFXNPIRPPTTTLTSNGHQICIRALFWAHEKKQDVAPHVMSVRACNFVXDSGPRMRLIRTTNINNPXKGVSIAKIQHNNVLYGYSQIVNVSPKS

SEQ ID NO: 172569 - protein, 79 aa, Oryza sativa
  unsure (1)..(79): unsure at all Xaa locations
  Clone ID: PAT_MRT4530_70693C.1.pep
RVKTKSQVLETAGPNKSIQXSIQHQDKNWRALSSRKTKKGPTHVGPIGGKNYFFFPKQHFPKTQGEIGPLLGGGPKGWG

SEQ ID NO: 172570 - protein, 60 aa, Oryza sativa
  Clone ID: PAT_MRT4530_70694C.1.pep
MKPYALLREFCVILVEITCNIATFCIIFIFDRLIKKLQTIEMIWFIKILIIYGLIIQKQN

SEQ ID NO: 172571 - protein, 71 aa, Oryza sativa
  Clone ID: PAT_MRT4530_70695C.1.pep
TTPKNLAFLIPRTKAHHCRGEARRPILLSQSLRACWAKIIPLGSSLRPRLPASRSVPPALSSLQLLGKQPS

SEQ ID NO: 172572 - protein, 174 aa, Oryza sativa
  Clone ID: PAT_MRT4530_70696C.1.pep
PPHHRRARSEVAFRFPDDLGLGGGADGGGFDEIGSEDDLFSTFMDMEKIAGADRDRAAETSSPPRPTKHRHSASFDGFAFGAGAGGPGPGLGKQQDGAGGVFSEVMEAKKAMSSEQLAELAAIDPKRAKRILANRQSAARSKERKARYITELERKVQTLQTEATTLSAQLTLFQ

SEQ ID NO: 172573 - protein, 106 aa, Oryza sativa
  Clone ID: PAT_MRT4530_70697C.1.pep
MDRAVSVKCMVIACNCPRLRLLLNRAPVVGTAARHPPCCRHMGGLAPSGARRRFCQGRRRWGDGSRAAVIVLLVSPVLAPPSSPSLAVAVDSHGRKRKKGERRKKQ

SEQ ID NO: 172574 - protein, 229 aa, Oryza sativa
  unsure (1)..(229): unsure at all Xaa locations
  Clone ID: PAT_MRT4530_70698C.1.pep
MARGAGSGGADSFGAALVEPWLAAHADPSRSILDRSLYFAVDRNHLIDAFSVDGGSMSCTVVILIIGEKKQHTIFKMEIRCVLLGVSCGANIADYVARKAVEAGKLLDPIKVVAQVLMYPFFMGTSPTQSELKLANSYFYDKSXPPLKLIPPTLTVXAELDWMKDRAIAYSEELRKVNVDAPVLEYKDAVHEFATLDVLLKTPLAQACAEDIAIWVKKYISLRGHELSY

SEQ ID NO: 172575 - protein, 71 aa, Oryza sativa
  unsure (1)..(71): unsure at all Xaa locations
  Clone ID: PAT_MRT4530_70699C.1.pep
CFLKMGCVNDNLDYHQVKIVLPKTYDFITKHSYSGKRVXHCTSNNNSIQSTRRLKQTPILWSEAGREYNRT

SEQ ID NO: 172576 - protein, 381 aa, Oryza sativa
  Clone ID: PAT_MRT4530_7069C.1.pep
MSSSSEEEQGASGVGLGNFLEVGPLDGDLKPRGSTWLQKADLIFVVRNTNSSSSPCFLSISNLSAKLSWLKLKLYALQDNPVGTGYSYVEDDALLVTTDGEAAADLAALLRALAAKEIPTLQSSPLFLVAESYGGKYAATLGVSLARAIRAGGLKLTLAGVALGDSWISPEDFAESTGGEAAHRIGAVEAGADVYNFLLDTGMDPVAAGAAPARSFPPAYSAYLDSKLSVGDSIRSVMNGAIKEKLKIIPKDVVWEEQSYTVYNALINDFMKPRIQEVDELLSYGVNVTVYNGQLDVICSTVGAEAWVQKLKWDGLKNFLRLPRQPLHCGSSEVTKGFVRSYKNLHFYWILGAGHFVPVDQPCIALDMIGSITQSSVQSHP

SEQ ID NO: 172577 - protein, 141 aa, Oryza sativa
  Clone ID: PAT_MRT4530_706C.1.pep
CKKPRTFGNSAARRPPNPVGSAGRRPSGPAGTWQRPPPPMPSYPDRYGHADRYHYTAPSATYDPPAYASYSEPYSASKPYQYTPGSVAPASYNSNQFKVAYGGPGAPPTAGGYGSYNDAAGQSTSSSYSGYSGYHPSLPRL

SEQ ID NO: 172578 - protein, 81 aa, Oryza sativa
  Clone ID: PAT_MRT4530_70700C.1.pep
RFCQLGREHHLVCGMRWLAPPALPSFSLIQYWGDSKGWGAPPPRRCPPLIQSDLGGREWMARCRRWEREKARRRWGVAKER

SEQ ID NO: 172579 - protein, 65 aa, Oryza sativa
  Clone ID: PAT_MRT4530_70701C.1.pep
IGYSTSFGLMAVFHAPSIHDGFSLPLLPIRVNICNPNSHCFLVLSCCTWIIYRILHTESLLLEAF

SEQ ID NO: 172580 - protein, 420 aa, Oryza sativa
  Clone ID: PAT_MRT4530_70702C.1.pep
MYHVILARYRMILTRVGAPRHAQSPPAAVPCRRGWRRQGQRTGAATAAVAGDRRGGGGDGGGDGGRTPPRRPPRTNHQFTVVVNRVITKSTCDLILVMAGDDLSLAETKKKKRRNLVCPHEEARGQQTDGPDVDTSEGASSLDRMIAGGVRVSWYSLRFTILNYIPKPQSRKSSHLTCKNRVKLYPMTVWVAVFADVASMSVPARGVGGVRWIRLGEAADDVVEERLGDRGRRASVRVDELLPPFTTTCKYQLPSFTAVESNANNQARCNTTPLASNGDTVKWPEQGADNRELLPVCNKISEFRDLSDRATPNNDTSGYQDSHSGHPWTTFPACSSVSVAIVRAAMAPREKLKVKKKSKKLNTVSVTPVQVCVCGSRCKLPVRCTSTKPHDDHGDFAVSAEDIEEILLSPSIDDWQMHFS

SEQ ID NO: 172581 - protein, 512 aa, Oryza sativa
  Clone ID: PAT_MRT4530_70703C.1.pep
MNIADVARPLVALPSRRRLISHPAASLLAGSSRGEGEATVPRLSAASLPSRRVPSGAFPYRNPIMLRSTFPLVSHLPSRKPPPIRPRPPPVRPYASSAASPPPPPPPPASAYVHLPFCRKRCHYCDFPIVALGTSSPPTSPHGGDGDDPRIADYVRLLLREVAATRPVSDDGVPLETVFFGGGTPSLVPPRLVAAVLDALRTRFGLSASPEVSIEMDPGTFDAAKLRELVGLGVNRVSLGVQAFQEDLLRACGRAHGLREVHDAVGIVTACEGLQNWSMDLISSLPNQTEEMWEESLRCTVDARPTHVSVYDLQIEQGTKFGQLPRRMKEYAEWVQKLENGVWSHESGNSGIKDMAMDVDNFLYVSNLAKKMHRSKKPTLFFKLDIAKAFNLVSWEYLLTLLDKMRFSAKWHDWVALILSTSSSSVSLNGIEGERIDHPRGLRFLKIITVEGHLSEFADRSVRFRCSLYADDAAIFIKPSCQDVDSLISILNSFGGATGLQEIFASFVTLGG

SEQ ID NO: 172582 - protein, 63 aa, Oryza sativa
  Clone ID: PAT_MRT4530_70704C.1.pep
PTLHRRNKKTLTLEEQRDLYDQEITDYALVIDDPRNATKNFKWQGKPCKTGHARMIWPILADL

SEQ ID NO: 172583 - protein, 665 aa, Oryza sativa
  Clone ID: PAT_MRT4530_70705C.1.pep
MLRSTFPLVSHLPSRKPPPIRPRPPPVRPYASSAASPPPPPPPPASAYVHLPFCRKRCHYCDFPIVALGTSSPPTSPHGGDGDDPRIADYVRLLLREVAATRPVSDDGVPLETVFFGGGTPSLVPPRLVAAVLDALRTRFGLSASPEVSIEMDPGTFDAAKLRELVGLGVNRVSLGVQAFQEDLLRACGRAHGLREVHDAVGIVTACEGLQNWSMDLISSLPNQTEEMWEESLRCTVDARPTHVSVYDLQIEQGTKFGQLSVLCSELTSMINNYCSQYTKRWVEPIRLTLNPVLDKVATQSFFIINACRYTPGVYPLPNEKDSANFYKIASKRLSEAGYNHYEISSYCKTGYECKHNVTYWQNRSFYAFGLGSASYINGIRFSRPRRMKEYAEWVQKLENGVWSHESGNSGIKDMAMDVVMLSLRTAWGLDVQSFSKTFGRSLTESLCNTFRPFVESGLVIAMDMERRALQPSEFELDLQHDAQLLVDNLVRVSADGSRGGIATFWDDEALQQSDLDIRTFSLSICLTQKSSNTTFLLTNVYGPMEDATLMQTCSSQTTTSKHSLHHAPDMLFSNHCPLLLSPTKQLLRKPTFRFENFWPRLLGFLEVVQTAWSQPVSASHPVKRLSTKLKMMAKALRSWSNRILSDSRVQFHLVIELILKLDIA

SEQ ID NO: 172584 - protein, 92 aa, Oryza sativa
  Clone ID: PAT_MRT4530_70706C.1.pep
MRRWGCGGHGGGCGSQRQISSLRRCRREEEVVFVEEDEQKQEEQKQKHRMHSTHASTKRAQTATPEIVFFWDKDFPPEIDSLCGTEGVKVSG

SEQ ID NO: 172585 - protein, 148 aa, Oryza sativa
  Clone ID: PAT_MRT4530_70707C.1.pep
MARRSNPALISTLCCFTALLSLAFVCFLLPYVCPLDGDDDDAGLTSVWPVLVRTDAATLMHNDCRRVHPSTAGVVPTFVSAGSESQHHQRKKKKSGSMAPLLIVLLLIAVAAATGCAAADARGSRCSNDPNLPRRIRACGPPSIKPHN

SEQ ID NO: 172586 - protein, 517 aa, Oryza sativa
  Clone ID: PAT_MRT4530_70708C.1.pep
MADFYSPSHASRRLSTSITFAGGLDVTSELVIAAVAAALLLVLLFAACACCSWCCRRRSATQRWQNHHAAAFGYQGNTTAYYYHHTGGARPQWAATKTGAPSTPPNMMMHPTNMTGPHVVVRPPLVPPPPPPVPAGLDENAFGYDELAAATGGFSEGNMLGQGGFGYVYRGVLGDGKEVAVKQLSAGGGQGEREFQAEVDMISRVHHRHLVPLVGYCIAGAQRLLVYDFVPNRTLEHHLHEKGLPVMKWTTRLRIAVGSAKGLAYLHEECNPRIIHRDIKSANILLDNNFEPLVADFGMAKLTSENVTHVSTRVMGTFGYLAPEYASSGKLTDKSDVFSYGVMLLELLTGRRPADRSSYGADCLVDWARQALPRAMAAGGGGGYDDIVDPRLRGEYDRAEAARVAACAVACVRHAGRRRPKMSQVVKVLEGDVSPEELGDGARPGQSAMSSSSGDSSSGSGSYTAQMERVRRTAASPASPEYYSSEYQGYGCPSPASSAGDNASSGEHDNQWRKAHR

SEQ ID NO: 172587 - protein, 209 aa, Oryza sativa
  unsure (1)..(209): unsure at all Xaa locations
  Clone ID: PAT_MRT4530_70709C.1.pep
HIRPKKTKKKKGPDKRKSKPREXKKRNKIEKKKTKKXKKKNKSKKQQTEKLAYKXKYKMRRKEGKKTQKKSXKNRKHKRKNKKSKEPRQQDHNKXKKNEKKNKYSSIGKKQEMKNKXNRHRKNKHGEKSKRIRKSGKIKTKQHKXRKNNKKKKVKKKKKKKKXRKENRKKQLNMQKKETKYNKKKXKKRYQKQRKKRKAYAMNKKSRPP

SEQ ID NO: 172588 - protein, 47 aa, Oryza sativa
  Clone ID: PAT_MRT4530_7070C.1.pep
MVTRAASARFTRRTCRPVSTNRATRPPCRGSCAPHARRRPRPGMRIA

SEQ ID NO: 172589 - protein, 66 aa, Oryza sativa
  Clone ID: PAT_MRT4530_70710C.1.pep
GRVGGRVGGRVGGRVGGRWVRHGLAVTVAAVKPPLDSPDFSAAVARFAECNPASTSGCARARRPGS

SEQ ID NO: 172590 - protein, 447 aa, Oryza sativa
  Clone ID: PAT_MRT4530_70711C.1.pep
MGKEKTHINIVVIGHVDSGKSTTTGHLIYKLGGIDKRVIERFEKEAAEMNKRSFKYAWVLDKLKAERERGITIDIALWKFETTKYYCTVIDAPGHRDFIKNMITGTSQADCAVLIIDSTTGGFEAGISKDGQTREHALLAFTLGVKQMICCCNKMDATTPKYSKARYDEIVKEVSSYLKKVGYNPDKIPFVPISGFEGDNMIERSTNLDWYKGPTLLEALDQINEPKRPSDKPLRLPLQDVYKIGGIGTVPVGRVETGVLKPGMVVTFGPSGLTTEVKSVEMHHEALQEALPGDNVGFNVKNVAVKDLKRGYVASNSKDDPAKEAASFTSQVIIMNHPGQIGNGYAPVLDCHTSHIAVKFAELVTKIDRRSGKELEKEPKFLKNGDAGMVKMIPTKPMVVETFSEYPPLGRFAVRDMRQTVAVGVIKNVEKKDPTGAKVTKAAAKKK

SEQ ID NO: 172591 - protein, 112 aa, Oryza sativa
  Clone ID: PAT_MRT4530_70712C.1.pep
TSAEIHHGRTNVTGVYCSGSPRATTVTGFDPKRRGRRGHGSAKFGIWWDHREEDAGMRLFGMKVRATDPCGSRHDYQTQPYPLCTMMPPHFGKPLRGLDGNMLVGGSILTPY

SEQ ID NO: 172592 - protein, 965 aa, Oryza sativa
  unsure (1)..(965): unsure at all Xaa locations
  Clone ID: PAT_MRT4530_70713C.1.pep
MGKEKTHINIVVIGHVDSGKSTTTGHLIYKLGGIDKRVIERFEKEAAEMNKRSFKYAWVLDKLKAERERGITIDIALWKFETTKYYCTVIDAPGHRDFIKNMITGTSQADCAVLIIDSTTGGFEAGISKDGQTREHALLAFTLGVKQMICCCNKMDATTPKYSKARYDEIVKEVSSYLKKVGYNPDKIPFVPISGFEGDNMIERSTNLDWYKGPTLLEALDQINEPKRPSDKPLRLPLQDVYKIGGIGTVPVGRVETGVLKPGMVVTFGPSGLTTEVKSVEMHHEALQEALPGDNVGFNVKNVAVKDLKRGYVASNSKDDPAKEAASFTSQVIIMNHPGQIGNGYAPVLDCHTSHIAVKFAELVTKIDRRSGKELEKEPKFLKNGDAGMVKMIPTKPMVVETFSEYPPLGRFAVRDMRQTVAVGVIKNVEKKDPTGAKVTKAAAKKXDPRSSGSFVHXPWHSLHCCNRLCLYLCCSRWPRQWTLTRSWRRRAHLLTAGHXSPLAEMVARVKRLPPYSTMGKEKTHINIVVIGHVDSGKSTTTGHLIYKLGGIDKRVIERFEKEAAEMNKRSFKYAWVLDKLKAERERGITIDIALWKFETTKYYCTVIDAPGHRDFIKNMITGTSQADCAVLIIDSTTGGFEAGISKDGQTREHALLAFTLGVKQMICCCNKMDATTPKYSKARYDEIVKEVSSYLKKVGYNPDKIPFVPISGFEGDNMIERSTNLDWYKGPTLLEALDQINEPKRPSDKPLRLPLQDVYKIGGIGTVPVGRVETGVLKPGMVVTFGPSGLTTEVKSVEMHHEALQEALPGDNVGFNVKNVAVKDLKRGYVASNSKDDPAKEAASFTSQVIIMNHPGQIGNGYAPVLDCHTSHIAVKFAELVTKIDRRSGKELEKEPKFLKNGDAGMVKMIPTKPMVVETFSEYPPLGRFAVRDMRQTVAVGVIKNVEKKDPTGAKVTKAAAKKK

SEQ ID NO: 172593 - protein, 51 aa, Oryza sativa
  Clone ID: PAT_MRT4530_70714C.1.pep
SIQEAKELWEKIQQPQGLNKWRPVLEKKSEDQEGNIFTQKPYPDLQLQGLI

SEQ ID NO: 172594 - protein, 201 aa, Oryza sativa
  unsure (1)..(201): unsure at all Xaa locations
  Clone ID: PAT_MRT4530_70715C.1.pep
GQHSLSSSSTVVHDYSSKPTTRDRLIYKXLGGINKRVINRLEKEHAEMNKRDFKYPRVLDKLKAQRERGITIDIALRKFKTTKDYCTAIDAPGHRDFVKNMITDTYQADCAVLIIDSTTGGFEAGISKDGQTREHALLAFTLGVKQMICCCNKMDATTPKYSKARYDEIVKEVSSYLKKVGYNPDKIPFDPISXFEGDNMI

SEQ ID NO: 172595 - protein, 258 aa, Oryza sativa
  unsure (1)..(258): unsure at all Xaa locations
  Clone ID: PAT_MRT4530_70716C.1.pep
HCPVIYKLGGIDERGIERLEKEAADMNNRPFKYAWVLDKLKAERERGITIDIALRNSETTKYYCTVIDAPGHRDFIKNMITSTCHADCAVLIIDSTTGGLEAAICNDGHTREHALLAFTLGVKHMICCCNKMDATTPKYSKARYDEIVNEVSSYLNNVRYNPDKIPFVPISGFEGDNIIDRSTNLDWYKGPTLLEALDHIHQPXIRPSEQAPASSLQDVYNIRGIGTVALLGPVENGIPPSLGMWVTFGPTGLDHLVF

SEQ ID NO: 172596 - protein, 175 aa, Oryza sativa
  Clone ID: PAT_MRT4530_70717C.1.pep
MASVVDLIESSFPIATKILNKTTIDRTIKWAVGLDIGLSGAVLAVATFAISQLQLRIRVIGIICACFNVLMYASPLTAVINVIQHENVDAMPFWLSFFLFLNGGVWLVYGIIDRDMLIGIPNGIGFLLGTIQLIVYAIYANFIHCRRLRLFLRGLVGRQALVAPLLPNAVEGQEA

SEQ ID NO: 172597 - protein, 301 aa, Oryza sativa
  unsure (1)..(301): unsure at all Xaa locations
  Clone ID: PAT_MRT4530_70718C.1.pep
MGKEKTHINIVVIGHVDSGKSTTTGHLIYKLGGIDKRVIERFEKEAAEMNKRSFKYAWVLDKLKAERERGITIDIALWKFETTKYYCTVIDAPGHRDFIKNMITGTSQADCAVLIIDSTTGGFEAGISKDGQTREHALLAFTLGVKQMICCCNKMDATTPKYSKARYDEIVKEVSSYLKKVGYNPDKIPFVPIFGFEGDNMIERSTNLDWYKGPTLXLEALDQINEPKRPSDKPLRLPLQDVYKIGGIGTVPVGRVETGVLKPGMVVTFGPSGLTTEVKSVEMHHEALQEALPGDNVGFVA

SEQ ID NO: 172598 - protein, 447 aa, Oryza sativa; identical to SEQ ID NO: 172590
  Clone ID: PAT_MRT4530_70719C.1.pep

SEQ ID NO: 172599 - protein, 188 aa, Oryza sativa
  Clone ID: PAT_MRT4530_7071C.1.pep
MRIVSDFLTDSSTYRYTDRYTGFEMSNTPEDYVAICKSLRNPCASEDGMRRQPSRRSPPRCKLETASTELDLAIANMGTTLHLSLRHIAQRVLVCSIDDGPHVFSSWSGPSADGDDTTAATASQGHTTAATARIWPSGEERRRSDRVPKIFYAKRPPYPSTRAVPPKRLSDTGWYRSISAVGSNSSDG

SEQ ID NO: 172600 - protein, 448 aa, Oryza sativa
  unsure (1)..(448): unsure at all Xaa locations
  Clone ID: PAT_MRT4530_70720C.1.pep
MGKEKTHINIVVIGHVDSGKSTTTGHLIYKLGGIDKRVIERFEKEAAEMNKRSFKYAWVLDKLKAERERGITIDIALWKFETTKYYCTVIDAPGHRDFIKNMITGTSQADCAVLIIDSTTGGFXEAGISKDGQTREHALLAFTLGVKQMICCCNKMDATTPKYSKARYDEIVKEVSSYLKKVGYNPDKIPFVPISGFEGDNMIERSTNLDWYKGPTLLEALDQINEPKRPSDKPLRLPLQDVYKIGGIGTVPVGRVETGVLKPGMVVTFGPSGLTTEVKSVEMHHEALQEALPGDNVGFNVKNVAVKDLKRGYVASNSKDDPAKEAASFTSQVIIMNHPGQIGNGYAPVLDCHTSHIAVKFAELVTKIDRRSGKELEKEPKFLKNGDAGMVKMIPTKPMVVETFSEYPPLGRFAVRDMRQTVAVGVIKNVEKKDPTGAKVTKAAAKKK

SEQ ID NO: 172601 - protein, 113 aa, Oryza sativa
  unsure (1)..(113): unsure at all Xaa locations
  Clone ID: PAT_MRT4530_70721C.1.pep
SACNLEVGMKTERIVSICSRQKRIQIPFGSDXNSRIVRIQIRIKIFSTGYGYRYEVELVFVFREKNIFVFVSDHIRFLFVFKIIRICFRIRSLRQRMYFINYFLDSLEYSKPL

SEQ ID NO: 172602 - protein, 447 aa, Oryza sativa; identical to SEQ ID NO: 172590
  Clone ID: PAT_MRT4530_70722C.1.pep

SEQ ID NO: 172603 - protein, 92 aa, Oryza sativa
  Clone ID: PAT_MRT4530_70723C.1.pep
CASLAAQRQPSGFPAGPTTSAREVVRRHVRLPSGGQCPTRCRGLLSEIWARGGGRGASGCHVMPLGPSRCLAPRPSPNCHVAGGASGEETQA

SEQ ID NO: 172604 - protein, 75 aa, Oryza sativa
  unsure (1)..(75): unsure at all Xaa locations
  Clone ID: PAT_MRT4530_70724C.1.pep
DHDSNSDIRTETLQHCVQSLHLRNPNFGVHLPPIFYLLFIDLVLVSRNYITXLCVGRRRRLHXXARXXAYPKVYS

SEQ ID NO: 172605 - protein, 94 aa, Oryza sativa
  Clone ID: PAT_MRT4530_70725C.1.pep
FAIEQPGHNISVRERSARGCRHERRVDAWWRCLARCRRKIDRWRTCKTIDQSWLDTYRYICKRISELKLDRSKWLLQLQSAHVHAHVSAAWGLQ

SEQ ID NO: 172606 - protein, 102 aa, Oryza sativa
  Clone ID: PAT_MRT4530_70726C.1.pep
MAGFGFGFVHASASHGGTRGSGEGSINSLYQGMPLMGQSEEVRNFHEKLVEENFYLITEVWDLIKLGDHLSEWEDVDPCRVGITGESLRGIVYDEFMIASLY

SEQ ID NO: 172607 - protein, 1252 aa, Oryza sativa
  Clone ID: PAT_MRT4530_70727C.1.pep
MRLPLLGAALPLLLSLLAASQLGASATAAAASSGAAASGRAEWQVLTRANFSSQIRLHPHILLVVTMPWYGESRSLMAEIELLVAADEQELGHLKLMAVYRNSEKLLTDVLGATEGIKFIYYQRSLPFKYEGKLRAREILSSVHYIMSLKHAEAPFVVLHTKEDVEAFVESTDKAVVLSEFCGWFSKLAHGGSNRTEGTSSKNHTENVDISGKALTGESDGPLELVIEDEELIFGGGVQLAGSPWKGGFTLANGSMSDQNGITTDENRKLCTAEKLQQFESFYAKLTALSRDYFLPPEKVRFGLITERSSLPSSEFINEGNSETWFLSVHYLGCTNCSIVAKEGDDLRSLLQSYHNLNINEMDIDASGIATFPASRSSAILFIDRLSDSSKVRDESKLSLKLLREYVQKNYPSHFSTGGLTSGKSRMSSKAVPSLVSTGRSAHTERTRLNDWASKLMEIGEKMSVMVVNDGESISYRSDSQGSTDNPLYDILTKLIHKTRPAHRSKKTKISFVAKDVAIKKLSDDSEVQVVESLSIRDSQLERNEGSCASSDGGNDDYTEDSVHENRATEAEYINDRQAPIKLEKGPANYCDNNEKHLESSDTEVEEEHKTKASDVSLDLQEDISVDVHSSNAPKNFCKINKEDLDCSDTKMEEQEHKTEASDTSADLQEEVSTDVHSSNEVGHILHKHKDEETVREALDILEPDGTNVNFNQQKSGSANQQDAVFSVLGQESRRIEDAIYEDNLFILDEGSEESDSKYPVHAALSSSSSLVGDNTYYTEQETPSIPDEHFAGSLFFSDGGYRLLQTLTGGSRMPSLVIIDPIQQKHYVFPDEIEFTYPSLANFLDHFMNRSLSPYYRSALSVISSKELLRPPFINRDFHEADSIPQLTTSNFCMLVFGFEGCVSKSELPFSNTENISSAWKKDVLVLFSNSWCGFCQRTELVVREVYRSFKNFLSSNSQFLQAQDLQIEEKEEESTMKGFPAIYLIDCTSNECHHLLKSVGKEERYPTLLFFPAENKSAISYERGISVSNLFEFLESHASNSPHLLEYKGFLWKKKTVVQGDAPQAIQFDNSDKISNDVGSHSPSHSERNEARVLTGSVLTATSKLGSAVPFDNSQVLIVSADSREGFHGLIINKRLSWDTFKNLDGSMEPIKHAPLFYGGPVVVQGYYLVSLSRVAFDGYLQVIPGVYYGNVAATAQVTRRIKSGEQSAENLWFFLGFSNWEYSQLFDELSEGAWQVSEEPIEHLVWPEN

SEQ ID NO: 172608 - protein, 95 aa, Oryza sativa
  unsure (1)..(95): unsure at all Xaa locations
  Clone ID: PAT_MRT4530_70728C.1.pep
ITNKGFIGVSADLTTSNFQPIYALTFGSMLIXYHTIISRLVYVGLYYCFITLSSADCLYAIIYIGHISDCXNPISIGWYPYRLVSLYRLVSRSTL

SEQ ID NO: 172609 - protein, 481 aa, Oryza sativa
  Clone ID: PAT_MRT4530_70729C.1.pep
MPVWLDWAIRDSVTCPPLEVQEKKPAGYACMSDNSECVNSTNGPGYYCKCKQGYDGNPYVDKDQGCKDINECDVSNKKKYPCYGVCNNIPGDYECHCRVGYQWSGEGPKKQECSAKFPLAARLALGITLGFSFLIVAVLFTLMMHKKRKMNEYFKKNGGSVLQKVDNIKIFTKDELKKITKNNSEVLGQGSFGKVYKGTLEDNTPVAVKTSIEVNEARKDDFTNEVIIQSQMMHNNIIKLLGCCLEVDVPMLVYEFAAKGNLQDILHGDANIPLPLGLRLDIAIESAEGLRYMHSSTSRTIRHGDVKPANILLTDKFIPKISDFGTSKLLNVDKDFTILIIEFQNAYDQENSGRIMFDKEIANEEDILILEEIGRLAMECLKEKVEERPDMKEAPAPAPPHSIPIASRRSWCLLHPPGRSNRHDIGGEWGLSDPAVPYLGATGSVQRRMVLLQIPIFSDKRVRGPHVQGWAGLLYFPFAAK

SEQ ID NO: 172610 - protein, 48 aa, Oryza sativa
  unsure (1)..(48): unsure at all Xaa locations
  Clone ID: PAT_MRT4530_7072C.1.pep
HSFGDRLARSSSAQGLESVSHYALFKGGGFWQPLAGPCTPPPLXLSRN

SEQ ID NO: 172611 - protein, 853 aa, Oryza sativa
  Clone ID: PAT_MRT4530_70730C.1.pep
MTLEGIDLEVQAEAEMGTMRQNMNKLQDMLRQMQLQHQAYEAAKQVKPAPSAPHPTSTAMVTTQGFGHAAQPHAPPASAMYGQVYQAPLYVAKAAPTVTVQPAPYTFTMPVQPAVTQVQPAKHVEAQHAAIEASLTLQAQFQAFLQQLNQPHTISKPTPSANAVGSKSRCPGATMRGGGEKRPPLSWVLKNHPIPPQFKYPPVAIYSRESDPSEFLSIYESAIEVAHGNDNTKAKAPMRSRKRSKTSSAFARRRRNNKEYIRHFSQARCQVQDITEASVINAASAGLLPSDLTRRIARKEPQTIERLFRIIDGHARGEEDTKRRLEIQADYDKAAASAAAAQAVMQAAEAMPLANRQVQPTKKVLPPRPSQAPMTCKKTRAERGKVRNAEGVLFLHQDPLIISAEIARFKVRRILVDGGSSAYVIFAEAYTRMGFLTLALSQALTLLHGFGGEAVQVLGQVHLAPAFGAGPNRHEQMILFGVIDISYNYNAIFGTATLNKFEAIAHHNYLKLKMPGPAGVIVVKGLQSLAVLGSETTVISREVDNVQAEDGERARIVPKPSPHGKVIKVQVDEAEPTKVVSLGGDISEEETNNILAVLKKNINIFVWGSNELGRNVEAYVDDIIVKSRKAFDHASGLQDTFDNLCSEKKPAGYACVSDSSECVNSTNGPGYYCKCKQGYEGNPYDKDQGCKDINECDVSNKKKYPCYGVCNNIPGDYECHCRVGYQWSGEGPKKQECSAKFPLAARLALVMHQKRKMNEYFKKNGGSVLQKVDNIKIFTKDELKKITKNNSEVLGQGSFGKVYKETLEDNTTVAVKTSIEVNEARKDDFTNEVIIQSQMMHNNIIKLLGCCHS

SEQ ID NO: 172612 - protein, 63 aa, Oryza sativa
  Clone ID: PAT_MRT4530_70731C.1.pep
MELLFLIKGRLGVQKIRENDHPSLQRKQGDGDKKGKLERESSYRLSRRKALQKECDAFRFCFD

SEQ ID NO: 172613 - protein, 141 aa, Oryza sativa
  unsure (1)..(141): unsure at all Xaa locations
  Clone ID: PAT_MRT4530_70732C.1.pep
FVGITLGFSFLIVVVLFTLVMHQKRKMNEYFKKNGGSVLQKVDNIKIFTKDELKKITKNNSEVLGQXSFGKVYKETLEDNTTVAVKTSIEVNEARKDDFTNEVIIQSQMMHNNIIKLLGCCXQLDFRFRVYKFVTQFNVVQ

SEQ ID NO: 172614 - protein, 88 aa, Oryza sativa
  Clone ID: PAT_MRT4530_70733C.1.pep
INDGRSRLARLAVHPENPNILTATVSLYPPSPLGFAAGERTPPLPFRIPGRHCKPVGIATRVTAAPDEPRTPPACSTECLSGVRHAGA

SEQ ID NO: 172615 - protein, 698 aa, Oryza sativa
  Clone ID: PAT_MRT4530_70734C.1.pep
MATCWLLAGLLILLASAAGDESVVTGRPAAGCQARCGDVDIPYPFGIGPNCSRGEGFEIACNPRNGSGDLVPTLAAANGTIHVQSLSVAPLPEVKVMLPVAYQCYDAGDSVTGSFYGEVDLNNTGVYRISDSRNMFVVIGCNTLSYTQNGNSGGSNALYAGLFYTGCVSYCNDSPSARDGRCAGVGCCHVDISPGLTDNVVSFGPWTRGFQVDFSPCDYSFLVDKNEYEFRSADLKMDLNRTMPVWLDWAIRDSVTCPPLEVQEKKPAGYACVSDNSECVNSTNGPGYYCKCKQGYEGNPYVDKDQGCKDINECDVSNKKKYPCYGVCNNIPGDYECHCRVGYQWSGEGPKKQECSAKFPLAARLALGITLGFSFLIVAVLFTLMMHQKRKMNEYFKKNGGSVLQKVDNVKIFSKDELKKITKNNSEVLGQGGFGKVYKGTLEDNTPVAVKTSIEVNEARKDDFTNEVIIQSQMMHNNIIKLLGCCLEVDVPMLVYEFAAKGNLQDILHGDANIPLPLGLRLDIAIESAEGLRYMHSSTSRTIRHGDVKPANILLTDKFIPKISYFGTSKLLTVDKDFTMFVVGSMGYIDPVFHKTGHLTQKSDVYSFGVVLLELICRKPTIYGENCSLIIEFQNAYDQENSGRIMFDKEIANQEDILILEEIGRLAMECLKEKVEERPDMKEVAERLVMLRRSRKCG

SEQ ID NO: 172616 - protein, 64 aa, Oryza sativa
  Clone ID: PAT_MRT4530_70735C.1.pep
MSNKNDVNGLELRPSASPGLQIKPPKTDPNTKPIWNSEEKLQKEMKESEKAINGKKPDVYLPQL

SEQ ID NO: 172617 - protein, 203 aa, Oryza sativa
  Clone ID: PAT_MRT4530_70736C.1.pep
MSTSSRPEVGRWSLAGATALVTGGSKGIGRAIVEELASFGATVHTCARNEATLNRCLEEWRAKKLAVTVSVRRVLNVVFHHKFPPLPHQPSVTKKALPDSRVAAPRGTPVAMDELLERRLVAATVTVAATDEVERLRQKFSCCSFIAWCLDNHSDCVDEATFLTLARPADRDFIPCTLRLDRSSSCSYHLRAWDSHHEGHQTF

SEQ ID NO: 172618 - protein, 85 aa, Oryza sativa
  Clone ID: PAT_MRT4530_70737C.1.pep
RAQKAHQTPSPPRFWESPPFTRKCAPSPNLFGPFTPPLNLGIPPGNCGPPGPSPPLRFPLNSFSPKRGPPDSSTNLIYNKLTHVL

SEQ ID NO: 172619 - protein, 97 aa, Oryza sativa
  Clone ID: PAT_MRT4530_70738C.1.pep
SKGATPAPYRSMLLGTFSFPCYSCSTAFSAVWSLLVSDRCNSNKPRKEMSGWGGEGRRRLNRRRRRRRRRQEQQWRRQNAGGDAARAAGAMLLFFSF

SEQ ID NO: 172620 - protein, 446 aa, Oryza sativa
  Clone ID: PAT_MRT4530_70739C.1.pep
MAAPPATASAPSLRPSAASPRAAAARSVAVPSGPRTVGPRRDGGRFLGVRAAKAVSGVQSGTVVDDGVQRPWKLSDARLVLEDGSVWKAKSFGASGTQVGEVVFNTSLTGYQEILTDPSYAGQFVLMTNPHIGNTGVNPDDEESNRCFLAGLIIRNLSICTSNWRCTETLEEYLMKRNIMGIYDVDTRAITRRLREDGSLIGVLSTDQSRTDDELLEMAKNWKIVGVDLISGVTCDAPYEWSDKTDSEWEFKKGQSTESFHVVAYDFGIKHNILRRLTSYGCKITVVPANWPASEVLNLKPDGVFFSNGPGDPAAVPYAVKTVQEIIGKVPVFGICMGHQLIGQALGGKTFKMKFGHHGGNHPVCDLRSGRVDISAQNHNYAVDPESLPEGVKVTHINLNDNSCAGLQYPKMKLLSLQYHPESSPGPHDSDLAFGEFIEMMKNNRL

SEQ ID NO: 172621 - protein, 657 aa, Oryza sativa
  Clone ID: PAT_MRT4530_7073C.1.pep
MGELADLVVVPSQPPLAGGRRDRLAALLELAAADDVDGLRGALAEGGEEAAELADGVGLWYGRSKAYEARTPLMVAATYGSAGVVSLLVGLGGCVDVNRRPGADGATALHCAASGGSRNAVAVVKLLLAAGADPATPDSAGRFPADVILAPPASPDALGDLEVLLGRRRALAVATSVASGSSSPPLSSSPDEGNRSPSSRSSSLSPITVDRGKKEYPVDPTLPDIKSSVYASDEFRMFAFKVRPCSRAYSHDWTECPFVHPGENARRRDPRKHPYTAVPCPNFRRPGGCPSGDSCEFSHGVFESWLHPSQYRTRLCKEGAACARRICFFAHDEDELRHVPHNSGAGLLSPRASSSIDMTAAAALGLLPGSPTRHFAPPPVSPSAGSNGGAAAAHWLQGSRLRSSFNARDAAVDDLGMLLEWESQYLGALCLPPSSRPQPRLSAGLSIRPTIAPSNLEDMYASDMAMSPRFPNDQGHSVYSPAHKSALLNKLHQQKGLLSPVNTNRMYSPRALDPSSLAHSPFGGMSPRSPRTMEPTSPLSARVGAPATQRPSVGSPRNSSAWGTVGSPMGKVDWGVDSEELVRLRRPAQPGFGEDETDVSWVQSLVSNAELNGKRGEVQGMPGTSALMNRPDLNNQGDLLDQTVIGAWLEQMHLDQK

SEQ ID NO: 172622 - protein, 377 aa, Oryza sativa
  Clone ID: PAT_MRT4530_70740C.1.pep
MAYAPAWSVVSPRPRGIFPPAQTGPHLSRDGGMAYTMRHIPSRVFIHFCSRGCWGCSLRWRWPKVSADVDARGIDVDGMVRQPRRQTAAETESTGRKRRPRPSLPVLTRRQTVNGDGRLRARVGGFLATTGGGNGGVDGLLLGAGDAEDGDGGNNGGSRLEVDGRQRRSGSHQRAASCGLRYKRTGGRGSPRPCGAEGGNGARRRRPERRRDAAGVGGGGGQRGNSREEVARPRRLGDRRGNRRGDPGIIYIGGGGRDPCGFGVSAVGNKGSRVHRDKNGAEIQREFVGGFLVANVEVIEGIPFPRSNDEAEFGGGGGVDVHGHGRTGEAAGGGRRQSRHCSRVGPRRQENEGRGTHRGLRTRKTGAGCGLRKERGD

SEQ ID NO: 172623 - protein, 176 aa, Oryza sativa
  Clone ID: PAT_MRT4530_70741C.1.pep
MAFSSEAWKSSATAGHGDGDGDGDRTPPPTPPLPTPLLPPTLAPLQRSLVFGRVEGEAMSSEARESSATAVDRTPPPTPPSPPPPPPPPPTNGTLTPPPSSAPSGGRATSSEARESPHATSVDDGGRAPPPPPLPRPTSARATPATTPSADGSSSSSSSTSGGSLPRGEMAHAVES

SEQ ID NO: 172624 - protein, 56 aa, Oryza sativa
  Clone ID: PAT_MRT4530_70742C.1.pep
EGSSNLWPKKKKKKKKKKKKKKKKKKKKKKKKKKKEKKNKKKKIKKRGKAKKKTLF

SEQ ID NO: 172625 - protein, 348 aa, Oryza sativa
  Clone ID: PAT_MRT4530_70743C.1.pep
MAASETAPFGVSAASKGGGGVAGARAQHGQLAVAGRVHDALVFAAGAVAAVGRRGGITGWDARRAAWMRLRYPRGLNATAAGRERVVMVSGSQAPPCRGEGGDHLLFRFLKNKVDYCRLHGVELLYNNALLQPRMLAYWAKIPAVRAAMLAHPDAEWVWWVDADAVFTDMDFSLPLHKYKDHNLVVYGWNKEVYGERSWVGLNAGVFLIRNCQWSLDFMDAWARMGPASPEYARWGSVLHDTLRGKSDKESDDQSALVYLLSEHEEKWGAKTYLEKGYFFQGYWVEVVDRLDDIAARYEAAELAALGGGGASPPAARGAGALAFRSPKTHSARISRIKLQISSKASHL

SEQ ID NO: 172626 - protein, 139 aa, Oryza sativa
  unsure (1)..(139): unsure at all Xaa locations
  Clone ID: PAT_MRT4530_70744C.1.pep
MRRPRVRPFFFKQNRQDRAKEGGKNATQGNDKAADHKASNRREGAETEQRHRKPDKAKEPTRQATAEPAGEDKRRAXXEGEEPDQEKAQKPPKPRSRHADQEERXGTTEPTRAADERTPEPRNATPQKSPKXAHQQEEN

SEQ ID NO: 172627 - protein, 471 aa, Oryza sativa
  Clone ID: PAT_MRT4530_70745C.1.pep
MAASETAPFGVSAASKGGGGVAGARAQHGQLAVAGRVHDALVFAAGAVAAVLVLLATASFLSPMPVTNLVAFRSLPVSVASTSAASAAIDADVGVRGGPGAAGRTFYDDSRVSYAVEVGRRGGITGWDARRAAWMRLRYPRGLNATAAGRERVVMVSGSQAPPCRGEGGDHLLFRFLKNKVDYCRLHGVELLYNNALLQPRMLAYWAKIPAVRAAMLAHPDAEWVWWVDADAVFTDMDFSLPLHKYKDHNLVVYGWNKEVYGERSWVGLNAGVFLIRNCQWSLDFMDAWARMGPASPEYARWGSVLHDTLRGKSDKESDDQSALVYLLSEHEEKWGAKTYLEKGYFFQGYWVEVVDRLDDIAARYEAAERRPSAAAAHLRRRHAEREHERYAAARNAAVRGAVPGPAGGGQSGWRRPFVTHFTGCQPCGGEPNKIYSKKSCADGMNRALNFADDQVLRNYGYRHKDPLSDE

SEQ ID NO: 172628 - protein, 152 aa, Oryza sativa
  Clone ID: PAT_MRT4530_70746C.1.pep
MANYDHHPCHPLDARCVVRRRTYADTRGRVTPYLLYLDHPNFDIVFALRGLNLARETDYALLLDNRLGKRRFHGGYVHNGLLRAAAWVLDAECDLLRDLLADHPDYTLTFTGHSLGAGIAAMLTVVVLLNLDKLGTNLHRSRIRCYAMAPAR

SEQ ID NO: 172629 - protein, 67 aa, Oryza sativa
  Clone ID: PAT_MRT4530_70747C.1.pep
SLLLLLTPHGEMPSRRGETTRGGHSPPQRNTPHRAEGRWRAPPHLPPPRRCVGGPGRGGEPCPNAGS

SEQ ID NO: 172630 - protein, 79 aa, Oryza sativa
  unsure (1)..(79): unsure at all Xaa locations
  Clone ID: PAT_MRT4530_70748C.1.pep
SIVVESPPLKIIFVFALLAFVACNASARFXPLSPXFRASXLLSRLLFLLXLLRPCGAVXRFLFFLVASPFCAPVSFLLF

SEQ ID NO: 172631 - protein, 51 aa, Oryza sativa
  Clone ID: PAT_MRT4530_70749C.1.pep
MATLMDVVTLVRASHLWIHMRGGIRKHLEMLEDGGQIHIKLEVWSHGKNIF

SEQ ID NO: 172632 - protein, 102 aa, Oryza sativa
  Clone ID: PAT_MRT4530_7074C.1.pep
AVPPPLFFQEGWVFREKFGATKNVATPDVIDRLFDYGEAQSRNFQHPDPSIVPWAPGGSKFPKTPPPPKGVGFFSPFGKKAFLPGALLLFGAEFSPSRGQTT

SEQ ID NO: 172633 - protein, 251 aa, Oryza sativa
  Clone ID: PAT_MRT4530_70750C.1.pep
SISAACSGRQLQAPHTQLLRLHVHFTGVAISNPKPKDFIGLRGEWSCCAAAAAAVFDGEKPRKRRTMNTPNSWLFADNSKYSTRARLLFMGLSFSIGILSFLVYLAIWYTCTRRRRSRQLRGGGSASADQEAPEANSHGMSAAAIAALPTFGYEASAAAAAALDCAVCLGQVDAGEKVRQLPKCGHLFHAECVDAWLRAHSTCPMCRAAVEGPATAAIAKKASSGGGATDTPPVVAPAPPAAAEALPLPPV

SEQ ID NO: 172634 - protein, 64 aa, Oryza sativa
  Clone ID: PAT_MRT4530_70751C.1.pep
QVVGQHIREHKSTLRDVLRCHTSINQHPQRVQLISRRFEVEYIRIIGGAGSDCLHISPSFLVNI

SEQ ID NO: 172635 - protein, 119 aa, Oryza sativa
  Clone ID: PAT_MRT4530_70752C.1.pep
GTMSCSLDALFACRSPMHDYSHIYISSFHHYISLSFLKPRLFLKKSLDQCHAASGIVAWAQIYIKKKTIDKVHNMQVMYQLYTRACAGTCKVCITKKNMWAYVYFFKKIRWLFRAINVA

SEQ ID NO: 172636 - protein, 155 aa, Oryza sativa
  unsure (1)..(155): unsure at all Xaa locations
  Clone ID: PAT_MRT4530_70753C.1.pep
KPVLLGPHPIFFVGPNSFXIALSGPRFCFFSRKGLXAFSKRFNPGALCLGLPPPAPKREDPPENFLFWVGLTKVVFFVLGQKPPFFPLGGGCLFSRPANLPGFDAPAKTRWPVPGAPQFFPFKLYDPPLVLGGGPRPGCFFPLGPGTPGFFSGFF

SEQ ID NO: 172637 - protein, 566 aa, Oryza sativa
  Clone ID: PAT_MRT4530_70754C.1.pep
MATTTSSSASDPAAISPTPSQQHASSTVKTLDDRRPAGTSSSAGETEPKAAVEPQEYPRRPGVPDCSYYVEFGSCKFGMRCLYNHPAKHAGGCDKLEHPQRPGEHDCLHYLRFGRCKYGMNCRFNHPPDRLPQQQVPAEQIRYTRDQLLKLRETVDVPKDIMKLIQDINVELRAEDESRAPNETNYETDSHDWHSRSLQTPVVAEEEKSQDDTREAKEPYALGWKQKEFNKQDQKSFQSDSKAQAGPTLALHKAEDPWSIQRSTVPEKYKVLKTVKGILNLLTPEKFDILKDQLIEAGITRTDILKDVIDLILEKAVAEPTLCPMYAQFCSYLNENITAFPPKDTHCEQITFKQALSDKCQQAFEIARNVRADIYKLTGREQEMERRDKERLVKHQILGKIRLIRDLLKQKMVPDKIVHHIAQAVTDCENFHFEPLENVDLLNIIFDGVLDSVLPGTEANKVVNAIIGIEKCSIASNDAGIIHKDVNRRNEEAKLQKSSNDIPNNLIDPQKNYVVSAFGHPIENEKQTNSETSVRISEVGCGISEIMELIVNAGAEEGTLKEDFGG

SEQ ID NO: 172638 - protein, 1579 aa, Oryza sativa
  unsure (1)..(1579): unsure at all Xaa locations
  Clone ID: PAT_MRT4530_70755C.1.pep
IRYRLMKELGASCSYFLVHAYPSRNMRAEQEKELEEEVVPEAAGTNNSEEAVPEAPMEIDEYDLVDPVDILTPLEKSGFWDGVKATKWSERRDAVAELTKLASTKKIAPGDFHEICRTLKKLITDVNLAVSVEATQAIGNLAKGLRTHFSGNSRVLLPVLLEKLKEKKPTMTEALSQTLQAMHKSGCITLLDVIEDVRVAVKNKVPLVRSLTLNWVAFCIETSNKATVLKLHKEYVPICMECLNDGTPEVRDASFSVLTAIAKMVGMKPLERSLEKLDDVRKKKLSDMIGSASDTTSGTVAASNTGVGTSAREVMDSSSMRRSAASMLSGKKPVQAVPATKKSGPAKSATAKKTDGGPQSKASAAPVIEDVEPSEMSLEEIEEKFSSMKXSASISQLKSTVWKERLXAISMLKQEVESLTELDLLICXRPLYPSRWPSPTPPESLAVKNQKISDLVVKCLIKLTKVLQSTIYEVDLDRILQSIHIYWQELGMEEIRRRAGADDKPLRMVKTVLHELVKLRGTXIKGHLSMVPIDAEPQPIILAYIDLNLQTLAAARMLTPSGTMGQTHWGDAGSNNPNPSTHSTDAQLKQELAAVFKKIGDKQTCTIGLYELYRITQLYPKVDIFAQLQNASEAFRTYIRDGLAQVEKNAAAGRTPSSLPLSTPPPIAPIPSPLSTPSPLHSKSINNKTDCNEDDAGGDTHPFRGQGEIDNRLQTTNLQTDRYQSSVRTLDALRERMKSIQAAAVGANFDGVQARPLPSMNGNTLHGGTRLDADPQTQNIIPPMDERALSGLQARMERLKSGGLGWPHLCSVSLRLWNSDFKRQIDGIELLQKALPSSRKEVIELLDILLRWFVLRFCESNTTCLLKVLDFLPELFDVLKDQSYMLTEAEAAIFLPCLMEKSGHNIEKVREKMGELIKQMVNIYSLPKLLPYILEGLRSKNNRTRIECVDIIGYFMDHHGTEVSXGLLKNLPSVAALTAERDGEIRKAALNTLATAYKNLGDDVWRYVGKLSDAQRSMLDDRFKWKAREMDKRREGRPGDARAALRRSVRENGSDIAEQSGEAVSRSMAGSMISRENFGYSDAHMVPRQMATATPGPADWREALDIVALGLPEQSVEGMKVICHELTQAVDPESSVLDDLIKEADRLVSCLAVMTFQIKRLAHAVKEGTLDNLITELLLWLLDERVPLMDDGSQLLKALNVLMLKILDNAERTSSFVVLINLLRPLDPSRWPSPTPPESLAVKNQKFSDLVVKCLIKLTKVLQSTIYEVDLDRILQSIHIYLQELGMEEIRRRAGADDKPLRMVKTVLHELVKLRGTAIKGHLSMVPIDAEPQPIILAYIDLNLQTLAAARMLTPSGTMGQTHWGDAGSNNPNPSTHSTDAQLKQELAAVFKKIGDKQTCTIGLYELYRITQLYPKVDIFAQLQNASEAFRTYIRDGLAQVEKNAAAGRTPSSLPLSTPPPIAPIPSPKFAPSPVHTKSINNKTDCNEDDAGGDTHPFRGTLDALRERMKSIQAAAVGANFDGVQARPLPSMNGNTLHGGTRLDADPQTQNIIPPMDERALSGLQARMERLKSGSMEPL

SEQ ID NO: 172639 - protein, 180 aa, Oryza sativa
  Clone ID: PAT_MRT4530_70756C.1.pep
MPPSSSPCSLRRGEEGHRSCATELVLVSHSRGEELVIVRAPLSSKSSPAREPPSSSSSNCLAPQTSSSSIRRVCRHLGFLDRCCIPMRVGLEQHPGVERPRWGEGIGRWRRSSLLRCGEWGEAGGGGVHRQGGERLEAAVSLWRKLCRAEEEGKLEQFAEKMKELTSNLKPRRTGVGQTR

SEQ ID NO: 172640 - protein, 329 aa, Oryza sativa
  Clone ID: PAT_MRT4530_70757C.1.pep
MAFSSRAVVAVASVALLVAALASTAAAEGNPVEYTESYYDNTCPNAQNIVRSVMERSVAANPRMAPAILRLFFHDCFVNGCDASVLLNRTDTMESEKDAEPANTSLAGFDVIDEIKSVLEHDCPATVSCADILALASRDAVALLGGPRWSVPLGRMDSRQASKAVAEDANNLPNPNSDLGELLRVFETHGLDARDFTALSGAHTVGKAHSCDNYRDRVYGDHNIDPSFAALRRRSCEQGRGEAPFDEQTPMRFDNKYYQDLLHRRGLLTSDQELYTHGGEVTSELVELYAKSRKAFFADFARAMVKMGEIRPPEWIPVEVRLNCGMVNN

SEQ ID NO: 172641 - protein, 48 aa, Oryza sativa
  Clone ID: PAT_MRT4530_70758C.1.pep
MLTCSQIYHHPGLCHPEVKMLELHRRKECTGGPSAVSLTPRMDCPSIH

SEQ ID NO: 172642 - protein, 180 aa, Oryza sativa
  unsure (1)..(180): unsure at all Xaa locations
  Clone ID: PAT_MRT4530_70759C.1.pep
YHFSLSAAAPSRPLGRCHHARPHLPREHHPRATAISPPRLSAPPASISXRTNRHRDHRRLRLARDHNHTASAGPHGRRLRDHPTPPPRPPLPGAAPAPPRCAGLFSPSTQCLPAEVELLPQAVAEWWSEDDGCIWLTPPPPTAIALASTIEVTARTKVIXVWRALRDVPPVSAFVTAAWP

SEQ ID NO: 172643 - protein, 265 aa, Oryza sativa
  Clone ID: PAT_MRT4530_7075C.1.pep
MEQHEEAAERKPSPPVIFRLFGVEVRGGGGGVDEEEYEEEEVEGGLFIKKSSSMPNLTSIDPLPVPADGGKRRASDDSELASGQQKRRRRKVQERKKGVPWTEEEHKKFLEGLRQLGKGDWRGISKNFVTSRTATQVASHAQKYFLRQTNPGKKKRRASLFDVVAECSDDQLPSPQSVGTKPPTQDIIHTDRGDVPILSYPVARGFRGDSVQVDELTEYVKRLKAAEDMSLSMISGLEMASSSISSLELSIAPPHCAIEAAIKVL

SEQ ID NO: 172644 - protein, 306 aa, Oryza sativa
  Clone ID: PAT_MRT4530_70760C.1.pep
MAEKLLYPPPLLSHEEVANDRAAFMDTLRRFHSLMGTKFMIPVIGGKEMDLHALYVEVTSRGGLAKVMEERKWREVMARFSFPATTTSASYVLRRYYLSLLHHYEQVYFFRAHGALLRPAASALTKTPRRKMRGTSDQSPAAAEAGKRMALPERLGGEPCSFSVTGSIDGKFEHGYLVTVKIAAETLRGVLYRVAPPPPPPAAPPPPPPPARGRRRRGRRQRDPAQPRPNRSAYNFFFKEKHPELKATHPHREREYSRMIGDAWNRLAADDKMVYYRHSAEDKERYKREMQEYNERLKLAPSTMAG

SEQ ID NO: 172645 - protein, 115 aa, Oryza sativa
  unsure (1)..(115): unsure at all Xaa locations
  Clone ID: PAT_MRT4530_70761C.1.pep
FTAGADFILVGSIYKPCGLIQLHTMQSGSXPLVSCTGGLSCTVXEGTTGFHMGALDPDMLNQADADAIAATVXRVTQVYCIPWFQDTVKACMNPDLRCSQPARKWQATLEEDTKG

SEQ ID NO: 172646 - protein, 723 aa, Oryza sativa
  unsure (1)..(723): unsure at all Xaa locations
  Clone ID: PAT_MRT4530_70762C.1.pep
ANSSSVPGDPLEPTIKLKRSLIDGGDALNILFAKTLDEMQIPRTELKPSIAPFHGVIPGLSSTPLGQITLPVTFSTRENFRTENVSFEVADFETAYHAILGHPALAKFMAVPHYTYMMMKMPVQRGVISLRSDNKQAITFDKESCEMAQTCETALAPXEIRLVASTSAEGEEPATKLPKTGEGDAKTMKIPLDPSDPTKTAANKDFFTWKPSDMLGIPRKVIEHSLNVKXYGNHTKQRLRQFAQDMKDAIKEELTKLLAAGFMKEVFHPDWLANPVLVLKKTGKWRMCVDFTDLNKSCPKDPFGLPHIDXVVDSIAGCELLSFLVYYSGYHQIXLKESDCLKTSFITPFGAYFYITMPFGLKNDGATYQCMIQRCFSSHISCNVEAYMDNVVIKTKHKDDFISDSSELPLSPFKXSVNQEKCIESIKKGFVLCFSISGRDSXVSPVRIHCILSMXPDKFVKDLLSSERERGKLIKFLCXDSRGFPILEFLTRKFRVYLNFTAAICFXVFRDSLFTPPPFRLHQRVQYVSATSXVVSSVLVIEREEEGHVQKVXRPIYFVSEVLADSKTRYPQVQKLLYGVLXTIRKLALYFQSHLVMVFTSFPLGDIXHNREATSRIAKCALELMSLDISFKPPTSIKPQALPDFVAEWTKCXKTRLRKLEYXTMHFDGSKRILGTGAGVVLISPTGERLSYVLXIHFLASHNVAEYEALLHGLRIAVSLVSK

SEQ ID NO: 172647 - protein, 53 aa, Oryza sativa
  Clone ID: PAT_MRT4530_70763C.1.pep
AFSSVRLLAIRLPISPYPNSLLLIIFTLISSEKHLNYCISRTWNYGDGQVERH

SEQ ID NO: 172648 - protein, 52 aa, Oryza sativa
  Clone ID: PAT_MRT4530_70764C.1.pep
IPSILSVPRKSFPKAVFSGGAHSLAFPGGSCLRGPRIQFPSTRSGNSVFLNE

SEQ ID NO: 172649 - protein, 92 aa, Oryza sativa
  Clone ID: PAT_MRT4530_70765C.1.pep
GLITSRNLRYGAGGTVNRIAWGMQVLTLRAEKGSDIIPQNSEAYWNRWLTQRCTRQDLEGVLPGTRSSRGCTSTGRRPCRGSILTWRRFRRR

SEQ ID NO: 172650 - protein, 47 aa, Oryza sativa
  Clone ID: PAT_MRT4530_70766C.1.pep
MALLLSVDGRIRCGGDIASVELDGVRHVLCEKGARRRGIRVPLRFRE

SEQ ID NO: 172651 - protein, 54 aa, Oryza sativa
  Clone ID: PAT_MRT4530_70767C.1.pep
MEDGWWVEQWSVSFQSAGGRMTELSSQNPVLVLLETSMDDDGSAIVVPLLGDVV

SEQ ID NO: 172652 - protein, 185 aa, Oryza sativa
  unsure (1)..(185): unsure at all Xaa locations
  Clone ID: PAT_MRT4530_70768C.1.pep
SVRRRRLSAACAQRGQGRRDGQRRGPLCRAALTAPPPPPRGSSSAAAATWPPLRPHTPPPSQRRARGKDEGGGTAGVEAPSAAPLXTAPPPPPPASSSAAAATRPPXARTTPRGRGESCAKRPPPHPPPPPPPPSREAPTLTLCLLALAAPSRTHRRCRPWSHPPLPLPHRLLSKTPSPPLAPSP

SEQ ID NO: 172653 - protein, 36 aa, Oryza sativa
  Clone ID: PAT_MRT4530_70769C.1.pep
IVHAIHTAGIIHDDVIGDTGMSGGRDMFGDLSGSRM

SEQ ID NO: 172654 - protein, 1937 aa, Oryza sativa
  unsure (1)..(1937): unsure at all Xaa locations
  Clone ID: PAT_MRT4530_7076C.1.pep
MAEQAKAHDLSPSVSGDDGEPNPRRRARTPPPPPRQSPKRGEALERVEKSAASPVAGGAGERRDGERRLLVYGDGSTPQGALQAVGALLRHPPVVPDPESPAQRWLDDVANLVMTAQQRLGAGGRSATTKTSGAATTGSASSRRRARRAAAAARHSATTPSSAPPTREDQHEEPDARLDIERRRSDRRAPRATEGASSSRVSPRHGREDQPSVPPVGGVGCRAFVASLRNVRWPPRFRPTITEKYDGSVNPTEFLQVYTTGIEAAGGDDRVMANFFPMALKGQARGWLMNLPPASVHSWEDLCQQFTMNFQGTYPRPXFCQVRNTIPCIPAHAVIYAFXGGVRHNRMLEKIASKEPQTTAELFQLADRVARKEEAWTWNPSGSGVAASAAPGSAAQTGRRDRRRKKRSVHSGDEGHVLAVEGAPRATRKGRPASDKKKEAGTPSRERPASKWCSVHNTSLHDLADCRAVKNLAERTRKWEEDRRQERREGKSAAVPSGKRRSEARQKAPAVDVDDGDDDLGFQEPGATIATVDGGACAHVSRRSFKAMKRELLAAAPTHEATRRARWSEVALTFDQTDHPPCVARGGQIAMVVSPTICNVKLGRVLIDGGAALNILSPAAFDAIKAPGMVLQPSQPIIGVTPGHTWPLGHIDLPVTFGGSANFRTERVNFDVADLSLPYNAVLGRPALVKFMAAVHYAYLQMKMPGPGGPISVRGDLKVALACMEQRADHLAAATKPEGGDERLGTSAPTAPRQRIATCDEVPEDALVSFLRANADVFAWRPADMPGVPREVIEHRLAVRPGARPVRQKVRRQAPERQAFIREEVARLLEAGFIREVIHPEWLANPVVVPKANGKLRMCIDYTDLNKACPKDPYPLPRIDQIVDSTAGCDLLCFLDAYSGYHQIRMAREDEEKTAFITPVGTYCYTSMPFGLKNAGPTFQRTTRISLGSQIGRNVEAHVDDLVVKTRNQETLLSDLAETFENLRSARIKLNPDKCVFGVPAGKLLGFLVSARGIEANPEKIRAIERMRPPSKLRDVQCVTGCMAALSRFISRLGEKALPLFKLLKRSGPFTWTEEAEHALTQLKAYLSSPPVLVAPEPNEPLLLYLAATPQVVSAALVVERGEDNPHFVHPHSMLTWPGSERGGEAPESDGGLRPLTTGVGPLPACQTVLGAPDPQEGPKATAGRPHLTPSDPEANPVLTRPGKEQGEEAPESNGGQRPLTTGVGPLPACPTMPGAPDPQDGPEATEGRPPLSSSDPEVIGTEDKCAPKGHLNEERPGDTSPSREDRPHRKVQWPVYFVSEALRDAKTRYPQAQKMLYAILMASRKLRHYFQAHRVTAVTSYPLGQILHNREGTGRVGAGAGVTLTSPTGDVLRYLVRLDFRATNNIAEYEGLLAGLRVAAGLGIRRLLVLGDSQLVVNQVCKEYRCSDPQMDAYVRQVRRMERHFDGIELRHVPRRDNMIADELSRLASSRAQTPPGAFEERLTQPSARPDPLGETDAPDRPPRPVGVQASGPEGSAPNSLRLIAWISEIQTYLTDKTLPEDREGSERVQRISKRYVLVEGTLYRRAANGILLKCIPQEQGVELLADIHEGECGAHSASRTLVGKAFRQGFYWPTALNDAVDLVRRCRACQFHAKQIHQPAQALQIIPLSWPFAVWGLDILGPFKRAPGGFEYLYVAIDKFTKWPEAYPVVKIDKHSALKFIKGITARFGVPNRIITDNGTQFTSELFGDYCEDMGIKLCFASPAHPRSNGQVERANAEILKGLKTKTFNILKKHGDSWIEELPAVLWANRTTPSRATGETPFFLVYCAEAVLPSELTLRSPRATMYCEADQDQLRRDDLDYLEERRRRAALRAARYQQSLRRYHQRHVRARSLCVDDLVLRRVQTRAGLSKLSPMWEGPYRVIGVPRPGSVRLATGDGTELPNPWNIEHLRRFYP

SEQ ID NO: 172655 - protein, 59 aa, Oryza sativa
  Clone ID: PAT_MRT4530_70770C.1.pep
SKVSPCHYTRPKRCLSTEVLRLWFIYIDSSLRVVALEKKQKFSPSQIIPSARSHLPQDS

SEQ ID NO: 172656 - protein, 144 aa, Oryza sativa
  Clone ID: PAT_MRT4530_70771C.1.pep
HEAPSHTLPWPPPPRRPRRRLLSRPSLPTPPPCLSSSSRCPTTTWTPPPRPAPASVAAARRASVAAPPRSRSTRPPPPRPPPPRLARTARPTSPGRPSAPPPRRSARGTSPSSAASAPGTSGPSTSAASTENAAPARRRRASTP

SEQ ID NO: 172657 - protein, 51 aa, Oryza sativa
  Clone ID: PAT_MRT4530_70772C.1.pep
PLYVRFCFFFHMPPLSLNLNIFSLRLKRTEPCSTEFYVFIYVPNLPLFLPY

SEQ ID NO: 172658 - protein, 1426 aa, Oryza sativa
  Clone ID: PAT_MRT4530_70773C.1.pep
MAAKEHCICEYNHPDVFMICAKKKKKRSLRREKSAETEIRKLECEIKSLNRLVNLMESDTRHLRTTVKLRDEKIRRLELLADNQISSDGYLMDENAAMFQEIQLLQEQINDNSQLTQFALENKRLIEQVRMLEKFSKQGEREMLLTEISLLRNHFLHILEQKYARPPKNMEAQGDVTIKELETCRKELDACLENNVLLAREVNKLRCELKQYQKCGTGQVAPEVVESSVIPGINQKQHDQAGWCGSYLASIDVERQFVDVGITTDITESLELTPPSEIYSENQDSPSRLHFSDPEICDLKNSTKVLEYNSSRNLLDKGIILSGQLENECGLNSVQNDEISLVKENAEKMYGHDEISVYRQNEILHSSEQLLQDELTHIKSLNEGLKEKLIIMAEESTKLSEIIVAKDVEIATLSEEWESAIVDLTSFLTDGCSSLDDAYQNIDNMISSFPYNNHSVSEHVEKAMKVSIEKEKIISRLQIELQAAQRMGREVKEKLHILRGATLAITEAQLLDNDESQEALKLLDLMRQKDCTVQELNDNVKQKSCLFAEATEGYSRHECHLPDNVGTVAEISHNRDGSEVNQANTHYQAKLEDVLHLVEDKSNKVLALFSNFEEAQETMEEAETMLSSLLKANEELKLEKDSCRQAVELLFAERTSLINDLQELEASNSFTAQRYDKLHEQVNGCVAEMTNLATIIKESFHQVQRVTTVELFAFCSEVISFGQDLRKWIYESRSYLVNMGALLEEQGNSYAEQNRRTNSSTYAGVSQQVESCSRQLGGMNGDIFPGTYMVVDGKEKASVHVVPFGSNAELEDTNVERTFDMDYASLRREFDRKSDVAEGLSFDLKLLQESTSQAKDMKDKADEISDALVSVQRELEKKTSAMESILKQQKVLEEELAENGAALLILRSELEHSESLSSELFKENNNLKVMLEEEAMMISETKAMLEDKSKVIEGLEHEILLLNSSEEGRLMSQIKELNDNLKIISIDKGNLEEEILKLTDKLEMAVALAEENEAASIEARQAAEISKVYAEEKEEEVRILERSVEELESTITVLEEEVCNLKEEVRSYQIYKKSEAEQAQEMFIVDSTSKCDATEQLCPGRCQLEKRLKAEIIAHQDARRKIECLTMEASCKDEEVRQYKEHIAELVLHSEAQSLLFQEKYQEMEHMISKQKFGLHESNSDTGHTKFEKPSGRTRGSGSPFRCISSIVQQMNSEKDQEISVARQRIEELEGLICMLTSRLAAVDSMTHDIIRELLGVKLDMTNYANMLDQEELQKLLMASQQQIEQSKAKDVELDMLKEQFDHLIQERDSLFDDMDQRKADLLESQLLIEQLEQREQMLEAQNGILQMEKDNLQQRIMEMDEEIQLLVGSNQAIAETTFQMHHLSDATGLLFSEDVGLKMVMTARNIVYEISVVCTVLPYMVATAY

SEQ ID NO: 172659 - protein, 78 aa, Oryza sativa
  Clone ID: PAT_MRT4530_70774C.1.pep
CITLFCASQSAICPPKDQMFHERPKPIDFKSPYVPNVVPQGKLKVSKISPHDNPAEMMPKPVPIAKFELCPSLVGIVV

SEQ ID NO: 172660 - protein, 961 aa, Oryza sativa
  Clone ID: PAT_MRT4530_70775C.1.pep
MVEMQWLLLLFMLLVSLRLSFSQTNPQDVSALQALMKNWQNEPQSWMGSTDPCTSWDGISCSNGRVTEMRLSGINLQGTLSNAIDQLSSLTYLDLSNNLNLGGPLPPSIVNLKQLTTLILLGCSFTGDIPEQIGALRQLTFLALNSNKFTGGIPPTLGLLSKLFWLDLSDNQLSGKIPVSSGSNPGLDQLVNAEHFHFSENQLTGPIDEKLFSEKMNLIHVIFDNNNFTGPIPGSLGRVSSIQIIRLDHNQFSGPVPGSIANLSRLMELSLASNQLNGTVPDLTSANALTYVDLSNNNFMSSPAPRWFSTLTSLTTLFMDSDHLTGTIPSALFSFPQLQQISLAKNSFSGELNMSSNISSLLRVVNLTNNQIFNAEVDPSYTGSLILSGNLICFNNISFCTLKQKQQVPYSTNLGPCGAISCPTDQSANPVASQNCACASPFQGLMIFRAPAFSDVTNPKSFQPLEFTLVQNLSLAPGSVAISNVEFSPGEPLTFTVKVFPESGTSFNHSEVIRISSSLVNQTYKAPAYFGPYSFIASTYFASPSGKRSSMGKGAIIGIAVAGFLLLVGLILVAMYALRQKKIAKEAVERTTNPFASWGQGGKDNGDVPQLKGARYFAFEELKRCTNNFSETQEIGSGGYGKVYKGMLANGQMAAIKRAQQGSMQGAAEFKNEIELLSRVHHKNLVSLVGFCYEQGEQMLVYEYIPNGTLRENLKGKGGMHLDWKKRLQIAVGSAKGLAYLHELADPPIIHRDIKSTNILLDESLNAKVADFGLSKLVSDTKKGHVSTQVKGTLGYLDPEYYMTQQLSEKSDVYSFGVVMLELITSRQPIEKGTYIVREIRTAIDQYDQEYYGLKSLIDPTIRDSAKMVGFRRFVQLAMECVEESAADRPTMNDVVKELEIIIQNEGAQLLNSASLSAQQFGYAKGRDPDPYGDHVPINDDSSSSAFDYNSVYSYSVVEPK

SEQ ID NO: 172661 - protein, 133 aa, Oryza sativa
  Clone ID: PAT_MRT4530_70776C.1.pep
MGLHYEQYDAEGHESSLSRKYGLRDVVQPQASSMTAAARRRQLQGSVLAGKMVLVRKALDTNLNSGDVVCQLVSSTVGDPGGGGDTQLRQRHAARVKAMAQRRQMVATVAGQQQLGTHEQQQHGCSRERHSDG

SEQ ID NO: 172662 - protein, 488 aa, Oryza sativa
  Clone ID: PAT_MRT4530_70777C.1.pep
MDGGGQGVARRHGAVAEEDPDRRRGDRSGKEGDDDGVDVDEKAPPPRRTSRRVASLDVFRGLTVALMILVDGAGGEWPVIGHAPWNGCNLADFVMPFFLFIVGMAIPLSLKRIPDRGRAVRRVVLRTLKLLFWGILLQGGYSHAPDDLSYGVDMKHVRWCGILQRIALAYLVVAVLEIVTKNAKVQDQSSSGFSIFRMYFSQWIVACCILVIYLSLVYGIYVPDWDFRVSDVKNPNFGKILTVTCGTRGKLSPPCNAVGYIDRKVLGINHMYHRPAWRRHKDCTDDSPHEGPFKTDSPAWCYAPFEPEGLLSSLSAVLSTIIGVHYGHVLVHMKSHTDRLKQWSIMGITLLILGLTLHFSHAIPLNKQLYTFSYICVTAGAAGIVFCMFYFLVDILNLHYPFAPLKWTGMNAMLVYVMAAAGIFEGFLNGWYYEGTNNTLVYWVRKHVFVKVWHSTRVGILLYVLFAQILFWALVAGLLHRARLYWKL

SEQ ID NO: 172663 - protein, 204 aa, Oryza sativa
  Clone ID: PAT_MRT4530_70778C.1.pep
MTVVTVGKNREAKAASTHVSTDQEEVALLEFAAKLAKKQSFKDNKSDFFKRLAKMTNDHFIPLDLNNQYVPLTNSKIVDEKFCLASQFTCSGARLIGHDGLFTSLFTASEATGTGAPSVSKKRKYTTPKDLGSSLKCLAEHGCKDIEHYIFTVALEDPAALKGFLAMKSYEDKRKHLIGLWKKGIVKVPAVEGINPELLPPDFQ

SEQ ID NO: 172664 - protein, 439 aa, Oryza sativa
  Clone ID: PAT_MRT4530_70779C.1.pep
GLIFIVTFSNRAPDPEHDSAAVQEFLENMEGAFRAHTPWAGSSEEELESAGEGLEKYVMTKLFNRVFASVPEDVKSDEELFEKMSLLQQFIRPENLDIKPEYQSETSWLLAQKELQKINMYKAPRDKLACILNCCKVINNLLLNASIVSNENPPGADEFLPVLIYVTIKKKYKPIIGAVRYRRQSRLVSEAQYFFTNILSAESFIWNIDGESLSMDERDFQKKMDLARERMLGLSASSENQDNQNNLDVREQKSQTLKASRDSDVNLSLKDNFQGPGLEMRRDSDASSNPVERVQSISDLEKKGAAELLKDDDLNKKIQEYPFLFARSGDLTVADVENLLNSYKQLVLKYVALSQGMGINLENPPVQSMQTVSDLVESEEPKNVKNAVNFSEGSSKTSDDIKNDTLYSEVDNTGTQQTAVDPSYQKAQQDEASDQPEHA

SEQ ID NO: 172665 - protein, 255 aa, Oryza sativa
  unsure (1)..(255): unsure at all Xaa locations
  Clone ID: PAT_MRT4530_7077C.1.pep
QHWLEAIDPRHRYGHNLHYYYQHWLHCESKQPFFYWLDVGEGKDVSMEDHCPRWKLLQQCIRYLGPKEREFYEVVIXNKKLLYKMSRKIVDTSEGPKNSKWIFVLSTTRVLYIGTKSKGTFQHSSFLAGGATSAAGRLVVDNGILKAVWPHSGHYRPTEANFREFMMYLKKRNVDLANIKLSPSEDEEDECLRSRSGRSQLEPTEPGKPEKEEDATADDNGTTTVAAQAAPPSTTGGEPATPVMKRSSSGNRLQR

SEQ ID NO: 172666 - protein, 337 aa, Oryza sativa
  Clone ID: PAT_MRT4530_70780C.1.pep
MAGGVSSVEVVKDGATGLEKLVLREAHGCSVQVDPLSSTLAFSCNVDKLFIGGGHHDAIVSCGFDWPFAIILSILGNVILDNLTGSLLSFFFLRNGQFGNHGVLEQHGFARNRLWSVDETPPPFPATTSNCHIDLILKQSPEDLKIWPHSFEFRLRVALSPTGDLMLTSRIKNTNADGKPFKFGFSYNTYFSVSDISEVRVEGLETLDYIDNLQCGKRCTEQGDAVVFESEAEKVYLSAPPKIVIIDHDKKRTFELRKEGLPDVVVWNPWDRKAKTILDFGEEEYKCMLCVGAANAEKPITLRPGEEWQGRQEISVVPSSYSSGQWDPEIIHRIQDI

SEQ ID NO: 172667 - protein, 51 aa, Oryza sativa
  Clone ID: PAT_MRT4530_70781C.1.pep
EERHGEEIAWRELSSSSPPHRSVALLFGVHCLPVTGANRHHHQDASSINGL

SEQ ID NO: 172668 - protein, 68 aa, Oryza sativa
  Clone ID: PAT_MRT4530_70782C.1.pep
MVIGFVNLQDGFAVPVFKDAHRAPSRFGRGGFAALSSEGVIMTAELEDGRSGGVALGTGRGEDDNSGW

SEQ ID NO: 172669 - protein, 100 aa, Oryza sativa
  Clone ID: PAT_MRT4530_70783C.1.pep
ATTLPVLFTFLGQNGRSNLIPDFLGPTCRGIDRSIHRLVFPPKKGNQNFFPGGKQKKKSWKKGPHYAGGNSITDGLWGCWRGRLPVWRGGFWGRQRPTLP

SEQ ID NO: 172670 - protein, 70 aa, Oryza sativa
  Clone ID: PAT_MRT4530_70784C.1.pep
MRRSIIELSFCDYKVSGHIYTRSQGRPLPYAAKATAGASAEKFFKIEVVEELFEINYVTRKVKWLGYVLN

SEQ ID NO: 172671 - protein, 66 aa, Oryza sativa
  Clone ID: PAT_MRT4530_70785C.1.pep
RNRFLFYSITTLQKKKWAAFLEGSGLRTHNCLIIPFLKSHLLALNGPLLYNLVPGKTLAIPILLDL

SEQ ID NO: 172672 - protein, 2027 aa, Oryza sativa
  Clone ID: PAT_MRT4530_70786C.1.pep
MAEHAKAHDLSPSASGDDGEPNPRRRACSPPPPPRRSPKRGEVPERVERSATSPIAGGGEERRDGERRLLVYGDGNTPQGVLQAAGALLRHPPVVPDPESPAQRWLDDVAKLVMTAQQRLDVGGRSSASKATGAATTGSASSRRRARRAAAAVRHSAATPLSTPTPQEDLRGRPDARTSIERRRNDRSAAQATEGASSSRVSPRHGRGNQPSVPPVGGVGCRAFVASLRNVRWPPRFQPTIAEKYDGSVNPTEFLQVYTTGIEAAGGDDRVMANFFPMALKGQARGWLMNLPPASIHSWEDLCQQFTMNFQGTYPRPGEEADLHAVQRRDDESLRSYIQRFCQVRNTIPCIPAHAVIYAFRGGVRHNRMLEKIASKEPQTTAELFQLADRVARKEEAWTWNPSGSGVAASTAPGSAVQTGRRDRRRKKRSVHSDDEGHVLAVEGASRATQKGRPASDKKKKAGAPGRERPAGKWCTVHNTSLHDLMDCRAVKNLAERTRKWEEDRRQERREGKSPAVPSGNRRSEAKQKAPVENIDDGDDDLGFQEPGATIATVDGGACAHVSRRSFKAMKRELLAAAPTHEAARRARWSEVALTFDQTDHPPCVARGGQIAMVVSPTVCNVRLGRVLIDGGAALNILSPAAFDAIKAPGMVLRPSQPIIGVTPGHTWPLGHIDLPVTFGGPANFRTERVSFDVADLSLPYNAVLGRPALVKFMAAVHYAYLQMKMPGPGGPISVHGDLKVALACLEQRADHLAAASKPGDDDERLGAPATLRQRMITCDEVPVKEVALGDSPSKTTRIGGLLDADMPGVPREVIEHRLAVRLGAKPVRQKVRRQAPERQAFIREEVARLLEAGFIREVIHPEWLANPVVVPKANGKLRMCIDYTDLNKACPKDPYPLPRIDQIVDSTAGCDLLCFLDAYSGYHQIRMAREDEEKTAFITPIGTYCYTSMPFGLKNAGPTFQRTTRISLGSQLGRNVEAYVDDLVVKTRNQETLLTDLAETFESLRSAHIKLNPDKCVFGVPAGKLLGFLVSARGIEANPEKIRAIERMRPPSKLRDVQCVTGCMAALSRFILRLGEKALPLFKLLKRSGPFTWTEEAENALTQLKVYLSSPPVLVAPEPNEPLLLYLAATPQVVSAALVVERDEDNPHFTLPHPVPTWPGREQGGEAPEPNGGPRPPTTGVGPLPACQTVLGAPDPQEGPEATVGRPHLSPFDPEANPVLTRPGKEQGEGAPEPNGGLRPLTTGVGPLPASPTTPGAPDPQDGPEATVGRPPLSSSDPEVISTEDECASQGRLNEERPGDAAPSKEDRPHRKVQRPVYFVSEALRDAKTRYPQVQKMLYAILMASRKLRHYFQAHRVTVVTSYPLGQILRNREGTGRVVKWAIELSEFDLHFEPRHAIKSQALADFVAEWTPAPEPVSIPEASTDSPHLPHTAHWVMQFDGSLSLQGAGAGVTLTSPSGDVLRYLVRLDFRATNNMAEYEGLLAGLRVAAGLGIRRLLVLGDSQLVVNQVCKEYRCSDPQMEAYVRQIRRMERHFDGVELRHVPRRDNMIADELSRLASSRAQTPPGAFEERLAQPSARPDPLGETDAPDRPPGPVGVQASGPEGSAPSSLRLIAWIAEIQAYLTDETLPEDHEGRERVHRISKRYVLVEGTLYRRAANGVLLKCIPREQGVVLLADIHEGECGAHSASRTLVGKAFRQGFYWPTALNDAVELVRRCRACQFHAKQIHQPAQVLQTIPLSCPFAVWGLDILGPFRRAPGGFEYLYVAIDKFTKWPEAYPVVKIDKHSALKFIKGITARFGVPNHIITDNGTQFTSELFGDYYEDMGIKLCFASPAHPRSNGQVERANAEILKGLKTKTFNILKKHGDSWIEELPAVLWANRTTPSRATGETPFFLVYGAEAVLPSELTLRSPRATMYCEADQDQFRRDDLDYLEERRRRAALRAARYQQSLRRYHQRQVRARSLCVDDLVLRRVQTRVGLSKLSPMWEGPYRVIGVPRLGSVRLATGDGTELPNPWNIEHLRRFYP

SEQ ID NO: 172673 - protein, 253 aa, Oryza sativa
  unsure (1)..(253): unsure at all Xaa locations
  Clone ID: PAT_MRT4530_70787C.1.pep
MLCEEGQTCTLLSXRVVDKNDRFVTGLTLIMSSADSHVPTTRLPPAEVEVGIESLGFHPEPPAEPAKGGLCGLPVRSPALRHLARQLFLFSQMAEQAKAHDHSPSVSGDDGEPNPRRRARTPPPPPRQSPKRGEALERVERSATSPIADDGKERRDGERRLLVYGDGSTPQGALQAAGALLRHPPVVPDPESPAQRWLDDVAKLVMTARQRLDAGGRSSATKASGAATTGSASSRRRTLPIACKLEYSIVSPK

SEQ ID NO: 172674 - protein, 71 aa, Oryza sativa
  unsure (1)..(71): unsure at all Xaa locations
  Clone ID: PAT_MRT4530_70788C.1.pep
FFFFFYLNLSILNXVNDEIXDILSCTFITSMXTVPSAGTRHFPSTFDDLTTRGHWVTCTTVRDXMYSVSIY

SEQ ID NO: 172675 - protein, 202 aa, Oryza sativa
  Clone ID: PAT_MRT4530_70789C.1.pep
MEKWSRGLSCRAAICGIVVLLCATAFSCSLAAEFRKVKEKDMKLDGSLCSLPKSSAFELGVAAIAFLSVAQLVGTTAAATTMCAASKRSKSSTTRRRAASVAILVLSWVSFALAVVLLATAASMNHGQRYGRGWMDGDCYVARNGVFGGAAALVVVTALLILGLTSTTKSSSCATSAASATTTIRLDAAATDAEQASGRSKQ

SEQ ID NO: 172676 - protein, 1101 aa, Oryza sativa
  Clone ID: PAT_MRT4530_7078C.1.pep
MAVEARGFRVGVVELTGGKGLAGWSRSPIIRRGELLGFSVSPWLVNNSNSILEFSSSHSRVSDETLWQWRWRQITRPYSWRCRRGFRGMDMGRNFPGLDLPVLLFSSLVLGVGLADWGIGFELIGFDCAIRFLRFCGGGQHGCAFRSLVVDAPGIYPQFSLYLLVYIEGSTQMMRHCRREWLLALCLISVQLLIPTGCEGVLVAASNMSPPALTPLLINQVDQLVEHAWVKCGLDKRTLEDVRRHFNYNHVLAILRRMSGQDIKDTSPDIDGGTSVLSLERRDAILNCLSKQNFMSIAGQDGLKILSADYIKALIASLRTDLAQESSTTKSIPEQAGKPVPGKTSTPKPVNKPTDSVSSPPDRSYKSAPTEKENPPTKSVAEKKKDSSGMPNAFIGLSIAGIALMAHLCLCCFMCHGTSSSDLRDDKPLLTLNPSNLSAASKSSQGNPIDVNKLGVVSLKSEAGQNGDVKLISKEGTNNVNVVHPVSSVSESTLMPPPEGANNVNMVHPEGANNMNVVHPEGANNVNMVHPEGANNVNVNMVHPVGSLSESTPMQPPVMPPPIPKLLSPPAPQAPMPPLKASPVPPPEPSPPPAPKAAPPPPPPKSTGPGPPRPPPPAMPGSSKTRPPPPLKPGAKVGAVENSNEAKTKLKPFFWDKVTANPARSMVWDHLKSGSFQFNEQLMENLFGYNSTDKSSDTKKDLSSKDATQLIRILDPKKAQNLAISLRALGVSPQEVCSAVKEGSELPSDLIQTLIRWSPSNDEELRLRLYSGELFQLGPAEQFLRVIIDIPYIFQRLDALLFMANLPEEASNVKQSFATLEVACQELRNSRLFMKLLEAVLKTGNRMNVGTFRGGAQAFRLDTLLKLSDVKGTDGKTTLLHFVVQEIIRSEGVRAERAAKEQNSGVSSVKTDDLGDKSEQTEDGYKQLGLKVISSLGDELQDVRKAAILDADQLTMSVASLGHKLMKTNEFLNMDMKSLDEDSGFHRKLTHFVQQSQTDITFLLEEEKKMRLLVKDTVDYFHGSAGKDEGLRLFVIVRDFLAMLDKVCKEVKEASKVAPVKAKAKQPSQSLQSFRDPRVNLFPAIQHLRADSSSSSSDDES

SEQ ID NO: 172677 - protein, 45 aa, Oryza sativa
  Clone ID: PAT_MRT4530_70790C.1.pep
ISCFTCVNHVDFVLVAISCFTTSIVHYKSSILQFCYVIWHWHCML

SEQ ID NO: 172678 - protein, 305 aa, Oryza sativa
  unsure (1)..(305): unsure at all Xaa locations
  Clone ID: PAT_MRT4530_70791C.1.pep
MAPAAAPAAATGGGAGGKGRGASSGAAWLYAITYGGGIVSGDIISCTVAVGDGCAAAMTTQASTKVLFSFNCSHXEKCSEQVLHFARVGEDALFXIIPDPVTCFSMARYHQKQVFHVFPNSNLVVVDWFTSGRYESGEKWNFSFHKSINHILLEDQPLFIDSVVLEQSSNFSIADRMQEYNVVAMVILLGPKLKHIQDQMQEWNFSFYKSINHILLEDQPLFIDSVLLEQSSNFSIADRMQEYNVVAMVILLGPKLKHIQDQMQDEGTGMVARITAVSTESVYSFLRHHLAALEPFLGACPYPAS

SEQ ID NO: 172679 - protein, 63 aa, Oryza sativa
  unsure (1)..(63): unsure at all Xaa locations
  Clone ID: PAT_MRT4530_70792C.1.pep
LNKXPXIFISYFTPFSNNYIQSTXTQSQSRSXYNHPPNXSXRILSQXRWRRRTRGRTRGRTRG

SEQ ID NO: 172680 - protein, 56 aa, Oryza sativa
  Clone ID: PAT_MRT4530_70793C.1.pep
LTQTDFNNYLHIILFFFLSNSPSLLSFYSLNANSLSTDNPYIIVLFHPPSHSRFIY

SEQ ID NO: 172681 - protein, 64 aa, Oryza sativa
  unsure (1)..(64): unsure at all Xaa locations
  Clone ID: PAT_MRT4530_70794C.1.pep
YLGNPNLXHAQSILAIWAGPVVLHGFVEGYPRRAAPALRGPSDQGVTQGGALLTPPRPSARTNP

SEQ ID NO: 172682 - protein, 1489 aa, Oryza sativa
  Clone ID: PAT_MRT4530_70795C.1.pep
MADDLPPPSITPVTAVDAASTAVADAIRAVFQPDARHGIDPTTAANVTESAAAISSTAAWKALISFIEKLSASTSSQPDNPSASAPVNSTAAATISSASAAAFFAGLHTSSAGLQPQHDAIPQGSGAPPPHGHGSLSFVAPSPTAPQADHFYNVDLDDKATANLHAQAISVLNIKSLVPVTLDVNSGTYTWWRGLLLVILSKYALADHVLTDNYRPDHPDWMRMDCVVLSWMYGTISTDLLESVMTHTTTARLVWRSLEHQFLGNREARALNLNAEFYNFQQGDLSVTDYCRRLKAMAADLADVGEPVGDRTLTLATIQGLDENFAHLQSAFTMRKPFPSFAEVRSQLLLDELTKNRSHTPATTLIAATSGRTSGGAANSNPAHITGYGNNSNTGNRNSNGRQGGNNRGRRHNNNGGNGGQQQPQFRPPGSSAQAASWPSPLNPWNGTLQMWPVPVGMIPSRVVGSGSGLLGPRPGAPSHFAGSMVAASHNGVPQHPAAPSVLGHAGPAQSLAASTSYQPVFAAMPSTPGTPASWNGSANTQWDQQGLINAFNTVSLSQPPSSDWYIDSGASSHMTSDAGTLSFSSQPNPNTLSHIIVGDGSPLPITATGSTHLSFPHRSFVLNNVLVSPEIIKNLIVVHRFARDNDVSVEFDKDGLDVKDFHSRNVIVWCNSFGDLYLVRPTELHYALAARESSVLWHHCLGHLGSEALTRLARSSVIPPYRELLASLPSSFWVEALHTATHLINRHPTKTLQFHTPFFALYGIHPTYNHLRVFGCKCYPNLSATAPDKLSVRSTACVFLGYPRDHKGYRCMDLSFNRVIISRHIVFDEHSFPFAKLSNGTCATDLSFLDDFTASSLPTPTSTRRTTAAARTSSPGGSPPASSATIDGHHCWHPLPGSPAPSADSSAPSVDPPASPAGSPTTTAGSPASTAPSPPPVVSTTSAPTLPPVPTRPRSARVPGGRHLPPVLGASPALNSHNMATSSKYGFHLPTDRLNLHASALSPIPRTYRVALADPHWRAAMEEEFAALRANNTWDLVPLPPGANMVTGKWIFRHKFKSDGTLDRLKARWVLRGFTQRPGIDFDETFSPVVKPATVRTVLSLAVSQNWAIRQLDVKNAFLHGTLQETVYCSQPLGFTDPAHPKSVCRLNRSLYVLTASSAPILQWTITQLQSEFAMKDLGVHHFLGISVTWNSIGLILSQRQYCSEILERAGMLHCKPCSTPVDTCAKLSASDGQPVADPTDYRSLAGALQYLTFTRPDIAYAVQQVCLHMHDPRETHLAAIKRILRYVRGTMDYSLHKSRSSSTDLVAYSDADWVGYPDTLRSTSGYAVFLGDNLISWSSKRQNTVSRSSAEAEYRAVANAVPETCWLRQLLHELHTPPTRATLVYCDNVSAVYLSTNPVQHQRTKHIEIDLHFVRDKVALGTVRVLHVPTSSQYADIFTKGLPSSVFCEFRSSLNVHSAHVPTAGGVRDIVFVSGSVSLNPMPILFL

SEQ ID NO: 172683 - protein, 129 aa, Oryza sativa
  unsure (1)..(129): unsure at all Xaa locations
  Clone ID: PAT_MRT4530_70796C.1.pep
CSKQYYQCNLLVNEQTLCLTKFSSQKAYRNALXLILERFPQPNQKPHPIQVDQRGGSRAVAPRSPCLCGRSHPNPTPGLSDLPSPCAVASLPPLYIPISEMLHSWRHLQRAXRFSYGSTTTSIGXKGET

SEQ ID NO: 172684 - protein, 50 aa, Oryza sativa
  Clone ID: PAT_MRT4530_70797C.1.pep
GLVYPGEVFFSSHEPVGSTRVEGIFSGMQDIENLKLYLSRFGKEEGLAFL

SEQ ID NO: 172685 - protein, 493 aa, Oryza sativa
  Clone ID: PAT_MRT4530_70798C.1.pep
TAEQLLLLPILFFSSNSPCPAGPAAAAAVAGAAGVGVGAAAWPRRRCRDVFWLVVFLLHLLVFGGALALTGLNRFGQADRFNIDRFTNLTVTPKSELTESYWPYYGAAGAVGTALAWAWLAAAAGKKDGGRVVMRAAVHSLTAYLAVVSVLCFWGKHFFWGVAFAVGGALHFLYVMSVLDRFPFTMLVLQKAVRMVWELPDVMRIAYAFVLVMLCWMALWSFGVSGILAFHIPNGGQWWALLIFSVSLFWTGAVLSNTVHVIVSGMVFLVLIHGGQAAASMPPKPLLKSLQYAVTTSFGSICYGSLFTAAIRTLRWEIRGIRSKIGNNECLLCCVDFLFHIVETLVRFFNKYAYVQIAINGQSFNRSARDAWELFQSTGVEALVAYDCSGAVLLMSTILGGLITGTCTGVWTYFKQSDKAIMVGSTSMLMGMILVGVTVVVVESAVTSIYICYAEDPRLIQRWDPDFFDQMSEALHQRLQYRSARAHQILNSR

SEQ ID NO: 172686 - protein, 138 aa, Oryza sativa
  Clone ID: PAT_MRT4530_70799C.1.pep
MSSKKIVIKVDFVRAKCKAVAMTVVAKIPGVKSLAADDEKGTMTVVGEVDVVQVVGELRKAKFAAEVVSVEPEKKPEAPKKPDDPPKKPDPPPPCPPPPPPCCPGCNSCRPACQCAAAPGGGVVLYEVEADGYGCIIA

SEQ ID NO: 172687 - protein, 1765 aa, Oryza sativa
  Clone ID: PAT_MRT4530_7079C.1.pep
MAEQAKAHDLSPSVSGDDGEPNPRRRARTPPPPPRQSPKRGEALERVEKSAASPVAGGAGERRDGERRLLVYGDGSTPQGALQAVGALLRHPPVVPDPESPAQRWLDDVANLVMTAQQRLGAGGRSATTKTSGAATTGSASSRRRARRAAAAARHSATTPSSAPPTREDQHEEPDARLDIERRRSDRRTPRATEGASSSRVSPRHGREDQPSVPPVGGVGCRAFVASLRNVRWPPRFRPTITEKYDGSVNPTEFLQVYTTGIEAAGGDDRVKANFFPMALKGQARGWLMNLPPASVHSWEDLCQQFTMNFQGTYPRPGEEADLHAVQRGDDESLRSYIQRFCQVRNTIPCIPAHAVIYAFRGGVRHNRMLEKIASKEPQTTAELFQLADRVARKEEAWTWNPFSSGVAASAAPGSAAQTGRRDRRRKKRSVHSGDEGHVLAVEGAPRATRKGRPASDKKKEAGTPSRERPASKWCSVHNTSLHDLADCRAVKNLAERTRKWEEDRRQERREGKSAAVPSGKRRSEAKQKAPAADIDDGDDDLGFQEPGATIATVDGGACAHVSRRSFKAMRRELLAAAPTHEATRRARWSEVALTFDQTDHPPCVARGGQIAMVVSPTICNVKLGRVLIDGGAALNILSPAAFDAIKAPGMVLQPSQPIIGVTPGHTWPLGHIDLPVTFGGSANFRTERVNFDVADLSLPYNAVLGRPALVKFMAAVHYAYLQMKMPGPGGPISVRGDLKVALACMEQRADHLAAATKPEGGDERLGTSAPTAPRQRIATCDEVPEDALVSFLRANADVFAWRPADMPGVPREVIEHRLAVRPGARPVRQKVRRQAPERQAFIREEVARLLEAGFIREVIHPEWLANPVVVPKANGKLRMCIDYTDLNKACPKDPYPLPRIDQIVDSTAGCDLLCFLDAYSGYHQIRMAREDEEKTAFITPVGTYCYTSMPFGLKNAGPTFQRTTRISLGSQIGRNVEAYVDDLVVKTRNQETLLLDLAETFENLRSARIKLNPDKCVFGIPAGKLLGFLVSARGIEANPEKIRAIERMRPPSKLRDVQCVTGCMAALSRFISRLGEKALPLFKLLKRSGPFTWTEEAEHALTQLKAYLSSPPVLVAPEPNEPLLLYLAATPQVVSAALVVERDEDNPHFVHPHSVLTWPGSERGGEAPESDGGLRPLTTGAGPLPACQTVLGAPDPQEGPKATAGRPHLTPFDPEANPVLTRPGKEQGEEAPEPNGGQRPLTTGVGPLPACPTMPGAPDPQDGPEATEGRPPLSSSDPEVIGTENKCAPKGHLNEEPPGGTAPSREDQPHRRVQRPVYFVSEALRDAKTRYPQAQKMLYAILMASRKLRHYFQAHRVTVVTSYPLGQILHNREGIGRVVKWAIELSEFDLHFEPRHAIKSQALADFVAEWTPAPETVSIPEASTNPSQLPHTTHWVMQFDGSLSLQGAVDLVRRCRACQFHAKQIHQPAQALQIIPLSWPFAVWGLDILGPFKRAPGGFEYLYVAIDKFTKWPEAYPVVKIDKHSALKFIKGITARFGVPNRIITDNGTQFTSELFGDYCEDMGIKLCFASPAHPRSNGQVERANAEILKGLKTKTFNILKKHGDSWIEELPAVLWANRTTPSRATGETPFFLVYGAEAVLPSELTLRSPRATMYCEADQDQLRRDDLDYLEERRRRAALRAARYQQSLRRYHQRHVRARSLCVDDLVLRRVQTRAGLSKLSPMWEGPYRVIGVPRPGSVRLATGDGTELPNPWNIEHLRRFYP

SEQ ID NO: 172688 - protein, 421 aa, Oryza sativa
  Clone ID: PAT_MRT4530_707C.1.pep
MAQDAGNAVLPASRFTAEKHMSFVRKYMPEDAAVTATESWLRPRYLERSVHLLSFAMAGLIPPFTSFFHDVLDFHEIHTLHLTPNAVIILAIFVHLCEMFIRVRLSMRLFQYFFIPQLQQPTMVGGCYFQPHVGVMGQYIESHLRKQWDDYKRDWGLWSWGLTAVMVFGDYFRHRIVPLQEQSRGAWAYTRYNDPMRTHVGERREWSEEDARAVGRDRDSILAVMMAVGTARGRGRRATAGGGRDDGAGNSSAGAGGSQVGGSSGGGGSSRVSSSSHGASTGPAADPMAKWKVSGSEPPSPPYRLATAQDALATLERLTQGQAGEIGALRLANDVGPGLHHDAIERLEHVGRRVGISRRWDEKLPATRPALAHRLDETAINLEKLQGEVDADVRSSSASLARAAVEVILASYQVRNSEFLP

SEQ ID NO: 172689 - protein, 503 aa, Oryza sativa
  Clone ID: PAT_MRT4530_70800C.1.pep
MELAAAGRTAAIALLLALAFASSFISAADGARSARHHHAKHAKRNAAHPPSQAPGPAARHAPGPARHHGAPAPHPGRRSPPAPAPANPPSSDPMPGGAPSAAPAAGAATVYDIVKDFGAAGDGVTDDTDALKTAWDTACADDGAGVVLAAAGRSFLIHTTVFTGPCQGSVTLQVDGTIVAPSEPATWPANNKRNWLVFYRADGVSLVGAGLIDGKGQKWWDLPCKPHKGGNTHGPCDSPVAMRFAISNNVTVRGLKVQNSPEFHFRFDNCNGVRVDGLSISSPALSPNTDGIHVENTSDVLITNTVVSNGDDCVSIGAGTLNVHIENVTCGPGHGISIGSLGKAGTKACVANVTVRNAVIRHSDNGVRIKTWQGGSGSVSAVAFENVRMDAVRNPIIIDQYYCLSKSCENETTAVFVNGVSYSGIRGTYDVRGPPIHFGCSDAVPCTNITLSDVELLPASGDTVDEPFCWNVYGNAATPTVPPVSCLSSGFPNYTEKKDLQCY

SEQ ID NO: 172690 - protein, 53 aa, Oryza sativa
  unsure (1)..(53): unsure at all Xaa locations
  Clone ID: PAT_MRT4530_70801C.1.pep
PKYQKKGFKDLSGKLFATIDGFDHAAKIKSVEEAEKYXALKKCAIGDVLVKLG

SEQ ID NO: 172691 - protein, 75 aa, Oryza sativa
  Clone ID: PAT_MRT4530_70802C.1.pep
MAGWWHSVGAGRDGSRGVAGRCTEGYGVGGFDQDGRERDGGSAADGGGDQKGVWQTWTRLGRGWLVRGCREHLRP

SEQ ID NO: 172692 - protein, 54 aa, Oryza sativa
  Clone ID: PAT_MRT4530_70803C.1.pep
ELIHVKKKLRINPWSYFGAILEKNYLLASIQINISNKALICLLTQYKAYIAHII

SEQ ID NO: 172693 - protein, 245 aa, Oryza sativa
  Clone ID: PAT_MRT4530_70804C.1.pep
MNPTNVTYELLEEITDGFSEERKLGEGGYGTVYKGEHKNGDKIAVKILHDTQDFDGKKLQNEFGNLMIVNHPNIVQLVGYCYEIKHTPGLAKGRLALIATIDRALCFEYMPRGSLENYLSDEDDGLDWPIRYKIIKGTCEGLKHLHVEMNPPIYHLDLKPANILLDNNMVPKIADFGLSRFITEEKTMITKNLVGTLPYMPREYIERKEISNKLDIFSLGAVMLDIIAGPTGRFRSTKMPSLEFT

SEQ ID NO: 172694 - protein, 212 aa, Oryza sativa
  Clone ID: PAT_MRT4530_70805C.1.pep
MGAAGAGAGAIRRAACAAADRACAAARGARRALARFAPRPSAFGAAADAEAAAVRAVRNLRTFRFHYAALQWALLLASLAPRHRASMLFLMAASKGLLLYGGLLRVFPNSALLRRLLDRRLVALVFVALVLADLAAAGAIANLLAALAVGVPVIVLHASFRVRDDLEGPSLPSPAAENGEEETAAVVEKKEDGDVEAGPTRRSMAAAPRSPK

SEQ ID NO: 172695 - protein, 123 aa, Oryza sativa
  unsure (1)..(123): unsure at all Xaa locations
  Clone ID: PAT_MRT4530_70806C.1.pep
GVAVLGGGASXXLXVXASXXXSASGGGXXSXWXSSXCXFXVLXVVWXXXVXSXGXXXLLSXXSXPVLFXXXXLXSXXVFWXSCXXXLRXVXWXXGFXSXLSFXCXFLLXSXVXXPFSXXXXXX

SEQ ID NO: 172696 - protein, 455 aa, Oryza sativa
  unsure (1)..(455): unsure at all Xaa locations
  Clone ID: PAT_MRT4530_70807C.1.pep
MGRLLVRPNLPWHRWIQVLAGRRGSLPNDGLRAILTIPTATTVIGRLYKDFTFSLHSHTSSNSSLISLKFSLVVSSWWNRNKVEIRSPEEFGIKSTGTPLNPRARFRTCTGVKQTSQGSVFFSHQQLCRKNRAPSAHPQDGAHVGANPSAARLYHVHHWVSKLLRFDFIVKYKLGRLYVAFVALSHHAHNDDMPALHGMSPQSFNLVNELQVEMNSDLVLYALMDELLASSLAASWALVDGLGTFRCWLYVPSSSPLLVSIVDGIHVDRDEGIKKMLHQFNKNFRTPQARWVIQDEIAVCLPYKCNKTNQLHPAGRLLPLPVPTAWPTTVAMISLRDRLRHWLRSHPLLEYMYNISYRTALKETPFKIVYYRDPPTILSYEAVDTKVAVVAYSKAAHDELLADVRSKLEHAHMVAKKAYDRGHRXPVPFSVGDWAWPCLRHHMPTSLTEGQKGKL

SEQ ID NO: 172697 - protein, 144 aa, Oryza sativa
  Clone ID: PAT_MRT4530_70808C.1.pep
MGCHRPAATAGGRAALPSLSFFLRRPLRLHLSFPTSPAAVASLSFQAARGDDASSVFLQTPSVAGVLSLVIIASFQVLGSAEGHKTAVPAIFVFGDGMLDVGNNNYLPSDAPQADYPYYGIDFPGSEPTGRFSNGYNMADFIGN

SEQ ID NO: 172698 - protein, 59 aa, Oryza sativa
  Clone ID: PAT_MRT4530_70809C.1.pep
PHTIGCGIIFISYSLSASRPKTDSAGFITRVLVVALWYWDWDVNCPELHFSSVGKRGCG

SEQ ID NO: 172699 - protein, 683 aa, Oryza sativa
  Clone ID: PAT_MRT4530_7080C.1.pep
MGLSISYPPDDYLPTEEDTDQMFVRSLSSDNLSTIETFESPPALLDSLSSQRPIIKESFNFKKSEGDPFHVETTVSLMSPKPGKEKSCTHKRTILPRYGSMEYLPPHSPVVGMISPKHQAAAVRVQKVYKSFRTRRQLADCAVLVEQRWWKLIDFALLKHNSVSFFEEEKPESALSRWSRARTKAAKVGKGLSKDEKAQKLALQHWLEAIDPRHRYGHNLHYYYQHWLHCESKQPFFYWLDVGEGKDVSMEDHCPRWKLLQQCIRYLGPKEREFYEVVIENKKLLYKMSRKIVDTSEGPKNSKWIFVLSTTRVLYIGTVPFLSIKQLVNIGICHLSIVHIQYMNHNSETSPITDEMDTFLQKSKGTFQHSSFLAGGATSAAGRLVVDNGILKVHGTADYVVLFLGLHSSKDTFSDSVIHLSQAVWPHSGHYRPTEANFREFMMYLKKRNVDLANIKLSPSEDEEDECLRSRSGRSQLEPTEPGKPEKEEDATADDNGTTTVAAQAAPPSTTGGEPATPVMKRSSSGNRLQRKRPPRLTLDKSRLAKGVAEQDAGSFGDRLDFCKVNLFRGGEEAEEAVVVPQEKILRRLNSRMTMNSYQLGKQLSLRWTTGAGPRIGCVRDYPPELQFRVMEQISLTPRGGAGPLRLGSTATPRQSPCAPLPSPAPLYAAAGTPTSLLQHGAA

SEQ ID NO: 172700 - protein, 105 aa, Oryza sativa
  Clone ID: PAT_MRT4530_70810C.1.pep
CVFQEMTKWMGYMSPKIKTSVLPLQNKKGWFVPQLSESRFPWDLHKDKGLCFNKQGLASPHGGLFVSDGLKGSAGAPEVAPSRLEHESKFPFKYNLLKKKIILFR

SEQ ID NO: 172701 - protein, 118 aa, Oryza sativa
  Clone ID: PAT_MRT4530_70811C.1.pep
YNPAKIRPENQQIRWNTASSSCVRFMISSARDKCLEAVEPIQLHGKPWLHHLLAHNHPDGSGSYRCTADVLRLFARLLHLHYFHWACCCQLVDLQAFTGHLRRQDSICRSHGFVTLSR

SEQ ID NO: 172702 - protein, 137 aa, Oryza sativa
  Clone ID: PAT_MRT4530_70812C.1.pep
MAICHWFKFAHSCHYCVDCVLTVNSKYTGESQGQIEVHCVVKYGYMDTWVTPPGVGRIWAMLVRSTTAEITVPLCPSLLTLVPLVLGLLLSFGPLIPDFLLGRCLSLGAQPGMHLYEAHPYSPALSIPHGQVQKSIV

SEQ ID NO: 172703 - protein, 44 aa, Oryza sativa
  Clone ID: PAT_MRT4530_70813C.1.pep
AMMNRCDLGFQMLTTMSHIVLTSVAGVAIEQPKHPMKHRGLSHE

SEQ ID NO: 172704 - protein, 304 aa, Oryza sativa
  unsure (1)..(304): unsure at all Xaa locations
  Clone ID: PAT_MRT4530_70814C.1.pep
AAPPPPPRPPLPPFQTLARGLLPRIAARPVPRRFSTASCSSTLFRVGECGAPGATAIPEAERGEEEEREGEDGGEADAAVEVAAGRHDTDAYAAVELALDSVVKVFTVSSSPNYFLPWQNKAQRESMGSGFVIPGRRIVTNAHVIADHTFVLVRKHGSPTKYKAEVQAVGHECDLALRKVDSEEYWDGMNSLELGDVPFLQEAVAVVGYPXQGGDNISVTKGVVSRVEPTQYAHGATQLMAIQIEAAINPGNSGGPAIMGDKVAGVAFQXNLSGAENIGXIIPVPVIKRFISGVEAAAVTYSGF

SEQ ID NO: 172705 - protein, 49 aa, Oryza sativa
  Clone ID: PAT_MRT4530_70815C.1.pep
DVSLHPPPPINRAQKVQGENNGSPVSCFSSIWALDAPKVRSVPMKRGLL

SEQ ID NO: 172706 - protein, 96 aa, Oryza sativa
  Clone ID: PAT_MRT4530_70816C.1.pep
MPFCHQLGGTEIGIAFSAHRQQPPPPPPVACRLPLPPPQPAAGRRLRARPRPPLAAASATIRCRQPPPPSHTACQPPLPLPVPAWLLACRSPAPCR

SEQ ID NO: 172707 - protein, 560 aa, Oryza sativa
  Clone ID: PAT_MRT4530_70817C.1.pep
MAFPAPSSSSPRRRGRGLAYLLVSVLLLASRVPGAAGADSEFEDGVSPKFPGCDNPFQKVKVTYWVDGDERSSLTGITARFGEVLPATGSDGDKRKAVVPAPKTGCAKSSAPLASSIAVAERGECTFLEKAKTAESGGAAALLLINDEDDLQKMVCTQNDTVPNIGIPVVMVSQSAGRKILSGMDGGAKVDILMYAPEKPSFDGAIPFLWLMAVGSVACASVWSFVVVGDEDKNAPTLGGEEAADSEIVELQTKTALVFIVTASLVLLFLFFFKSTWSAWLLVVLFCLSGLQVARGSDEGPSLPMVLKMPKEFDTWNGYDMIGFGDILFPGLLVAFSFRYDRANGKDLTDGYFLCLMIGYAFVAFGSWCRHESAGEEGPGRPSDSSKLTDGNMNGTAVGVPLQEEVLQGGKEVPVEHGVQSGGVNSSETGEIDTKVQDPVVTDDTASVPDERNLPVSSDSSDNLQKTNEGSCDLYHGHWVFDSSGPLYTNNSCPIITQMQNCQGNGRPDKDYENYSEGGVDRFPHFSHRSLVVSSPPPSHLVSKISLMRSGRGVWILVPP

SEQ ID NO: 172708 - protein, 86 aa, Oryza sativa
  Clone ID: PAT_MRT4530_70818C.1.pep
HTCTHVYILIFIMVPGYILTETDTPTTCKKVQATDIAMMFSLTSFIFRVCLDFAITEKYSLYSIINGTRQYSYLNLNSLFFFPKKE

SEQ ID NO: 172709 - protein, 67 aa, Oryza sativa
  Clone ID: PAT_MRT4530_70819C.1.pep
LGATPHCIVHIPSPPCHIAPHVSYFPVSSAHITGTPCIRHGCLTHISQHTPYYTKPFLARTIASLAQ

SEQ ID NO: 172710 - protein, 1969 aa, Oryza sativa
  Clone ID: PAT_MRT4530_7081C.1.pep
MAEQAKVHDLSPSVSGDDGEPNPRRRARTPPPPPHQNPKQGEALERVEKSAASPVAGGAGERRDGERRLLVYGDGSTPQGALQAVGALLRHPPVVPDPESPAQRWLDDVANLVMTAQQRLGAGGRSATTKTSGAATTGSASSRRRARRAAAVARHSAATPSSAPPTREDRHGEPDARLDIERRRNSRRTPHATEGASSSRVSPRQGREDQPSMPPAGGVGCRAFVASLRNVRWPPRFRPTITEKYDGSVNPTEFLQVYTTGIEAAGGDDRVMANFFPMALKGQARGWLMNLPPASVHSWEDLCQQFTMNFQGTYPRPGEEADLHAVQRGDDESLRSYIQRFCQVRNTIPCIPAHAVIYAFRGGVRHNRMLEKIASKEPQTTAELFQLADRVARKEEAWTWNPSGSGVAASAAPGSAAQTGRRDRRRKKRSVHSGDEGHVLAVEGVPRATRNGRPASDKKKEAGTPSRERPASKWCSVHNTSLHDLADCRAVKNLAERTRKWEEDRRQERREGKSAAVPSGKRRSEAKQKAPAVDIDDGDDDLGFQEPGATIATVDGGACAHVSRRSFKAMRRELLAAAPTHEATRRARWSEVALTFDQTDHPPPRGWCFSRLNRSSLVRGAHMAANFRTERVNFDVADLSLPYNAVLGRPALVKFMAAVHYAYLQMKMPGPGGPISVRGDLKVALACMEQRADHLAAATKPEGGDERLGTSAPTAPRQRIATCDEVPEGALVSFLRANADVFAWRPADMPGVPREVIEHRLAVRPGARPVRQKVRRQAPERQAFIREEVARLLEAGFIREVIHPEWLANPVVVPKANGKLRMCIDYTDLNKACPKDPYPLPRIDQIVDSTAGCDLLCFLDAYSGYHQIRMAREDEEKTAFITPVGTYCYTSMPFGLKNAGPTFQRTTRISLGSQIGRNVEAYVDDLVVKTRNQETLLSDLAETFENLRSARIKLNPDKCVFGVPAGKLLGFLVSARGIEANPEKIRAIERMRPPSKLRDVQCVTGCMAALSRFISRLGEKALPLFKLLKRSGPFTWTEEAEHALTQLKAYLSSPPVLVAPEPNEPLLLYLAATPQVVSAALVVERDEDNPHFVHPHSVLTWPGSERGAEAPESDGGLRPQTTGVGPLPACQTVLSAPDPQEGPKATAGRPHLTPFGPEANPVLTRPGRKQGEEAPEPNGGLRPLTTGVGPLPACLTTPGASDPQDGPEATEGRPPLSSSDPEVIGTEDKCAPKGHLNEERPGDTAPSKEDRPHRRVQRPVYFVSEALRDAKTRYPQAQKMLYAILMASRKLRHYFQAHRVTVVTSYPLGQILHNREGTGRVVKWAIELSEFDLHFEPRHAIKSQTLADFVAEWTPAPETVSIPEASTNPSQLPHTTHWVMQFDGSLSLQGAGAGVTLTSPTGDVLRYLVRLDFRATNNMAEYEGLLAGLRVAAGLGIRRLLVLGDSQLVVNQVCKEYRCSDPQMDAYVRQVRRMERHFDGIELRHVPRRDNMIADELSRLASSRAQTPPGAFEERLTQPSARPDPLGETDAPDRPPRPVGVQASGPEGSAPSSLRLIAWISEIQTYLTDKTLPEDREGSERVQRISKRYVLVEGTLYRRAANGILLKCIPQEQGVELLADIHEGECGAHSASRTLVGKAFRQGFYWPTALNDAVDLVRRCRACQFHAKQIHQPAQALQIIPLSWPFAVWGLDILGPFKRAPGGFEYLYVAIDKFTKWPEAYPVVKIDKHSALKFIKGITARFGVPNRIITDNGTQFTSELFGDYCEDMGIKLCFASPAHPRSNGQVERANAEILKGLKTKTFNILKKHGDSWIEELPAVLWANRTTPSRATGETPFFLVYGAEAVLPSELTLRSPRATMYCEADQDQLRRDDLDYLEERRRRAALRAARYQQSLRRYHQRHVRARSLCVDDLVLRRVQTRAGLSKLSPVWEGPYRVIGVPRPGSVRLATGDGTELPNLWNIEHLRRFYP

SEQ ID NO: 172711 - protein, 111 aa, Oryza sativa
  Clone ID: PAT_MRT4530_70820C.1.pep
WTGSPPLSPAAVPHPPPQPRPPRWRWRRRGTRRTSASGSRRSSSSRTTPTTTPFPPPPPPPRRVSPTTAAAPSPRRRWRRGARAATPPLTPPPRSAGGRRQRRRRGARGRP

SEQ ID NO: 172712 - protein, 352 aa, Oryza sativa
  Clone ID: PAT_MRT4530_70821C.1.pep
MVASETNQKAAAAGSSIPEGARQLLHELAAGWGDVADCRALEVVPLRGAMTNEVYQARWPPAAEAEAAGRRVLVRVYGEGVELFFDREAEVRTFESMSRHGHGPRLLGRFPNGRVEEFIHARTLSAVDLRDPEISAIIASKLREFHNLDMPGPKSVLIWDRLRNWLKTAKNLCPSDEAKEFCLDSMENEITALENELSEDYQCVGFCHNDLQYGNIMIDEETKLLTIIDYEYASFGPVAYDIANHFCEMAADYHSEKPHILDYTKYPDTDEQKQFVQSYLSSSGEEPDAEKVNNLIKSIEKYTLASHLIWALWGIISEHVNDIDFDYMGYARQRFEQYWLKKPAILTCQVVE

SEQ ID NO: 172713 - protein, 84 aa, Oryza sativa
  Clone ID: PAT_MRT4530_70822C.1.pep
SGSQRPPRSEGRGHATGGSKLDSYLLRKSRGGGADAMEDETAIGAILSNLSEGGLRENDAKTTTAARGGRRMMDFALDLVGYDG

SEQ ID NO: 172714 - protein, 81 aa, Oryza sativa
  Clone ID: PAT_MRT4530_70823C.1.pep
MARGSQSDGAGGGEPNASEAGGAASRWLGWSRSARVGGGRVVASEGMPVETVGGEQRSPVIVEPAFIDATARKRYRRCYRQ

SEQ ID NO: 172715 - protein, 151 aa, Oryza sativa
  Clone ID: PAT_MRT4530_70824C.1.pep
MAREIAAVAVDSRLWLDRRPTGLPASPVRPAAVAVDVPRASRPHASYTQACAHWCYITCICGPHAARSGHMGRGQSRSAPPLGAISGGSPSLRVRPNGGRPVAVPYVGRAGLADRPRSPNPPQPQPSREIHPRIELGKIDQNLPGKIPLPA

SEQ ID NO: 172716 - protein, 139 aa, Oryza sativa
  Clone ID: PAT_MRT4530_70825C.1.pep
MPPAASIGTTASIRCGAGRRAFGHGRHRQGWPVDRTVAIVEGRNQEAAVEEIQGDGDEDSAIGGSALGRRSLNHSRDIEKLVHLEINYSVYGRILRHEGRLLTAADHTCEEWHPEDNRTTAVARQWGSNMASLEQHRLS

SEQ ID NO: 172717 - protein, 416 aa, Oryza sativa
  Clone ID: PAT_MRT4530_70826C.1.pep
MAAAAAAAAAAASTARGGHRPWTAASRGVSARRCSVAPAQVRARGPTEWWPAAARRRRAPRRHAVAAKAGAADARPSSSSDAVSYSSSISTDMPLYEPTGVSFDEYLLDRARVFRAMFPDESRSQRLSDEEWRVQMLPLQFLLLTVHPVVVMQLRHRDGVLDLRIQPLNRVRAMCLFVCLFGPEGAAQTEWELRGLERDYAPASFDLGVRGSLYADRSRGRRACRLRGHLEISIGCVLPPPMRLVPGAVMRGVAESVLQRLAEKMKQDVDVGIVADFQRFRREKAAAAAAATGKRTRERKIGDASSSAQSARRAPDMTLSAASKGVSAPPGLPVPGNVGDDPLPNPGVNGPTADGAFAAGVVPPAMELPMCYYVSETEQMVDRFLQTFRECCPRERGKMLTFLRRRIALNLKPRKN

SEQ ID NO: 172718 - protein, 42 aa, Oryza sativa
  Clone ID: PAT_MRT4530_70827C.1.pep
MELGTNGLYLASVMAALDSPVVQLSIKNASQPALPNRPITIC

SEQ ID NO: 172719 - protein, 46 aa, Oryza sativa
  Clone ID: PAT_MRT4530_70828C.1.pep
SNHGNRSCRGVRYRKTPGRGNPEPDGLGNPGFHSSLYHGRPTVLLY

SEQ ID NO: 172720 - protein, 190 aa, Oryza sativa
  unsure (1)..(190): unsure at all Xaa locations
  Clone ID: PAT_MRT4530_70829C.1.pep
IFLLYTVFALNRYISNYTPLLLNTNFSSTSNSHQNFKFELDCLLRDGFVDIVKEIWLNVVNDNTTSERWXAKIRRQFLRGPKXTSDIYKKENVLLEXFDFLDXSTLLTQEDLDSRLYLRDRVSCLLREEKIKXYQRDKTKXILKGNLNTKYFHLVANGLLALPEASSLTLDESQISDISQVSQLENNALV

SEQ ID NO: 172721 - protein, 1346 aa, Oryza sativa
  unsure (1)..(1346): unsure at all Xaa locations
  Clone ID: PAT_MRT4530_7082C.1.pep
MAEQAKAHDLSPSVSGDDGEPNPRRRARTPPPPPRQSPKRGEALERVEKSAASPVAGGAGERRDGERRLLVYGDGSTPQGALQAVGALLRHPPVVPDPESPAQRWLDDVANLVMTAQQRLGAGGRSATTKTSGAATTGSVSSRRRARRAAAAARHSATTPSSAPPTREDQHEEPDARLDIERRRSDRRTPRATEGASSSRVSPRHGREDQPSVPPVGGVGCRAFVASLRNVRWPPRFRPTITEKYDGSVNPTEFLQVYTTGIEAAGGDDRVMANFFPMALKGQARGWLMNLPPASVHSWEDLCQQFTMNFQGTYPRPGEEADLHAVQRGDDESLRSYIQRFCQVRNTIPCIPAHAVIYAFRGGVRHNRMLEKIASKEPQTTAELFQLADRVARKEEAWTWNPSGSGVAASAAPGSAAQTGRRDRRRKKRSVHSGDEGHVLAVEGAPRATRKGRPASDKKKEAGTPSRERPASKWCSVHNTSLHDLADCRAVKNLAERTRKWEEDRRQERREGKSAAVPSGKRRSEAKQKAPAADIDDGDDDLGFQEPGATIATVDGGACAHVSRRSFKAMRRELLAAAPTHEATRRARWSEVALTFDQTDHPPCVARGGQIAMVVSPTICNVKLGRVLIDGGAALNILSPAAFDAIKAPGMVLQPSQPIIGVTPGHTWPLGHIDLPVTFGGSANFRTERVNFDVADLSLPYNAVLGRPALVKFMAAVHYAYLQMKMPGPGGPISVRGDLKVALACMEQRADHLAAATKPEGGDERLGTSAPTAPRQRIATCDEVPEDALVSFLRANADVFAWRPADMPGVPREVIEHRLAVRPGARPVRQKVRRQAPERQAFIREEVARLLEAGFIREVIHPEWLANPVVVPKANGKLRMCIDYTDLNKACPKDPYPLPRIDQIVDSTAGCDLLCFLDAYSGYHQIRMAREDEEKTAFITPVGTYCYTSMPFGLKNAGPTFQRTTRISLGSQIGRNVEAYVDDLVVKTRNQETLLLDLAETFENLRSARIKLNPDKCVFGVPAGKLLGFLVSARGIEANPEKIRAIERMRPPSKLRDVQCVTGCMAALSRFISRLGEKALPFSPPVLVAPEPNEPLLLYLAATPQVVSAALVVERDEDNPHFVHPHSVLTWPGSERGGEAPDSDGGLRPLTTGAGPLPACQTVLGAPDPQEGPKATAGRPHLTPFDPEANPVLTRPGKEQGEEAPEPNEGQRPLTTGVGPLPACPTMPGAPDPQDGPEATEGRPPLSSSDPEVIGTENKCAPKAHLNEEPPGGTAPSREDQPHRRVQRPVYFVSEALRDAKTRYPQAQKMLYAILMASRKLRHYFQAHRVTVVTSYPXGQILHNRE

SEQ ID NO: 172722 - protein, 509 aa, Oryza sativa
  Clone ID: PAT_MRT4530_70830C.1.pep
MASSASVSPAAASHHRLLLPCSPRRLPRPRPRPRPRLLRSARPRLVACHADTLLPSSSPAAAAAACASTASANGFSDWLREHGLPPGKVAILDRPVPCFREGKDLPLHYVAAGQDLEAGDVAFEVPMSLVVTLERVLGDESVAELLTTNKLSELACLALYLMYEKKQGQDSFWYPYIKELDRQRGRGQLAVESPLLWTESELNYLKGSPIKDEVVARDEGIRREYNELDTLWFMAGSLFQQYPFDIPTEAFPFEIFKQAFVAVQSCVVHLQKVSLARRFALVPLGPPLLTYKSNCKAMLTAVGDSVRLVVDRPYKAGEPIIVWCGPQPNSRLLLNYGFIDEDNPYDRIVIEASLNIEDPQFQEKRMVAQRNGKLAIQNFHVCVGKEKETIAEMLPYLRLGYISDPDEMQSILSSEGDTCPVSPCTERAVLDQLVGYLESRLADYPTTLDEDDAMLADGNLEPKKEVATRLVRLEKKLLHGCLQAANEFINDLPDHTVSPCPAPFAPELK

SEQ ID NO: 172723 - protein, 70 aa, Oryza sativa
  Clone ID: PAT_MRT4530_70831C.1.pep
PRPTPPPPTSCCGWRQHDFLSFTGASPQALLRTGGVRGKMRRRGRIEEGTDDEPSRRRRTSFRAPSRPAR

SEQ ID NO: 172724 - protein, 172 aa, Oryza sativa
  Clone ID: PAT_MRT4530_70832C.1.pep
MDGAYIVSEPDNQLVVDNRVVFLLKYELVEIRDDARSLLPTSPKEEGDGEIGSKYAAAKDRSYAALCGCHVGAAPRAESPRENVKGSHVGRGPGLPPPRDPKAGAAPAIAPGRPPPPTSQLIRVKVRATVTRGNEKPHADRLISLRKNVYVNLYLWSVYVLQNFGRKKFEII

SEQ ID NO: 172725 - protein, 652 aa, Oryza sativa
  Clone ID: PAT_MRT4530_70833C.1.pep
MRIPTTETETGTGTRIPSHRRRKGSSDGSRARADASRRGPTPTKETEIPGRPLKRSSSTLSLDDAAGASNPTSTWAILNRYGARRDSFRGDDRDRTTSAVSYTSGGDQISVSFELVKPPETSLLTLDWPQGPRPSAGTTSYPYVIAAHDNVVLFQIISPDKYARPSAIDYFVYNANSSSSSNHHPSLTRLPVSYWRRRDTLRPRIMSREGTCILSCSNNSPSFVVAELERRSCQSSETNIYLFASGSASGRVFRNVPIRHGDGLAHLCWWTTDAVLSYHNRYMIWVDYLVAGMIVAKVAHPGRVDPPEPVLWYVPLPVDPVDGNPYDIDRGRGCPQASRSVCATHHGIKFVNVNQHGGGSSSSSSSSRSFSITLWSWREEDQTWGEDATLDADQLRDLDSENRLPNIQPEFPVVDMENPYAVCFLLNERYHTADPNATTWMIKVHMKKKVLLDCTGYSNKGSPSTARRMSEGLSFISSEMPSYLSRKTIKRFLEGPLWPATHDAIEIEENGKMGFPKKQKKYTGRGSEKETPNLLRKKNERATVLTVVPRYTDAEDERHLENAMTSNSSAEKNPTNSVHDFGFSVCYLQDLLTVMLCDEAHYKMVSKPDPGIQLKLQKHGVAYTQRSSDANAATNTPGQQCRRDDSRCKITK

SEQ ID NO: 172726 - protein, 60 aa, Oryza sativa
  Clone ID: PAT_MRT4530_70834C.1.pep
SSWSSSQLPLPPVSTALASGSSPSPSLTPLPFSFAAVAFTKPSAEARPRASKVTSLSLPS

SEQ ID NO: 172727 - protein, 52 aa, Oryza sativa
  Clone ID: PAT_MRT4530_70835C.1.pep
SCGALQHAQAQNQCYIYIPLLKGELLQFCQICCFESIFLSNLIYLSEECNLM

SEQ ID NO: 172728 - protein, 81 aa, Oryza sativa
  Clone ID: PAT_MRT4530_70836C.1.pep
MSMITVKVKTLTGKEVEVSIEATETVARIKEQVEAAEGIPPPQQTLIYGGRQLADDMTAEMCDLRHGSELHLVLALRGGLL

SEQ ID NO: 172729 - protein, 139 aa, Oryza sativa
  Clone ID: PAT_MRT4530_70837C.1.pep
FDSYVEARPNCRGIILLPPETPEMRRGESKAATRGANRSSSSSSWKSRYIGYGLVLGFVLMLLYLMVNAQFSNSPNAYLGPATTSKTESIPATTYQGNQAWQVYGSRGLEEGHREEVASTHTERSTRQEKDDESEKQQT

SEQ ID NO: 172730 - protein, 75 aa, Oryza sativa
  Clone ID: PAT_MRT4530_70838C.1.pep
RQLLLHHHHHQQQQLRRRRPSYSPRPPIPRPEPVPGVSILRWRERERERFHASRWRRLTRSSDLAAAAEVTGFDS

SEQ ID NO: 172731 - protein, 163 aa, Oryza sativa
  Clone ID: PAT_MRT4530_70839C.1.pep
MRTYPLAARRTPRRSPCRLPRLCATPSPLDGVLAAPVRLCVVASLADLRESRRGILERMGLGRPEGRGEGDRRRRDPKKCVVCSCALAPSTASTAVKQVRRQIGKRRLAVAAGEGERGSRRDGNNGRGEEVADVTVMRSKGEEKRGKEKREEEREEEEGKEKG

SEQ ID NO: 172732 - protein, 2027 aa, Oryza sativa
  Clone ID: PAT_MRT4530_7083C.1.pep
MAEQGKAHDLSPSVSGDDGEPNPRRRARTPPPPPRQSPKRGEALERVEKSAASPVAGGAGERRDGERRLLVYGDGSTPQGALQAVGALLRHPPVVPDPESPAQRWLDDVANLVMTAQQRLGAGGRSATTKTSGAATTGSASSRRRARRAAAAARHSATTPSSAPPTREDQHEEPDARLDIERRRSDRRAPRATEGASSSRVSPRHGREDQPSVPPVGGVGCRAFVASLRNVRWPPRFRPTITEKYDGSVNPTEFLQVYTTGIEAAGGDDRVMANFFPMALKGQARGWLMNLPPASVHSWEDLCQQFTMNFQGTYPRPGEEADLHAVQRGDDESLRSYIQRFCQVRNTIPCIPAHAVIYAFRGGVRHNRMLEKIASKEPQTTAELFQLADRVARKEEAWTWNPSGSGVAASAAPGSAAQTGRRDRRRKKRSVHSGDEGHVLAVEGAPRATRKGRPASDKKREAGTSSRERPASRWCSVHNTSLHDLADCRAVKNLAERTRKWEEDRRQERREGKSAAVPSGKRRSEARQKAPAVDIDDGDDDLGFQEPGATIATVDGGACAHVSRRSFKAMKRELLAAAPTHETTRRVRWSEVALTFDQTDHPLCVARGGQIAMVVSPTICNVKLGCVLIDGGAALNILSPAAFDAIKAPGMVLQPSQLIIGVTPGHTWPLGHIDLPVTFGGSANFRTERVNFDVADLSLPYNAVLGRPALVKFMAAVHYAYLQMKMPGPGGPISVRGDLKVALACMEQRADHLAAATKPEGGDERLGTSAPTAPRQRIATCDEVPEDALVSFLRANADVFAWRPADMPGVPREVIEHRLAVRPGARPVRQKVRRQAPERQAFIREEVARLLEAGFIREVIHPEWLANPVVVPKANGKLRMCIDYTDLNKACPKDPYPLPRIDQIVDSTAGCDLLCFLDAYSGYHQIRMAREDEEKTAFITPVGTYCYTSMPFGLKNAGPTFQRTTRISLGSQIGRNVEAYVDDLVVKTRNQETLLSDLAETFENLRSARIKLNPDKCVFGVPAGKLLGFLVSARGIEANPEKIRAIERMRPPSKLRDVQCVTGCMAALSRFISRLGEKALPLFKLLKRSGPFTWTEEAEHALTQLKAYLSSPPVLVAPEPNEPLLLYLAATPQVVSAALVVERDEDNPHFVHPHSVLTWPGSEQGGKAPVSDGGLRLLTTGVGLLPACQTVLGAPDPQEGPEATAGRPHLSPFGPEANPVLTRPGRKQGEEAPEPNGGQRPLTTGVGPLPACPTMPGAPDPQDGPEATEGRPPLSSSDPEVIGTEDKCAPKGHLNEERPGDTAPSREDRPHRRVQRPVYFVSEALRDAKTRYPQAQKMLYAILMASRKLRRYFQAHRVTVVTSYPLGQILHNREGTGRVVKWAIELSEFDLHFEPRHAIKSQALADFVAEWTPAPETVSIPEASTNPSQLPHTTYWVMQFDGSLSLQGAGAGVTLTSPTGDVLRYLVRLDFRATNNMAEYDGLLAGLRVAAGLGIRRLLVLGDSQLVVNQVCKEYRSSDPQMDAYVRQVRRMERHFDGIELRHVPRRDNMIADELSRLASSRAQTPPGAFEERLTQPSARPDPLGETDAPDRPPRPVGVQASGPEGSAPSSLRLIAWISEIQTYLTDKTLPEDREGSERVQRISKRYVLVEGTLYRRAANGILLKCIPQEQGVELLADIHEGECGAHSASRTLVGKAFRQGFYWPTALNDAVDLVRRCRACQFHAKQIHQPAQALQIIPLSWPFAVWGLDILGPFKRAPGGFEYLYVAIDKFTKWPEAYPVVKIDKHSALKFIKGITARFGVPNRIITDNGTQFTSELFGDYCEDMGIKLCFASPAHPRSNGQVERANAEILKGLKTKTFNILKKHGDSWIEELPAVLWANRTTPSRATGETPFFLVYGAEAVLPSELTLRSPRATMYCEADQDQLRRDDLDYLEERRRRAALRAARYQQSLRRYHQRHVRARSLCVDDLVLRRVQTRAGLSKLSPMWEGPYRVIGVPRPGSVRLATGDGTELPNPWNIEHLRRFYP

SEQ ID NO: 172733 - protein, 62 aa, Oryza sativa
  Clone ID: PAT_MRT4530_70840C.1.pep
KKGGYFLFFNKAKGWDSPIPCKVCFSNQVKKVKGALFNPWGGGPPGPLGGAKSGFFGGSRFP

SEQ ID NO: 172734 - protein, 86 aa, Oryza sativa
  unsure (1)..(86): unsure at all Xaa locations
  Clone ID: PAT_MRT4530_70841C.1.pep
LVGCERMILMVVLMTIKDRFTIFSCXTLTVPTTSQRGQRLYFLYSMVHCGAPDCEVAEISPRGSLGSPCLVYKGVIMIQERCTTLN

SEQ ID NO: 172735 - protein, 55 aa, Oryza sativa
  Clone ID: PAT_MRT4530_70842C.1.pep
EPEVFLLIYLIGAVLIEMQRLVDLMLSSPCSMKHYLFLFKKKKKKLETSSLSPSC

SEQ ID NO: 172736 - protein, 190 aa, Oryza sativa
  Clone ID: PAT_MRT4530_70843C.1.pep
STTREKEKTLEKKSSIAACDSGRRRRRHRHRRRHLLPPLYSPDLHTPACFAPVPCPKLADHLRLKQARVVVGGRGALAAPSAGTISSPGAVSPCWIRSRASTFFILVEPSHLGIYRCCLYTVILIEFTMDKDWMKTSRSSAEYNIGVDKFIEFALSNSENLITNQQSLNQETFMLQCHWHPNKMTHLQMT

SEQ ID NO: 172737 - protein, 77 aa, Oryza sativa
  unsure (1)..(77): unsure at all Xaa locations
  Clone ID: PAT_MRT4530_70844C.1.pep
NFCRSVFEQDLHIGMSTSSGQAMVSVSTGVMNCLLAKLATLIDEEHVKFSNIPXEVGFLRDELRTMKAFLEILAXKX

SEQ ID NO: 172738 - protein, 70 aa, Oryza sativa
  Clone ID: PAT_MRT4530_70845C.1.pep
WIPGLQVFFFFFFFFFFFFFFLLLMDTNVASLEIDHVIHYILQRSCYPSIIIRRCQQFINPFVKAQNQSH

SEQ ID NO: 172739 - protein, 976 aa, Oryza sativa
  Clone ID: PAT_MRT4530_70846C.1.pep
MAATVPAAAGPDDLTACEAAAESSQLLGWPIDSAQDFEQEMEGNGIMVSAATGAMNSLLAKLAALLEEDYQMHKGMKREIAFLKDELSSMNALLEGLADTEATLDPQTKEWRSQVREMSYDIEDCIDEYTRQLRHGRPQRPGGNGIMGFFSGYVQKVKDLVGRHEIAEQIQELKARIVEAGQRRKRYKLDSAVNCKSNHVVPIDRRLPALYAELDALVGIDGPRDEIIKSLDDGEQRMKVVSIVGSGGLGKSTLANQVYQKIGNQFDCKAFVSLSQHPVMGMIFETILYQVNDEVGTIRSGDKEQVINELRAFLKNKRYFIVIDDIWSAQAWKTIRYSLLENNCGSRILVTTRIGTVAKSCSSPCLNLVYELRVLSEDDSKRLFFRRIFGSEDKCPHQLKDIAVEIVRKCGGLPLAIISMASLLTTKSYVRAEWFKVRDSIGSGIEKNSDVEEMNMILSLSYYDLPHHLRTCLLYLSMFPEDYVINRDYLVRRWVAEGFIKANGGRTFEEEGECYFNELINRSMIQPVHTQYDGRVYSCKVHDMILDLIISKATEENFVTIVTDRKQMLVSKDKVHRLSFYNYGQEDVTLYSMVTTHVRSLNIFRYSEQMPPLSNFPALRMLDLDGNNNLESSYLEDIGKLFQLRYLRIRASNISLPDQIGELQFLVILDLLNCIGISKLPASIVILRHLKCLVVHRVELPDGVGNLQALEYMSLVVVDYSTSVSSLQELGTLTKLRTLGLDWRIGDFHKEKLTYADNFVSSLGKLGRSNLQYLTLISPWSLDFLLDSWSPPPHLLQRLGITGWYLSRIPVWMASLADLTYLDIEVKVRQETLQILGNFPALQFLELYSNAADYGDRWLTVSNCGFRCLQKFKFVHWMNLVFEEGAMPMLETLEFQIIAHEARTECGFGPPDLGICHLSSIRNLIINIYCECARIEDVEALEAAIWLAASTLPNHPTLTLHRFREAEMVKNNQGNL

SEQ ID NO: 172740 - protein, 80 aa, Oryza sativa
  Clone ID: PAT_MRT4530_70847C.1.pep
NRHEVFSRSPRASPPYLLAPFSLSSTSFASPRVSSRSPLATTRHAMGAADDANHRHEEASPLLPPGGGGAGAGGKKLNQS

SEQ ID NO: 172741 - protein, 185 aa, Oryza sativa
  Clone ID: PAT_MRT4530_70848C.1.pep
ASAAHRAAIDFRILLRSRTPSPLPPLRRCRRPSLPLDEGGDRGLAPSPSRTATHQVRDAVGDKGRNGGLAPCHHRPLRLPVMENLPPHSNHAHHRSAPLTGNLHHCHHPRPTGAIGACLADCHWAWPLPPSTSPPLRRSPEPGETHRAALSLGRGLRRKPCRQPSGPALSGDLLERWQVEKRRRR

SEQ ID NO: 172742 - protein, 67 aa, Oryza sativa
  Clone ID: PAT_MRT4530_70849C.1.pep
NKVRLLHSTKNIKICQRVSGKNIQFPFCIQCACYMEFPLQKTAQSILHLCITDANFSSIYINEAKDS

SEQ ID NO: 172743 - protein, 134 aa, Oryza sativa
  Clone ID: PAT_MRT4530_7084C.1.pep
MGHSLYLYAAERSCANATGGSVLLGPVLGHYTAGPRQEGGIVAVARPLHAGRHPRLLPLQCNEKLDGEALWVGLDGGAPWVGLDGDGAQRAAASDRLRPPRWQPHFSLSVRACWPVRKDDRAHLSGRRGYNQQR

SEQ ID NO: 172744 - protein, 379 aa, Oryza sativa
  Clone ID: PAT_MRT4530_70850C.1.pep
MIMLWLPAAVSLLLSSSLHVAGDAGGGVASLSVRRYDAIFSFGDSLADTGNNPVVFDWYSIFDPVTRPPYGSTFFGRPTGRNCDGRLVLDFVAERLGLPLVPPFLAYNGSFRHGANFAVGAATALDSSFFHGAGDPPGASPFPLNTSLSVQLSWFDSLKPSLCSTTQECKDFFGRSLFFVGEFGINDYHSSFGRRSMQEIRSFVPDIIRTISMAVEKLIGDGATTVVVPGMIPSGCSPPVLVTFADAGAAEYDASTGCLREPNEVATLHNSLLLDAVEELREKHPDVAIMHTDLFRHVSEMVQNPDKFGFQKDVLSVCCGGPGKYHYNTRIICGDEGATTCVDPSKSLYWDGVHLTEAAYHYIADDWLHAITLSARATS

SEQ ID NO: 172745 - protein, 169 aa, Oryza sativa
  unsure (1)..(169): unsure at all Xaa locations
  Clone ID: PAT_MRT4530_70851C.1.pep
MGGEKGVGRRGKARRRRPPADESLFLVRQGLYXTQGYKLCTRGPCNXIYRSIQLLSAHRHPLYRGFYLSFSGIWXHLTRGCIGSVRSPAKXKSYVPSGPGESVIYVGVVQGCIXVHSTSWIALVWMIYLPTYLSYVSINLILAYXFSSIGCFSLXGFCRYRLNRVARLD

SEQ ID NO: 172746 - protein, 366 aa, Oryza sativa
  Clone ID: PAT_MRT4530_70852C.1.pep
MAAVNTVSSLPCSKAGAAVAGGAPRPSTCSVFYPPRCWSKRSSGNGVRAQASTTETTAAPAAEVTTKVEKVSKKQVDGVVTNKYRPKEPYTGRCLLNTRITGDDAPGETWHMVFSTDGEIPYREGQSIGVIPDGIDKNGKPHKLRLYSIASSAIGDFADSKTVSLCVKRLVYTNDQGEIVKGVCSNFLCDLKPGSDVKITGPVGKEMLMPKDPNATIIMLGTGTGIAPFRSFLWKMFFEEHDDYKFNGLAWLFLGVPTSSTLLYREEFERMKEIAPERFRLDFAVSREQTNAAGEKMYIQTRMAEYKDELWELLKKDNTYVYMCGLKGMEKGIDDIMIDLAAKDGIDWLDYKKQLKKSEQWNVEVY

SEQ ID NO: 172747 - protein, 94 aa, Oryza sativa
  Clone ID: PAT_MRT4530_70853C.1.pep
MTAGDGGLGRANRGHLRDEDDERNSLMVTATTIDDGKRPATRLRRRRARVDGVSGAPAGFGFDRGVDARLKEGQEMDFGGGIKAAERKGEWAEN

SEQ ID NO: 172748 - protein, 63 aa, Oryza sativa
  Clone ID: PAT_MRT4530_70854C.1.pep
LDAAFLWAMFIVVPRYNYAVLFFFPIWLWTFSMGFALYPFVNFSSPPLRPVFFFEFPLYWWAW

SEQ ID NO: 172749 - protein, 45 aa, Oryza sativa
  Clone ID: PAT_MRT4530_70855C.1.pep
YMCGLKGMEKGIDDIMIDLAAKDGIDWLDYKKQLKKSEQWNVEVY

SEQ ID NO: 172750 - protein, 196 aa, Oryza sativa
  Clone ID: PAT_MRT4530_70856C.1.pep
TTMKTFSIQVMAVSALLAGLSQSFEMRRPPPVELVKGFDWADPFTLSSMAAFQPRCDDKKQFEVFEYTLAELMEPPPKGLKPWAKGLKAVFANREYPGGWLGLDPHAGGRSVLLMNYDRIPLVVREWIEQQERTDGEGKALFAVLEKPKNDEDEIEEVVKFPEADKIDRANDKDKGCRFCARCFIRHPSPLGSGSK

SEQ ID NO: 172751 - protein, 117 aa, Oryza sativa
  Clone ID: PAT_MRT4530_70857C.1.pep
RPSLPLSPDICLVNFYTSSGKLGLHQDKDETKPSLHKGLPVVSFSLGDTAEFLYGDVNDVDKASKVDLESGDVLIFGGKSRLIFHGVSRIKPKTAPNWLTDEAKLRPGRLNLTFRQH

SEQ ID NO: 172752 - protein, 116 aa, Oryza sativa
  Clone ID: PAT_MRT4530_70858C.1.pep
ESLHEYAMHLRGRGQSFFLSNGNGLHLRPRHVDRKRSSDMDREECLADLLFTLHDRGDENACNMHGGVSVKWLIGDFCGLINYMDINFSFDHLLFIFSLKTIFFCSFLFSWRYLIN

SEQ ID NO: 172753 - protein, 357 aa, Oryza sativa
  Clone ID: PAT_MRT4530_70859C.1.pep
MAIASSSFSLAAILLIIIMYCCPTGLVEAARKGPAAAGGGDDSAMRERYEKWAADHGRTYKDSLEKARRFEVFRTNALFIDSFNAAGGKKSPRLTTNKFADLTNEEFAEYYGRPFSTPVIGGSGFMYGNVRTSDVPANINWRDRGAVTQVKNQKDCASCWAFSAVAAVEGIHQIRSHNLVALSTQQLLDCSTGRNNHGCNRGDMDEAFRYITSNGGIAAESDYPYEDRALGTCRASGKPVAASIRGFQYVPPNNETALLLAVAHQPVSVALDGVGKVSQFFSSGVFGAMQNETCTTDLNHAMTAVGYGTDEHGTKYWLMKNSWGTDWGEGGYMKIARDVASNTGLCGLAMQPSYPVA

SEQ ID NO: 172754 - protein, 178 aa, Oryza sativa
  Clone ID: PAT_MRT4530_7085C.1.pep
MAGSGRDDPLVVGRIVGDVLDPFVRITNLSVSYGARIVSNGCELKPSMVTQQPRVVVGGNDMRTFYTLVMVDPDAPSPSNPNLREYLHWLVTDIPGTTGATFGQEVMCYESPRPTMGIHRLVFVLFQQLGRQTVYAPGWRQNFSTRNFAELYNLGSPVATVYFNCQREAGSGGRRVYP

SEQ ID NO: 172755 - protein, 462 aa, Oryza sativa
  Clone ID: PAT_MRT4530_70860C.1.pep
MEPAAAAAAGQLDVDKLTYEIFSILESKFLFGYDDPKLVFSGGDEPQGAVKGTLARGPAVVERGKVCVLSIDGGGRAADGLLAGAALVSLEASLRRRTGDETARLADFFDVAAGSGAGGVLAAMLVARGGDGRPMFSAEDALAFLMRSLRRGWSGGGGGGAAGGIRALFRRPGAAFRKVFGDLTLRDTVRPVLVPCYDLASAGPFLFSRADAVETAAYDFRLRDVCAATCAGSDGSASAVEVRSSDGATRIAAVGGGLALGNPTAAAITHVLNNKREFPLAAGVEDLLVISIGSGECDNRPTGGAAASTSEIVRIAAEGVADMVDQAVAMAFGHNRTNNYIRIQAMGSPRASRGGMRCGGGGGGDGAGWGVAEEMLSQKNVESVLFRGKKLAEQTNAEKLEWFAHELVKERDRRRTAGALAPAVVKQQPSESAPATAAAADGHTPPPTSYSNLVSQMFTTIL

SEQ ID NO: 172756 - protein, 130 aa, Oryza sativa
  Clone ID: PAT_MRT4530_70861C.1.pep
PTRFSSIFNLRETVPYLYNTEADHHIKSGQIFLDLPKLVEFFLPTRYFLSVSLKIGVIHKTWDKKVRGSSEARQLAIIRVQRIGMDSVRKEICGILVYLLLEILPPPTRAETTEKYACKDYLMSVLIMFG

SEQ ID NO: 172757 - protein, 95 aa, Oryza sativa
  Clone ID: PAT_MRT4530_70862C.1.pep
ARGEPQSRLRLLQDSITRLEDARKKEHEANRLQSLSSHLSKLKHNIQTMEWHLDAKNQASSSSIFSLEKEVEAAEKYCQAMKDEVVALKMNHSNL

SEQ ID NO: 172758 - protein, 56 aa, Oryza sativa
  Clone ID: PAT_MRT4530_70863C.1.pep
MQWEKRYAAGREPGVVITRPLEVKPTGPRTRSSLNSLPIDVEVREIATAYLSENQE

SEQ ID NO: 172759 - protein, 174 aa, Oryza sativa
  Clone ID: PAT_MRT4530_70864C.1.pep
MLHTISLTPPVIPLPSLSSSLSSLSLFFAGSAGTDGLVGSGAAAGDLGEAAPSSPPSLSGDGLHAAPGPVASNDNDDMVGSCNCLWLKRHPLVCGSIIVINPVTGESLHIPSPPLATSRSRHAGMISFGYHSTTGKYKIVHFPSNGGLVDEVTLGGTASSSSPPAMAAATVMGW

SEQ ID NO: 172760 - protein, 151 aa, Oryza sativa
  unsure (1)..(151): unsure at all Xaa locations
  Clone ID: PAT_MRT4530_70865C.1.pep
MAQATINKYTAAATDAAARRCRRGKGAAGPPLPFLPPDLAXGRAPPGGRCSSHYTPPTPPHATAAEERVPXAVAVLPPAGSGRGRVPPGGHRTSRRTPPTPPHVATAEGRALLGRRRPSSYRIWRREGASERPLLLLPPPPPPGEKKEKRR

SEQ ID NO: 172761 - protein, 338 aa, Oryza sativa
  unsure (1)..(338): unsure at all Xaa locations
  Clone ID: PAT_MRT4530_70866C.1.pep
SASSDQIGTIIVIDNSVYRDHPSLKIRGVPKDVRSYDVERVRNKKQLSTRVGCGRAHSIIENVLDKCRVIAPNLPTKTDDLSHSTGHSWAIREKVVAISRTXNFHWCSRDDSTRWFPNQXIVEISRTXNFHWCSRDNSTRSLVPRHQSAXELRLLLVLGPVGCSDLSXPLLLVVELRLHLVFDQRCSDSPTTFTSSGRVMTTXWFSTSGVAFLPLHPLQXWSSYDYXLVPDQRCSDSPATFTPTKLISGTQYRQAFYPEIPYHXRHLELKPILMSLYAVPTRSLRNLRELRLAMPRADKALSDHVKTNDHTLRLLDHSRTVGGSXQGIRNEEMVYPLR

SEQ ID NO: 172762 - protein, 55 aa, Oryza sativa
  Clone ID: PAT_MRT4530_70867C.1.pep
RCDSCLSVLAVVQYMNDLNAVRGTNQKKTDRGSFWTWLFSLFGCCKKDQELGLPV

SEQ ID NO: 172763 - protein, 451 aa, Oryza sativa
  Clone ID: PAT_MRT4530_70868C.1.pep
MEAAAAMEAGRKLAARHPHGRSRTAHNMSSSSLRKKSDAALVRKVPVAPLRPLLANLQEVFLATKLAVLFPAVPLAIAAQCFRFDQVWVFALSLLGLIPLAERVSFLTEQIALYTGPTVGGLLNATCGNATELIIALFALLKGKIEVVKCSLLGSVLSNLLLVLGTSLFCGGVVNLGARQPYDRNQSDVSTALLFLAVLCHSAPLLLRYAVAAGEHSVSATSAAASLDLSRACSFVMLASYVAYLFFQLKTHRQLFEPQEVDGGDAGDDDEEPALGLGSALFWLALMTAVISVLSEYVVGTIEPTSQSWGLSVSFISIILLPIVGNAAEHAGAIIFALKNKLDITLGVALGSATQISMFVVPLSVLVAWIMGVQMDLDFKLLETGSLFMAVLVTAFTLQDGTSHYLKGILLLLCYIVIGACFFVARQPAGHANSNGALLDVPTGSMSVQAA

SEQ ID NO: 172764 - protein, 50 aa, Oryza sativa
  Clone ID: PAT_MRT4530_70869C.1.pep
LPSRRLRFLWEVIGAAASRSFQKVRNMLFRVGEQESPLPWWQLTETRPIL

SEQ ID NO: 172765 - protein, 1581 aa, Oryza sativa
  Clone ID: PAT_MRT4530_7086C.1.pep
MTAQQRLGAGGRSATTKTSGAATTGSASSRRRARRAAAAARHSATTPSSAPPTREDQHEEPDARLDIERRRSDRRTPRATEGASSSRVSPRHGREDQPSVPPVGGVGCRAFVASLRNVRWPPRFRPTITEKYDGSVNPTEFLQVYTTGIEAAGGDDRVMANFFPMALKGQARGWLMNLPPASVHSWEDLCQQFTMNFQGTYPRQRFCQVRNTIPCIPAHAVIYAFRGGVRHNRMLEKIASKEPQTTAELFQLADRVARKEEAWTWNPSGSGVAASAAPGSAAQTGRRDRRRKKRSVHSGDEGHVLAVEGAPRATRKGRPASDKKKEAGTPSRERPASKWCSVHNTSLHDLADCRAVKNLAERTRKWEEDRRQERREGKSAAVPSGKRRSEAKQKAPAADIDDGDDDLGFQEPGATIATVDGGACAHVSRRSFKAMRRELLAAAPTHEATRRARWSEVALTFDQTDHPPCVARGGQIAMVVSPTICNVKLGRVLIDGGAALNILSPAAFDAIKAPGMVLQPSQPIIGVTPGHTWPLGHIDLPVTFGGSANFRTERVNFDVADLSLPYNAVLGRPALVKFMAAVHYAYLQMKMPGPGGPISVRGDLKVALACMEQRADHLAAATKPEGGDERLGTSAPTAPRQRIATCDEVPAPERQAFIREEVARLLEAGFIREVIHPEWLANPVVVPKANGKLRMCIDYTDLNKACPKDPYPLPRIDQIVDSTAGCDLLCFLDAYSGYHQIRMAREDEEKTAFITPVGTYCYTSMPFGLKNAGPTFQRTTRISLGSQIGRNVEAYVDDLVVKTRNQETLLLDLAETFENLRSARIKLNPDKCVFGVPAGKLLGFLVSARGIEANPEKIRAIERMRPPSKLRDVQCVTGCMAALSRFISRLGEKALPLFKLLKRSGPFTWTEEAEHALTQLKAYLSSPPVLVAPEPNESLLLYLAATPQVVSAALVVERDEDNPHSAHPHSVPTWPGSRQGGEAPESNGGLRPPTTGVGSLPACQTVLGAPDPQEGPEATAGRPHLPPFDPEANPVLIRPGREQGEEAPEPNGGLRPLTTGAGPLPACLTTPGAPDPQGGPEATVGRPHLSSSDPEVISAGDECAPRGHWDEEHPGDTALSEEDRPRRKVQRPVYFVSEALRDAKTRYPQAQKMLYAILMASRKLRHYFQAHRVTVVTSYPLGQILHNREGTGRVVKWAIELSEFDLHFEPRHAIKSQALADFVAEWTPAPETVSIPEASADPSQLPHAAHWVMQFDGSLSLQGAGAGVTLTSPNGDVLRYLVRLDFRATNNMAEYEGLLAGLRVAAGLGIRRLLVLGDSQLVVNQFTKWPEAYPVVKIDKHSALKFIKGITARFGVPNRIITDNGTQFTSELFGDYCEDMGIKLCFASPAHPRSNGQVERANAEILKGLKTKTFNILKKHGDSWIEELPAVLWANRTTPSRATGETPFFLVYGAEAVLPSELTLRSPRATMYCEADQDQLRRDDLDYLEERRRRAALRAARYQQSLRRYHQRHVRARSLCVDDLVLRRVQTRAGLSKLSPMWEGPYRVIGVPRPGSVRLATGDGTELPNPWNIEHLRRFYP

SEQ ID NO: 172766 - protein, 97 aa, Oryza sativa
  Clone ID: PAT_MRT4530_70870C.1.pep
MVAFLWLLPPPSFTKCLTVKGIPASKIDIARINKTLSTVTTTSCRSRPQPPQWDGQTLDQMDPPTYSVLRGKVRVVTAKFVYAAACLHRFGEIVFLP

SEQ ID NO: 172767 - protein, 47 aa, Oryza sativa
  Clone ID: PAT_MRT4530_70871C.1.pep
MANTAEHTAAPCHIAGAASGSGWVRGATTGECDTKLPPLPLAPAPRP

SEQ ID NO: 172768 - protein, 54 aa, Oryza sativa
  Clone ID: PAT_MRT4530_70872C.1.pep
RYVIKSYLEVTGSINLVRAFEKGNRVVFFLESAREKSCSWLKKFLKPFLYLFKV

SEQ ID NO: 172769 - protein, 111 aa, Oryza sativa
  unsure (1)..(111): unsure at all Xaa locations
  Clone ID: PAT_MRT4530_70873C.1.pep
MLPDLDIRDEPSHTPSGTYRGRQEGSSAISYLTEYGFEEXDYPVVDYELMNKEQHQLRPTGCRAITCKIXGPNLYKIICLHLFYLNLAYTLIPTIPIXSKYPSRVDNLLVW

SEQ ID NO: 172770 - protein, 152 aa, Oryza sativa
  Clone ID: PAT_MRT4530_70874C.1.pep
MAGKVAAPLAFRRDVVVRGTLGGGRRSGVSGLWSNGGGGGGRLVAPPSAGAPAQADPKNRSDGGGRCATKDDERAGKDEAAEAVVFVDGEDDEAAIDGDDLSGFRGLVLDLSYRPVNVVCWKRAICLEFMAKADVLEYYDQTVSSPSGSFYI

SEQ ID NO: 172771 - protein, 50 aa, Oryza sativa
  Clone ID: PAT_MRT4530_70875C.1.pep
MGKEKTHINIVVIGHVHSGKLTTTGHLIYKVGGIGQGVSDRGPRVTYAHS

SEQ ID NO: 172772 - protein, 57 aa, Oryza sativa
  Clone ID: PAT_MRT4530_70876C.1.pep
SFFLFWQRRPSYSDSSALVPQMGGGNVRPLPALAAAAAAESPLPEVSFAVGALQESM

SEQ ID NO: 172773 - protein, 76 aa, Oryza sativa
  Clone ID: PAT_MRT4530_70877C.1.pep
LVLPSTFPGLLIGNYLALGPMWERITVNSQAPHQDPCNGVHQAAEYSVWRRKNNGSFRSHKWPYEKISTPPPGRVG

SEQ ID NO: 172774 - protein, 290 aa, Oryza sativa
  unsure (1)..(290): unsure at all Xaa locations
  Clone ID: PAT_MRT4530_70878C.1.pep
DYGCSLQLLKVRARGFTGVISATVLCPLDVIKTRLXGRVIISGFQHILKNEGLPGLYRGLSPTIVALFPTWAAKYCFMIDACLVTFSVYNHLKGLLHSQGDNTGELSVQANILAASCAGIATAVATNPLWVVKTRLQTQGMRTGVVPYTSIWSALRRIAEEEAGVTHVAIQLPVYENVKLYFAKRDNTTVDKLSPGKLAICSSGSKVAASIITYPHEVVRSKLQEQGRARHGAVHYTGVIDCIKQVYQKEGIPGFYRGCATNLLRTTPNAVITFTSYEMINRLMHQLLPH

SEQ ID NO: 172775 - protein, 109 aa, Oryza sativa
  Clone ID: PAT_MRT4530_70879C.1.pep
MASGDPVDAPAAAAESMEVEADQCLDLTSCQLHDLSEVEIPPTLEELELTANRLAAVDPRIGRLPGLRKLSFRQNLLDDAAVAPLSTWADIAGLQVVVISVSLFGNLGI

SEQ ID NO: 172776 - protein, 1986 aa, Oryza sativa
  Clone ID: PAT_MRT4530_7087C.1.pep
MAEQGKAHDLSPSVSGDDGEPNPRRRARTPPPPPRQSPKQGEALERVDKSVAPPVAGDAGERRDGERRLLVYGDGSTPQGALQAVGALLRHPTVVPDPESPAQRWLDDVANLVMTAQQRLGAGGRSATTKTSGAATTGSVSSRRRARRAAAAARHSAATPSSTPSTREDQHGEPDARLDIERRRNSRRTPRATEGASSSRVSPRQGREDQPSMPPAGGVGCRAFVASLRNVRWPPRFRPTITEKYDGSVNPTEFLQVYTTGIEAAGGDDRVMANFFPMALKGQARGWLMNLPPASVHSWEDLCQQFTMNFQGTYPRPGEEADLHAVQRGDDESLRSYIQRFCQVRNTIPCIPAHAVIYAFRGGVRHNRMLEKIASKEPQTTAELFQLADRVARKEEAWTWNPSGSGLAASAAPGSAAQTGRRDRRRKKRSVHSGDEGHVLAVEGAPRATRKGRPASDKKKEAGTPSRERPASKWCSVHNTSLHDLADCRAVKNLAERTRKWEEDRRQERREGKSAAVPSGKRRSEAKQKAPAVDVDDGDDDLGFQEPGATIATVDGGACAHVSRRSFKAMRRELLAAAPTHEATRRVRWSEVALTFDQTDHPPCVARGGQIAMVVSPTICNVKLGRVLIDGGAALNILSPAAFDAIKAPGMVLQPSQPIIGVTPGHTWPLGHIDLPVTFGGSANFRTERVNFDVADLSLPYNAVLGRPALVKFMAAVHYAYLQMKMPGPGGPISVRGDLKVALACMEQRADHLAAATKPEGGDERLGTSAPTAPRQRIATCDEVPEDALVSFLRANPDVFAWRPADMPGVPREVIEHRLAVRPGARPVRQKVRRQAPERQAFIREEVARLLEAGFIREVIHPEWLANPVVVPKANGKLRMCIDYTDLNKACPKDPYPLPRIDQIVDSTAGCDLLCFLDAYSGYHQIRMAREDEEKTAFITPVGTYCYTSMPFGLKNAGPTFQRTTRISLGSQIGRNVEAYVDDLVVKTRNQETLLSDLAETFENLRSARIKLNPDKCVFGVPAGKLLGFLVSARGIEANPEKIRAIERMRPPSKLRDVQCVTGCMAALSRFISRLGEKALPLFKLLKRSGPFTWTEEAEHALTQLKAYLSSPPVLVAPEPNEPLLLYLAATPQVVSAALVVERDENNPHFVRPHSVLTWPGSERGGEAPESDGGLRPLTTGVGPLPACQTVLGAPDPQEGPKATAGRPHLTPFDPEASPVLTRPGKEQGEEAPEPNGGLRPLTTGVGPLPACPTMPGAPDPQDGPEATEGRPPLSSSDPEVIGTENECAPRGHLDEERPGDAAPSKEGRPHRKAHRVTVVTSYPLGQILHNREGTGRVVKWAIELSEFDLHFEPRHAIKSQALADFVAEWTPAPETVSIPEASTDPSQLPRTTHWVMQFDGSLSLQGAGAGVTLTSPNGDVLRYLVRLDFRATNNMAEYEGLLAGLRVAAGLGIRRLLVLGDSQLVVNQVCKEYRCSDPQMDAYVRQVRRMERHFDGIELRHVPRRDNMIADELSRLASSRAQTPPGAFEERLSQPSARPDPLGEMDAPDRPPRPVGVQASGPEGSAPSSLRLIAWISEIQTYLTDKTLPEDREGSERVQRISKRYVLVEGTLYRRAANGILLKCIPQEQGVELLADIHEGECGAHSASRTLVGKAFRQGFYWPTALNDAVDLVRRCRACQFHAKQIHQPAQALQIIPLSWPFAVWGLDILGPFKRAPGGFEYLYVAIDKFTKWPEAYPVVKIDKHSALKFIKGITARFGVPNRIITDNGTQFTSELFGDYCEDMGIKLCFASPAHPRSNGQVERANAEILKGLKTKTFNILKKHGDSWIEELPAVLWANRTTPSRATGETPFFLVYGAEAVLPSELTLRSPRATMYCEADQDQLRRDDLDYLEERRRRAALRATRYQQSLRRYHQRHVRARSLCVDDLVLRRVQTRAGLSKLSPMWEGPYRVIGVPRPGSVRLATGDGTELSNPWNIEHLRRFYP

SEQ ID NO: 172777 - protein, 125 aa, Oryza sativa
  unsure (1)..(125): unsure at all Xaa locations
  Clone ID: PAT_MRT4530_70880C.1.pep
SYRQYQLQPPVLLQQHVLNPGEEFERRQYGISXNPFLKLAAVQLKNNQVRQQLALVAQQSHYHDINIAQAITHHLQLQQVSDLYFYRNLSQTQTLFSFXTYPSKYEIYPRYYNSPNTITTLFKIL

SEQ ID NO: 172778 - protein, 56 aa, Oryza sativa
  Clone ID: PAT_MRT4530_70881C.1.pep
AGAQVAAQLSGRAWLMVRARIAAPTTSLTRRDTRAYHLPRSVRRAWPCGSCSAGGA

SEQ ID NO: 172779 - protein, 162 aa, Oryza sativa
  Clone ID: PAT_MRT4530_70882C.1.pep
MAWRILVVMPSPYEYSYSSVAERLHVSNMAPSQSRHWGDRAIGAQLRQLAAARAAGRRQVEAAGRHAALRQQQAKTVSLSAPAAATASLRTRSHTRDNVKAAADYPVYRVQESLLSPAFSSAQLSTLASAGWLAGCCSQRFPFPNAPTGEKPLLKAEFIVTH

SEQ ID NO: 172780 - protein, 85 aa, Oryza sativa
  unsure (1)..(85): unsure at all Xaa locations
  Clone ID: PAT_MRT4530_70883C.1.pep
LQTFAVFVEASSNKSLLNILTXLVYPFLSQYLIRHHAFLCHPHRRLRRLRHGPVHYSHHCLCPYPRGPDPPAVFCPCLPRTVQPL

SEQ ID NO: 172781 - protein, 53 aa, Oryza sativa
  Clone ID: PAT_MRT4530_70884C.1.pep
LAGSGGGEGAAASRCLPFCATACRLGHRCLPSSRIRWRGGRSRRRCCLRRGCK

SEQ ID NO: 172782 - protein, 71 aa, Oryza sativa
  unsure (1)..(71): unsure at all Xaa locations
  Clone ID: PAT_MRT4530_70885C.1.pep
SVVALIHHNHASTIFVVAYLTVVDMTVXRYVVSITLTVAPDFNANEQVHILNRRPWSNCYRARVTVLGEFR

SEQ ID NO: 172783 - protein, 146 aa, Oryza sativa
  Clone ID: PAT_MRT4530_70886C.1.pep
MVELYQDQFQKDMSSSSSCDIRNSCPGIVEKGKLESFNLPIYGPSIDEVKTVITRNKLFCIDHIELFESNWDPYDDLEHDGMHISPHRGMNVAKCIRAVSEPLLASHFGEYILDKLFQRFAQIVERHLAKENVKYSVIVLSLNRRD

SEQ ID NO: 172784 - protein, 318 aa, Oryza sativa
  Clone ID: PAT_MRT4530_70887C.1.pep
MKSHGSRDKLQAAASSSHRRVLLLLFATCFALATFVTFVYNTSHFASASGSGAAADSSGGGASAGSGTGAVSALPLPVFDALVHFASISNATHRMSDTDIRAISAVLRARGPCNLLVFGLGAESPLWLALNHGGRTVFLEENEFYVKYLEPRHPGLEAYDVSYTTKVRDFRDLLDAARASRAAECRPIQNLLFSECRLAINDLPNDLYDVAWDIVLIDGPSGWNPTSPGRMPSIFTTAVLARTGATAAKGPTDVLVHDFQFELEQVLSKEFLCDENRVAGSGTPSLGHFVVRPDGRRDAFCSGQDSTAAGTSSEKSGK

SEQ ID NO: 172785 - protein, 51 aa, Oryza sativa
  Clone ID: PAT_MRT4530_70888C.1.pep
RIPEYFYFEVGAAIAIIFLKKNWDGNIIYQHSVTPMCCNRELQENSFITEN

SEQ ID NO: 172786 - protein, 129 aa, Oryza sativa
  Clone ID: PAT_MRT4530_70889C.1.pep
LGDHENQTPTGGTRMASKTPTLPGGGGGGDGGSDGDGGDGWWRTCRAYPGAGRSWPTSTTLLHKRRRGRTLRDNSVAHTSLARQGPPERPLARLPLPHGGDRVFCFQPEGARRWRLPGHQGQLSRDLLG

SEQ ID NO: 172787 - protein, 2005 aa, Oryza sativa
  Clone ID: PAT_MRT4530_7088C.1.pep
MAEQAKAHDLSPSVSGDDGEPNPRRRARTPPPPPRQSPKQGEALERVDKSAASPVAGDAGERRDGERRLLVYGDGSTPQGALQAASALLRHPPVVHDPESPAQRWLDDVANLVVTAQQRLGAGGRSATTKTSGAATTGSVSSRRRARRAAAAARHSAATPSSTPSTREDQHEEPDARLNIERRRNSRRTPRATEGASSSRVSPRHGREDQPSVPPAGGVGCRAFVASLRNVRWPPRFRPTITEKYDGSVNPTEFLQVYTTGIEAAGGDDRVMANFFPMALKGQARGWLMNLPPASVHSWEDLCQQFTMNFQGTYPRPGEEADLHAVQRGDDESLRSGGVRHNRMLEKIASKEPQTTAELFQLADRVARKEEAWTWNPSGSGVAASAAPGSAAQTGRRDRRRKKRSVHSGDEGHVLAVEGAPRAARKGRPASDKKKEAGTPSRERPASKWCSVHNTSLHDLADCRAVKNLAERTRKWEEDRRQERREDKSAAVPSGKRRSEARQKAPAVDIDDGDDDLGFQEPGATIATVDGGACAHVSRRSFKAMRRELLAAAPTHEATRRARWSEVALTFDQTDHPPCVARGGQIAMVVSPTICNVKLGRVLIDGGAALNILSPAAFDAIKAPGMVLQPSQPIIGVTPGHTWPLGHIDLPVTFGGSANFRTERVNFDVADLSLPYNAVLGRPALVKFMAAVHYAYLQMKMPGPGGPISVRGDLKVALACMEQRADHLAAATKPEGGDERLGTSAPTAPRQRIATCDEVPVKEEDALVSFLRANADVFAWRPADMPGVPRELIEHRLAVRPGARPVRQKVRRQAPERQAFIREEVARLLEAGFIREVIHPEWLANPVVVPKANGKLRMCIDYTDLNKACPKDPYPCPRIDQIVDSTAGCDLLCFLDACSGYHQIRMAREDEEKTAFITPVGTYCYTSMPFGLKNAGPTFQRTTRISLGSQIGRNVEAYVDDLVVKTRNQETLLSDLAETFENLRSACIKLNPDKCVFGVPAGKLLGFLVSARGIEANPEKIRAIERMRPPSKLRDVQCVTGCMAALSRFISRLGEKALPLFKLLKRSGPFTWTEEAEKALAQLKAYLSSPPVLVAPEPNESLLLYLAATPQVVSAALVVERDEDNPHSAHPHSVPTWPGSRQGGEAPESNGGLRPPTTGVGPLPACQKVLGAPDPQEGPEATAGRPHPPPFDPEANPVLIRPGREQGEEAPEPNGGLRPLTTGAGPLPACLTTPGAPDPQDGPEATVGRPLLSSSDPEVISAGDECAPRGHLDEEHPGDTAPSEEDRPRRRVQRPVYFVSEALRDAKTRYPQAQKMLYAILMASRKLRHYFQAHRVTVVTSYPLGQILHNREGTGRVVKWAIELSEFDLHFEPRHAIKSQALADFVAEWTPAPETVSIPEASTNPSQLPHAAHWVMQFDGSLSLQGAGAGVTLTSPNGDVLRYLVRLDFRATNNMAEYEGLLAGLRVAAGLGIRRLLVLGDSQLVVNQVCKEYRCSDPQMDAYVRQVRRMERHFDGIELRHVPRRDNAVADELSRLASSRAQTPPGAFEERLTQPSARPDPLGETDAPDRPPRPVGVQASGPEGSAPSSLRLIAWISEIQTYLTDKTLPEDREGSERVQRISKRYVLVEGTLYRRAANGILLKCIPQEQGVELLVDIHEGECGAHSASRTLVGKAFRQGFYWPTALNDAVDLVRRCRACQFHAKQIHQPAQALQIIPLSWPFAVWGLDILGPFKRAPGGFEYLYVAIDKFTKWPEAYPVVKIDKHSALKFIKGITARFGVPNRIITDNGTQFTSELFGDYCEDMGIKLCFASPAHPRSNGQVERANAEILKGLKTKTFNILKKHGDSWIEELPAVLWANRTTPSRATGETPFFLVYGAEAVLPSELTLRSPRATMYCEADQDQLRRDDLDYLEERRRRAALRAARYQQSLRRYHQRHVRARSLCVDDLVLRRVQTRAGLSKLSPMWEGPYRVIGVPRPGSVRLATGDGTELPNPWNIEHLRRFYP

SEQ ID NO: 172788 - protein, 94 aa, Oryza sativa
  Clone ID: PAT_MRT4530_70890C.1.pep
FFFFFVEVYSRCSIFQTVVFQVQRAHHQGRVGGHTCISKTRLGLTCKGPYLPVSFLPHLNHRSTTNFCKHATSPSISDADCFYPSLSSTLILLT

SEQ ID NO: 172789 - protein, 93 aa, Oryza sativa
  unsure (1)..(93): unsure at all Xaa locations
  Clone ID: PAT_MRT4530_70891C.1.pep
SRGRGGAGKQAPPVSGTRAPDHRGPGPPRXGPLEPMPRIGPSRSGGHEAAXAGTQARLRLARPSDGARQRGHRRRRPATARGAAAHAGGDGAR

SEQ ID NO: 172790 - protein, 39 aa, Oryza sativa
  Clone ID: PAT_MRT4530_70892C.1.pep
IYIIMIPFLISLRGGIYGYGWRVATGSYSNIFRVLGCGP

SEQ ID NO: 172791 - protein, 1173 aa, Oryza sativa
  unsure (1)..(1173): unsure at all Xaa locations
  Clone ID: PAT_MRT4530_70893C.1.pep
MESMEERLMDTLKALALKVDGVEDIAKRLTQIDLKLAQQGEWLDRVQTKVDLSMTSLGQVQQEQSQVWKLEVGWHDWTMLKMAIAGEFEGAQLGNVGKRHFQKRDPVVWKQPEKPKLATGELWKAQQLKEYRRAHDLCFKCGDKYVPGHVCVKPDNAQLKAMEVQEDQVILSDDNLDAVVASDMVEDDCNLSLHAMAGTCSASTLQLRAMVGNQVILILVDSGMDWLTKHSPMQCDWVARSIQFPYQGDLITLQGIQSTPFSAVTEASVHQVVKWTQGNYIWAMAVLEPDFSKGSPPVELAVQSVLDKFSSVFTATNSLPPHRVLDHSIALIPNSVPVNSRPYRYSPTQKDEIEKQVLEMLNAGLITPSCSPFASPVLLVKKQDNSWRFCVDYRRLNSLTIKNKFPLPIVDELLNELAGTKFFSKLDLRSGYHQIRMLETDEFKTAFKTHHAHFQFRVMPFGLTNAPATFQCLMNSIFAPFLRKFVLVFMDDILIYSRSLEDNIHHIELVLQLLQQHQLCAKLSKCSFPQNKLEYLGHIISAEGVATDPEKTRVMQDWPLPSNVTELRGFLGLTGYYRKFVKHYGILAKPLTMLLQKNAKFVWTPQAQSAFVALKEAMCSTPVLALPDFAKPFVIETDACATGIGVVLSQEGHPVAFYSKALGIVNQRLSIYEKEFLAIMMAVDHWRSYLLRGPFVIKTDHKALCHLDDQTLDTELQKKAMTKLIGLQYKFQYKKGVENKSADALSKVXILNSYAVDSSAQQLLCELAVSSPNAKGFSLSNGLIRKAAWQDVSMDFIEGLPLSKGANVIFVVVDRYTKFAHFLPLRHPFSALQVAKVYLNNVASLYGLPKSIVSDRDKVFTSNFWQTLFKRFEIPLHLSTTYHPQSDGQTERVNQCLEMYLSPSNSPNADQLFQERAMFSSLLKHHLSRAQNRMKQTADAKRTLRSFQPGDLVLLKLQPYAQKSVVARPFPKLAFKYFGPFPVVAKVGSVAYKLQLPDHSEIHPVFHVSQLKQYIPDASPVFSTLPSTLQLDATELIPSEILDRRMVKKDNAAVVQVLVRWGTLSPELATWEDYDVLRARFPLALVWGQAGARGGGGKCHVCHYRTSQWRQRKENRGKRKVRRRVFAKKAYCVKRVNHTQKSNGISSCANYCGFYLEVYRLPIPPNLALLIDA

SEQ ID NO: 172792 - protein, 84 aa, Oryza sativa
  unsure (1)..(84): unsure at all Xaa locations
  Clone ID: PAT_MRT4530_70894C.1.pep
SRQRLHRLPYLLRQRWHQASIDPIQQQPIQXTPPIQQIVQPIQQQVVQPVQQTPPRQQPPRPIQQTPLRQQIVQPIQHQGSMSA

SEQ ID NO: 172793 - protein, 378 aa, Oryza sativa
  unsure (1)..(378): unsure at all Xaa locations
  Clone ID: PAT_MRT4530_70895C.1.pep
MDAEFHTVXRAVGWNKFACVDELGSCLLTMQFLCTLLEVGDGVXFWLFRKEYHLSRKDLSLHLGFDKTCKVNFRNAFLGFXKRMFWQSISGFSSSKKPRTSDIHHPTLGLLHKLLGFMLFLRADIQIVCEDELVLLYAMVKKKIKVSPVQPMIKQWLENMKLSGPFECISLVTRSAXELGLCFISXIPITRSYVDEAYLVQCHILKHGPNDYLIFLFPGYTNKIPLPNPEFHLCNCRELTIPLQLELHRDXPTQGNMTNVQRSTSGGVFLFTTSXMYGDYWDAGGSSWQSASDGRWHEPXELHWGYSRSSNSSGPPSSSWMXAVSSRGDLGELTRRMDTLELXAGNEQHTLEDNVVQSREWQQSVDAQVANFNTMMQQ

SEQ ID NO: 172794 - protein, 200 aa, Oryza sativa
  Clone ID: PAT_MRT4530_70896C.1.pep
MPSPPPDLGRGGPAAAAVGGGMRRQRGGGMRRRDERRWQPGGGALPSRLSLAVLSLAGMRGGGWSAVAAPSPPPDPGRGVPAAATAGGGMQRRPPSSLSVMIFCDVLQSGIALTSYSLPIDIQCPDDDSHAISSPKYLRNLTIRSGDKAMPTSISMPPEQPPRPSATDIAPVFATDMTSTFASLPNPRRTRGTLATHYAG

SEQ ID NO: 172795 - protein, 415 aa, Oryza sativa
  unsure (1)..(415): unsure at all Xaa locations
  Clone ID: PAT_MRT4530_70897C.1.pep
ICKLRRIRQSSSRTSRHEKPSTPSSADASMEEAYVPPRLYDNSDLDLVGDQEMQAYHMLKDRTCAQTXSIQLDLLKRIGMDAEFHTVXRAVGWDKFACVDELGSCLLTMQFLCTLLEVGDGVXFWLFRKEYHLSRKDLILHLGFDKTCKVNFRNAFLGFXKRMFWQSISGFSSSKKPRTSDIHHPTLGLLHKLLGFMLFLRVQCHILKHGPNDYLIFLFPGYTNEIPLPNPEFHLYNCRELTIPLQLELHRDVPRRVTXRMAREAPQEASSSSPPVXMYGDYWDPTADVPGXTQIPQHDAGGSSWQSASDGRWHEPXELHWGYSRSSNSSGPPSSSWMXAVSSRGDLGELTRRMDTLELXAGNEQHTLEDNVVQSREWQQSVDAQVANFNTMMQQXQADWQAFHRYQGFDPRHEP

SEQ ID NO: 172796 - protein, 145 aa, Oryza sativa
  Clone ID: PAT_MRT4530_70898C.1.pep
MSIKHCEQHKDCERQRLYRRCCAAIFGILLLLLLIVLIVWLILRPTKPRFYLNDLTVVCLNVTTGGSYAGATASSGYFSFLTVTMQTTLAARNGNERVGIYYDRADVYAEYKGLRITVPTSLPAVYQGHPDLTVWSPFLSGNNVQ

SEQ ID NO: 172797 - protein, 49 aa, Oryza sativa
  Clone ID: PAT_MRT4530_70899C.1.pep
RLKNVRKKGTFKFFFFLKIATQPFLQKKRYPLDLHYRTGHAHLLYFYGL

SEQ ID NO: 172798 - protein, 119 aa, Oryza sativa
  Clone ID: PAT_MRT4530_7089C.1.pep
DRRQISDKAKDIKKLSNELAELRAKYTVRGVGADLAASTGIDPRVINLYKKETDLVGIEESRDKAIRMLSMGTKDDDAHEAHQDLKIVPIVGVGGLGHSRRCYWNSIASVNKLTWPDGI

SEQ ID NO: 172799 - protein, 81 aa, Oryza sativa
  Clone ID: PAT_MRT4530_708C.1.pep
MEADRVMQWLNGKELRSVVFVSLAMMAHGLELSGAAFVHGAGGGTQNQTSILLSDPNYMVLYSLWVKISTIGDKGLQTNST

SEQ ID NO: 172800 - protein, 336 aa, Oryza sativa
  Clone ID: PAT_MRT4530_70900C.1.pep
MVTARDRPPRIWRQRATERYIHRRLPELSLAGSDPEGGGHDGDGSEWGGIGESLLFGLGGGKGEGVAEADQRRGLLQALDLVAIAGLSRRLYRRCCAAIFGILLLLLLIVLIVWLILRPTKPRFYLNDLTVVCLNVTTGGSYAGATASSGYFSFLTVTMQTTLAARNGNERVGIYYDRADVYAEYKGLRITVPTSLPPVYQGHPDLTVWSPFLSGNNVQLPPYLAVSITQDETAGYLLVTIRVDGWIRYKAGAFITGHYHLRVRCPALLIVNDGRGSYGSNSGGGNGYFRFPASHRLRRRGLITPSILLRPSWACIPKIMTYLINSPPSIYNCLLN

SEQ ID NO: 172801 - protein, 123 aa, Oryza sativa
  Clone ID: PAT_MRT4530_70901C.1.pep
MARIKVHELRGKNKAELQAQLKDLKAELSLLRVAKVTGGAPNKLSKIKVVRTSIARVLTVISQKQKAALREAYKKKSLLPLDLRPKKTRAIRRRLTKHQLSLKTEREKKREKYFPMRKYAVKA

SEQ ID NO: 172802 - protein, 123 aa, Oryza sativa
  Clone ID: PAT_MRT4530_70902C.1.pep
MARIKVDELRGKNKAELQAQLKDLKAELSLLRVAKVTGGAPNKLSKIKVVRTSIARVLTVISQKQRAALREAYKKKSLLPLDLRPKKTRAIRRRLTKHQLSLKTEREKKREKYFPMRKYAIKA

SEQ ID NO: 172803 - protein, 123 aa, Oryza sativa; identical to SEQ ID NO: 172802
  Clone ID: PAT_MRT4530_70903C.1.pep

SEQ ID NO: 172804 - protein, 71 aa, Oryza sativa
  Clone ID: PAT_MRT4530_70904C.1.pep
EPLRPLLLWCFCSIHLLSIGLLSRRRRKIGRRRPRMQRCIGQDLQRTLSDRAPIASGLATRGWWICGGQGG

SEQ ID NO: 172805 - protein, 153 aa, Oryza sativa
  Clone ID: PAT_MRT4530_70905C.1.pep
IDNLESSSTAWIQARIKVHELRGKNKAELQAQLKDLKAELSLLRVAKVTGGAPNKLSKIKVVRTSIARVLTVISQKQRAALREAYKKKSLLPLDLRPKKTRAIRRRLTKHQLCYTCIRLLTFSMVAISQLSLKTEREKKREKYFPMRKYAIKA

SEQ ID NO: 172806 - protein, 743 aa, Oryza sativa
  Clone ID: PAT_MRT4530_70906C.1.pep
MECGGRVGVEGWDGAEDDDCSVGARSGAEVVDDRGKHGGPEWAAVGVQCGEERGHEWEEARAGEAVQHAGGEGVVVEIDLHNPKNKRKNKILGMEQQQKQEPGGGGGGVRVVARICPCAPPPPPPDAALNFQVAALNDPALISFIPRRPTASAATAAASGRGDGPKDKQQQQQQKYRVDGCYLRDDPNHRVFHNEVKPLIDGRGGGGGGRGGAKACVVACGDAAAKRHLFMGSPDQPGLFTMAMAQLLDSSKAIGAAVTVSSYQVLQDTHILDLLEPKNHEVLILEDADGQTHLKGLSRVGVNSIEEFSQLCCCATNQQRHHPAKDSTQLQDWGHQGLIIYVSSFDQQGKECALAKINFLNLAGYVDPKQKKNEGLALLTGNKSMHALMNVVQALNSNQRFVPYRQSKVTRILQDSLCKSKTSGSVLIACLGCTKENNSVSTLALASRSSQVVNEQYYSLSLSAKKSSKSNMNLPTDAKTLSRTFIHKTMSMQEKNARPGFNNSGVKGGQTPTANRRTQPIISSTKKSGSSICTSIKMKENYAKPKISGRKLFCPSNNSLKEENATDVASTVVTETNTLSSPKLSDRLREISNSLKLLSTRPVSVRAEKWDIECARRINTIAPEPKTPEVHLKFEQAEDPKDKLTARSTGIKKSLAQECLTFLNSANKEQLKSLKGIGDKRANYILELREESPELFKEISDLRDIIGMNSKELLLKSECFGQELAFCERISALQWFAAIMCSL

SEQ ID NO: 172807 - protein, 181 aa, Oryza sativa
  Clone ID: PAT_MRT4530_70907C.1.pep
MAAAATTTTKKLQVASSSPNTHKSYWSTKQYILVAVVGTLAATVIVIGISALLSPGEIDFSVTKASRMILPLDGGVELNLTVAAANPGWRAAVEYRGFDVKLHYTPFDGEPTLLNEDDASSVRTPFVQPPRNTTAIPVRVFVSGDYWVQNMMRGNDIPITAQIIGEVVLEMIGFTGDMQVI

SEQ ID NO: 172808 - protein, 201 aa, Oryza sativa
  unsure (1)..(201): unsure at all Xaa locations
  Clone ID: PAT_MRT4530_70908C.1.pep
HISLPSPRPRVSLRPPPPAPRSLRLDRVVAAAAASAQLAALSPRELQLVLVYFAQDGRDAYCALEVFDWLRRANRVDGETMELMAAIACGWIERLVGGGGDVADVAALLGEMDCVGLRPGFSLVEKAVALYWDRGDRGSAVDFVRDVLRRGGVGVGVGDGGEYGXACDGERGGPVGYLAWGMIVGGGWRGAGGWEVRVGEV

SEQ ID NO: 172809 - protein, 109 aa, Oryza sativa
  Clone ID: PAT_MRT4530_70909C.1.pep
MSTDNANGSAPGDGTNGGNSASNISGGPFSGYNTAFIGNDTSYRVVGVGDVKFKMYDGNEVDSDRKTTNIMKDSKTVMTGGVMEDGYTGVDVHNPKGGEPSIGSSGGSA

SEQ ID NO: 172810 - protein, 107 aa, Oryza sativa
  Clone ID: PAT_MRT4530_7090C.1.pep
PMVLAGALTHKKFPRHMVSSRNGLGKPQKSPLLVLHLLCQNQRGQLNVQSKGSWTSSPPTATTAPATRSTAATTATTAQRVIASLSLPGKGGRPSLWIWICSFFFYP

SEQ ID NO: 172811 - protein, 72 aa, Oryza sativa
  Clone ID: PAT_MRT4530_70910C.1.pep
LLTLTKCWGHLQKTAGVMTKPCPSSLDETRNLDKQIIILLQKQLRVKTKTMFLHYKLPISQLQFICFQNIHY

SEQ ID NO: 172812 - protein, 325 aa, Oryza sativa
  unsure (1)..(325): unsure at all Xaa locations
  Clone ID: PAT_MRT4530_70911C.1.pep
MAVVVPEAVLRHGDARPMPAVGMGVAEYPSTPERTRDAVLAALEAGFRHFDTASLYRTEAPLGEAIAEATRRGLLASREEAFVTTKLXWCTVSLRWIHEQGVTPIPKSYNKERLXNRILRYSDWELTKEDRLKISQIPQKKIVTAARMFSPDGEFASVDLSDMEXCGGVGPDEDAWLPLLQFFFHVCIYEKIQLGFVFEYXILNSCIFNXFRMIGYQISNGCILXSPKYEMESSVLTEIARARGKSIAQVSLRWIYEQGVTPIAKSYRKERLKENLEIFDWELTDEDRLKISQIPQRKRVTAASLFSPDGEFTSVDLPDIEIVEE

SEQ ID NO: 172813 - protein, 331 aa, Oryza sativa
  unsure (1)..(331): unsure at all Xaa locations
  Clone ID: PAT_MRT4530_70912C.1.pep
MDGEEAPPGALNLADYAPAGARTVDCFRRIRKISEGTYGEVFEAMDIITGERAALKKIKLDDGKEGFPRQILREIKLLKKLDHENIIRLKEIVVSPGTAHGAGGSDDYMYRGDIYMVFEYMDHDLKKVLHHSTPSQVKYYMEQLLKGLHYCHVNNVLHRDIKDYLLPFIGANLLISGGGKLLKLADFGLARPFTRDGSFTNHVITLWYRPPELLLGATNYAEAVDIWSVGCIFAEFLLRKPLFPGRTEXEQLSEIFELCGFPNEENWPGVSKLPLYKTIRPTTPTKRRLRDIFHNFDSHAVDLIDRMLILNPTERISAHDALCAAYFITKM

SEQ ID NO: 172814 - protein, 63 aa, Oryza sativa
  Clone ID: PAT_MRT4530_70913C.1.pep
MGGFYKRAGKTTSPGRGATEAPPLPSVKVSKITKTGFHPTTLQEEMRRHNNALKRGSGSKRLR

SEQ ID NO: 172815 - protein, 316 aa, Oryza sativa
  unsure (1)..(316): unsure at all Xaa locations
  Clone ID: PAT_MRT4530_70914C.1.pep
RPPPPQPPPPFAPXLHSDTAAPFAPPPPPPPLXPPSAPPDPXPPSFSPPPPGPRRRRCLHLGQPSPPQESSPPPGPRRPCRLYLGRPPQPRESPPPGPRCPRRLHLGRPPRPRESLPPGPRRPRRPPATARMPPPRRDTSSPPPFTKVSPRPPPPLFYLLSDXTPFSPPQPXPGLVVVPGPSSPPPGPPPRRLFLLSAAAPRPSLPPPGPPXASSSSQLPHQESPPLPTLLAGQPKPSXTPPGTSPSSAPFKGYQSTNPPKSNPQVTRARKLRPPEPSYPFDDVTEDTPGTDRPPRISVSPSRPPVVASPRDSPIA

SEQ ID NO: 172816 - protein, 234 aa, Oryza sativa
  unsure (1)..(234): unsure at all Xaa locations
  Clone ID: PAT_MRT4530_70915C.1.pep
DVIHGSHSTGGDLAGARVVGRDFGGHLREENDETNPMVLTTTANNARRRPATRRTTAVARVARRRRAPVVGDEGEVAAELPHTTAHLKATAASGCDGGGGCATSPXSAGGGGGLSXRRRRATRHERPRERGQTKEEDXGVLFIALDXRDRTPNERNRSRKIKNSVLEINSKTSLIRXNTQRFAPILGGKDRGGXEDQNPSKIRKKRGRIGADLEAERRRGAQLGLCPDCRLKVR

SEQ ID NO: 172817 - protein, 174 aa, Oryza sativa
  Clone ID: PAT_MRT4530_70916C.1.pep
MATKDVPVEVEGHSNGADNKRMNNGNRTRQDNGGSKTKKSSDCNVQGHEYSSFPVEAVMRMGSTVKGGDRGVRLGRGLAMSSVHMLVAGGEVEGGDRGMRLGRGLAMSSVHRLVAGGEVVGQIWLVLVVFLAISPMEDLRPTRSFLQLMANMQPRGSAIEFLMMCLLTVIIGQF

SEQ ID NO: 172818 - protein, 500 aa, Oryza sativa
  Clone ID: PAT_MRT4530_70917C.1.pep
MDLTTGAIWLFLAQLFVAATMLSKIATRERTRTTGTKFSRPPPPPLARGAPLVGVLPSLLANGPVEFIRHHYEKMGSVFTVSLLQQKVTFLVGSEASSHFYKGLDSEISQDEVSQFTIPTFGPGVAFDVDYATRHEQFRFFGDIMKPAKLRTYVDLMVAEVEGYFARWGQSGTVNMKQEFEQLVTLIASRCLLGEEVRDKMFDEVSTLLRELNDGMRLVTILFPRLPIPAHRRRDRARARLGEIFSDIVRSRRGSSGGGGGGGGARHDDMLQCLIDARYKDGRATTETEVAGMLVAALFAGQHTSSSTSTWAGARLLTNPDHLRAAVEEQARLLRRHGGDRVDHAALAAMDTLQRCVKETLRLHPPALMLLRHARRSFVVRGGSGEREYEVPEGHTVASPLLLHNALPRVYRDPGEFDPGRFGAGREEGAGGLAYTAFGGGRHACVGEAFAYMQIKVIWSHLLRNFELQLVSPFPETDWTVVMPGPKGKVMVTYNRRKLT

SEQ ID NO: 172819 - protein, 264 aa, Oryza sativa
  Clone ID: PAT_MRT4530_70918C.1.pep
MAAALRAALRRRHAASSPVARLLPYSSPGPCAKGGGAASTLHAATRGAPAPSIQAPSVVRRYCSAGVSSDLDLFAVSPSGGYAAVRPARGASPLQVPSLVRRYGSTTGATATATPAAGVPALHRASPLPLFVPRRRRVYSSEEYSSDEYSSDGYSSGQHEPPEPRGVSQTTMVLPAINLERMAYGNGIVCGYNRLAEYKYVEDCQVAKVMDHQLRRIEKVEAGLKQLGWFQIITVSLLGLVTYQCHSEVSRLDKEVAAPKSEST

SEQ ID NO: 172820 - protein, 513 aa, Oryza sativa
  Clone ID: PAT_MRT4530_70919C.1.pep
MAHEPGMTIKAPASATNSSTSKAYRKRPRPSPGTWASKKLFKDNYDGTADGSAKGPRRHSVGSSDGDGGRRPGLPLASILIPPKPPPNPNPTTTSPSSAAAATATATATSSLRSPVRIEAMSSDDEVREEKELDLSSSDVVTKYKDAADIINNALKLVVSLCKPKAKIVDICEKGDSYIREQTGNIYKNVKRKIERGVAFPTCVSVNNTVCHFSPLATDEAVLEENDMVKIDMGCHIDGFIAVVAHTHVIHDGAVTGKAADVLAAANTAAEVALRLVRPGKKNKDVTEAIQKVAAAYDCKIVEGVLSHQLKQFVIDGNKVVLSVSNADTKVDDAEFEENEVYAIDIVTSTGEGKPKLLDEKQTTIYKRAVDKNYHLKMKASRFIFSEISQKFPIMPFTARALEEKRARLGLVECMNHELLQPYPVLHEKPGDLVAHIKFTVLLLPSGSQRVTSHSLQELQPTKSIEDNAEIKAWLALGTKTKKKSGAKKKKGKKGDAAEAVPMEEGSNDANKE

SEQ ID NO: 172821 - protein, 92 aa, Oryza sativa
  Clone ID: PAT_MRT4530_7091C.1.pep
TTGCRSSVIGVTAPRAWSRALTGDKSPPRGHRTSSAQTARKAMRLYADGRRSYHHVRQDGTGNARSRYGAVPAGKSPAGRRPEVASYANFFW

SEQ ID NO: 172822 - protein, 115 aa, Oryza sativa
  Clone ID: PAT_MRT4530_70920C.1.pep
TNAYFTLCSCYTGYTTSLSVRCFGAGIMLAYAITLCYDDDIRVVSGSLDVGSRLWDIIIWGYMLRMRGGSLMVIAQYGYSFARVYSHKLISWVGYSSVFSPACMVMTGCRRKSTV

SEQ ID NO: 172823 - protein, 45 aa, Oryza sativa
  Clone ID: PAT_MRT4530_70921C.1.pep
FSFDQRLKVIGGGGKHREGAHNRHAPRHGQRLGSGTTTSGASVNS

SEQ ID NO: 172824 - protein, 132 aa, Oryza sativa
  Clone ID: PAT_MRT4530_70922C.1.pep
FVFLFFGVLFFFFFSHKSYLNNILKMGGPFCSIPVCGRGPWPASFCQDYEVTKYHYKFIFCRGHKDTGFMFGLDKLLGAKSCRVTQCRGWTVHCWTWRPLYGSEPALKVLGTTSETKQSPLYFTRKRPDKGP

SEQ ID NO: 172825 - protein, 352 aa, Oryza sativa
  Clone ID: PAT_MRT4530_70923C.1.pep
MTIIDYVDLCDDEEIIVEEPGPHGQVHAADMHVELVDLTTEGDGVEDQNIPGKDDAVLCTTLHSPNFIAAHGQGETAHLIVTLCKQGFIAVVDDAEEAMQSGNKELSAANDGKGEAMQSADQGIVVAGDCTEEVMMSGNQDFASAVADAEETMQSGTQEFVAEGDHSRDAMQFGNAGQASTCSSMSEQGAITYSSMTEQIATASSSMTGQWSREAAAFLCSRPMSIALPFPRQFWKAGEYSVAAQPTINSDQNHLRIHPKFLHSNATSHKWAFGAIAELLDNAVDEVNNGATFVKIDKIKCSLIDEYSLVIQDDGGGMSPESLRHCMSFGFSKKSGNSSIGQYGNGFKTSTM

SEQ ID NO: 172826 - protein, 91 aa, Oryza sativa
  unsure (1)..(91): unsure at all Xaa locations
  Clone ID: PAT_MRT4530_70924C.1.pep
MEHDGFMREVEGEYADANQSAISXYLLVLSMSPTWSSRWLLLLAQVNTSLLVMVLPSVWQRGSKXAFASTAAGHXLAGHRHQPPRCRRPSP

SEQ ID NO: 172827 - protein, 719 aa, Oryza sativa
  Clone ID: PAT_MRT4530_70925C.1.pep
MAVAKWERAKRALATRLCVRAPRVRAAAAEAEGEGEEGEGRGRSVAASPPAHVASSRRLSRCGSRSSTKICAICLGGMCSGNGQALFTAECSHKFHFHCISSSVRHGNTVCPICRAVWKELPFQGPLPAAAAADASLLGTARVNPHPLDDRHQHQRMAVVRRLSRGDSVTRQWQLPIFRTLDGGIFDDDEQLDLHPAEDVVGTQDVDSIVADEMAPASVGITTYAAFPAMEESVMVEEFAVLIHLKAPSSPATVTSRAPIDLVTVLDVSWSMAGTKLALLKRAMSFVIQALGPGDRLSVVTFSSSARRLFPLRKMTESGRQRALQRVSSLVADGGTNIADALRKAARVMEDRRERNPVCSIVLLSDGRDTYTVPVPRGGGGGGDQPDYAVLVPSSLLPGGGSARHVQVHAFGFGADHDSPAMHSIAEMSGGTFSFIDAAGSIQDAFAQCIGGLLSVVAQELRLSVECGDDGVLLTSVRSGGYASHVDGDGRGGFVDVGDLYADEERDFLVTVRVPAARGVSALITPSCTYRSTATMETVRVGGDTVTVPRTVDAPVGYDGMSPEVERELHRVQATEDMAAARAAAERGDFELAAAILDERRGVLESRADDDPQSVALAAELREMQDRVETRQRYEESGRAYMLAGLSSHSWQRATARGDSTELTSVIHTYQTPFMVDMLQRSQTLQPEVVVAMSRSAPLPAPSLSLSPPPPPSQLRRRS

SEQ ID NO: 172828 - protein, 65 aa, Oryza sativa
  unsure (1)..(65): unsure at all Xaa locations
  Clone ID: PAT_MRT4530_70926C.1.pep
ELRXATNGLYCPTFRDMQIANLSWLLNISLCGLDCIIDGSLSLGTMTAYSSTAIGIVRGTLYPNG

SEQ ID NO: 172829 - protein, 70 aa, Oryza sativa
  Clone ID: PAT_MRT4530_70927C.1.pep
MVTNAKRFARRRYGMYWSLNGMCDNKTGRRAGAARQRHICRYLSANVSGTELSHLSANRFGADIPDISAG

SEQ ID NO: 172830 - protein, 152 aa, Oryza sativa
  Clone ID: PAT_MRT4530_70928C.1.pep
YTTWLHPEHSLTRRVYGGKRGAAGEGNEGDRTIFGGSYRYRCRGGAPCGGFDVHEACLTLPKRVKLGRRHRDHELTLSVLTASRRCVACRETSDAGRCMYRCVECDVDVHPRCTPLLMEAGGASGRRWPQHGWKRRAAKRVAKVALNCVLEV

SEQ ID NO: 172831 - protein, 67 aa, Oryza sativa
  Clone ID: PAT_MRT4530_70929C.1.pep
PFGGRAHSQIKGTKIENKYFGKTLLDIEGLWIFYPLLETMDPALYDTMYEKKQNIKPSKHRLLFPLF

SEQ ID NO: 172832 - protein, 1040 aa, Oryza sativa
  Clone ID: PAT_MRT4530_7092C.1.pep
MPGVPREVIEHRLAVRPGARPVRQKVRRQAPERQAFIREEVARLLEAGFIREVIHPEWLANPVVVPKANGKLRMCIDYTDLNKACPKDPYPLPRIDQIVDSTAGCDLLCFLDAYSGYHQIRMAREDEEKTAFITPVGTYCYTSMPFGLKNAGPTFQRTTRISLGSQIGRNVEAYVDDLVVKTRNQETLLLDLAETFENLRSARIKLNPDKCVFGIPAGKLLGFLVSARGIEANPEKIRAIERMRPPSKLRDVQCVTGCMAALSRFISRLGEKALPLFKLLKRSGPFTWTEEAEHALTQLKAYLSSPPVLVAPEPNEPLLLYLAATPQVVSAALVVERDEDNPHFVHPHSVLTWPGSERGGEAPESDGGLRPLTTGAGPLPACQTVLGAPDPQEGPKATAGRPHLTPFDPEANPVLTRPGKEQGEEAPEPNGGQRPLTTGVGPLPACPTMPGAPDPQDGPEATEGRPPLSSSDPEVIGTENKCAPKGHLNEEPPGGTAPSREDQPHRRVQRPVYFVSEALRDAKTRYPQAQKMLYAILMASRKLRHYFQAHRVTVVTSYPLGQILHNREGIGRVVKWAIELSEFDLHFEPRHAIKSQALADFVAEWTPAPETVSIPEASTNPSQLPHTTHWVMQFDGSLSLQGAGAGVTLTSPTGDVLRYLVRLDFRATNNMAEYEGLLAGLRVAAGLGIRRLLVLGDSQLVVNQVCKEYRCSDPQMDAYVRQVRLDLVRRCRACQFHAKQIHQPAQALQIIPLSWPFAVWGLDILGPFKRAPGGFEYLYVAIDKFTKWPEAYPVVKIDKHSALKFIKGITARFGVPNRIITDNGTQFTSELFGDYCEDMGIKLCFASPAHPRSNGQVERANAEILKGLKTKTFNILKKHGDSWIEELPAVLWANRTTPSRATGETPFFLVYGAEAVLPSELTLRSPRATMYCEADQDQLRRDDLDYLEERRRRAALRAARYQQSLRRYHQRHVRARSLCVDDLVLRRVQTRAGLSKLSPMWEGPYRVIGVPRPGSVRLATGDGTELPNPWNIEHLRRFYP

SEQ ID NO: 172833 - protein, 86 aa, Oryza sativa
  unsure (1)..(86): unsure at all Xaa locations
  Clone ID: PAT_MRT4530_70930C.1.pep
MKAKKQKEPHNHMRKPSSPAEKKKPNEKGTDKTIHGPCLERRLGTWAGTARPVSSAVPNGPCRNXRAGTVPVPGRAVPPVWPPLGA

SEQ ID NO: 172834 - protein, 201 aa, Oryza sativa
  unsure (1)..(201): unsure at all Xaa locations
  Clone ID: PAT_MRT4530_70931C.1.pep
MATMGSLIGLVNRIQRACTVLGDHGGGGEGGSLWEALPSVAVVGGQSSGKSSVLESIVGRDFLPRGSGIVTRRPLVLQLHKTEGGQEYAEFLHAPRKRFTDFAAVRKEIADETDRITGKTKAISNIPIHLSIYSPHVVNLTLIDLPGLTKVAVEGQQESIVQDIENMXSGFMLDRPXSIILAISPANQDIATSDAIKLVRD

SEQ ID NO: 172835 - protein, 79 aa, Oryza sativa
  Clone ID: PAT_MRT4530_70932C.1.pep
CSNRQAESKLVHKASRDQGGSGGYAVSEVTKTCSWENGRANLRLLEDQSEDLLDLLTKTSYLFEYLILYITCNAITSTN

SEQ ID NO: 172836 - protein, 361 aa, Oryza sativa
  Clone ID: PAT_MRT4530_70934C.1.pep
MDVEYDVIVLGTGLKECILSGLLSVDRLKVLHMDRNDYYGGDSTSLNLNQFMMANGTLVRVLIHTGVTKYLSFKAVDGSYVFNKGKIHKVPSTDMEALKSPLMGLFEKRRAGKFFLFVQDYKENDPSTHKGYDLNKMTTKELISKYGLDDNTIDFIGHAVALHKEDNYLTEPAIDTVKRMKAKSVGRFQGGSPYIYPLYGLGELPQGFARLSAVYGGTYMLNKPECKSYDATTHFESTVMDVLSIYTKITGKLDSRALAAAAASSPTARASTPPPPPPPPRLQHCRSPPPVLPSPVIFVVSGVRCHRAALLLHLRRLLLPAASTDYPLLRPPDLRSPRHRPPRGLRRPGRFRLTLDPHHET

SEQ ID NO: 172837 - protein, 469 aa, Oryza sativa
  Clone ID: PAT_MRT4530_70935C.1.pep
MDVEYDVIVLGTGLKECILSGLLSVDRLKVLHMDRNDYYGGDSTSLNLNQLWKRFKGEGTPPAQIGASRDYNVDMIPKFMMANGTLVRVLIHTGVTKYLSFKAVDGSYVFNKVQIHKVPSTDMEALKSPLMGLFEKRRAGKFFLFVQDYKENDPSTHKGYDLNKMTTKELISKYGLDDNTIDFIGHAVALHKEDNYLTEPAIDTVKRMKLYAESVGRFQGGSPYIYPLYGLGELPQGFARLSAVYGGTYMLNKPECKIEFNDEGKVCGVTSEGETAKCKKVVCDPSYIPDKVRKVGKVFRAIAIMSHPIPNTADSHSVQIIIPQKQLGRKSDMQITLGLLVISIIVTKECSLVHARYVFCCSYSHNVASKGKFIAFVSAQAESENPAAELKPGIDLLGPVDELFIDTYDRFEPTNDPSSDNCFISTSYDATTHFESTVMDVLSIYTKITGKTVDLSVDLSAASAAEDDL

SEQ ID NO: 172838 - protein, 339 aa, Oryza sativa
  Clone ID: PAT_MRT4530_70936C.1.pep
MAALLPPLRFSIRRRRPNQSPRGGGDLGFPRPRRRRLPPRRRPLLPSSIPGGLRRVACPKMRPVFCGNLDYDARQSEIERLFSKYGRVERVDMKSGFAFVYMEDERDADEAIHRLDRIEFGRKGRRLRVEWTKEDRSGGRRGNSKRSPNNTRPTKTLFVINFDPINTRTRDLERHFDQYGKISNVRIRRNFAFVQYELQEDATKALEGTNGSTLMDRVISVEYALRDDDEKRNGYSPERRGRDRSPDRRDYRGRSASPYGRGRERGSPDYGRGRERGSPDYGRGGDRGSPDYHRGASPQGGNKGDERGSPPNNYDRERREASPGYDRPRSRSPARYERE

SEQ ID NO: 172839 - protein, 459 aa, Oryza sativa
  unsure (1)..(459): unsure at all Xaa locations
  Clone ID: PAT_MRT4530_70937C.1.pep
MDEEYDVIVLGTGLKECILSGLLSVDGLKVLHMDRNDYYGGDSTSLNLNQLWKRFKGDDNPPAHLGGSKDYTVDMVPKLMMANGTXYRPLIYTDVTKXYLNLKPVDGRXVCSKGKIHNVPAADMEALKSPLRCLLEKRRARNFFIYVQDYNEADPKTHQGLDLTTMTTRELIAKYGLSDDTVDFIGHALALHRDDRYLNEPAIDTVKRMKLYAESLARFQGGSPYIYPLYGLGELPQGFARLRAVYGGTYMLNKPDCKVEFDMDGKVCGVTSEGETAKCNRVVSYTSXYPNKVRKDGKVAHSITKVXHPIAYTKDSHSXVQIIFPQKQLGRNSDMYVFGCSYTHNVAPNGKFIAFVSTEAETDNPESELKPGIDLLGQVDETFFDIYDRYEPGNISXKENCFVTTSYDATTHFETTVTDVLNMYTLITGKTVDLSVDLSAASAAELISVNNRSSSKSIH

SEQ ID NO: 172840 - protein, 257 aa, Oryza sativa
  Clone ID: PAT_MRT4530_70938C.1.pep
VRNSRVDPRVRRSPFSLPSPAPLSSPPSLFPFGCAAPPPLHPDLRLHRPAVSATATAVATRSRPPKPTAAAPESGGGRIRVLPALPFLPGRSQGRRPLDSCVTVATEDGGRRIRIGFFLPRLLTAWVCRWDGGSCAAARAGERKVRTLCVFSWCVSCCDFLGELFVVSPPAAVDEILHLCFGGFLVGFFPSSSSLSCGKVWEDGHGLELWIFSLTDFPPAQTSTTRNLRLAVDGAGTNNQTRTWRGFWESKKGDFHF

SEQ ID NO: 172841 - protein, 98 aa, Oryza sativa
  unsure (1)..(98): unsure at all Xaa locations
  Clone ID: PAT_MRT4530_70939C.1.pep
MRPVFCGNLDYDARQSEIERLFSKYGRVERFDIXQGFAFVYMEDERDADEAIHRLDRIEFGRKGRRLRVEWTKEDRSGGRRGNSXRSPNNTRPTKTVW

SEQ ID NO: 172842 - protein, 63 aa, Oryza sativa
  Clone ID: PAT_MRT4530_7093C.1.pep
MDCGAVAVMPPQPQDNMMIVDKDIWGNGVSSRKMKKRVTDNNDVQQQNKQHIGQGKTWPGFVT

SEQ ID NO: 172843 - protein, 76 aa, Oryza sativa
  Clone ID: PAT_MRT4530_70940C.1.pep
LSRHSHNLSRLLLDANFGNGPKSRLTPEKVLTPHDKEALYFQLQSNSRSLNPTFAYSHAQHRVSSNTTPDDTVIQQ

SEQ ID NO: 172844 - protein, 75 aa, Oryza sativa
  Clone ID: PAT_MRT4530_70941C.1.pep
GFSRCFKDPRKLALHVAPEIFPGPLRFMCYYLSMGGLELWFYSQIKELGEGKTLATSMYTLFRILYSRGVVLRQN

SEQ ID NO: 172845 - protein, 50 aa, Oryza sativa
  Clone ID: PAT_MRT4530_70942C.1.pep
FWGRLGKSCISFQQHVQDPLLMGHYMPTITGSMHDITKFFYLIPKFQLNH

SEQ ID NO: 172846 - protein, 97 aa, Oryza sativa
  Clone ID: PAT_MRT4530_70943C.1.pep
MVSPPAGKNPIFRPMPGEVIANASPISREQARTLKNNRGKEPGAFPPKYHHQPPLGFSNESENGAPEGWPNEKGWGDQKKIKSPKYVKLWGGSVLSL

SEQ ID NO: 172847 - protein, 129 aa, Oryza sativa
  Clone ID: PAT_MRT4530_70944C.1.pep
LSHRAMGKYSVGLVVLGLLALAFSTTVLAETHVVGDSNGWDFSVSFDSWADGKVFAAGDTLVFNYKPGAHNVLAVDAATYRSCKVGSSADSVAAATGTASFLLKKGVNYYICGVPGHCAAGMKLRVVAN

SEQ ID NO: 172848 - protein, 58 aa, Oryza sativa
  Clone ID: PAT_MRT4530_70945C.1.pep
SCSYMIHITNLVVHEPICMVSYKALFYIMLGGCQQTTVQVLLVRYFQACLFELEVYSL

SEQ ID NO: 172849 - protein, 182 aa, Oryza sativa
  Clone ID: PAT_MRT4530_70946C.1.pep
SLASWMFFVCRGRVIPLTLSFTFLKPGILVVSFGGKCWPSRDPEFLVQAKARTPSLVCLPSFDLLVLFCSSWSPAAPITSLFIFLDASLLCGTDPLASGPLRYNSLRRCPLPSTPASSSGEMLRDGVHERSLNSLMSCSFDLGFLEATLLGLFKTASAAFSGGLPCPSITGQPDLPNQALPT

SEQ ID NO: 172850 - protein, 184 aa, Oryza sativa
  Clone ID: PAT_MRT4530_70947C.1.pep
CAVCLTEFRDGETLRLLPRCRHAFHRGCIDTWLRAHVNCPLCRAPVQISDKSAAAAAAAAANAAPGAAAAVPGGAPAPNPRNAAAAEADRGELQGSPERGVRRAASMVTLPRRPWPEVSLRSPASNSGRMGEMGLAKIARLMKFSEVLEMAGIGATRSVSFGGHGRSGQSAAAGAGNNADEISR

SEQ ID NO: 172851 - protein, 170 aa, Oryza sativa
  Clone ID: PAT_MRT4530_70948C.1.pep
YFKPSGRRRGVQTPIGGRRPEPAPPPRTAAINTRPPRARARRGAEGEMEMEAEDWGESSSSPRPHPEADMVNKEKDPEEMKRKLKERILELEKEEVPLPDDAYAFVHHLSRLPKRYLFDLGVDRGDDVLLHWRILTPCAHPRIAPFSRPLQKFILYRIRFRPCQGYGRPH

SEQ ID NO: 172852 - protein, 248 aa, Oryza sativa
  Clone ID: PAT_MRT4530_70949C.1.pep
MDRHHHHHHHHHHHMMSGGGQDPAAGDGGAGGATQDSFFLGPAAAAMFSGAGSSSSGAGTSAGGGGGGPSPSSSSPSLSRYESQKRRDWNTFGQYLRNHRPPLSLSRCSGAHVLEFLKYMDQFGKTKVHTPVCPFYGHPNPPAPCPCPLRQAWGSLDALIGRLRAAYEENGGTPEMNPFGARAVRLYLREVRETQARARGISYEKKKRKKPSSAGAGAGPSSEGSPPPPGGSASGGGDTSASPQFIIP

SEQ ID NO: 172853 - protein, 1924 aa, Oryza sativa
  Clone ID: PAT_MRT4530_7094C.1.pep
MAEQGKAHDLSPSVSGDDGEPNPRRRARTPPPPPRQSPKQGEALERVDKSVASPVAGDAGERRDGERRLLVYGDGSTPQGALQAAGALLRHPPVVHDPESPAQRWLEDVANLVMTAQQRLGAGGRSATTKTSGAATTGSVSSRRRARRAAAAARHSVATPSSTPSTREDQHGEPDARLNIERRRSSRRTPRATEGASSSRVSPRHGREDQPSVPPAGGVGCRAFVASLRNVRWPPRFRPTITEKYDGSVNPTEFLQVYTTGIEAAGGDDRVMANFFPMALKGQARGWLMNLPPASRFCQVRNTIPCIPAHAVIYAFRGGVRHNRMLEKIASKEPQTTAELFQLADRVARKEEAWTWNSSGSGVAASAAPGSAAQTGRRDRRRKKRSDRSGDEGHVLAVEGAPRATRKGRPASDKKKEAGTPSKERPAGRWCSVHNTSLHDLVDCRAVKNLAERTRKWEEDRRQERREGKSPAVPSGKRRSEAKQKAPAVDIDDGDDDLGFQEPGATIATVDGGACAHVSRRSFKAMKRELLAMAPTHEAMRRARWSEVALTFDQTDHPPCIARGGQVAMVVSPTICNVKLGRVLIDGGAALNILSPAAFDAIKAPGMVLQPSQPIIGVTPGHTWPLGHIDLPVTFGGPANFRTERVNFDVADLSLPYNAVLGRPALVKFMAAVHYAYLQMKMPGPGGPISVHGDLKVALACMEQRADRLAAASKPEGGDERLGPSAPTAPRQRMATCDEVPEDALVSFLRANADVFAWRPADMPGVPREVIEHRLAVRPGARPVRQKVRRQAPERQAFIREEVARLLEAGFIREVIHPEWLANPVVVPKANGKLRMCIDYTDLNKACPKDPYPLPRIDQIVDSTAGCDLLCFLDAYSGYHQIRMAREDEEKTAFITPVGTYCYTSMPFGLKNAGPTFQRTTRISLGSQIGRNVEAYVDDLVVKTRNQETLLSDLAETFENLRSARIKLNPDKCVFGVPAGKLLGFLVSARGIEANPEKIRAIERMRPPSKLRDVQCVTGCMAALSRFISRLGEKALPLFKLLKRSGPFTWTEEAEHALTQLKAYLSSPPVLVAPEPNEPLLLYLAATPQVVSAALVVERDEDNPHSAHPHSVPTRPGSRQGGEAPESNGGLRPPTTGVGPPPACQTVLGAPDPQEGPKATAGRPHLTPFDPEANPVLTRPGKEQGEEAPEPNGGQRPLTTGVGPLPACPTMPGAPDPQDGPEATEGRPPLSSSDPEVIGTEDKCAPKGHLNEERPGDTAPSREDRPHRRVQRPVYFVSEALRDAKTRYPQAQKMLYAILMASRKLRHYFQAHRVTVVTSYPLGQILHNREGTGRVVKWAIELSEFDLHFEPRHAIKSQALADFVAEWTPAPETVSIPEASTNPSQLPHTTHWVMQFDGSLSLQGAEYEGLLAGLRVAAGLGIRRLLVLGDSQLVVNQVCKEYRCSDPQMDAYVRQVRRMERHFDGIELRHVPRRDNMIADELSRLASSRAQTPPGAFEERLTQPSARPDPLGETDAPDRPPRPVGVQASGPEGSASSSLRLIAWISEIQTYLTDKTLPEDREGSEREQGVELLADIHEGECGAHSASRTLVGKAFRQGFYWPTALNDAVDLVRRCRACQFHAKQIHQPAQALQIIPLSWPFAVWGLDILGPFKRAPGGFEYLYVAIDKFTKWPEAYPVVKIDKHSALKFIKGITARFGVPNRIITDNGTQFTSELFGDYCEDMGIKLCFASPAHPRSNGQVERANAEILKGLKTKTFNILKKHGDSWIEELPAVLWANRTTPSRATGETPFFLVYGAEAVLPSELTLRSPRATMYCEADQDQLRRDDLDYLEERRRRAALRAARYQQSLRRYHQRHVRARSLCVDDLVLRRVQTRAGLSKLSPMWEGPYRVIGVPRPGSVRLATGDGTELPNPWNIEHLRRFYP

SEQ ID NO: 172854 - protein, 57 aa, Oryza sativa
  Clone ID: PAT_MRT4530_70950C.1.pep
LPPKKQEGRRIMLQTISMAIGAKLKSSLAFYQLPKSRRTRDRGQNMGRTQSQSESRS

SEQ ID NO: 172855 - protein, 105 aa, Oryza sativa
  Clone ID: PAT_MRT4530_70951C.1.pep
VLDQLLIGPHHYVVVKKAQREGCAYIAFKTNPNSMVSHIAGKSSIFRALPTDVLANAYRISREELKAQHTEMSRCITLIDSRRYMWRSLSACDKILIIIIIAAWC

SEQ ID NO: 172856 - protein, 137 aa, Oryza sativa
  Clone ID: PAT_MRT4530_70952C.1.pep
MEIADPAASNPDVRNMASYFIDPTTTWHRFPSPSRLLLRRRRFPTSGGEQPGCGCALAGPGRSGTHGRSLRGIGDGNGGRPAGSFSSGQIDGALAAGFRGEQRQSDLFINAGRFYLIASPGAPTPTEYSVKIASVRT

SEQ ID NO: 172857 - protein, 513 aa, Oryza sativa
  Clone ID: PAT_MRT4530_70953C.1.pep
MAMATALRKLSSDALRRQPLSRITPLYYMASLPATEERSGVTWPKQLNAPLEEVDPEIADIIEHEKARQWKGLELIPSENFTSVSVMQAVGSVMTNKYSEGYPGARYYGGNEYIDMAESLCQKRALEAFRLDPAKWGVNVQPLSGSPANFHVYTALLKPHERIMALDLPHGGHLSHGYQTDTKKISAVSIFFETMPYRLDESTGLIDYDQMEKSAVLFRPKLIVAGASAYARLYDYDRMRKVCDKQKAILLADMAHISGLVAAGVVPSPFDYADVVTTTTHKSLRGPRGAMIFYRKGVKGVNKQGKEVMYDFEDKINAAVFPGLQGGPHNHTITGLAVALKQATTPEYRAYQEQVMSNCAKFAQSLTAKGYELVSGGTDNHLVLVNLKSKGIDGSRVEKVLENVHIAANKNTVPGDVSAMVPGGIRMGTPALTSRGFVEEDFAKVADFFDAAVNLALKVKAAAGGTKLKDFVATLQSDSNIQSEIAKLRHDVEEYAKQFPTIGFEKETMKYKN

SEQ ID NO: 172858 - protein, 97 aa, Oryza sativa
  Clone ID: PAT_MRT4530_70954C.1.pep
MLRIANYWFFNMMNCALTFEPLPYLVAIYHFQSLTAKGYELVSGGTDNHLVLVNLKSKGIDGSRVEKVLKNVHIAANKNTSPGDGSAMVPGGIRMGT

SEQ ID NO: 172859 - protein, 100 aa, Oryza sativa
  Clone ID: PAT_MRT4530_70955C.1.pep
MRTAAARIPVLSSPALVNDMARQPFLSPVHADDVVAGDCGADEKQKTHIAQNFEGMTMIMHDEVAQQCVTLMISYMLFENDWPPDLTFKIQITQFSSFHF

SEQ ID NO: 172860 - protein, 100 aa, Oryza sativa
  Clone ID: PAT_MRT4530_70956C.1.pep
MCTRVPDLPKDSDKQRFGHSRDTNRSGFLNAHTLEPRNRSTTSPLVITRVETAERPKYGDAAPGQILDVNLFGRFLLTRKEFGCGTKTIGNSKNPTIKLG

SEQ ID NO: 172861 - protein, 179 aa, Oryza sativa
  Clone ID: PAT_MRT4530_70957C.1.pep
MTTSSSPFSPESFVNAVAASVADAVRAAYQAPPGSMHLPALSTVPAATSPPPAGDAAPASVAPTPPALSPELAALFARLAHNIPGVPQGAAPAASSNDAPPAPVLDDNARSALRSQAVVVLNVKALVLVTLDIAAGNYARWRGLFLVVLGKYALTDHVLCDAPRPDLAEWVQMDCVVLR

SEQ ID NO: 172862 - protein, 1433 aa, Oryza sativa
  Clone ID: PAT_MRT4530_70958C.1.pep
MAEVVVLAGSGWVVSPIMRKIINDAKTYLGKDMAQELDDLETTVIPQFRFVIKAAERSPRRMELERWLWKLKAAFYDAEDLLDMHEYKLLQRKATGNISMPSTSNSRLALVSTASNLLPANRRLLRKLTELKNILVEAKNFHREFLSAGTTAAAITGPHVNSSSSTITTSLPTSKVFGRDADRDHIISFLCNPDDTNTSGERNYCTSAIVGHGGAGKTTLAQYIYNDERVVNHFDVRMWICISRKLDVHRHTAEIMESATNNNRVVHFTNLNNLQCALRGVLQESQRFLLVLDDVWFYGFQDEEEWAKLLAPLVSQQRGSQVLVTSRSGRLPAPLCCKQVFPLQNMKDTEFLALFKYHAFSGAGMREQHRSEELLDIAGRIAQKLGQSPLAAKVVGSQLSRNMTITAWKDALKSDNLGETRGSLLWSYQNLDPNIQRCFMYCSLFPKGHVFVINELVHLWVAEGFVVDSSDVNSSDQSRTVEDIARAYFREMVSACFFQPVPKSFDTSYSMHDIIHDFAETLSRGDCFRLEDCMVTEIPHTVQHLSVYVDRMGQHKQSICKLIHLRTVIFMEPVMDDANKLFHEVFCNMKKLRVLLLCFYNSRKLPQSIDEFKHLRYLNILKTSISELPGSLCTLYHLQFLRVHRDVNNLPAKICNLSKLRHLERCSPSLSFGPIAQLPVPQIPYIGKLTKLQHVLEFSVAKQIGYELQQLRDMRELRNILQINYLENVRTKDEALEAMLHNKSRLDRLELSWSYIDDLHINDNLHLEVLEGLKPPRELNDLIVTGYRSPVYPSWLLEDSYFVNLKTLVLSNCTSLECLPSSVQLIKHFRHIALRNILNLKTLPCFPGGLVSLNMMGCPLLRFISREELGQDVQHTDLMKVGNLSSTLARILEAKRGSKISKKVRDTLVFEHSSLKQLMALMDDDISAQLQTIKSAIESEREEVLLEENIIKAWLYCQEKRTKLIYSRPTENLLLLPSSIENLSLSSCNLTDGALAVCLQGLTSLKWLSIERIMNLTSFPSPQVLQRLTMLKRLYIRSCWCLRSLGGLREATSLSEVKIDSCISLELVDENGIAVMPSSIGKLSLFGCILGANFLSTDFPRLRSISITCCRSSSSFAIGHLRSLESLSLNNMPDLCFLEGLSCPHLQDIHLINVPNLTAESFSRHHAWKSLAISSSAMLSLMLSIKDFMLPEKLCFEQYDEPSITFQSSANFTSIKFLEFRDSKVMYLPSSLKNLSSLERIKFVRIPNLSSLPDFPNSIQQIEIQDCECLKRSCQAPNGENWQKIECIRWKLIEVSKPDESIAWFIHRYDKVGIAAYPKKLQPGQPVVWAPVRHRPLTEGSPHPLSSARWRNPTKMQGMFMHKDLLLRSRKNPILAANLRVQISVQASIIMGLQGAVSQTALQPGQPSRGCTGRCPSNSRELVFRKQQTALEM

SEQ ID NO: 172863 - protein, 151 aa, Oryza sativa
  Clone ID: PAT_MRT4530_70959C.1.pep
MHLRLRQGRRDEEGGGDRGRRRRGDVGRGGGGGGGGGQEGRHHRRCHARRRRRRQRRRRPPPRKPTTWLSRSLPRRRRRRRRRTPPPTRKPPPPWQRQPQANHHHRRTKRRRDRSIEETTCKPYPIHHIHVPGINPGDPWIYNQSIDVLLT

SEQ ID NO: 172864 - protein, 262 aa, Oryza sativa
  Clone ID: PAT_MRT4530_7095C.1.pep
MSLPFSSESASTALEKVVKAIADAVRDSFTTSASTDVDPGTASTIANVAAKHASQAPHDAITNAFASLFSSSTSPAPIDPPPTTDTTTPPFRTFHQVDLSITDYCRKMKAMADSLGDPVTNRYLVVTTLNSWSSKFDNMQTLITMQCPFLSFADVRSQLLLEELSKANRHTDQSTVFLASTFAKLLVGSNPAHATYFGAGNKCGSNENQGCGNNSSRNHRCRGGRGGGGGGNQPSSIAPHPPMNQPEYWPTPQNSWAGVDGH

SEQ ID NO: 172865 - protein, 132 aa, Oryza sativa
  Clone ID: PAT_MRT4530_70960C.1.pep
MLLINLVKFDYGKSQNELTKYTQIIPNRWILSSNDLRCGSSPLPSPSQCHRRLANRPTTVRLSPPPSPRLVSPSPLNTVRCGCYTLTPLDIAACPPLSVLSICRHPQLCIFAIRKAVFTSLANSYAVAPTVC

SEQ ID NO: 172866 - protein, 136 aa, Oryza sativa
  unsure (1)..(136): unsure at all Xaa locations
  Clone ID: PAT_MRT4530_70961C.1.pep
RQVWPPWCSALSIPQGQLPELETTASPPPRLWSPPQPSPDPPXQQRPPLSRRPWPAPPPPPPPAPRRPWWTRAAPPPPPPPPSAPPPSPSPRSPRAWQRRXVTSFXPPPPPPPPPRPTSPRRRRPRSPPPSSSRRP

SEQ ID NO: 172867 - protein, 65 aa, Oryza sativa
  Clone ID: PAT_MRT4530_70962C.1.pep
KKKKKKTNHFKRFQYDSWIHFLRIPFRKKKKKKKKKKKKKKKKKKKKKKKGYQIKKKQPHQMQHT

SEQ ID NO: 172868 - protein, 120 aa, Oryza sativa
  Clone ID: PAT_MRT4530_70963C.1.pep
IRHEDETKAPVFVLRFPSLPPPPAGLPPPPPPTAVRTPPASRPRRGGGPNSPPPLRPIRAHHLRGNSMYANVATRCRINKAVLAANLWFGGFLENDDGKRGQICEVSFLHHQLFEIVYKE

SEQ ID NO: 172869 - protein, 70 aa, Oryza sativa
  unsure (1)..(70): unsure at all Xaa locations
  Clone ID: PAT_MRT4530_70964C.1.pep
MSNRRTYLVVALIPVGCTTLIPCRSTLVVPRYPCSLSVYTKYPTYTVDCRKFGKWVXEALKTRHVASVGL

SEQ ID NO: 172870 - protein, 89 aa, Oryza sativa
  Clone ID: PAT_MRT4530_70965C.1.pep
GAPVCWAPPWPGCFPGCRRGALERAAATLPAFCPVAFPLGPGGVCSWLGFPGPPRPGPSPPKASCVFASVGLLNTWCFLLSGGLFPFGE

SEQ ID NO: 172871 - protein, 62 aa, Oryza sativa
  Clone ID: PAT_MRT4530_70966C.1.pep
MGQAHKHGRERRRLTRWLTGQAWTWSSPCGLPCKREREGGLARPDRTAHGGRGAPANGGESE

SEQ ID NO: 172872 - protein, 112 aa, Oryza sativa
  Clone ID: PAT_MRT4530_70967C.1.pep
IRRRWIGTHAPPSPRSTPGPTQPPTARTGPDHHYYPGSPSSSSSSPASLTISTSLLSSPPPPPPLSPPPPPPPPPPPPSSSSRGRCVLASGLGPCCRRYAWADFLLASTYAI

SEQ ID NO: 172873 - protein, 507 aa, Oryza sativa
  Clone ID: PAT_MRT4530_70968C.1.pep
MAEAIASAGGIAMAASTSLTPGQGCGSKGVNHQVIAVLLYGRLVAPNIWWRFHSSELLENWRYNSLYVGFKVGNSSLLFWDFFGFSPPGHMRRFSIIGRMLLLLKRTYSRKSMDEERNNYSRDMFLFLYFLLIIVAAMTSFKVHQDKSSFTGKSILYLNRHQTEEWKGWMQVLFLMYHYFNAKEIYNAIRVFIAAYVWMTGFGNFSYYYVRKDFSLARFAQMMWRLNFFVAFCCIVLNNDYTLYYICPMHTLFTLMVYGALGILNKYNEIGSVMAIKFVACFLVVILIWEIPGVFEIVWSPFTFLLGYTDPSKPDLPRLHEWHFRSGLDRYIWIVGMIYAYYHPTVEKWMEKLEEAETKTKLYIKALIVSIALTAGCLWYEYIYKLDKITYNKYHPYTSWIPITWLGKITLETYISQFHIWLRSKVPNGQPKWLLTIIPNYPMLNFMLTTAIYVAVSHRLFELTNTLKIAFVPSRDNKRLSYNFVAGIAISVALYSLSFLIVGVAGY

SEQ ID NO: 172874 - protein, 67 aa, Oryza sativa
  Clone ID: PAT_MRT4530_70969C.1.pep
AFETTHCYDVCTDGWAIRFLESARRNYSLFINIYFVFTNMSNTGGNGKTRRRRLRYKSGLHLECIPE

SEQ ID NO: 172875 - protein, 45 aa, Oryza sativa
  Clone ID: PAT_MRT4530_7096C.1.pep
GCGGGWRLGEDSTGGPHLSATPGERRGSGGQPSGKGREERMGRRT

SEQ ID NO: 172876 - protein, 133 aa, Oryza sativa
  Clone ID: PAT_MRT4530_70970C.1.pep
PLCSQLIIHILIYFYLKLTLSDLKCIYRNTGPPHTHTHIYINKYIYIYIYIYIYIYIYIYIYIYIYIYIYIYVCVCVCVCVCVYVCTYIYIYTYIYIYIYTYIYIHIYIHIYIYIYIYIYIYGGVYDDRSLAQ

SEQ ID NO: 172877 - protein, 122 aa, Oryza sativa
  Clone ID: PAT_MRT4530_70971C.1.pep
MTTTTTTTNHSAKSILLLALLLVPHLAAALTGDALIRQRRRLLDYHGGRWLHGGGDLYLDPAITFYNARLVLRVIPQKRRVEAAPALRTRTDELTHRIAANERAYAGMLCADKRHHRQLRSY

SEQ ID NO: 172878 - protein, 115 aa, Oryza sativa
  Clone ID: PAT_MRT4530_70972C.1.pep
VQSLLIIASRKHYSVNVVVAWYTVNLVVFFVDNKLPEMPDRTNGVPLLPLSTREKDGRLKEEKDSRLKEEFHKLLNGNHGDPTDRRQRAQMNGRHDEDINHAHSTLSDAAVNGGT

SEQ ID NO: 172879 - protein, 206 aa, Oryza sativa
  unsure (1)..(206): unsure at all Xaa locations
  Clone ID: PAT_MRT4530_70973C.1.pep
MDEIGPPSRGEAEAGGDLTSTAREAGQRQGGAGAVRASQPASPVYQYQPPAPGNGIGMACPVPGHPIIVFQRLQHSKAIIALPCIIAAKNAFKVHTSSVKTRLLIELSTESEQLQLLPPQDRQEDCRRQILSLYRALMEWWWKLCGTTAVGPPPEPLSSSSESINQSRGFPLDSPYTQAVTATSYLXGKTITQVRRHIILCRCQQI

SEQ ID NO: 172880 - protein, 326 aa, Oryza sativa
  Clone ID: PAT_MRT4530_70974C.1.pep
MTIYIAREASKVWRKVTTETSVELSLLREKWGLLLAGIVFQYIHGLAARGVHYMVYAIVEDLGFMALPEFGQDKGYLSESIFASIFASFVLASQVLRIITFYSTQLPGPNYHCREGSKLATLPPPNNVFEVLLINFPRGVLFGCGDLIFSSHMIFTLVFVRTYHKYGSKRFVKLLAWFMAIVQSLLIIASRKHYSVDVVVAWYTVNLVVFFVDNKLPGYIFVTFVALRLYRDLYGKHFVTSFVEIFTEMPDRTNGVPLLPLSTREKDGRLKEEKDSRLKEEFHKLLNGNHGDPTDRRQRAQMNGRHDEDINHAHSTLSDAAVNGGT

SEQ ID NO: 172881 - protein, 86 aa, Oryza sativa
  unsure (1)..(86): unsure at all Xaa locations
  Clone ID: PAT_MRT4530_70975C.1.pep
ARIRGSRQGELGEGEEEERAMAAQQQLCPPLPLFPTSPPINPLLPFLRLPYLLAPPPPPPSHWAANGLMEQYEEEKIGEGTYGVXY

SEQ ID NO: 172882 - protein, 74 aa, Oryza sativa
  Clone ID: PAT_MRT4530_70976C.1.pep
MHCRSLASSAGRCSIVRESALTAGVKCLTSNNTCGGGRRGGATGYFANRNLLITGDLGRRAADDQSYAAAAATR

SEQ ID NO: 172883 - protein, 119 aa, Oryza sativa
  Clone ID: PAT_MRT4530_70977C.1.pep
MASAAATATTRTSLRRAELCAAAASAADAASWCFAVALVALVLLCALRAEAVEVHGPRLGGAAARPCEEVYVVGEGETLHTISDKCGDPFIVERNPHIHDPDDVFPGLVIALRPTKNSI

SEQ ID NO: 172884 - protein, 565 aa, Oryza sativa
  unsure (1)..(565): unsure at all Xaa locations
  Clone ID: PAT_MRT4530_70978C.1.pep
MVYIYHGYSSIRSTAARNQVTLPAATAAAAAADEPQPNQILFHSNLAALNPREERKPSKTCSPCPPRLTDGGPHRPTLPPXVGPVRRRPTASSGDPLPADEIRPSPLTKKMEDLQDCDCKSLVAVPGSVVLHLFRLFNQQDNSWQKYTLAYFLLVRNEYFSRDSRKHSDGKNQLLDCCDDSELDLDVLYADLDSKELELKLQKPVVKTQSKGDSSASGSNDCFFPGLHDDLAQDCLAWASRSDYPSLSCLNKKFNLLINSGYLYRLRRKYGIVEHWVYLACSLMPWEAFDPSRKRWMRLPRMPCDECFSCADKESLAVGTQLLVFGREYTGLAIWMYNLLARGWSRCTPMNLPRCLFASGSFGEIAIVAGGCDKNGQVLKSAELYNSETGHWETLPDMNLPRRLSSGFFMDGKFYVIGGVSSQRDSLTCGEEYNLETRTWRRIHDMYPGGTSASQSPPLVAVVNNQLYAADQATNVVKKYDKGNNTWNIVKPLPVRADSSNGWGLAFKACGDRLLVIGGHRVPRGEVILLHSWCPEDGNGGADWEVLSVKERAGVFVYNCAIMGC

SEQ ID NO: 172885 - protein, 397 aa, Oryza sativa
  Clone ID: PAT_MRT4530_70979C.1.pep
MEGGGARNGSTTGAARTGGSGGDAAAGGGGGSAGNGKPLPPCCVKARAAAPESEAKCHATVVSGWFTEPRSRGGKTSKVQYYNNPMWPGEAHSLKVEKILYQGKSPYQEVLVFESSTYGKVLVLDGIVQLTDKDECAYQEMITHLPLCSIPSPKKVLVIGGGDGGVLREICRHGSVESIDICEIDQLVIDVCKDFFPDLSVGFKDPRVRLHVGDAVEFLRNAPEGTYDAIIVDSSDPIGPAQELVEKPFFDTIARALRPGGVLCNQAESMWLHTHLIQDMLSICRETFKGSVHYAWTSVPTYPSGVIGFLLCAKEGPPVNFLTPANPIEKLEGAMEAGRDIRFYNSEMHRAAFVLPTFARRELEAYCTTVEREQQEETTAEPLKMNIMPNSEILTAS

SEQ ID NO: 172886 - protein, 36 aa, Oryza sativa
  Clone ID: PAT_MRT4530_7097C.1.pep
KLLQRIAATPLLAIHPLIYLGILYPLGQLKKDPATF

SEQ ID NO: 172887 - protein, 554 aa, Oryza sativa
  unsure (1)..(554): unsure at all Xaa locations
  Clone ID: PAT_MRT4530_70980C.1.pep
PRLTDGGPHRPTLPPXVGPVRRRPTASSGDPLPADEIRPSPVFLEPLVVAGVAPGGMEAAGARAGGGGRDLAGGAPRXDVICDLSNLCVLGLIPQLTKKMEDLQDCDCKSLVAVPGSVVLHLFRLFNQQDNSWQKYTLAYFLLVRNEYFSRDSRKHSDGKNQLLDCCDDSELDLDVLYADLDSKELELKLQKPVVKTQSKGDSSASGSNDCFFPGLHDDLAQDCLAWASRSDYPSLSCLNKKFNLLINSGYLYRLRRKYGIVEHWVYLACSLMPWEAFDPSRKRWMRLPRMPCDECFSCADKESLAVGTQLLVFGREYTGLAIWMYNLLARGWSRCTPMNLPRCLFASGSFGEIAIVAGGCDKNGQVLKSAELYNSXTGHWETXPDMNLPRRLSSGXFMDGKFYVIGGVSSQRDSLTCGEEYXLETRTWRRIHDMYPGGTSASQSPPLVAVVNNQLYAADQATNVVKKYDKGNNTWNIVKPLPVRADSSNGWGLAFKACGDRLLVIGGHRVPRGEVILLHSWCPEDGNGGADWEVLSVKERAGVFVYNCAIMGC

SEQ ID NO: 172888 - protein, 49 aa, Oryza sativa
  Clone ID: PAT_MRT4530_70981C.1.pep
CRVYEYTVASPTCGVCVMIRYTLTLVRVFVYEIPPWRITSQIHEYNRGL

SEQ ID NO: 172889 - protein, 318 aa, Oryza sativa
  unsure (1)..(318): unsure at all Xaa locations
  Clone ID: PAT_MRT4530_70982C.1.pep
LNLTMLWEAMVDVLVTVSGYAREHSNHGGAAGLVKKMERFEFVLXFIMHFLISLLSITNEXISKAMQRKDHDTVEAMGLNLDVKERLQDMGLMCQXAWMILLSYGLISVQRKYKVSIHQVQQPISTRPKLTHXKSNPLYPLKPSPLAGLDATLHEMNHHFNEVSSELVVCMSCLDPRNSSSKFNVNKLVPLAKIYSGDFTTSDXLLLRSQLQTFILINVRRTDEFNECTNISSLAQLTVKTXTTKHRTLXPLVHRFIELPLPIGVXSVECIFSAMKIIKTADLRXNKISDNWLNSLKVXYTELEIFKSIDYDAIMKQF

SEQ ID NO: 172890 - protein, 66 aa, Oryza sativa
  Clone ID: PAT_MRT4530_70983C.1.pep
TVKLTYGRGPKAQKCSHTPPQTPSAHVSLIKLYNVPTQFTLHHLPADHNIILKLPCQNLNQGYNNA

SEQ ID NO: 172891 - protein, 179 aa, Oryza sativa
  Clone ID: PAT_MRT4530_70984C.1.pep
MERGGRTEGGTTVRAGAVTRADGAKRDRFGLGLRKRRGRARPESPSASLLVPAPPTRATTNGDGEQSTGGGDNGVAARDEKEGDWRRNELGFIGATMSEEGAGVTRQKEEELCLISLEASAGRGGAESMTTAMTAGRFGAERRHGRQARTGAAEADGGGDQAVGHHGTRAREAMGGAAV

SEQ ID NO: 172892 - protein, 267 aa, Oryza sativa
  unsure (1)..(267): unsure at all Xaa locations
  Clone ID: PAT_MRT4530_70985C.1.pep
MVIHVHWNWRSIQDSGERGRSLRPRCHSYIIIMSSLHNHHHVSLRRPASPRKSAMNNPRQAGETSTTIDFTKLLQTYVTDEIDPYLLPLHHHHDGLLRHNIADGLLQQGNTPPPLVHKDGHPASYDRLIYKPLYRRYRPCPLRRQRPRHRRRRRSRHLRRQRLHQLGITFVMIATRRERTNQSGCKMLTIAVFSSHHGVNIFFSPSAICGYINYCNYHDHGYFMIGYIEECLXQKSLTEILGIEESQGTTPKGTHAPGGGPDCNYFA

SEQ ID NO: 172893 - protein, 188 aa, Oryza sativa
  Clone ID: PAT_MRT4530_70986C.1.pep
MRADGAKRDRFGLGPRKRRGRARPESPSASLLVPAPPTRATTNGDGEQSTGGGDNGVAARDENEGDWRREELGFIGATMSEVTPARGGKRRKEEGKGACLLAALGKGGGSGGVTRQREEELCLLFLEASAWRGGAESMTTAMTVGRFGAGRRHGRQARAGAAEANGGGDQAVGHHGTRTRKATGGAAV

SEQ ID NO: 172894 - protein, 424 aa, Oryza sativa
  unsure (1)..(424): unsure at all Xaa locations
  Clone ID: PAT_MRT4530_70987C.1.pep
MVEEGDDVGWTAPTRAREPEDARGGAATWAARAAMAVAGPGWRLGMTPTGGAHPNENPVARIRRRELDSGGLRQRQPAERKEENDDEVTRGRFPVARASTRLRESVPCAGLGGNASREAGDERRFRAWAATAASTRRAAATVGAALASVRAGAVTRADGAKRDRFGLGPRKRRGRARPESPSASLLVPAPPTRATTNGDGEQSTGGXRQWRGGEXDENKGDWRREELGFIGATMSVWERGTDIGRSSRRAGARLAAKTTTGGDADERREEELCLLSLEASAWRGGAESMTTAMTVGRAAGPGGADGAGAARAATTRARAREQRRAGADFXGGELARDGGRERESXGGGVLGAAYAHARAARAQSEGEREREREKERERAGEGGEDGPREIWPIEPEGGKIDFCGGIDLXEGFGFGIELDDRSGI

SEQ ID NO: 172895 - protein, 39 aa, Oryza sativa
  Clone ID: PAT_MRT4530_70988C.1.pep
QTELLIQDDRVLMRAHIVLGVVTLSIDRSAQHDNSKLHL

SEQ ID NO: 172896 - protein, 110 aa, Oryza sativa
  unsure (1)..(110): unsure at all Xaa locations
  Clone ID: PAT_MRT4530_70989C.1.pep
NYASLLGYFNLCSFGVFYEARSNTRINRMKIINAVSKSVPQPHKVDLNSPNRIIINLMXIICMVGVIERYTVLAKFNLKQLTSPPQKQLMGQLELDSAAVSCWLSRGSHC

SEQ ID NO: 172897 - protein, 102 aa, Oryza sativa
  unsure (1)..(102): unsure at all Xaa locations
  Clone ID: PAT_MRT4530_7098C.1.pep
GAGEKLGRLGGEKGREGAWVYRAAMSVLETDLGRSRCELAFGARGQNGDRGGXRRRGRGKGKRRRKRGLTPCHFGEKEEEERATRQRGRALPPSLGDSCYMV

SEQ ID NO: 172898 - protein, 57 aa, Oryza sativa
  Clone ID: PAT_MRT4530_70990C.1.pep
YRMGIPLSVVERDQEPYEDDSTMTHVFYEKRGFMIYEWIKLRPNTRRIMDFDNQESY

SEQ ID NO: 172899 - protein, 194 aa, Oryza sativa
  Clone ID: PAT_MRT4530_70991C.1.pep
LCTQVPLKDSKIIRSWIRGGGASSSSSLCPPPREPRCHRPSSLLQQDWRRHRPVVVAAAAALPGSPLLDPGRRRLVIVVVAPAATRTTPPPPELAAPAGSAPAPPGRRRGRRRPPGLAAPGSGPAPPHRRRRRAPRRENHAATARARRSGRIRATSLCNWTGIMCSRSVIRHGRRHRLPWPVVTNISLPASGIH

SEQ ID NO: 172900 - protein, 238 aa, Oryza sativa
  Clone ID: PAT_MRT4530_70992C.1.pep
MAAYGKPQPPLNDAYYGPPIPPPPAAAYYGAAAPPPAPRRSGAHRLFCCLFRVLAVAVIALGTAVLVLWLIYRPSVVKAYADTAALSRFDLTNGGSLLVYNLTVGMRVRNPNRFGINFRSVDAQASYDGDRFGYAPLQPLYVGRKSDARFDVTLSGSAAIDDRDVERTYRRETAQGSYEVKVRVYARQGFKVRGFRLNNKSKFTCTLNLPAPNSGNGTASGTPTTVFTRKQPKCDVDY

SEQ ID NO: 172901 - protein, 751 aa, Oryza sativa
  Clone ID: PAT_MRT4530_70993C.1.pep
MGKTQKFSKGHPLGFVPDYRHGVETVGESKGCIGSPERIVSGSSCAVPKRKCGILKTEDGGELPGFNVPRDVFMLPRMSPSDKKDLEMRLRKELEQVKALQSRLFLRPAAVSMNGGAASASGDVVAKRNDAKLKRSNSVQSGRGVPPSAATPVVRSANYAEAFKQCGNLLKNLFKHQWAGPFLAPVDVVQLNIPDYFDIIKKPMDLGTIEKKLNAGMYSTPWDFAADVRLTFDNAVTYNPVGNDVNLMGKALTCIFETRWKFIEKKLPSLDDRFSVRREPSQKGAVKKDTIEKDYPSEKKHSTKGVHKKDMFKKEDASTKPALQPKKRKASPLVQGSLEIPVVEADKVIDDAQVVQPSKVIDDAQVVQAFKVIDDAQVVQASKEIMTDRQKYELSVRLQSYGGLIPNHVVDFIRSHLPDDNEGDEDELELDMNVLSDSTLFELQKLLDDYDRVNQSGNPTKDEHREVEFESEYGLSNSSMHHEEGNELVEEDVDIGGNDLPPLTYPPAVFESETAERSSKHSTSSSSSSDSESSSSDSDSSSSSGSDLDVNVPPSTSGAKDNTQSAVRLDQENDPLSSTNLPQQSSDPVPISAEDEGENVSEKQVPPAKQYRAAVLLNRFADTIFKAREKTLDQRARIQAEAKAAEDARKRAEAAAAAEAAAEAKRQREREREAARKALQQMEKTVDINEGNLFLKDLEMLGTVTSGEQFPSSVGETSPTHTPEGLGFQLGSNPLEQLGLYMKNDDEEDEE

SEQ ID NO: 172902 - protein, 791 aa, Oryza sativa
  Clone ID: PAT_MRT4530_70994C.1.pep
MGKTQKFSKGHPLGFVPDYRHGVETVGESKGCIGSPERIVSGSSCAVPKRKCGILKTEDGGELPGFNVPRDVFMLPRMSPSDKKDLEMRLRKELEQVKALQSRLFLRPAAVSMNGGAASASGDVVAKRNDAKLKRSNSVQSGRGVPPSAATPVVRSANYAEAFKQCGNLLKNLFKHQWAGPFLAPVDVVQLNIPDYFDIIKKPMDLGTIEKKLNAGMYSTPWDFAADVRLTFDNAVTYNPVGNDVNLMGKTLKCIFETRWKFIEKKLPSLDDKFSVRREPSQKGAVKKDTIEKDYPSEKKHSTKGVHKKDMFKKEDASTKPALQPKKRKASPLVQGSLEIPVVEADKVIDDAQVVQPSKVIDDAQVVQAFKVIDDAQVVQASKEIMTDRQKYELSVRLQSYGGLIPNHVVDFIRSHLPDDNEGDEDELELDMNVLSDSTLFELQKLLDDYDRVNQSGNPTKDEHREVEFESEYGLSNSSMHHEEGNELVEEDVDIGGNDLPPLTYPPAVFESETAERSSKHSTSSSSSSDSESSSSDSDSSSSSGSDLDVNVPPSTSGAKDNTQSAVRLDQENDPLSSTNLPQQSSDPVPISAEDEGENVSEKQVPPAKQYRAAVLLNRFADTIFKAREKTLDQVAKKDPEKLQHDMEELERLRREERARIQAEAKAAEDARKRAEAAAAAEAAAEAKRQREREREAARKALQQMEKTVDINEGNLFLKDLEMLGTVTSGEQFPSSVGETSPTHTPEGLGFQLGSNPLEQLGLYMKNDDEEDEEGESADEPTIDVEEGEID

SEQ ID NO: 172903 - protein, 85 aa, Oryza sativa
  Clone ID: PAT_MRT4530_70995C.1.pep
RRDRRRRAGGDSEEHGAGRVLCTGRQRQAAAQRRSGAPGDEGRAAGSEAQAASRSGYQVIHPSKGIRERRSGGKQQQLAEQASSR

SEQ ID NO: 172904 - protein, 47 aa, Oryza sativa
  Clone ID: PAT_MRT4530_70996C.1.pep
MGAKHSYGDTFFRMESITNTITPNYKLRTISSKCHLLRPHGMARMTY

SEQ ID NO: 172905 - protein, 261 aa, Oryza sativa
  Clone ID: PAT_MRT4530_70997C.1.pep
MAARFSVVFDWRARPVGGVRRERRAAPRRRPTAAAARPSSSHGRWGKPWSWAASKAWGGDRQRPAKGRRRAVGWRMGKRRGMADGETTAARMAAGEQERQGGGVQRGGVHLSPLYLYFLRVFTDEEAAARDGLWKRSGARRLAGEEQRAAANLPVSSSSAAAVWIPPLSCRICTAAAMVLSPPGMARRVGTRKGGRSSGATTVAGHERSGSGGRGRGRRRVVRCTAGGGVTTGDEAGGGRQGGALRRRRLRRRRVYGEERG

SEQ ID NO: 172906 - protein, 70 aa, Oryza sativa
  Clone ID: PAT_MRT4530_70998C.1.pep
MGEARPCSSSTASALLRPPSPPLPAAVICASTGRRPRDLCVRRRPPARPPPSPPPLAPKQPPPPPAPSAA

SEQ ID NO: 172907 - protein, 131 aa, Oryza sativa
  Clone ID: PAT_MRT4530_70999C.1.pep
MNSDVSRCQGFSNRWGRGYRALAVSHRLCSGLGPVGTRRFSSSTRSPPPGRHRCPSPMPTSPATTTSNALLGLTTTTAAAALAGAGSGRADSAHAAASSSKQATTAARDHRLLIIASPTTFFAGKRGGKGK

SEQ ID NO: 172908 - protein, 112 aa, Oryza sativa
  unsure (1)..(112): unsure at all Xaa locations
  Clone ID: PAT_MRT4530_7099C.1.pep
NIIIVYSNVRIRKRIXWEVKVPLKIKVFMXFLXKKVILTKNNLIKRKWRGNKQCCFXNIQEIIQYFFFDCHEQQDTIRNGATRLELVAKELLFQFGWRIRLSFFLVGHVHKP

SEQ ID NO: 172909 - protein, 61 aa, Oryza sativa
  unsure (1)..(61): unsure at all Xaa locations
  Clone ID: PAT_MRT4530_709C.1.pep
LNGYALYIGRAAHGLPTIVTPARFACLDFNPHIIYMHLGVQVPVLDPMDSDIIXQIYXDIS

SEQ ID NO: 172910 - protein, 587 aa, Oryza sativa
  Clone ID: PAT_MRT4530_70C.1.pep
MARLDCTGNFAVSGLPLPLTNRLVLAYAVFGDTEAACQVFNEMSDKSGITWAIMVSAYSDGTMRRHRPYLDGVAAAAATFLLAVLLHAPLAAGEDEPPPWVLCGPYPPSGNYSKNGTYQVNLDLLSTTLPKNTSSSPAMYATGTVGDVPDKVYGLALCRGDANASACERCVAAALRDAPRRCPLVKDVLVFYDLCQLRYSNRDFFLDDDYFVTTYTLQRSRRVGAAAAAAFDAAVAVLVNATADYAAADSSRRYGTGEEEGVDGDSDRPKIYALAQCTPDKTPEVCRTCLSTVIGQLPKEFSGRTGGGMFGVWCNFRYEVFPFFSGRPLLQLPAFVETPPPPPSPSATSGDDIQSIDSLILDLPTIRVATDDFADTKMIGQGGFGMVYKGVLPDGQEIAVKRLCQSSRQGIGELKNTDKNRELDWGKRFKIINGIARGLQYLHEDSQLKIVHRDLKASNILLDFDYSPKISDFGLAKIFGGDQSEDVTNRIAGTYGYMAPEYAMRGNYSIKSDVFSFGVLVLEIITGRRNTGSYDSGQDVDLLNLVWEHWTRGNVVELIDPSMGDHPPIEQMLKCIHIGPAFCIQEE

SEQ ID NO: 172911 - protein, 92 aa, Oryza sativa
  Clone ID: PAT_MRT4530_71000C.1.pep
NTGGTMKKFIPLEDWTLKIYHLTYPLTHAFKSMRGGNNFHNTHREGEFYKIHFFFFSPPNLLTFYTCILHKKKKRRNRKRTFFIAQFLVLPA

SEQ ID NO: 172912 - protein, 417 aa, Oryza sativa
  Clone ID: PAT_MRT4530_71001C.1.pep
MDAVRPLQPADREWPPNPTKPPRLSLATSICQPRYINRTKPYPPPSPRLADRSTDDGRNIAVDRAESPAAAMGRVKLQIKRIENIPNRQVTFSKRRNGLIKKAYELSVLCDIDIALLMFSPSGRLSHFSGRRRIEDVLTRYINLPESDRGGYVNFFDGKVSQRDFNLNLALFLVFVLNLGALADPGAVRRRLTPTLRMFEPDPARSASMEDVEASEKFIAGILSRVEERKRYLLCSMGSFDVTASTSAMQHLYLPQQHQHGDITDNGFGSDEVASWVSEGMPPTTSSVASIFAGTSDSMMSFRDQAVYDTMRQDACVDQTVVPEMGMCHVDQQNQSDDWQAYTSAEFLNALIPPTPFPLDDEDTMGPMLASSPLLMPGIHDQQPPVEDMATAGCSQAPANDGNGLYAAEDIAPVNVG

SEQ ID NO: 172913 - protein, 79 aa, Oryza sativa
  unsure (1)..(79): unsure at all Xaa locations
  Clone ID: PAT_MRT4530_71002C.1.pep
QHMAFQQGSVLSVASAPSSPCSRDATWRVPPPDQVVYTRARSVSQDGLPMYRYVLPALVKRSDVAWHDAAREVRDCYAX

SEQ ID NO: 172914 - protein, 105 aa, Oryza sativa
  Clone ID: PAT_MRT4530_71003C.1.pep
WIPGLQVACHVAAADEEKVIKRKPVSRRALRKILSRLRVDAWTSQHDAGRAPAVARWPTGTHDAGVGERKREGREREEMSGSICTFLILMPSKRQSTVDKVTTAM

SEQ ID NO: 172915 - protein, 39 aa, Oryza sativa
  unsure (1)..(39): unsure at all Xaa locations
  Clone ID: PAT_MRT4530_71004C.1.pep
LLNFVYGTLNLLFALFMYLSDLPYLTRVYERPPIXSCVV

SEQ ID NO: 172916 - protein, 106 aa, Oryza sativa
  Clone ID: PAT_MRT4530_71005C.1.pep
CGLALSFGPPGFSLFVSGSFFVWNCGRISFSPRVQLWPWFPPGFIRLPLGKPWVASRVPVPSFSGLVPRVPAPRVRPRVRKKKKKKKKKKKPKKKKKKKKKKKKKK

SEQ ID NO: 172917 - protein, 132 aa, Oryza sativa
  unsure (1)..(132): unsure at all Xaa locations
  Clone ID: PAT_MRT4530_71006C.1.pep
SPDYSLSCTSMDRPLSXSLXXTSNYKKSQGHGSDTRPKKRKRTEELRQWRELPRNLAQLGTPEETSPSHAAPESHPNRWHKNXNXPXXLGRXXXGGGGSILLQSKKRRGKKAAAALISLRGGEASTEWAAAN

SEQ ID NO: 172918 - protein, 53 aa, Oryza sativa
  Clone ID: PAT_MRT4530_71007C.1.pep
HTQNSIIPTRPNLYTHHNINNHTNLNQATHINFQPTKSRAVAVCFSIKFLPLD

SEQ ID NO: 172919 - protein, 57 aa, Oryza sativa
  Clone ID: PAT_MRT4530_71008C.1.pep
KKKKKKKKKKKKKKKKKKKEKKKKKKKKKKKKKKKNEWKKKKKKEKKNKYIKKKKKN

SEQ ID NO: 172920 - protein, 64 aa, Oryza sativa
  Clone ID: PAT_MRT4530_71009C.1.pep
MSHRRVRGRYRAPPSSSRPGVTFVLGEAAAPEYRFGVTFDRRRGVMEIPAMEIDDMKRPLLVNL

SEQ ID NO: 172921 - protein, 659 aa, Oryza sativa
  Clone ID: PAT_MRT4530_7100C.1.pep
MSLRPSERMGIRQKGYKASMDAAEGRRRREDITVILRKADRDRALKEKRRRPTATAAAEGLPQAAHSSAIEKKLESLPMMVQGLYSDDSSMQLESTTQFRKLLSVDHCPPIDEVIRSGVLPRFVEFLTREEYPQLQFEAAWALTNIASGTAANTMAVIEHGAVPIFVKLLSSPREDAVWALGNVAGDSTKCRNLVLMHGAMLPLLQQLNEHAKLSMLRNSAWTLSNFCRGKPQPDFKHVEPALPVLRELILSQDEEILTDSCWALSYLSDGSNDNIQAVIETGVCDWLVELLSHPSPVVLIPALRTVGNIVTGDDAQTQSKLTKTADTGQNYLQNYGFNPQYYGTTDLVLTLSMCIVGHPQALPCLFNLLTTTQKKSVKREACWTISNITAGTKEQIQAVIDSNIIAPLLHLLQHAEFDVKKEAVWAISNATSGGTFNQIEYLVSQGCIKPLCDLLVHQDSKTVLTCLEALDNILRVGEAKKNLGACNMNIFVPMVDEADGLDKIEDLQNHDNVEIYNKAVYVLESYWVQEDDQQPFLIPSVSESESDNEMFQFGSFGKVSVKCPIWMEMHRSCLFRGLSRIGESSYPSHGLVLLTCYEAAVRRLVHMDYGSPHKGVGTGNWSVGEGHTLACVVGLAISFAFLPLARTRLPVLLYSQPP

SEQ ID NO: 172922 - protein, 107 aa, Oryza sativa
  Clone ID: PAT_MRT4530_71010C.1.pep
MESSGGSQLGKNSKTSDGRETKATSSLLLLITAIHFVALCPKGENEDARKEVNSTAQNFVHFTEEEEDIVFRMHRLVGNRWELIAGRIPGRTAEEVEKFWAIKHQAT

SEQ ID NO: 172923 - protein, 66 aa, Oryza sativa
  Clone ID: PAT_MRT4530_71011C.1.pep
MATAVASTGFGSGAVAAKRGAARAGGADLALQPPSAGALAPFSAAFAAGVARIHCYCGSGDPLRMF

SEQ ID NO: 172924 - protein, 189 aa, Oryza sativa
  Clone ID: PAT_MRT4530_71012C.1.pep
PYLGWQRPRLQRASARGRWRQSVVLRGPVVQIWPSSRPRPAFVLWELGRVDDGVGWSAAGPWLLSARSGASIFIDGGQVGVGGCDRRWRPFPPPSRPVLLGSIATVAAVTPYACSSCDTALSLSLAWLQQTSSPSPPTSALVLAPSFLPDLICSCALFLPRSNLGPVPSFLSLLVSFPINISIFNSSML

SEQ ID NO: 172925 - protein, 626 aa, Oryza sativa
  unsure (1)..(626): unsure at all Xaa locations
  Clone ID: PAT_MRT4530_71013C.1.pep
TIIACYNKNKLPCNQKEITPFEEWEKKKLNLSYLRKWGCLAKVNVPIVKKRKLGPKPVDCVFLNYVIHSMXYIFLIVNSRVPDMRVGTITDSRDAXFLNEFSMNDAPSTSSXVPILSPESFVPIEYNDXTPEENPKEDNIVATXQRTAKSFGDNYIVYIVDDTPKTIEKAYSSPDADYWKEAVRTEMDSILSNGTWEIVERPYGCKPVGCKRVFKKKFRPDGIIEKYKARLVAKGYTXKEGEXFLYTYSPVTSLTTIRVLLALAASHSLLVHQKDVKTAFLHQELEEXIYMDQPDVYVLEDQEGMVCKLLKSLYGLKQAPKXXHEKFDKTMTLVDVVMNETDKCVYYCYGGGGXVIFCLYVDDILIFGTNLNVIEEVKDLLSKNFEIKDFSXDVIVNFKLPRGDDGGITLAQYHYVDKVLCHFGYSDCKPASTLYDPSVLLRKYLRIARDQLRHSXIIGXLMYLASETRRDISFAVSKLSRFVSNPGDDHWQALERLMRYLKGTXKQTISTSSTIEAELTALDTVTVEVEWLRELLMDLPMVEKPVPAILMICDNQTLNIKMNNSNDNMKSSRHVKRRLKSVRKQKNSGVIALDYVQTAKNLADQFTKGLSRNVIDNASREGLRPT

SEQ ID NO: 172926 - protein, 68 aa, Oryza sativa
  unsure (1)..(68): unsure at all Xaa locations
  Clone ID: PAT_MRT4530_71014C.1.pep
PPQGRGRNPYAKIWQRICSSIRRNPRSRDRCPVHRSNPRRTERACIDPIENPNNQSIVPGVXPSPCLA

SEQ ID NO: 172927 - protein, 180 aa, Oryza sativa
  Clone ID: PAT_MRT4530_71015C.1.pep
MSPRHSNEGIRLDFAKTNKCWHHTLLDIAKPHLMHFHGAFSFVCGLYDAIQDGGCVRFGEWLWHATPGGGAFVEIRWYQLEGGLAMTCGLLRQKERSDDPVPKINHITQCCLIVQVIISVLESNVNELNIAELRGLEEAMTNALTVVKNKLMMKVASVLPQSEKKRKSCSISEPRSGVSS

SEQ ID NO: 172928 - protein, 133 aa, Oryza sativa
  Clone ID: PAT_MRT4530_71016C.1.pep
KSSFRERRKSSEFHFQGPEEVRKGAAACGERRMQLRRRRRRPRAASGGGWAAARRRAVAGGGYSGGGAGGGRARRAADAAAAAARRRAGGGWRRRRRRVRQKRPARRAADAARGDDWAAGRRRVAAAQAARAV

SEQ ID NO: 172929 - protein, 141 aa, Oryza sativa
  Clone ID: PAT_MRT4530_71017C.1.pep
LAFVLTVTAVKDAYEDWRRHRSDRAENGRLAAVLLSPGAGTHFAPTKWKHVRVGDVVRVYSDESLPADMVLLATSDPTGVAYVQTLNLDGESNLKTRYAKQETLTTPSEQLTGAVIRCERPNRNIYGFQANLELEGEGRRI

SEQ ID NO: 172930 - protein, 874 aa, Oryza sativa
  unsure (1)..(874): unsure at all Xaa locations
  Clone ID: PAT_MRT4530_71018C.1.pep
MWKRVLETTKKAAAAATATAATGPQLATRKNPSSSRRKAVTPATAVSPAALLRLKQAASSKRTNLPSTLPDAQDVAAVEDENPSGGFTKEILSILNGPDDAEELRGAQAPPEESEDAEESVVNRILDTEWFAAPPPSNPLAAWRKEVAREKKKRYIFKNTESRRFTRLMQKCADKLGAEPALEFFGKLGRDTGAKEFNALIRICLGKAKECMDIDSAVEHIYRAYRLFELMRERGYQIVEDCYGPFLLYLVDVGMSEEFDMFSVFFKDANPRSSSRIAYYEMLLWIRAQDEEKIQELCRSVEDFNEEGDYDMAESYMLAFAESDRRLDFISLLESLDPTRILRSKYLLTIFQSLGRLELKNYAEKLLQQMRSKESGVGKFSSIIFEYASNIPNIAVEDVIVSFNRWHEQFEVAPSISASEKIISVCCKSSKISLALDVAECLCKSNPDMPVELFHPIIQACEQGSEFHLVHPIYDLMRRHKMKLKTETFRNMINLCVKMKDFEGAYRILTDAEESGDISTVSLYNAIMLGYFREKNHNGAQMVMAQMQIAGVKPDSETYCYLIFNCEFEEKISEYLDQLRQDGIHMSKHIYMSLVSAYARLGNFDMAKQVLENKEIPPKYLNEIKSALIGALASNGKVLDGLIMYDEIKQSGCHLEPKSAIALIENTQTKGELDRLYQLLEELGDSNMWFDGAAIGLLKQLKEKDELSTYMVIDQVFSQIWDMDPVNLDFGMKILHAVKELGLNVSRTSLDFLLSACVKGKASKRAKLIWTDNESTGLPNTILTSFRMYXGLLLYQKKKATKKLLRKIPKEDVHVRYIIDSCQMAYCSQNLKLPSASRSSSIKRAASKAGSTCKPAASGTEVFRNEAEEAHTGP

SEQ ID NO: 172931 - protein, 303 aa, Oryza sativa
  Clone ID: PAT_MRT4530_71019C.1.pep
LIEIVELMKQGARRVLVGKNIKEGCAINKQPFAPFYKAVLKITGTPRRNPSPSPSPATRSPSTTLGRDRYCCLTREDIVRFLINCLGALAPIPMQSIASLGAISRAYSHVEDSSPAIGAAWELPSDPRAVAVVRTGHDGSRVILGEISGHKLWKKDYAAAAEAMATMSAMDFATGVDESGPSPTATAAAAAGNVGGGGARARMGSVEEEIAPVPRLTRFSSRKIGFSASLANMIMVSHRKNRVLTCKATSSLAAVMAQMLSHRATHLWVVEDGDADKGAVLVGMIGYMEILRAVTRGVVVPPA

SEQ ID NO: 172932 - protein, 68 aa, Oryza sativa
  Clone ID: PAT_MRT4530_7101C.1.pep
FAHIIYFRLGNCPDHERRQIRGYMKSLEKGLKMELIVSTTIKMLRECPKTHQLSQFSHTTIQDKYKMI

SEQ ID NO: 172933 - protein, 60 aa, Oryza sativa
  Clone ID: PAT_MRT4530_71020C.1.pep
NKYFSWTSRPPLNDNAHSLAFQSINCDPCLPLIARMLAAFVPRLPNFSNQFKKKKKKEGR

SEQ ID NO: 172934 - protein, 52 aa, Oryza sativa
  unsure (1)..(52): unsure at all Xaa locations
  Clone ID: PAT_MRT4530_71021C.1.pep
DTVEMCLRYAPWMDSGLAPWKKGPYVGYXLGWSRRVPGSTRIRTDGEKTDXR

SEQ ID NO: 172935 - protein, 63 aa, Oryza sativa
  Clone ID: PAT_MRT4530_71022C.1.pep
MEIGAPPLPCQMGGPAHHGKGPADGTATVMGRTVPDLGQNGPRRCWAVSGRHGYCCMDRWPTH

SEQ ID NO: 172936 - protein, 144 aa, Oryza sativa
  Clone ID: PAT_MRT4530_71023C.1.pep
MAAEKTQIIPVLCLGNGGSGPNRAVSEDPGSEHTAEDETAREIVDAEVRRQVARYKHKLREFKLTVIGTAVFLVFWVVLLLIGTLDHHMSVSWRRFFVTCGVFECLFWLYLVVGHLREYGLSIPKISDFSNEEHQLPPVGHDRC

SEQ ID NO: 172937 - protein, 233 aa, Oryza sativa
  Clone ID: PAT_MRT4530_71024C.1.pep
MVRGRTELKRIENPTSRQVTFSKRRNGLLKKAFELSVLCDAEVALIVFSPRGRLYEFASAPSLQKTIDRYKAYTKDHVNNKTIQQDIQQVKDDTLGLAKKLEALDESRRKILGENLEGCSIEELRGLEMKLEKSLHNIRLKKTELLERQIAKLKEKERTLLKDNENLRGKHRNLEAAALVANHMTTTTAPAAWPRDVPMTSSTAGAADAMDVETDLYIGLPGTERSSNRSETG

SEQ ID NO: 172938 - protein, 366 aa, Oryza sativa
  Clone ID: PAT_MRT4530_71025C.1.pep
MVRGRTELKRIENPTSRQVTFSKRRNGLLKKAFELSVLCDAEVALIVFSPRGRLYEFASAPSTRIVYLTPSSLAPTPAGEWREWREDLSRKFLSLQAMICNELSSNVELKPFGWALAQGEVELELCRMGPMYIKNIYNLVIEYLYFNGKKLSSNYSLVYRQHAPILQVLQPKLSILVLPEIPVPLAGCYFFRFIILQKTIDRYKAYTKDHVNNKTIQQDIQQVKDDTLGLAKKLEALDESRRKILGENLEGFSIEELRGLEMKLEKSLHKIRLKKTELLEQQIAKLKEKERTLLKDNENLRGKHRNLEAAALVANHMTTTTAPAAWPRDVPMTSSTAGAADAMDVETDLYIGLPGTERSSNRSETG

SEQ ID NO: 172939 - protein, 68 aa, Oryza sativa
  Clone ID: PAT_MRT4530_71026C.1.pep
LSRRSRLLSPQSPHLTSLISTAIATLPKTGVAGDGGLRGMPAVDLNPSAMAYVAMVRCAHNDRSLCGR

SEQ ID NO: 172940 - protein, 340 aa, Oryza sativa
  Clone ID: PAT_MRT4530_71027C.1.pep
MAPSKQQQQLMLLKKVMAKKPKTKRLSGFGLKPSAAFSRPHVPSAAASLQPSRRVRVVFEDPDATDSDSDDDEDAGAASKKRYFELFIGKPASSTKQASPASTVAAYANIGKVGSTCYRGVRLRKWGKWAAEIRNPFTGHREWLGTFDTADAASAAYQSASRNFAEEKRRRGVASSASPASSATPTPTASSSSSTSAAPFAHPSPSSVLEATKPAPKPESPPLPEQAATPLLVEATNETAELPDDPEFYKDILRGLQLPDIDPMDFRAGLDALDISDVPAYMNGEQDVLFTEDMLLGDFAEEDDLDLDDIGDDFCEDFPEIPSGYDFGRGDMFRQVDFCV

SEQ ID NO: 172941 - protein, 292 aa, Oryza sativa
  unsure (1)..(292): unsure at all Xaa locations
  Clone ID: PAT_MRT4530_71028C.1.pep
MPKLSVISVSGGHCLVAWSQVCSPDEYGGLGIKDLHPVRSSTAYEVAGTDAKRVEVGNVVNIDFWRSNWLPSISSSMPCLSCFVCQDGLLVWDLVEEKKLNQREEDVFFWTTARGGNFSVDSXYNMFFLARTRWSWDRMVXETRAPSKIKLFMWLTXKGRCLTADNLQKRGWPHHQHCHLCSLASEDCTHLFAACNFTNAVWDMLRNWLNIGFQLPRDQALDLGEWWLQSRVCCRAAHRKSFDXLFFMVCWFIWKERNAGVSENRASTPSSVYGAIKDEILVWRAAGLFKRD

SEQ ID NO: 172942 - protein, 70 aa, Oryza sativa
  Clone ID: PAT_MRT4530_71029C.1.pep
PPRATPHGSHAAAMGPRLRRRRRGAHSPPGPSRGAAEQTFQVRIGSFGVIFSLLIHGFRVRSDLFLCCTV

SEQ ID NO: 172943 - protein, 255 aa, Oryza sativa
  Clone ID: PAT_MRT4530_7102C.1.pep
MGRGKIAIKRIDNTMNRQVTFSKRRGGLMKKARELAILCDADVGLIVFSCTGRLYDFSSSSMKSIIERYQEAGEEHCRLLNPMSEAKFWQREVTTLRQQVQNLHHNNSFYLSANYLNENSAYYFIRINQYEGENEIFFKAHVEIHVSNKRQLLGEEISNFTVRDLQLLQNQVEMSLHSIRNKKGSLVQKENSELRKKFNIAHQRNIELHKKLNSGESTSSEQVTRSSKDPGESSTPRDSRVCIDLELSQKEVEDE

SEQ ID NO: 172944 - protein, 102 aa, Oryza sativa
  unsure (1)..(102): unsure at all Xaa locations
  Clone ID: PAT_MRT4530_71030C.1.pep
VFXFXXKKFGGGGGXPXXXKXGGXEKKKAXXKKKKFLKHXLGGGFFFFLXGXEXXXGXXIXGXGGXXXGVFXKXGEXKNPGGFLVGGGXXGKRXXFFXLKVI

SEQ ID NO: 172945 - protein, 187 aa, Oryza sativa
  Clone ID: PAT_MRT4530_71031C.1.pep
MTLRLLVILTWSLTRKTSWKLLHATSAKLQPGLHFTPTDASMENLPTSPKLPEPFLVFHVHVSAVETKTESFQVQIRLNPCAITILKTALYNAPIFLGWGCSDEEIGVFFSNSGHWLPTSIPRSPIVCRSTPSPFARCPQCRQAVPDALAIVQTATNLVGPWKFKIEFGYYNYRWGDYRYGRGDYHI

SEQ ID NO: 172946 - protein, 249 aa, Oryza sativa
  Clone ID: PAT_MRT4530_71032C.1.pep
MGGECKVHQLQAAGDGGPGAVAPFVAKTFHMVSDPSTNAVVRWGGAGNTFLVLDPAAFSDFLLPSYFKHRNFASFVRQLNTYGFRKVDPDRWEFAHESFLRGQAQLLPRIVRKKKKGGAAPGCRELCEEGEEVRGTIEAVQRLREEQRGMEEELQAMDQRLRAAESRPGQMMAFLAKLADEPGVVLRAMLAKKEELAAAGNNGSDPCKRRRIGADTGRGGVATGGDAAEMAQSRGTVPFPFSVLGQVFY

SEQ ID NO: 172947 - protein, 35 aa, Oryza sativa
  Clone ID: PAT_MRT4530_71033C.1.pep
VSYQCLSANLLSFLQFKIANVQFQSINMDNSMSEV

SEQ ID NO: 172948 - protein, 47 aa, Oryza sativa
  Clone ID: PAT_MRT4530_71034C.1.pep
VLATHDILYPVRYSGHGGIVTDEHTQLVVREVLMALPFHMLISGGLT

SEQ ID NO: 172949 - protein, 457 aa, Oryza sativa
  Clone ID: PAT_MRT4530_71035C.1.pep
MVFHLRSASVPSSPCSNETNIEEQLASLREIICSPSATMETMCNGFRRLTDVYSCMDEIMCLPSSQASLCKHQQRREVEKELERSLTLLDLCNAMQESFSELKATTQEMQLAIKRGEDAAVQTNVQSYTRLTKKAHKQCKKINKKPASSADQESCRVVKLMADAREITFSVLESTLHLLSKQIAVPSSSKWSLKAFQKTRVTCQEEQLQMLNAVSTAGKPVMQCCKISEQILPDKKHGELAANNQDMTAFSTIETMSSGWKKLGSIYNCIDEIMCLPSSQALLCQPLQRKAVEQELEGSLVVLDLCNAIHESFSGLKACIQDMQLAVKRGDDAAVQAKIQSYIRLAKKGRKQFKHISKKSSSADQESCRVIKLLAEAREIALSMLESSSHLLSKQIALPCSSKWSLVSKTFQKRRLVCEEEQLQVLELDIVDLETGVENLFRKSIQSRVSLLNILSL

SEQ ID NO: 172950 - protein, 69 aa, Oryza sativa
  Clone ID: PAT_MRT4530_71036C.1.pep
MGSRGGSNVSAGGFESPCTHKIYGYPWSTPFNFFTMNDKLKAPSIRGGLWPAFRLSLTGHGKKLRRADS

SEQ ID NO: 172951 - protein, 121 aa, Oryza sativa
  Clone ID: PAT_MRT4530_71037C.1.pep
EARWETIFSGNNYLLLLLLSPSAPPLAAGHPPPFHGTPCFWRRQLPQQRRCRLALASSPRRQEPPPPPASLPSSSSRCHAGADPGGAMGKRAGAAAGAATIAGPVAAPRPRRTTWTKLPPG

SEQ ID NO: 172952 - protein, 92 aa, Oryza sativa
  Clone ID: PAT_MRT4530_71038C.1.pep
MATDGRAYVFPNPDRTEDRPCQTCTAASPCCSHRQLAAGARRPSTIATATAGRVSSRSSSSHAGVKKLGKGGEDADTWVPHISSGSGELPCD

SEQ ID NO: 172953 - protein, 33 aa, Oryza sativa
  Clone ID: PAT_MRT4530_71039C.1.pep
RTRKPEGTIWLNSDELYNIWMISSALRPKYRPL

SEQ ID NO: 172954 - protein, 161 aa, Oryza sativa
  Clone ID: PAT_MRT4530_7103C.1.pep
MRHVGLKFVARRSRPAPADAGETTTYDVVFDDRGGVMEIPAILIDDARRPLLANLIAFEQSQGGEVARLLSSYVALMSQLIMTARDVELLRRRGVVENLLDNDEEAARFFNRLGDIDPVDYDTQAFAGLYEDVTRYCGTWRNRHMAGLRRNYFASTGHRAN

SEQ ID NO: 172955 - protein, 97 aa, Oryza sativa
  unsure (1)..(97): unsure at all Xaa locations
  Clone ID: PAT_MRT4530_71040C.1.pep
SCSSSSFLQRKKEGTRRKEGDVEXVVLVVXXXSDXASXTPAXAFLAXXXWTXXPSIPDXVESFAXXXXXRXLRHGAGIXEEDDLDLRXEAATGERVS

SEQ ID NO: 172956 - protein, 152 aa, Oryza sativa
  Clone ID: PAT_MRT4530_71041C.1.pep
MIEWQGDQQELATRLVGWQFGWQGRPNQPGLSTLLTQDGEGQAEQALDMTTAQLGSANAQKRLGGRNGDVAASDWWRAGVRGAGTRSLGRVARMRWLGGARRGSVHADWLEVESRGSHEGAQRGELGSTTWRLSRRLPSDLRNNGQPGLHQG

SEQ ID NO: 172957 - protein, 91 aa, Oryza sativa
  Clone ID: PAT_MRT4530_71042C.1.pep
QAWAFCRELSFQRERGRPSQEKEGRGLFCFRGGTLAWRHSRTSEVAWNSPSTSLEEEEEEEGETAWRLYGYGNPDGIYRLRVPPSSAGRGG

SEQ ID NO: 172958 - protein, 148 aa, Oryza sativa
  Clone ID: PAT_MRT4530_71043C.1.pep
MAIPVYSITRAEIEEFWRRKEMEEEEQRLTAEKEAARIKAKTLMIEDYAIFEQMIREILEEGIKGDSARAERDITTNGAAATKSTEGRIGIKDWWRKSTYAYLNEPAMTSTDENGRRKHAIKYIPQERCMNFFSSIPSQHNTTTFAIF

SEQ ID NO: 172959 - protein, 172 aa, Oryza sativa
  Clone ID: PAT_MRT4530_71044C.1.pep
MDISRTNEGYTSCGPVVEMSWHRAGVLLLGAQSCLPVPGVPAVGGVGSPCSAVAPAVAAAREDRRRHRQVAAVLVCPFAAVGTRRSIVAVVNPKVAAASFSSPSPSVPFPPPFWSPVCSPRCPLRAGALRWCRGAAVRRRVSAARAVFFAEPPPSSVTSSLTSSGSYPVSRS

SEQ ID NO: 172960 - protein, 57 aa, Oryza sativa
  Clone ID: PAT_MRT4530_71045C.1.pep
PNSDPPSYTPVRTLTFHPLIFFLVSKLPVLWITTYRTHCSRLYKSVTYYNACLSRHP

SEQ ID NO: 172961 - protein, 254 aa, Oryza sativa
  unsure (1)..(254): unsure at all Xaa locations
  Clone ID: PAT_MRT4530_71046C.1.pep
MTPAMMSPMAAAARRGRRLERRTLTGERRRYGTNGGHQRVADGTANSPTTKATADDQRTATATRLKRRRSSAXRRRRCSGGLRRQRRGGRGRRRLGEHDGGLPERRRRLKRRRHTAGAAAATAXKLGHTALELFRRREAKARVATGARRRRRRPTATATAKETFGLERGXTDPSRTRFQSFPKRFNRRFQRRKGRGDPGDHFPSNKSAGEGKERWAPPVSGRTRARARRTGPAGPRREKRGFGPTFGPKPKETF

SEQ ID NO: 172962 - protein, 106 aa, Oryza sativa
  unsure (1)..(106): unsure at all Xaa locations
  Clone ID: PAT_MRT4530_71047C.1.pep
MTSTMTSPTTAAARRRRRLGRRTLAGERRHHGTNGGHQHVEDNAANTPXLPSGCRRRRSSGGFRRLRRGGRGRRRLGDDDGGLPERRRQLERRRSTAEAAAAKAKL

SEQ ID NO: 172963 - protein, 46 aa, Oryza sativa
  Clone ID: PAT_MRT4530_71048C.1.pep
GQQLEYYVPLVAIFCVCLVIICCFVLLRRSLDQDEGEIVIICLRMK

SEQ ID NO: 172964 - protein, 69 aa, Oryza sativa
  Clone ID: PAT_MRT4530_71049C.1.pep
QTREQPLPSSIAAKPSSALERRIPPSDAWLNVLWWHDGVTSHCAMDGRSMVWVSSTGEPPGTPRQLPER

SEQ ID NO: 172965 - protein, 68 aa, Oryza sativa
  Clone ID: PAT_MRT4530_7104C.1.pep
TDRTFPLFPDETTNNTSISKNTVQFLLIKISLRPNLHHGPWSGPCVQPTLAGTLNHTGRRTPRPRAEF

SEQ ID NO: 172966 - protein, 286 aa, Oryza sativa
  unsure (1)..(286): unsure at all Xaa locations
  Clone ID: PAT_MRT4530_71050C.1.pep
MTSPTTAAARRRRRLGRRTLAGERRHHGTNGGHQHVEDNAANTPVTKTAAEKERTTTATRRKRRLPSGCRRRRSSGGFRRLRRGGRGRRRLGDDDGGLPERRRRLERRRRTAEAAAAKAKLGHTALGLLRRREAKARVATGRGDTGGPFKGARRRRRRPTATATAKETFGLERGKTDPNRTRFQSFPKRFNQRFQRRKGRGDPGDHFPSIDSAGEGKERPDLESGGDGSSAAXTRVSARGRRRLTSGTHLSATARARARLRTGPDWAEERENGFGPTFGPKPKEDF

SEQ ID NO: 172967 - protein, 240 aa, Oryza sativa
  Clone ID: PAT_MRT4530_71051C.1.pep
MTSPTTAAARRRRRLGRRTLTGERRRYGTNRGHQHVEDNAANTPVTKTTAEKQRTATAMRRKRRLPSGCRRRQSSGGFRRLRRGGRGRRRLGEHDGGLPERRRQLERRRSTAEAAAATAKLGHTALGLFRRREAKARGATGRGDTGGPFKGARRRRRRPTATATAKETFGLERGKTDPNRTRLRRFPKRFNQRFQRRKGRGDPGDCFPSNKSAGEGKERPDLEGKRRRRETRVSGGGGRR

SEQ ID NO: 172968 - protein, 874 aa, Oryza sativa
  Clone ID: PAT_MRT4530_71052C.1.pep
MIKEYLTKRKFLLVLDNAYFTEENILEHMGIPHPRQQNIGSKVIVTTRTRRTAGAMWPHGPDTVIMPQPLTYEESYNLLCTKIGKDVGSSYTLDLINNCYGIPLSVILLAGVLCDVPSQDTLNELVRNACVTLGSKVSVFHTMQRLVKFAYHQLPDANARHCFLYCLLFPEDQGIPVNDLIRFWVMDGLITQSIEFHEASCIGKEILDVLLKRCMLYMDGNDHVRMHDVIRETVSGFGKVNGYREQHDFKFGNPARKLECLAKLSTRVSLMSTEMEYLDGSVRCFWLTSLFLRGNRHMKYISEELFCHMEMLGILDLSFTGIKILPRSISCLTRLRILLLMGCDHLEEIQHIASLAQLEVLDASSCRSLRSIESGSFGHMGMLGILDLSFTGIKILPRSISCLTRLRILLLMGCDHLEEIQHIASLAQLEVLNASSCRSLRSIESGSFDHMMLLKLLDLSTTSIKCLPSLPASRELCHLLLQNCPYVGSENTIKSDGILSDTELIRFPYGVSKTGAIQNLQLGRIGDLSDLMAMLWLPCGLTFQLCDMFNMGVLFSDNEDSKTFVYASDTYFFHSLKKDSPLWLNGFQRFQIIISPLKDDQALDTDAQLMKADFIFRSSYFKTKHFTHSIDLDKFLEINGTFDVPSETEGILGHAELVSLKRLATTRSSDLNITSMEAVRELWIENCSQLESLLSVDEIEILSAWGNLHNLWISNLERLSSLLEGVKDVVSFSCLKHLLIDCCPNLKWIFPSMVCLPNLETMHVKFCDILERVFEDDSVLGDDALPRLQSLELWELPELSCICGGTLPSLKNLKVRSCAKLRKIPVGVDENSPFVTTIGETFWWDCLIWDDESIKRWILFRKWGPMLPYLATEG

SEQ ID NO: 172969 - protein, 290 aa, Oryza sativa
  unsure (1)..(290): unsure at all Xaa locations
  Clone ID: PAT_MRT4530_71053C.1.pep
MTSPTTAATRRRRRLGRRTLAGERRHHGTNGGHQHVEDNAANTPVTKTAAEKERTATATRRKRRLPSGXRRRRCSGGFRRLRRGGRGRRRLGEHDDGLPERRRQLERRRSTAEAAAATAKLGHTALELFRRREAKARVAAEREGHGDPFKGARRRRRRPTATATAKETRGLERGKTDPNRTRFQRFPKRFSRRFQRRKGRGDPGDHFPSIDSAGEGKRRPDLEGNSGGGSAAARXVSARGRRRXLTGGTHLSAAARARARAAXFGLGRLGREEREGGFGPTFGPKPKEDF

SEQ ID NO: 172970 - protein, 286 aa, Oryza sativa
  unsure (1)..(286): unsure at all Xaa locations
  Clone ID: PAT_MRT4530_71054C.1.pep
MTSPTAAAARRSERLGRRTLTGERRRYGTNGGHQRVADGTANSPTTKATADDQRTATATRLKRRRSSAXRRRRCSGGLRRQRKSGRGRRRLGDDDGGLPERRRRLERRRRTAGAAAAKAKLGHTALGLLRRREAKARVAARREEHGDPFKGARRRRRRPTATATAKETRGLERXKADPIRTRIKLIPNRLSQRFQRRKGRGDPGDCFPSNKSAGEGKERPDLESGGDGSSAAXTRVSARGGRRLXTGGTHLSATARARARRTGPAWAEEREXGFGPTFGPKPKETF

SEQ ID NO: 172971 - protein, 379 aa, Oryza sativa
  Clone ID: PAT_MRT4530_71055C.1.pep
MAKDGGGPDWNGLLKWSLAHGDGTAKPRSLSEEDKKWFMEAMQANTMDVVKRMKEITQVMKTPDDVLQSQGVTPENIEDMLDELQEHVESIDMANDLHSIGGLDPLLGYLKNSHAGIRAKAAEVVSTIVQNNPKSQQLVMESNGLEPLLTNFSSDASTNSRTKALGAISSLIRHNQPGVAAFRLGNGYSALRDALGSDDARLQRKALHLLQYLLHDNKADRSVATELGLPKLMMHLASSDDSGVREAALGGLLELARDNTSGAGNVLPDQDKLKDVLKSRIEGISTMDADDLSAHREERQLVDSLWKECYNEPSSLREKGLVVLPGEDAPQQPPPDVVGSMFEPPLRAWAASRPPPKEDSESESAKKDPPLLLGPGPSS

SEQ ID NO: 172972 - protein, 239 aa, Oryza sativa
  unsure (1)..(239): unsure at all Xaa locations
  Clone ID: PAT_MRT4530_71056C.1.pep
DVTPAAAAQRLGRLGRRTLTGERRREDANREHQHVEDDTANTPVTKTATEEQRTTTATRRKRRKPSGRRRRCCSGDLRRRRRGRRGRRRDGEHDGGLPERRRRLERRWSTAGAAAAKTKLGHTALERFRRREAKARVATGRGDTGEAFKGARRRRRRPTATATAKETXGLERGKXDPIRTRFXRIPKRISRRFQRRKGRGDPGDHFPSINSAGEGKERPDLERKRRRRETRVSGGGGRR

SEQ ID NO: 172973 - protein, 287 aa, Oryza sativa
  unsure (1)..(287): unsure at all Xaa locations
  Clone ID: PAT_MRT4530_71057C.1.pep
MTSPTAAAARRGRRLGRRTLTGERRRYGTNGGHQRVADGTANSPTTKTTAEKQRTATATRRKRRLPSGCRRRRSSGGFRRLRRGGRGRRRLGDDGGGLPERRRQLERRRSTAEAAAATAKLGHTALELFRRREAKARAATGRGDTGGPFKGARRRRRRPTATATAKETRGLERXKADPIRTRIHRFPNRFSRRFQRRKGRGDPGDHFPSIDSAGEGKERPDWKETAAAARRRRARVSARGRRRXPTGGTHLSATARARARXLTGPAGPRREKRGFGPTFGPKPKEDF

SEQ ID NO: 172974 - protein, 574 aa, Oryza sativa
  Clone ID: PAT_MRT4530_71058C.1.pep
MGCVHGRPSTSSPAAANASRRRDHPPPPAEAQKQGADASAEADAAAGEKGEQPAVAVAAAGPPVKRERRSRSSRSAHAHAHAEVRIGGSFANKARGEQVAAGWPAWLSAVAGDAIDGWTPRRADSFEKIDKIGQGTYSNVYKARDSVSGKIVALKKVRFDNLEPESVRFMAREILILRRLDHPNVIKLDGLVTSRMSCSLYLVFDYMVHDLAGLAASPEIKFTLPQVKCYVHQLLSGLEHCHDRGVLHRDIKGSNLLLDNNGVLKIGDFGLASFFDPNHKQPMTSRVVTLWYRPPELLLGATDYGVGVDLWSAGCILAELLAGKPIMPGRTEVEQLHKIFKLCGSPTEEYWKKSKLPHATIFKPQQPYKRRIADTFKDFPQSALRLIETLLAIDPADRLTATSALESEFFKTEPHACDPSSLPQYPPSKEMDAKRRDEEARRLRAAGGRVNGEGARKTRTRERPRAVPAPEANAELQANIDKRRLITHANAKSKSEKFPPPHQDGALGYPLGCSNHMEPAFEPPDPSSFSTVFPYEKGSVPTWSGPLADPSSGNQKRKHKSGRSSKQPATARAR

SEQ ID NO: 172975 - protein, 175 aa, Oryza sativa
  Clone ID: PAT_MRT4530_71059C.1.pep
MASRLLHLRRLLPSARPSAGGGGGGGGAVAAFSTVTPTPRVSALVDEICGLTLIEASSLTDALRGRLGVDQLPPLAILTGGAAPLAGGGAATGAAGEEAKAKEEKMAFDVKLEGFDAAAKLKIIKELRAFTNLGLKEAKELVEKAPAVLKAGVPKEEAESIAEKMRAIGAKIVLE

SEQ ID NO: 172976 - protein, 244 aa, Oryza sativa
  Clone ID: PAT_MRT4530_7105C.1.pep
MGRLTLVEVMRFGREGTLCRGQQQQQQQEVGQSATVGGGGFRDGGFCGAAFDGAVCGVVGGGSPAVTVLNVKALVPVTHDLAIDNCSRWRRLFLMVLGKYALANHVLVIAPRLRSRGVLCRCCPAGLPCLGDTSHQADGGQEVAGVRRSDGRPGMRRRRCGGGDTWEKAALVGGEPDAHPGRCPASALHRDGKELLVDGCSFTRDCAVASPYAAHLDSSSAGIQLHHLAVDVQGRPWDKDLIAF

SEQ ID NO: 172977 - protein, 58 aa, Oryza sativa
  Clone ID: PAT_MRT4530_71060C.1.pep
MDSKANVQGIRPTNPAWISLSAGHGVTASCHATWVHGSSALIRGGVGDFYCDKLASSY

SEQ ID NO: 172978 - protein, 58 aa, Oryza sativa
  Clone ID: PAT_MRT4530_71061C.1.pep
NTAARAVTGRVADASTDSLASLALHLCSCGVGALVDAVAEAAALWSTSEEVAVERSLH

SEQ ID NO: 172979 - protein, 65 aa, Oryza sativa
  Clone ID: PAT_MRT4530_71062C.1.pep
FFFFFLNRSDHFSHSLLFVWWGPGLVRFLLLSTQFSVFVRDHLRRKDRYQFCGGAAVKGRFPLFH

SEQ ID NO: 172980 - protein, 172 aa, Oryza sativa
  Clone ID: PAT_MRT4530_71063C.1.pep
DASEDSPSASAPMAQGPRRTPWRRWRQAALAGEGEEEACEPVATESQPHNTAARAVTGRVADASTDSLASLALHLCSCGVGALVDAVAEAAALWSTSEEVAVERSLHGGDTRWWEAHHARHRREWRGTSPEEQEEEGRQPRRPLRPGDRQIEGGRGGGVEARMACWRGDCGG

SEQ ID NO: 172981 - protein, 63 aa, Oryza sativa
  Clone ID: PAT_MRT4530_71064C.1.pep
LAALRRPQLRLLRVIGHLPVHQRPRSSSPARRRRRRPVRHGLLHLLRRAHADGAPCTGTGCCQ

SEQ ID NO: 172982 - protein, 58 aa, Oryza sativa
  unsure (1)..(58): unsure at all Xaa locations
  Clone ID: PAT_MRT4530_71065C.1.pep
FFFFFFNHRVDWLNYLMYCKKILHANHAGNTKYIFXYFMLNLYSTNTIDCLXMIFGPT

SEQ ID NO: 172983 - protein, 793 aa, Oryza sativa
  Clone ID: PAT_MRT4530_71066C.1.pep
MNSLTGELPETISSCSLLEIVDLFSNSIESEIPPSIGQCSFLQQIILGTNNIRGNIPPDIGLLSNLSALFIPHNQLTGTIPQLLGSNKPLIWVNLQNNSLSGEIPPSLFNSTTTSYIDLSSNGLSGSIPPFSQALSSLRYLSLTENLLSGKIPITLGNIPSLSTLMLSGNKLDGTIPKSLSNLSKLQILDLSHNNLSGIVPPGLYTISSLTYLNFGANRLVGILPTNIGYTLPGLTSIIFEGSLSDLTYLDLGGNKLEAGDWSFMSSLTNCTQLTNLWLDRNKLQGIIPSSITNLSEGLKIPTSLGECLELESVHLEGNFLQGSIPGSFANLKGINEMDLSRNNLSGEIPDFFEYFGSLHTLNLSFNNLEGPVPRGGVFANSSNVFVQGNKKLCAISPMLQLPLCKELSSKRNKTSYNLSVGIPITSIVIVTLACVAIILQKNRTGRKKIIINDSIRHFNKLSYNDLYNATNGFSSRNLVVWYLAVPVPGGTNCWTVKILIKGQLKFGACNVAIKVFRLDQNGAPKNFFAECEALKNIRHRNLIRVINLCSTFDPSGNEYKALILEYRINGNLESWIHPKVLGRNPTKHLSLGLRIRIAVDIAVALDYLHNRCSPPMVHCDLKPSNVLLDDEMVACLSDFGLTKFLHNNIISLNNSSSTAGLRGSIGYIAPEYGLGCKVSTEGDVYSYGIIVLEMITGKCPTDEMFKDGMNLRSLVESAFPHKINDILEPTITEHHDGEDSNHVVPEILTCAIQLAKLGLMCTETSPKDRPTINDVYYQIISIKEKYHALINH

SEQ ID NO: 172984 - protein, 70 aa, Oryza sativa
  unsure (1)..(70): unsure at all Xaa locations
  Clone ID: PAT_MRT4530_71067C.1.pep
AHCVRRRLGSFNRVLNEGLXNYSAVMTKKLLELYTGLDAASTVADVGGGMGTSVGATMTCHTYIRRINYD

SEQ ID NO: 172985 - protein, 476 aa, Oryza sativa
  Clone ID: PAT_MRT4530_71068C.1.pep
MDAAAREAQVQGSLEWRVTVPEGSSVTVEHEAGVAERAWAWVVRMLVAVRAAVAGFARKVWKIGADDPRRAVHSLKVGLALTLVSIVYYTRPVYDGVGGNAMWAVMTVVVVFEYTVGGCMYKGFNRAVATASAGLLALGVNWVADKSGDKLEPFILSGSLFLLAAAATFSRFIPTVKARFDYGVTIFILTFSLVAVSGYRVDQLLDLAQQRMSTIGIGIVICLAELHLLTVRNMEKLAGAVEGCVEDYFAAKPAAAKSEGYKCVLNSKASEDSQANLARWEPPHGRFGFRHPYAQYTKVGAAMRHCAYCVEALNSCVRAEVQAPEHVKRLLGDVCTRLASQCARVLREASTSVAAMTSPKTLDFAVADMNTAVHELQGDLRALPPVLALEPAAEMSLMDAMPLFTVASLLIEISARIEGVVDAVETLASLASFKQVEDDDDKKGQTEMKVHPLNVPDDHDASTHESQTTTKHPEQV

SEQ ID NO: 172986 - protein, 62 aa, Oryza sativa
  Clone ID: PAT_MRT4530_71069C.1.pep
ANALVSHLAGKNSVFRALPVNVVANAYRIPREQAQSLKTFRGKEPGAFPPRFQQQYYPGLSN

SEQ ID NO: 172987 - protein, 168 aa, Oryza sativa
  unsure (1)..(168): unsure at all Xaa locations
  Clone ID: PAT_MRT4530_7106C.1.pep
MGISRCSIHLVKPKNQNSNRQHSKQHGSHHPAQTLVRAQHVHHGSPPSLSFIAPSPIIFTFHHMHTHTSHHMVATSHMVTHPHMDRAHHHTXVVGWATWTHPLHFTXHSISPTWAPSYVNTSSFSPRGHTHTTHAIQNSWVTHHTSHTFPXRHTIVGAHTITIQLGRE

SEQ ID NO: 172988 - protein, 100 aa, Oryza sativa
  unsure (1)..(100): unsure at all Xaa locations
  Clone ID: PAT_MRT4530_71070C.1.pep
MKLSMKRPPYNRTSRVSLSPSGAPELLSLLETXWTPRVHEDXSSWSGYCQSEVIERLCRGKSHSLGRXAYVLGKSRSMGKVYIHYSMSVEEKPLFVRLRT

SEQ ID NO: 172989 - protein, 111 aa, Oryza sativa
  Clone ID: PAT_MRT4530_71071C.1.pep
PFNPFGLSDDFNPFAEFKFKELKTAPPPIFSILGFFVQPFFPAKGPIETLFDQFAIPVPNKVVAYPPNFFPGNLSPPPYLNCSPQRPFFPFLVPPPRPSISIFTRAFIFAP

SEQ ID NO: 172990 - protein, 99 aa, Oryza sativa
  unsure (1)..(99): unsure at all Xaa locations
  Clone ID: PAT_MRT4530_71072C.1.pep
MKLSMKRPPYNRTSRMGLPFPGAPELLSLLETXWTPRVHEDXSSWSGYCQSEVIERLCHDASHVLGXAHVLGKSRSKGKVYIHCSQSVEEKPLLVRLRT

SEQ ID NO: 172991 - protein, 129 aa, Oryza sativa
  Clone ID: PAT_MRT4530_71073C.1.pep
LLVSPPPSDCSCPLGASSVAALRPSPTATRSPTPRSAVAVQGRGAAASVRGVRWQAGRRKGKGRLVGVRCDAAVTEKPAEEEEAASEEFEYQTEVHDESASPPPPRAGAPSPFFSLSLWWHRGLRMLRG

SEQ ID NO: 172992 - protein, 140 aa, Oryza sativa
  Clone ID: PAT_MRT4530_71074C.1.pep
MVRQVSDFSIRITGLANNIRVFGSNLPKADLRSRPRKNVRGELVGVLHHISFGGSSSNMQMLSARTVHAWHDPWDGGQRRTILLVVHLLVIVRLNGLPWPDKDRVLTLAPDSFTTTGGKKARARELSFGLARVLFVWLGS

SEQ ID NO: 172993 - protein, 83 aa, Oryza sativa
  Clone ID: PAT_MRT4530_71075C.1.pep
SSSVPPLFKRIRRVRWLCSRCSHQSFSWLQPNISRRRLIRRLSLRPCFPCFRPPHCPRQRRKHSQPWRGLRHGSPQMSVFMVW

SEQ ID NO: 172994 - protein, 82 aa, Oryza sativa
  unsure (1)..(82): unsure at all Xaa locations
  Clone ID: PAT_MRT4530_71076C.1.pep
RFAEHRMQCSMQNMVLLPQIYXDARVYCNDEHVLVTVRTKPYYTAYVXVENHSYYVGYTWAMVVMDSHIEKSLKKWSHIKEY

SEQ ID NO: 172995 - protein, 69 aa, Oryza sativa
  Clone ID: PAT_MRT4530_71077C.1.pep
LASGQKKLRRIRSYVYLAWRKKKKRRRDCGAIDRHASSTDKFLAKSIDIISIESRGDEIRCEVLEELIW

SEQ ID NO: 172996 - protein, 232 aa, Oryza sativa
  unsure (1)..(232): unsure at all Xaa locations
  Clone ID: PAT_MRT4530_71078C.1.pep
RQQRRPARVGELAGAREVGRGNGGHLRVEDNEANPLVLTTTTNGARRRPATRRSGAAARVDGDGGAPVVGGERGGAAELPLTTAHLTAATASGGDDGDGAATMPKTAGGGGGLGARRGGARRHGRTRERGQTKEDDEGTLYMALDRRDRAPNERNRFGKKSNSVLGIKSKRTRFGSNPQRFSLILGGKERGEREEQNPSNNRKKPGRIWADLAAQNGDSXACAAAAGGRGRP

SEQ ID NO: 172997 - protein, 62 aa, Oryza sativa
  Clone ID: PAT_MRT4530_71079C.1.pep
IKTPIKEMRASSLALMAVQHSCPTRPRAPRGDPSCTRSSLRPRASVARRGAEIGAWCPRIAR

SEQ ID NO: 172998 - protein, 2263 aa, Oryza sativa
  Clone ID: PAT_MRT4530_7107C.1.pep
MAWLGLPSCRPTPLPEPSLHRRRREGHHRGEPRLTDGQIRRFRFPLVVGTGSAPRRLATGIRGATPCWRRGAREKGGDSTGGSSSNSSSEEDERDVAAQRMSDMNHVSDDPKHVGVGKPDVDVPNDPMSDKGVTISGTVKRRKEDVAQRVPTVAAAAVPGDMMAKVREAPAVVNGFSTASSSHQRLAGKVAVITGGASGIGKATATEFIKNGAKVIIADIQDDLGHSVAAELGPDAAYTRCDVADEAQVAAAVGLAVKRHGRLDVFHNNAGIAGALPQDDMAAVDLGDFDRVMAVNARSTLAAVKHAARAMAPRCSGCVLCTSSGAGVIPVPAVPVYSVSKATVIAIVRAAAEPMARHGLRVNAISPGATRTPLLLRQIPLLSEMSPSLSDGLKTTVEKEVGEGGAVVLLAPEDIARAAVYLASDEARYVNGHNLVVDAGGLFTTPSAQFDSALHLLHSEQDVQSIPTPQTQSPTWPGTFGDVGPEGEGARRVFSELSYSSVCAKFPLFSLMAEQAKAHDFSPSVSGDDGEPNPRHRARTPPPPPRQSPKRGEALERVEKPTASPVAGGAGERRDGERRLLVYGDGSTPQGVLQAAGALLRHPPVVPDPESPARRWLDDVANLVMTAQQRLGAGGRSATTRTPGAATTGSVSSRRRARRAAAAARHSATTPSSAPPTREDQHEEPDARLDIERRRSDRRAPRATEGASSSRVSPRHGREDQPSVPPVGGVGCRAFVASLRNVRWPPRFRPTITEKYDGSVNPTEFLQVYTTGIEAAGGDDRVMANFFPMALKGQARGWLMNLPPASVHSWEDLCQQFTMNFQGTYPRPGRRDRRRKKRSVHSGDEGHVLAVKGAPRATRKGRPASDKKKEAGTPSRERPASKWCSVHNTSLHDLADCRAVKNLAERTRKWEEDRRQERREGKSAAIPSGKRRSEARQKAPAVDIDDGDDDLGFQEPGATIATVDGGACAHVSRRSFKAMRRELLAAAPTHEATRRARWSEVALTFDQTDHPPCVARGGQIAMVVSPTICNVKLGRVLIDGGAALNILSPAAFDAIKAPGMMLQPSQPIIGVTPGHTWPLGHIDLPVTFGGSANFRTERVNFDVADLSLPYNAVLGRPALVKFMAAVHYAYLQMKMPGPGGPISVRGDLKVALACMEKRADHLAAATKPEGGDERLGTSAPTAPRQRIATCDEVPEDALVSFLRANADVFAWRPADMPGVPREVIEHRLAVRPGARPVRQKVRRQAPERQAFIREEVARLLEAGFIREVIHPEWLANPVVVPKANGKLRMCIDYTDLNKACPKDPYPLPRIDQIVDSTAGCDLLCFLDAYSGYHQIRMAREDEEKTAFITPVGTYCYTSMPFGLKNAGPTFQRTTRISLGSQIGRNVEAYVDDLVVKTRNQETLLSDLAETFENLRSARIKLNPDKCVFGVPAGKLLGFLVSARGIEANPEKIRAIERMRPPSKLRDVQCVTGCMAALSRFISRLGEKALPLFKLLKRSGPFTWTEEAENALAQLKAYLSSPPVLVAPEPNESLLLYLAATPQVVSAALVVERDEDNPHSTHPHSVPTWPGSRQGGEAPESNGGLRPPTTGVGPLPACQTVLGAPDPQEGPEATAGRPHLPPFDPEANPVLIRPGREQGEEAPEPNGGLRPLTTGAGPLPACLTTPGAPDPQDGPEATVGRPHLSSSDPEVISAGDECAPRGHLDEEHPGDTAPSEEDRPRRKVQRPVYFVSEALRDAKTRYPQAQKMLYAILMASRKLRHYFQAHRVTVVTSYPLGQILHNREGTGRVVKWAIELSEFDLHFEPRHAIKSQALADFVAEWTPAPETVSIPEASADPSQLPHAAHWVMQFDGSLSLQGAEYEGLLAGLRVAAGLGIRRLLVLGDSQLVVNQVCKEYRCSDPQMDAYEQGVELLVDIHEGECGAHSASRTLVGKAFRQGFYWPTALNDAVDLVRRCRACQFHAKQIHQPAQALQIIPLSWPFAVWGLDILGPFKRAPGGFEYLYVAIDKFTKWPEAYPVVKIDKHSALKFIKGITARFGVPNRIITDNGTQFTSELFGDYCEDMGIKLCFASPAHPRSNGQVERANAEILKGLKTKTFNILKKHGDSWIEELPAVLWANRTTPSRATGETPFFLVYGAEAVLPFELTLRSPRATMYCEADQDQLRRDDLDHLEERRRRAALRAARYQQSLRRYHQRHVRARSLCVDDLVLRRVQTRAGLSKLSPMWEGPYRVIGVPRPGSVRLATGDGTELPNPWNIEHLRRFYP

SEQ ID NO: 172999 - protein, 117 aa, Oryza sativa
  Clone ID: PAT_MRT4530_71080C.1.pep
MASMSSFRLAVAVAALLVIGSHATELTFKVAEGSSATSLELVTNVAISEVEVKEKGGKDWVGLKESGSNTWTLKSDAPLKGPFSVRFLVKNGGYRVVDDVIPESFTAGSEYKSGIQL

SEQ ID NO: 173000 - protein, 63 aa, Oryza sativa
  Clone ID: PAT_MRT4530_71081C.1.pep
MEHPSAAAVDDDGDDRPAPIATSTTCGGLTRWSGHAVVAVEEDLAQQGVGDLVAASASYLIPL

SEQ ID NO: 173001 - protein, 156 aa, Oryza sativa
  unsure (1)..(156): unsure at all Xaa locations
  Clone ID: PAT_MRT4530_71082C.1.pep
PLSPASPPPPPSSPSPSSAATSAVASRHRVHICLALAPPLPPPPTPPSCRSLRLPSPLPSPRSDAFPPSVGFEVNXRKGGGEHSSPPPPTPTPTAPPPAHRGATSCSRRPPPPRGATAVVAVDRRLRLAHLHQCRAVPQPLRPQQAQGEEGDPPNP

SEQ ID NO: 173002 - protein, 611 aa, Oryza sativa
  Clone ID: PAT_MRT4530_71083C.1.pep
MSMSTAASSSASAVRPPPTWGAPSQRRLVEQHLASLPRGLPRAAHVRELHAQVLKQGLHLNPRAAARLVSAYALLRLLPSSRRVFDAIRDPHADAFLANTMLRAYALGGAPRDALAAFSAMPRRDSFTYSFLIKALSAAGVAPVRAVHSHVVKLGSVEDTFVGNALIDAYSKNGGFSDARKVFDEMPERDVVSWNTAMAAMVREGELAGVRKLFDEMPEKDTVSWNTILDGYTKAGEVEAAFELFQRMPERNVVSWSTMVSGYCKKGDLEMARVIFDKMPSKNLVTWTIMVSACAQKGLVDEAGKLFAQMKEASVELDVAAVVSILAACAESGSLSLGKRIHRYVRKRNLGRSTHVCNALIDMFCKCGCVNRADYVFDTETVQKDSVSWNSIIGGFAMHGHGDKALELFAQMKQQGFNPDAVTMINVLSACTHMGFVDEGRRHFSNMERDYGIMPQIEHYGCMIDLLGRGGLIKEAVDLIKSMPWEPNEVIWGSLLSACRLHKNVEYAEIAVNELSKLQPSNAGNYAVLSNIYAEAGQWSDMAKARMQMKGTGSQKTAGSSWVELNETFHEFTVGDRKHQDSDQISEMVDRLSSHVKHVGCVPAGHELLVQ

SEQ ID NO: 173003 - protein, 28 aa, Oryza sativa
  unsure (1)..(28): unsure at all Xaa locations
  Clone ID: PAT_MRT4530_71084C.1.pep
ENPSSLWWDSSCYAFAVMFDVDEKDXRP

SEQ ID NO: 173004 - protein, 202 aa, Oryza sativa
  Clone ID: PAT_MRT4530_71085C.1.pep
WRRSLSSYGKKSCSGHQPKTSPGHVASRRSGATSLGTPPSGSSTMTGTPRRTMSPTLCSSPHTTSTRKESPASSRSNRPPSLRRRPRARPRRPSAGSTTWKATGSPTSATASSASPPIAQPRPSYTTPSPARGWRSPGLLASLPTKTTLARRSRSRWGSARTTVFTSCSASPTARWMCTRWAAAPNPPGGADTRFLCTRATW

SEQ ID NO: 173005 - protein, 709 aa, Oryza sativa
  unsure (1)..(709): unsure at all Xaa locations
  Clone ID: PAT_MRT4530_71086C.1.pep
MRAALFGAERSGVVDHGGGDKEELFWPAGKGGLVVVEPRSVLDCTRSPSPPYSTSTLSSSLGGGSADSTGVAAVSESSTAAAGATKWGAPGEHGGGGKEEWGGGCELPPIPGALDVGLVGGEGWDATATLGNAAGPDQSFLNWIIGAAGDLEQPGPPLPVLQQPLIDNAGFGIPAVDTMGFSLDHPLSGVASDLSSSGAHTATGGGGKASLGFGLFSPEATSLEQPPPSMLFHEGIDTKPPLLGAQPQFLLNHYQPQPPNPAAALFMPLPPFPEHNHQSPHLQPPLKRHHAIPDDLYLARNQQQSSAVAPGLAYSPPLHGPAPFQLHPSPPPIRGAMKSTAAEAAQQQLLDELAAAAKATEAGNSVGAREILARLNQQLPQLGKPFLRSASYLKEALLLALADSHHGSSGVTSPLDVALKLAAYKSFSDLSPVLQFTNFTATQALLDEIGGMATSCIHVIDFDLGVGGQWASFLQELAHRRGAGGMALPLLKLTAFMSTASHHPLELHLTQDNLSQFAAELRIPFEFNAVSLDAFNPAEXISSSGDEVVAVSLPVGGCGRAPALPAILRFVKQLCPKVVGPIVHGGVRADLPVSQHFQYCFESCGFLADSLDAAGIDADSACKIERFLIQPRVEDAVIGRHKAQKAIAWRSVFAATGFKPVQLSNLAEAQADCLLKRVQVRGFHVEKRGAALTLYWQRGELVSISSWRC

SEQ ID NO: 173006 - protein, 52 aa, Oryza sativa
  Clone ID: PAT_MRT4530_71087C.1.pep
CSAREVILSRVISWEGSAIVNASCAAHVALRTGILRHVQYDSDQNRRLKRRL

SEQ ID NO: 173007 - protein, 715 aa, Oryza sativa
  Clone ID: PAT_MRT4530_71088C.1.pep
MRAALFGAERSGVVDLGGIGGGNRGLFWPAGKGGLVVVEPRSVLDCTRSPSPRNSTSTLSSSQGGGGADSTGVAAVSESSAAAAEATKWGAPGEHGGGGGGGGGGGKEDWSSGCELPPIPGTLDVGLVGGEGWDTMLGNAAAAAAGQDQSFLNWIIGAAGDLEQPGPPLLDNAGFGIPAVDPLGFSLDHSLSGVASDLSSSGAHTATGGAGGGKASLGFGLFSPEATSLEQPPPPMLFHEGIDTKPPLLGAQPPGLLNHYHHQPPNPAATLFMPHPSFPEHNHQSPLLQPPPKRHHSMPDDIYLARNQLPPAAAAAQGLPFSPLHASVPFQLQPSPPPIRGAMKTTAAEAAQQQLLDELAAAAKATEAGNSVGAREILARLNQQLPPLGKPFLRSASYLREALLLALADSHHGVSSVTTPLDVALKLAAYKSFSDLSPVLQFANFTATQALLDEIGGTATSCIHVIDFDLGVGGQWASFLQELAHRRAAGGVTLPLLKLTAFVSTASHHPLELHLTQDNLSQFAADLGIPFEFNAVSLDAFNPGELISSTGDEVVAVSLPVGCSARAPPLPAILRLVKQLSPKIVVAIDHGADRADLSFSQHFLNCFQSCVFLLDSLDAAGIDADSACKIERFLIQPRVHDMVLGRHKVHKAIAWRSVFAAAGFKPVPPSNLAEAQADCLLKRVQVRGFHVEKCGAALTLYWQRGELVSISSWRC

SEQ ID NO: 173008 - protein, 253 aa, Oryza sativa
  unsure (1)..(253): unsure at all Xaa locations
  Clone ID: PAT_MRT4530_71089C.1.pep
MADDGFKYHEEYVTNKRGMKLFACQWSPLDHEPKALIFLCHGYAMECSISMRGTGVRLPKAGFTVHGLDYQGHGKSEGLQGYINSFDDVVVDCSNYFASVCGXGAALLPRPIVITILSKLSNVIPTWKIIPTEDVIDKAIKSEEWRQEVRNNPYCYKGRPRLKTGYELFMASLDIESTLDKVTLPFIIVHGGDDAVTDPSVSEELYTSAQSKDKTLKLYPGMCHALTSGEPASNIDIVFLDIIKWLDERVSVS

SEQ ID NO: 173009 - protein, 1110 aa, Oryza sativa
  Clone ID: PAT_MRT4530_7108C.1.pep
MSKKERGALFYTHICPLTHVPSGSQILWLGSSTEGNKEKCELVRPMHAAAAVLPVMGAWICNYRGSYWSAKISTSESMNRLRLLLCAHDEPPNLSYGVHSFMLTLSSPEFQHPLMVSLVLAMAGKLISSSIVLALLPLFCGILLAPSCEAATVDTTSATLLQVKSGFTDPNGVLSGWSPEADVCSWHGVTCLTGEGIVTGLNLSGYGLSGTISPAIAGLVSVESIDLSSNSLTGAIPPELGTMKSLKTLLLHSNLLTGAIPPELGGLKNLKLLRIGNNPLRGEIPPELGDCSELETIGMAYCQLIGAIPHQIGNLKQLQQLALDNNTLTGGLPEQLAGCANLRVLSVADNKLDGVIPSSIGGLSSLQSLNLANNQFSGVIPPEIGNLSGLTYLNLLGNRLTGGIPEELNRLSQLQVVDLSKNNLSGEISAISASQLKNLKYLVLSENLLEGTIPEGLCNGDGNGNGNSSLENLFLAGNDLGGSIDALLSCTSLKSIDVSNNSLTGEIPPAIDRLPGLVNLALHNNSFAGVLPPQIGNLSNLEVLSLYHNGLTGGIPPEIGRLQRLKLLFLYENEMTGAIPDEMTNCSSLEEVDFFGNHFHGPIPASIGNLKNLAVLQLRQNDLTGPIPASLGECRSLQALALADNRLSGELPESFGRLAELSVVTLYNNSLEGALPESMFELKNLTVINFSHNRFTGAVVPLLGSSSLTVLALTNNSFSGVIPAAVARSTGMVRLQLAGNRLAGAIPAELGDLTELKILDLSNNNFSGDIPPELSNCSRLTHLNLDGNSLTGAVPPWLGGLRSLGELDLSSNALTGGIPVELGGCSGLLKLSLSGNRLSGSIPPEIGKLTSLNVLNLQKNGFTGVIPPELRRCNKLYELRLSENSLEGPIPAELGQLPELQVILDLSRNKLSGEIPASLGDLVKLERLNLSSNQLHGQIPPSLLQLTSLHLLNLSDNLLSGGIPGALSAFPAASFAGNGELCGAPLPSCGAPRRLPGAEVSAIVAAIAVVSAAVCVALLYIMLRMWSNWRAVASVSSSDGEETASSVAAAHGKWCAGDGKYWKVGSVSVASSAAEEKYSSASSETTSVLHGKPAEAAGGGAGAVKPASKC

SEQ ID NO: 173010 - protein, 221 aa, Oryza sativa
  Clone ID: PAT_MRT4530_71090C.1.pep
MARLSAARALPAPRRRSRGTSPGKADIRRRRGSVMLRVHRADLGVLRRRNPVLGCILVGGGGRRILRLRAYSSASARIWRKPEEGWMKLNFDGSSKHSTGIASIGGVYRDHDGAFLLGYAERIGTATSSVAELAALRRGLELAVRNGWRRVWAEGDSKAVVDVVCDRADVQSEEDLRLCREIAALLPQLDDMAVSHVRRGGNKVAHGFAELGHRAEIPNID

SEQ ID NO: 173011 - protein, 46 aa, Oryza sativa
  Clone ID: PAT_MRT4530_71091C.1.pep
RMYCAMLVTGYTTSRDESGKLGYFRWASRVGKRSTTEARQTARDMN

SEQ ID NO: 173012 - protein, 86 aa, Oryza sativa
  unsure (1)..(86): unsure at all Xaa locations
  Clone ID: PAT_MRT4530_71092C.1.pep
GKKTSEPATVQNLKKAGLGQPTACFPSLKGKKLFIKKLVHGGSGLFVKPYDYPRCKPLKSMWRDYLMAALFCFXPKKKKKKPKKKK

SEQ ID NO: 173013 - protein, 128 aa, Oryza sativa
  unsure (1)..(128): unsure at all Xaa locations
  Clone ID: PAT_MRT4530_71093C.1.pep
YDSGYTSRSTDNYNSGYGXSQSGNGSSFHSSFHNSNSGNQFGDTSGFQTSFHNSSSNNQTSDNPSFHASSNNDQPGDGLSFHARFYSSSRGSDQSRTNNAGFRDRSRSPPSNRNHEDPGSKAVGVSNW

SEQ ID NO: 173014 - protein, 33 aa, Oryza sativa
  Clone ID: PAT_MRT4530_71094C.1.pep
VLSNYLIITALLFWILRNGGNQYCIIVVMSQCS

SEQ ID NO: 173015 - protein, 116 aa, Oryza sativa
  Clone ID: PAT_MRT4530_71095C.1.pep
MWSGLNNDNESLRLYTLCRNGNPTVQTKKFQSLNATRSNLSKHGDLSIYLRMHYGSSTVQILSANAGAGRAGIDMHRGCPTKNENPAIFVVIGAGGGGGGGAAPRGGNIRSSASCS

SEQ ID NO: 173016 - protein, 58 aa, Oryza sativa
  Clone ID: PAT_MRT4530_71096C.1.pep
CGTIRIQTTPPPPQLSPLWEGAFIIFEVTRPGSNQLKCEDGSVVENSWNIEHLRCFYA

SEQ ID NO: 173017 - protein, 204 aa, Oryza sativa
  Clone ID: PAT_MRT4530_71097C.1.pep
MQGRMVTWSMASVIVAAACIFLSCSASVAHGRRFVRSSSYDKPCKEMRLYLHDILYDYSNSTSNSTSAAATKPTALATAVPSTGGTFFGQVVVFNDPMTEGRALPPSLEETAVRAQGVYLYNSKEAFNAWFAFSIVFNSTGRRGTLNLMGADIIAEKTRDISVVGGTGDFFMSRGVATLRTDAFEGFTYFRLQMDIKLYECYVV

SEQ ID NO: 173018 - protein, 57 aa, Oryza sativa
  Clone ID: PAT_MRT4530_71098C.1.pep
LCYELFACILSLLVCLLPVFYGRGSGACWVTLRDGSTLFSQAVELTSQVIGLCLQLA

SEQ ID NO: 173019 - protein, 77 aa, Oryza sativa
  Clone ID: PAT_MRT4530_71099C.1.pep
RLNFVTAAWFDSSGKKSILPSPSRCSRDSLYDVKYKCCTVSYWSSVVAGGIQHSPIQPKYSHSLTKEAFTHSKYFSA

SEQ ID NO: 173020 - protein, 2030 aa, Oryza sativa
  Clone ID: PAT_MRT4530_7109C.1.pep
MAEQAKAHDLSPSVSGDDGEPNPRHRARTPPPPPRQSPKRGEALERVEKSAASPVAGGAGERRDGERRLLVYGDGSTPQGALQAAGALLRHPPVVPDPESPAQRWLDDVANLVMTAQQRLGAGGRSATTRTSGAATTGSVSSRRRARRAAAAARHSATTPSSAPPTREDQHEEPDARLDIERRRSDRRAPRATEGASSSRVSPRHGREDQPSVPPVGGVGCRAFVASLRNVRWPPRFRPTITEKYDGSVNPTEFLQVYTTGIEAAGGDDRVMANFFPMALKGQARGWLMNLPPASVHSWEDLCQQFTMNFQGTYPRPGEEADLHAVQRGDDESLRSYIQRFCQVRNTIPCIPAHAVIYAFRGGVRHNRMLEKIASKEPQTTAELFQLADRVARKEEAWTWNPSGSGVAASAAPGSAAQTGRRDRRRKKRSVHSGDEGHVLAVEGAPRATRKGRPASDKKKEAGTPSRERPASKWCSVHNTSLHDLADCRAVKNLAERTRKWEEDRRQERREGKSAAVPSGKRRSEARQKAPAVDIDDGDDDLGFQEPGATIATVDGGACAHVSRRSFKAMRRELLAAAPTHEATRRARWSEVALTFDQTDHPPCVARGGQIAMVVSPTICNVKLGRVLIDGGAALNILSPAAFDAIKAPGMVLQPSQPIIGVTPGHTWPLGHIDLPVTFGGSANFRTERVNFDVADLSLPYNAVLGRPALVKFMAAVHYAYLQMKMPGPGGPISVRGDLKVALACMEQRADHLAAATKPEGGDERLGTSAPTAPRQRIATCDEVSVKEEDALVSFLRANADVFAWRPADMPGVPREVIEHRLAVRPGARPVRQKVRRQAPERQAFIREEVARLLEAGFIREVIHPEWLANPVVVPKANGKLRMCIDYTDLNKACPKDPYPLPRIDQIVDSTAGCDLLCFLDAYSGYHQIRMAREDEEKTAFITPVGTYCYTSMPFGLKNAGPTFQRTTRISLGSQIGRNVEAYVDDLVVKTRNQETLLSDLAETFENLRSARIKLNPDKCVFGVPAGKLLGFLVSARGIEANPEKIRAIERMRPPSKLRDVQCVTGCMAALSRFISRLGEKALPLFKLLKRSGPFTWTEEAEHALTQLKAYLSSPPVLVAPEPNEPLLLYLAATPQVVSAALVVERDEDNPHFVHPHSVLTWPGSERGGEAPESDGGLRPLTTGAGPLPACQTVLGAPDPQEGPKATAGRPHLTPSDPEANPVLTRPGKEQGEEAPEPNGGQRPLTTGVGPLPACPTMPGAPDPQDGPEATEGRPPLSSSDPEVIGTEDKCAPKGHLNEERPGDTAPSREDRPHRRVQRPVYFVSEALRDAKTRYPQAQKMLYAILMASRKLRHYFQAHRVTVVTSYPLGQILHNREGTGRVVKWAIELSEFDLHFEPRHAIKSQALADFVAEWTPAPETVSIPEASTNPSQLPHTTHWVMQFDGSLSLQGAGAGVTLTSPTGDVLRYLVRLDFRATNNMAEYEGLLAGLRVAAGLGIRRLLVLGDSQLVVNQVCKEYRCSDPQMDAYVRQVRRMERHFDGIELRHVPRRDNMIADELSRLASSRAQTPPGAFEERLTQPSARPDPLGETDAPDRPPRPVGVQASGPEGSAPSSLRLIAWISEIQTYLTDKTLPEDREGSERVQRISKRYVLVEGTLYRRAANGILLKCIPQEQGVELLADIHEGECGAHSASRTLVGKAFRQGFYWPTALNDAVDLVRRCRACQFHAKQIHQPAQALQIIPLSWPFAVWGLDILGPFKRAPGGFEYLYVAIDKFTKWPEAYPVVKIDKHSALKFIKGITARFGVPNRIITDNGTQFTSELFGDYCEDMGIKLCFASPAHPRSNGQVERANAEILKGLKTKTFNILKKHGDSWIEELPAVLWANRTTPSRATGETPFFLVYGAEAVLPSELTLRSPRATMYCEADQDQLRRDDLDYLEERRRRAALRAARYQQSLRRYHQRHVRARSLCVDDLVLRRVQTRAGLSKLSPMWEGPYRVIGVPRPGSVRLATGDGTELPNPWNIEHLRRFYP

SEQ ID NO: 173021 - protein, 122 aa, Oryza sativa
  unsure (1)..(122): unsure at all Xaa locations
  Clone ID: PAT_MRT4530_710C.1.pep
TTKPPWPTPPSPFPLLPPPSAAFRHTTPCYLLSHASQPPFEPPSPANPARTSGAASSHPYPXPVVPSSTCFPPPPPLPIKAGEATIPGPXPQPTPAAVPFPAPPLATAVGSARPPEPRPLSL

SEQ ID NO: 173022 - protein, 199 aa, Oryza sativa
  Clone ID: PAT_MRT4530_71100C.1.pep
MVKVNWELQGCCDRDQKIFIAAVGVSTVVILLLWRTFLLTPFKLITVFLHETSHALACKLTCGDVEGMQVHPNEGGVTQTRGGIYWIILPAGYLGSSFWGMVFILASTNLLTTRIAAGCFILALIVVLFVAKNWFLRWLCIGFIVFLALVGVIQEFTKFHSLKYVILFIGVMNSWFSVYDIYDDLISRRVHSSDAETIC

SEQ ID NO: 173023 - protein, 1133 aa, Oryza sativa
  Clone ID: PAT_MRT4530_71101C.1.pep
MAPLGTARPKKPLLRTNVDLSDVATGAAHVGFASATGILFSRHFVLGWSFAVDGPAPPLNISSLPPLPRAWPKPRSKVLEIVLPIASTALVAAVAMAVYAMARRRLRYAELREEWETAFGPHRFSYKDLFHATKGFSDKNLLGTGGFGSVYRGVLRKPDMEVAVKRVSHESRQGMKEFVAEVASIGRLRHRNLVQLLGYCRRKGELLLVYDYMPKGSLDKYLYDGSKHPLSWPQRFHIIRGVASGLLYLHEDWEHVVIHRDVKASNVLLDDEMNGRLGDFGLARLYDHGAVAQTTHVVGTMGYLAPELGHTGKATPSTDVFAFGAFLLEVTCGRRPIVQDEHGNRAVLVDWVTEQWSKGALVNVVDARIPSCFDPDEVSLVLKLGLLCSHPLPNARPTMRQVAQYLDGDMALPDLSPTYLSFTSLERMYKEFNRNSISYISSASSAHFVLLPGGSLSNDVVVASAAGGDGQFTYQGFAAANLTVDGLATVTASGLLVLTNFTYQAKAHAFHPAPLRFLGESSTAAAGANASGGAGADVARSFSTAFVFAIVSGYDGLSDHGLAFVVAPTANLSAANAGQYLGFLNATNGTASGQILAVELDTIMNPEFHDISSNHVGIDANSLMSTQARPAGYYGDGDGAFRELRLNSRQPMQVWVDYDGQAKQLNVTLSPVQVPKPKKPLLSQAIDLSTVMAEEMYVGFSSATGVVNTHHYVLGWSFGFDGPAPPLDLSKLPRLPRFGPKPRSKVLDIVLPLATAFLVAAVLAAVFFVVRRRRRFAEVREDWEDEFGPHRFAYKDLFRATDGFKDRNLLGVGGFGRVYRGVLPESNLEIAVKRVSHDSRQGIREFVAEVVSIGRLRHRNLVQLLGYCRRKNELLLVYDYMANGSLDKYLHERNVTTLFWPERLWIIKGVASGLLYLHEDWEQVVIHRDIKASNVLLDSAMNGRLGDFGLARLYDHGTDPKTTHVVGTMGYLAPELVRTGKASPLTDVFAFGVFLLEVTCGRRPIETDEHNKRVVLVDLVLEHHRNGSIVGAADPRLTGKFDVEEVALVLKLGLLCSHPLPGARPSMRNVMQYLERGGKSAPDLSPSYVSYSMMAIMQNEGFDSFIMSGGPRSATSIGTVSGASSMTIMSEGR

SEQ ID NO: 173024 - protein, 87 aa, Oryza sativa
  unsure (1)..(87): unsure at all Xaa locations
  Clone ID: PAT_MRT4530_71102C.1.pep
LFDIYNEYTSPTAGILCTDAFQSMYTQMLSGLVERAXVLRIYIESINGGHIEIKVIGRPCREITEDMKTGTMYVKASGSSIRSGWRD

SEQ ID NO: 173025 - protein, 77 aa, Oryza sativa
  Clone ID: PAT_MRT4530_71103C.1.pep
ALVAGGYVHCVVFALHSGFVTVSVIAVKKNATVGTVVAILPDMRYLICWREDYLVYVVLCVSISVRWFIEVNFLLPQ

SEQ ID NO: 173026 - protein, 1202 aa, Oryza sativa
  Clone ID: PAT_MRT4530_71104C.1.pep
MAQDSSKLDLLLKMVEENEKKRVVADERTRAEYLELKKMVESRIPAVERKVEDIGEAFQAMNTKVDLIESTLQRQIKTEKTSGGNGKIGTASGPSSPKFSGTPDSNLFPHAHYSLDLGHKQLDVDLGAVGFSGAVPPMLCPQFSGDSPQMWRANCEQYFDLYGILPANWVKIATLNFVGNAAFWLQSVRTQLGGISWPDLCEIVCNRFARDRKRELIRQWIHLNQTGTVSEYVEKFDNLMHQLMAYGNSDIPDYFVTKFIEGLRDDIRTVVMVQKPPDLDAACSVALLLEEALEGCKSLSYKKSDLIVGTRPQRPISSSNNRTLSITNSEDRRGTDAARARDDKLAALKAYRRSKGLCFTCGERWGKEHKCATTIQLHVVEELLEAVSVEAVFETDDENDTKETLMAISQQAMWGIESSKSIKLRGWIQGFELLMLIDSGSTHSFVDASIGQKLSGLKQLDNPVAVKIADGGTMQCTQEIPNCNWWMQGYNFSSNFRLLYLGGYDIILGMDWLESYSPMHIDWVHKWLEFPYQGTTVRLQVRKKDGTWRMVIDYRQLNDIIAKTNYPVPVIEELLDELTGAKWFSKLDLRAGYHQIRMYRVMSFGLTRAPATFLKAMNDTLKTVIRKCALVFFDDILIYSPDFNSHLEHLRQVLQLLHDHQWKVKLSKCSFAQKQLSYLGHIIGETRVSTDPSKIQDILDWAVPTTPKKLRGFLGLTGYYRKFVKNFGLISKPLTQLLRKHVSFKWTSETEQAFQDLKKALSSAPVLALPNFQLPFTVETDASDSGIGAVLTQNGHPIAYLSKALGPRTRGLSTYEKECMAILLAVDHWRSYLQHGEFVILIDHHSLMHLSDQRLHTPWQHRALTKLLGLSYKICYRKGSSNNAANALSRKFQDTEEEINAVSTCVPSWQQEVEQGYTQDSFTSQLIAALTLNPAAKQHYSLQNGLLKYKNRIWIGSNYPLQLKIISELHSSPVGGHSGFPVTYRRIKQLFAWQGMKKMIKQELQKCQICLQEKPDRAKYPGLLQPLPTPFEILYGYPPSHFNIGFRDCAIPDLVVWLKDRATIQQLAQQHLNRAQQQMKYFADKKRSFREFAVGDWVYLKLQPYVQSSVAPRSNHKLAFKYYGPYQIISKIGTVAYKLLLPVGSSVHPVFHVSLLKPAKGFDKPVQTHLSYVSSTPQYPLHVLDHRLTRKNNSTIMQVLIQ

SEQ ID NO: 173027 - protein, 116 aa, Oryza sativa
  unsure (1)..(116): unsure at all Xaa locations
  Clone ID: PAT_MRT4530_71105C.1.pep
MALALSXSAAAAAAAAARRSXRGVTTTRGYAASXXSAMRRXAAAVEXKRXAGITXAKXXSSSSAAREVSWXPXPVTGHYRPYNFGGGPTXIXAXXXTSXTATPARDARPSSRRRAT

SEQ ID NO: 173028 - protein, 736 aa, Oryza sativa
  unsure (1)..(736): unsure at all Xaa locations
  Clone ID: PAT_MRT4530_71106C.1.pep
MGSCGAGAADSEWPDGVTGRDAEVGALVWVRRRNGSWWPGQILSADELPENCVVPPRSSGTPIKLLGRPDGSIDWYNLEKSKRVKPFRCGEYEECIEKAKAQARQHKRAYNEGKYVRREDAIMHALELERARFPNEDDTDEHDTSGLLFESQNSYCAKSKNINELNKKSSRTARDLYDIEEESAKGLSQALTLYKQPQNVSSSSTRYASSSRKKHKASNDFEDDTVQGSQRMRDLTEIGSKKHSSYVLNGHRDLPLLESASFGYSLSGTNGIKGDPQSHSATKRKRXNIGQAYENSRKKDRRRPLSKLCKDSAVAVPAYSHWDPSGHSSAQYSGGKMSNAFEPSXIPVKEAEVSCMPGFLNNDCSDGDEYFDTPLVMEEDALEEDHLHKYESCASVKGQISKPRKQTAEYTELVIPSPHGHRSSKKKSMSFVSQRTQENHKDRTLLAQHGRTVKGQALDTDAVEVDARVSSAFCKPPALKNNMQLAIVPADGCASTLEQQYYGSGPEHDESSETISNRSQSEKGAPSSPYYEPLQVIPPEQKSGLEPSSPHVVKPIKNARTDYKVYDVELAAQGSYKGHRVPLVSLMSKWNGKPIVGYPITVEVLKDSSSAASRNDLRPATSSLNNLLKRSEPAEPRQARSSHSSRPASRPKPSGKKKISEHDTDKSRRPHTKKSATSPRKMRRLSSFASSRRDGASRKPVVGKISGPTIACIPLRLVFSRINEALSFPVRSENPT

SEQ ID NO: 173029 - protein, 142 aa, Oryza sativa
  Clone ID: PAT_MRT4530_71107C.1.pep
MRRWRGWRGHRRRSRGPPPSRTSRSRLRPCLATTRPWWCARRSRKEAEERPNRKSCKQCMDMYMRPFLLNVFFSKRFVHAKVVHRGTSECIIETGAWQRDGQRLEASAEGGDAVTVGRQRAGERRQSPSMPEGNSYFFPYYL

SEQ ID NO: 173030 - protein, 98 aa, Oryza sativa
  Clone ID: PAT_MRT4530_71108C.1.pep
HDYIAQIVGGLLIKHQQKRAKYSKQRHCQVPTKGNPSESETSYMNCWVLANVWPNLHDGGTTPAKTMVWPSPRVRRENQAKNFGPGKECYHPNLNKKK

SEQ ID NO: 173031 - protein, 112 aa, Oryza sativa
  Clone ID: PAT_MRT4530_71109C.1.pep
VAFLLLLCPPSSSSCRNPNPSNSAPLPASSDPFLRRRCCTGRRHFFLFNSKVLYFLFLGAFLSLETGVLLLLDAKFQVFDMGGNAVSVQRHGNFASVGILTVCMYYANFQFL

SEQ ID NO: 173032 - protein, 129 aa, Oryza sativa
  unsure (1)..(129): unsure at all Xaa locations
  Clone ID: PAT_MRT4530_7110C.1.pep
MVSLVLAMAGKLISSSIVLALLPLFCGILLAPSCEAATVDTTSATLLQVKSGFTDPNGVLSGWSPEADVCSWHGVTCLTGEGIVTGLNLSGYGLSGTISPAIAGLVXVETIDLASASLTGAIPAGARDH

SEQ ID NO: 173033 - protein, 90 aa, Oryza sativa
  unsure (1)..(90): unsure at all Xaa locations
  Clone ID: PAT_MRT4530_71110C.1.pep
PGSVSCHQXSLFPYLVYYXCHSVPKVRVYEADIMAADSDQKINHGVAICHLDTSDWSPTHGAFIALGGKPGEVEVCHWIFEGDMTWTVAD

SEQ ID NO: 173034 - protein, 90 aa, Oryza sativa
  Clone ID: PAT_MRT4530_71111C.1.pep
FWGPLKKKFIAPFPKKRGPPNPEPKPEPPKPKLERGPPFLAPIPKKEKPFFAPFPKKPVPPNPNPNLEPNPEPNPHPGPEYYNPTPPAKK

SEQ ID NO: 173035 - protein, 76 aa, Oryza sativa
  Clone ID: PAT_MRT4530_71112C.1.pep
PIGRLGQYRAAGIEFSQPLLGYHILLSLNFSHCRNFSARTIGRMMVIAIYSAVPSGASASLTTSYRKVSITPKAMS

SEQ ID NO: 173036 - protein, 251 aa, Oryza sativa
  Clone ID: PAT_MRT4530_71113C.1.pep
MGVTCVADKRCKEKWENINKYFKKVKESNKKRPEDSKTCPYYHQLDALYRTKAANAAAAASASPAPATTTVLAPVPLSQTPPHVDHGGSNGNGNGWASANNGGGGSSSGGMQTKASNNGTATAGGLPAVSGSKQVPVAKETAGQRQPQPLAMNHNYGNDRMADDMDSDSMDDDDDDDEFDDDENDDDIGGGKMQVQYETSSHFQRPQLQNQNVVVGRPNASGGGGGGAPTTPAGPPPPAATSGTSFLACVQ

SEQ ID NO: 173037 - protein, 385 aa, Oryza sativa
  Clone ID: PAT_MRT4530_71114C.1.pep
IAAVPPPPLQPTPVASAAPPPPIQVQPHHIMPMTPQPQLQPPQPQSKEANTVVRAAPPPQEQHDTAASGGGGGASSSRWPKAEVHALIQLRTELETRYQDSGPKGPLWEDISAGMRRLGYSRSSKRCKEKWENINKYFKKVKESNKKRPEDSKTCPYYHQLDALYRTKAANAAAAASASPAPATTTVLAPVPLSQTPPHVDHGGSNGNGNGWASANNGGGGSSSGGMQTKASNNGTATAGGLPVVSVAGGNGNGNGVAATTDNKGSKQVPVAKETAGQRQPQPLAMNHNYGNDRMADDMDSDSMDDDDDDDEFDDDENDDDIGGGKMQVQYETSSHFQRPQLQNQNVVVGRPNASGGGGGGAPTTPAGPPPPAATSGTSFLACVQ

SEQ ID NO: 173038 - protein, 222 aa, Oryza sativa
  Clone ID: PAT_MRT4530_71115C.1.pep
MAPGPEKKKSWMPAGLGGSGKLGATIDIPLEDPRKKEKELLAWEEDLRRRELDIKQRENAMDRAGVTVEVKNWPPFYPIIHHDIASEIPIHAQKLQYMAFGSWLDVVLFLFAIIYAIFGCPLSYILWYRPLYSAMRTDSMVTFVQFFVFYSIHVGFCVIAAVTPPIIFKGKTLTGILVAIEVLTGDMFVGVLYLIGFTFFTLESIISIWVLERVYMHFRGHR

SEQ ID NO: 173039 - protein, 75 aa, Oryza sativa
  Clone ID: PAT_MRT4530_71116C.1.pep
LGHGGNAMAGGAWVTVEAVKTLDADGRRLEREAARAPSTRRCRAVTHWDPTCCRSLGRCITTGGATVAPGKHIYI

SEQ ID NO: 173040 - protein, 144 aa, Oryza sativa
  Clone ID: PAT_MRT4530_71117C.1.pep
PLSPFWNITAPRVVFFIQGRARVQVVPPNGKTVFKGGFSRGQLFFFPPPFAVVKRAQKKGGGSLAFKALPTFWVSPLAGKGSFFGVFPNVVLAKAFGFSKKGGQGARLNRGGGLGAFPPIQSKGSPGVFFGADSFWGGLGVKNN

SEQ ID NO: 173041 - protein, 52 aa, Oryza sativa
  unsure (1)..(52): unsure at all Xaa locations
  Clone ID: PAT_MRT4530_71118C.1.pep
ISALNALNSIEPTLGSHVGPKTPMCFLKVPLGPPILYMEXFYPPSTQETDAW

SEQ ID NO: 173042 - protein, 49 aa, Oryza sativa
  Clone ID: PAT_MRT4530_71119C.1.pep
AGSKVISFSGPKIWQGPGQGKGKQTGLASDDSQPVDGRQQWPRTSPGAS

SEQ ID NO: 173043 - protein, 2037 aa, Oryza sativa
  unsure (1)..(2037): unsure at all Xaa locations
  Clone ID: PAT_MRT4530_7111C.1.pep
MAEQAKVHDLSPSVSGDDGEPNPRRRARTPPPPPHQNPKQGEALERVEKSAASPVAGGAGERRDGERRLLVYGDGSTPQGALQAVGALLRHPPVVPDPESPAQRWLDDVANLVMTAQQRLGAGGRSATTKTSGAATTGSASSRRRARRAAAVARHSAATPSSAPPTREDQHGELDARLDIERRRNSRRTPRATEGASSSRVSPRQGREDQPSMPPAGGVGCRAFVASLRNVRWPPRFRPTITEKYDGSVNPTEFLQVYTTGIEAAGGDDRVMANFFPMALKGQARGWLMNLPPASVHSWEDLCQQFTMNFQGTYPRPGEEADLHAVQRGDDESLRSYIQRFCQVRNTIPCIPAHAVIYAFRGGVRHNRMLEKIASKEPQTTAELFQLADRVARKEEAWTWNPSGSGVAASAAPGSAAQTGRRDRRRKKRSVHSGDEGHVLAVEGVPRATRKGRPASDKKKEAGAPSKERPASKWCSVHNTSLHDLADCRAVKNLAERTRKWEEDRRQERREGKSAAVPSGKRRSEAKQKAPAVDIDDGDDDLGFQEPGATIATVDGGACAHVSRRSFKAMRRELLAAAPTHEATRRARWSEVALTFDQTDHPPCVARGGQIAMVVSPTICNVKLGRVLIDGGAALNILSPAAFDAIKAPGMVLQPSQPIIGVTPGHTWPLGHIDLPVTFGGSANFRTERVNFDVADLSLPYNAVLGRPALVKFMAAVHYAYLQMKMPGPGGPISVRGDLKVALACMEQRADHLAAATKPEGGDERLGTSAPTXAPRQRIATCDEVPVKEVALVLXEDALVSFLRANADVFAWRPADMPGVPREVIEHRLAVRPGARPVRQKVRRQAPERQAFIREEVARLLEAGFIREVIHPEWLANPVVVPKANGKLRMCIDYTDLNKACPKDPYPLPRIDQIVDSTAGCDLLCFLDAYSGYHQIRMAREDEEKTAFITPVGTYCYTSMPFGLKNAGPTFQRTTRISLGSQIGHNVEAYVDDLVVKTRNQETLLSDLAETFENLRSARIKLNPDKCVFGVPAGKLLGFLVSARGIEANPEKIRAIERMRPPSKLRDVQCVTGCMAALSRFISRLGEKALPLFKLLKRSGPFTWTEEAEHALTQLKAYLSSPPVLVAPEPNVPLLLYLAATPQVVSAALVVERDENNPHFVHPHSVLTWPGSERGGEAPESDGGLRPLTTGVGPLPACQTVLGAPNPQEGPKATAGRPHLTPFDPEANPVLTRPGKEQGEEAPEPNGGQRPLTTGVGPLPACPTMPGAPDPQDGPEATEGRPPLSSSDPEVIGTEDKCAPKGHLNEERPGDTAPSKEDRPHRRVQRPVYFVSEALRDAKTRYPQAQKMLYAILMASRKLRHYFQAHRVTVVTSYPLGQILHNREGTGRVVKWAIELSEFDLHFEPRHAIKSQTLADFVAEWTPAPETVSIPEASTNPSQLPHTTHWVMQFDGSLSLQGAGAGVTLTSPTGDVLRYLVRLDFRATNNMAEYEGLLAGLRVAAGLGIRRLLVLGDSQLVVNQVCKEYRCSDPQMDAYVRQVRRMERHFDGIELRHVPRRDNMIADELSRLASSRAQTPPGAFEERLTQPSARPDPLGETDAPDRPPRPVGVQASGPEGSAPSSLRLIAWISEIQTYLTDKTLPEDREGSERVQRISKRYVLVEGTLYRRAANGILLKCIPQEQGVELLADIHEGECGAHSASRTLVGKAFRQGFYWPTALNDAVDLVRRCRACQFHAKQIHQPAQALQIIPLSWPFAVWGLDILGPFKRAPGGFEYLYVAIDKFTKWPEAYPVVKIDKHSALKFIKGITARFGVPNRIITDNGTQFTSELFGDYCEDMGIKLCFASPAHPRSNGQVERANAEILKGLKTKTFNILKKHGDSWIEELPAVLWANRTTPSRATGETPFFLVYGAEAVLPSELTLRSPRATMYCEADQDQLRRDDLDYLEERRRRAALRAARYQQSLRRYHQRHVRARSLCVDDLVLRRVQTRAGLSKLSPMWEGPYRVIGVPRPGSVRLATGDGTELPNPWNIEHLRRFYP

SEQ ID NO: 173044 - protein, 103 aa, Oryza sativa
  Clone ID: PAT_MRT4530_71120C.1.pep
AAITSHGDVRTYNKHNSYYTYSAGRVHRYLQAYMYGSVVYCLITLRSYREAYVSLHAGPYGRRRHRGRGGGRRRGNSRTTCRRWWMPTTRGARRGRRHGDRGR

SEQ ID NO: 173045 - protein, 307 aa, Oryza sativa
  Clone ID: PAT_MRT4530_71121C.1.pep
MKGCKESFEFLAVAQQICNQEEERERIAMEQSAGQRSSVATNATVDLEVLDCTVCCHPLKPPVLQCGVGHVICSSCHGKLPDKNRCHVCAMDTAYNRCFAVEQILRSILVPCRNAGYGCDAKTAYHDSDSHEDGCPHAPCFCPEPGCGFAGATSSLPAHFTGGHGWPPATEFRRARAFDLQVQEGKRVLRDVDGGHLFLVDVAPAGPAGLAGAVLLLDPHAGAKAKPKFECHVAFHCRATGWRSSSEFPVRSTALDGGSLPADCYAFVVPRVAHPPATASIIVSVYDVSKKRPRNGDIRQHLKSRVN

SEQ ID NO: 173046 - protein, 166 aa, Oryza sativa
  Clone ID: PAT_MRT4530_71122C.1.pep
MADSTARTVKDVNPHEFVKAYSAHLKRSGKLFVASQELLLLGNLRISFYQMELPEWVDIVKTARFKELPPYDPDWYYTRAASIARKIYLRQGIGVGGFQKIYGGRQRNGSRPPHFCKSSGAISRNILQQLQKMGIIDVDPKGGRLITSQGRRDLDQVAGRVDVTIA

SEQ ID NO: 173047 - protein, 67 aa, Oryza sativa
  Clone ID: PAT_MRT4530_71123C.1.pep
AELKELLYGILDLDPSTRIGFSEVAPSFLFVELKKTNGDTLEYQRQVKEDIRPSLKDIIWSLQGDQQ

SEQ ID NO: 173048 - protein, 59 aa, Oryza sativa
  Clone ID: PAT_MRT4530_71124C.1.pep
FISLGGPHVLRPRRPFKNLSNTQVLAAGDDRHYCVLESGECDTPRDSQRERELESLEPP

SEQ ID NO: 173049 - protein, 170 aa, Oryza sativa
  Clone ID: PAT_MRT4530_71125C.1.pep
ALTSAGSNLPYHQPYLDQQHPSRTRDRQSLSSWSICRWPQPCARQGHVDSDDGRTPAAVVVAAPELDSPRRRRIPRFRRRPPPLPPPDPGGTRPASPPTRRRRRGRRRRHHPRRRRRRRPLVVVAAHSSSGSAPPRRGQPERRGRRGGRQPPARARRPLVLGAERGRGLV

SEQ ID NO: 173050 - protein, 150 aa, Oryza sativa
  Clone ID: PAT_MRT4530_71126C.1.pep
NGGELKLDNEDLYKLIVACYLSFILNINVRSKEKLPPSFFLSSMKPLMPSFSLDLTDQSWGRLPLPRFYFFMGIADAVALLCPPALLHEEREINGIDKTQNLIFTCNTRNLSIIKTMSSISIIAYALMAPKLDLLLLQFHLIQWRLWSRC

SEQ ID NO: 173051 - protein, 206 aa, Oryza sativa
  Clone ID: PAT_MRT4530_71127C.1.pep
MSGRRRQRVGDDDDDDAGGGGGADPDDDDEWAAMRASSLPDPAAGAGAAGGGSGESGGGAANPAQARRRRPGDDNGGGRSSFAQENVCLLLKVFLSSQCDHHHCQHALVGCMAEAICICSMNSSSVCLWYGMDVAGQGRADGKGGWSQLRKGLPVDLTEGILKAICMQAQGQIWKINFSNSLVLLHKFLLLAVELLFDSGSRDEFF

SEQ ID NO: 173052 - protein, 122 aa, Oryza sativa
  Clone ID: PAT_MRT4530_71128C.1.pep
NISLFLCFASRSHGVMDQRSNRTKKRKKNGGEEKQSGYPQGMSSCRLILVPPPGGDLAAPADPEGGERVEPRHGGAQRHGRRDLGRRRPLREAGPTGAPPPEEDVEGGEPDAWADAWADAWG

SEQ ID NO: 173053 - protein, 66 aa, Oryza sativa
  Clone ID: PAT_MRT4530_71129C.1.pep
SVKSLGSYQIWLVMVKSRDQVNSLHQFCVAISRLSLSVQHLGPGVSVHAATSIRHCWFVHGLADLE

SEQ ID NO: 173054 - protein, 521 aa, Oryza sativa
  Clone ID: PAT_MRT4530_7112C.1.pep
MRPSLLQYLKLLLLLALGGVTTMHVPKQDVPSSLEELTLDGHFSFHDVSAAAQDFGNLSSFPPVAVLHPGSVADIATTIRHVFLMGEHSTLTVAARGHGHSLYGQSQAAEGIIISMESLQSNTMRVNPGVSPYVDASGGELWINVLHETLKYGLAPKSWTDYLHLTVGGTLSNAGVSGQTFRHGPQISNVNELEIVTGRGDVITCSPEQNSDLFHAALGGLGQFGVITRARIPLEPAPKMVRWLRVLYLDFTSFTEDQEMLISAEKTFDYIEGFVIINRTGILNNWRSSFNPQDPVRSSQFESDGKVLFCLEMTKNFNPDEADVMEQEVNTLLSQLRYMPSSLFHTDVTYIEFLDRVHSSEMKLRAKGMWEVPHPWLNIIIPRSMIHKFAKEVFGKILKDSNNGPILLYPVNKSRWDNRTSVVIPDEEVFYLVAFLSSALGPHNIKHTLDLNYRIIEFSDKAGIGVKQYLPNYTTEQEWQSHFGARWDTFQQRKKAYDPLAILAPGQRIFQKASASLPLPS

SEQ ID NO: 173055 - protein, 40 aa, Oryza sativa
  Clone ID: PAT_MRT4530_71130C.1.pep
MQSNNLAALRLRQDGAFHMMLIALAVAGKVSKIKLISPEG

SEQ ID NO: 173056 - protein, 68 aa, Oryza sativa
  unsure (1)..(68): unsure at all Xaa locations
  Clone ID: PAT_MRT4530_71131C.1.pep
TPPATHVTRRRLTRTVGTHTVGLHNNTXHHGAGLGILTRGHLXTTRHDVRPHDTTSLYHVLPYVCGNG

SEQ ID NO: 173057 - protein, 48 aa, Oryza sativa
  Clone ID: PAT_MRT4530_71132C.1.pep
SCPVCRGKATLANNPADDIAQSPDICHCATLVHPARRQPPPLSFYPLP

SEQ ID NO: 173058 - protein, 79 aa, Oryza sativa
  unsure (1)..(79): unsure at all Xaa locations
  Clone ID: PAT_MRT4530_71133C.1.pep
PWLPFXPRNRRRTKVRXPDEVDAXWDGAEHLRTSTPXPXRAPPLPAEPTLAKRRLXHEVAMASSSXRILLQCMAINXSI

SEQ ID NO: 173059 - protein, 49 aa, Oryza sativa
  Clone ID: PAT_MRT4530_71134C.1.pep
MKARIPVGGDESQPTVKMADEVHMLVMMSVTIIHQIGVIAVADASLGGK

SEQ ID NO: 173060 - protein, 162 aa, Oryza sativa
  Clone ID: PAT_MRT4530_71135C.1.pep
MEAAVPSRVALSASRLSNHHHHAVGGERYAIYRGRCPNPAIPMALAAAAAPGKGGGVLDRPIEKVTPGRQSEFDVRKSRKMTPPYRVLLHNDNYNRREYVVQVLMKVIPGMTVDNAVNIMQEAHVNGLSVVIICSQSEAEEHCTSLRGNGLRSSIEPASGGC

SEQ ID NO: 173061 - protein, 51 aa, Oryza sativa
  Clone ID: PAT_MRT4530_71136C.1.pep
VVLSPCQPHMFNRGRAYVGHRLVSSSRGAQPAARLWCQCRASLRLGPRVRV

SEQ ID NO: 173062 - protein, 390 aa, Oryza sativa
  Clone ID: PAT_MRT4530_71137C.1.pep
MRRFVGALRPLRTLTLSPIPTALRVLSTASASSSSASAAASSSDSDSAAAPDADFDSSEFALPPSGPTPPPPPQQARNPVSALRKLRFDPSLRARADEALFGKERGGVDDAVEEERSREVALALLEAALEPPDDDLGPGEVREEDQMSLSVGIVGAPNAGKSSLTNTMVGTKVAAVSRKTNTTTHEILGVLTKGITQICFFDTPGLMLGHHGLPHRDVTVRVESAWSSINLYDLLIVLFDVNRHLKTPDTRVVKLIKRLGAEVNPNQKRILCMNKVDLVEDKKDLLKVAKEFEDLPAYERFPLVCRYFMVSGLKGKGVKDLVQFLMEQAVRRPWDEEPTTMTEEVMKTISLEVVREKMLDHIHQVRLRLFHAQGKIFPVHAKRENSLAHD

SEQ ID NO: 173063 - protein, 162 aa, Oryza sativa
  Clone ID: PAT_MRT4530_71138C.1.pep
VDLVEDKKDLLKVAKEFEDLPAYERYFMVSGLKGKGVKDLVQFLMEQAVRRPWDEEPTTMTEEVMKTISLEVVREKMLDHIHQEIPYVIDHRLMDWKELKDGSLRVEQHFIAPKQSQRQILVGKNGSKIGRIGIEANEELRSIFKRDVHLILQVRVAKKRSA

SEQ ID NO: 173064 - protein, 177 aa, Oryza sativa
  Clone ID: PAT_MRT4530_71139C.1.pep
PTEVLRTSTPVAAALELVDPPGCRNSARVSSYLTYLECYCDSSFVTRVQGDGLIISTTSGSTAYSLAAGGSMVHPQVPGILFTPICPHSLSFRPLILPEYVTLRVQVPINSRGQAWASFDGKGRKQLGPGDALICSISPWPVPTACLVDSTTDFLRSIHEGLHWNLRKSQSFDGPVA

SEQ ID NO: 173065 - protein, 110 aa, Oryza sativa
  unsure (1)..(110): unsure at all Xaa locations
  Clone ID: PAT_MRT4530_7113C.1.pep
ANVAKAVATTGSNRKTTPRPSVATGQSTSHITSTTPRPRAPPSCFRGSSTSPAAPPPPSPRRYSPPPPSPPPPCPSXRTRPRXTPPPPRALPLLPEFAPRAVSWQADASA

SEQ ID NO: 173066 - protein, 127 aa, Oryza sativa
  unsure (1)..(127): unsure at all Xaa locations
  Clone ID: PAT_MRT4530_71140C.1.pep
HRFFFACGFLDRCSSPLEAELLAYREGINLVLQWTLLPIIVETDCLVEKNLIXSAMKGRSELAFIVRDIEELLSGNMEVIIAKIQQNQNNVSHTLANRARCESLTEFXPDDKCNFISHFVCEDSLVE

SEQ ID NO: 173067 - protein, 48 aa, Oryza sativa
  Clone ID: PAT_MRT4530_71141C.1.pep
KHYIIHYSGGITISFHATHQRCDPTSYEASQLNLLLAGGENASLLELN

SEQ ID NO: 173068 - protein, 95 aa, Oryza sativa
  Clone ID: PAT_MRT4530_71142C.1.pep
MAMMMEITGLLLLNRRASSSLSCCRALLAAPNRSIRTASTASSDEGGDGGGGEAGGEHPKSAMQLPPLLAMTFGMINLLSKVTTRPSPKSTRDQN

SEQ ID NO: 173069 - protein, 62 aa, Oryza sativa
  Clone ID: PAT_MRT4530_71143C.1.pep
SKYIVFSSWLGARVYVLCPLYHAQNLFSFPFWGRPRPPMFLLPMVENVPLINRPFWFEVPLL

SEQ ID NO: 173070 - protein, 508 aa, Oryza sativa
  Clone ID: PAT_MRT4530_71144C.1.pep
MEGGGRGGGPVVAALLLAALLLAAVAPASASSYPAKVVSGFLSNAASSVMKRLWSLKSTTKTGSGGKSMVKYEGGYTVETVFDGSKLGIEPYAVEVTQGGELLVMDSMNSNIYRIALPLSRYSRPKLVAGSPEGFPGHVDGRPREARMNHPKGFTVDGRGNIYVADAMNMAIRKISDTGVTTIAGGKSSRGGHVDGPSDDAKFSTDFEVRYIGSSCSLLVIDRGNQAIREIQLNFDDCVYQYEAGFPLGVAVLLAAAFFGYMLALLQRRVLGMVSTEDEPETQTPLKASIASIPPYQKPLKQSVRPPLIPNEDESEKQEVEEGFFTSIGKLIVGAKSSVAEIVGAAFSRKKRLNIHQQQARVRSWPVQESYAIPRDETPPPLDTRTPTPRKNYAFMSKEPEKIHHIRHGRSQFNGWNGDAPQQQQQQQQQQQIHHQQYLQHHRQYSSGPQTFYEPSCEATNEIVFGAVQEVDSKRRAVEIKPMNHGDPQYDQDGLRHRSSYTGYSNNW

SEQ ID NO: 173071 - protein, 118 aa, Oryza sativa
  unsure (1)..(118): unsure at all Xaa locations
  Clone ID: PAT_MRT4530_71145C.1.pep
PKHTWRRSIREAGYTGGERDFTPGSXPPKKNIGCRPLPHRPPARRPPRGPSIRRRAAAPPSGGRPRAGPPPLRAAARPPAARWDDGEGRRGVRGEVREVEEEGMMGEGRRGGGRGRDG

SEQ ID NO: 173072 - protein, 76 aa, Oryza sativa
  Clone ID: PAT_MRT4530_71146C.1.pep
MDEAALELAGWSSTGLVGKEMMIKELVINKFLDQLVVLILGIISIRDVGGGYCGHFTDEESNQLTRREQFGCSLNI

SEQ ID NO: 173073 - protein, 402 aa, Oryza sativa
  Clone ID: PAT_MRT4530_71147C.1.pep
LASVDQKQQSRLKEGARLPLPREASYSSSPPSVIVREAKPRRSPSVPSLEEDDSPVQCRVTSLENMSPESEPQRTLLSRAGSASPAEFRVYKPTGCVDAATQTDDLGRRSVRKVPEMHKKSLSTDHDSVVREITEYRQSQPRRSAELQGIAREAMSQCHTPLSIPSSRGKSESLESLIRADNNALNSFRILEEDDIIMPTCPKLRPANVLMQLITCGSLSVKDHENIRLVEGYKPRFPNMKFPSPLISRTMMMGELDYLSENPRLMGMRLEDKEYFSGSLIETKMQRDVPADRYSALKRSSSYNAERSNETLDCARPDEDTVNTSRARCLPRTPILSSFLHPKSEAMKSPISDCRRSSSAGPDCSLASSGDGSKRFIDATGAPGSRIDSFRKEEKLVKIEES

SEQ ID NO: 173074 - protein, 54 aa, Oryza sativa
  Clone ID: PAT_MRT4530_71148C.1.pep
GPRSSSWSIRRTPRGRGGRTRCRSPRWTRRRRRARSRRRRRRGRSPALRPGGAS

SEQ ID NO: 173075 - protein, 228 aa, Oryza sativa
  Clone ID: PAT_MRT4530_71149C.1.pep
MEGRRFDVINLMMQDIAISKGTFGQGIYYALYIMRLIQRKLGHAGDNLKEHKEDKPRRQLSIPRAPQVHQPIFDQGASTSAAPPPHGYDPNTFFHPQYAYFRIQPNEYFNPVLRAINTLSENIQRLTTGHEAMYEDSPRRLVKELPCDLSEKIVEKARRRLGGMGRHGEDIPPRCRMGGSGRFGRMQPPERSGEQGRATCGSRHPSHHEASSATRQGDDRGGELGSGG

SEQ ID NO: 173076 - protein, 164 aa, Oryza sativa
  unsure (1)..(164): unsure at all Xaa locations
  Clone ID: PAT_MRT4530_7114C.1.pep
MPSSLFHTDVTYIEFLDRVHSSEMKLRAKGMWEVPHPWLNIIIPRSMIHKFAKEVFGKILKDSNNGPILLYPVNKSRXQALSLNHRYHGDASLSEXPFLLIISCRWDNRTSVVIPDEEVFYLVAFLSSALGPHNIKHTLDLNYRIIEFSDKAGIGVKQYLPNYT

SEQ ID NO: 173077 - protein, 62 aa, Oryza sativa
  Clone ID: PAT_MRT4530_71150C.1.pep
ASSRIVPPHVYVAAARRGSEGRTVASSVCVGHGRTLKGRDLRAVRNAVLHMTGFLGGGPDEY

SEQ ID NO: 173078 - protein, 36 aa, Oryza sativa
  Clone ID: PAT_MRT4530_71151C.1.pep
DRDLRCYLKIQDGIPVPVVTHGNSSLADLSCCSRIH

SEQ ID NO: 173079 - protein, 56 aa, Oryza sativa
  Clone ID: PAT_MRT4530_71152C.1.pep
NDSRLYSFRCLWLTAAATFFFAFFPPPPPFFLLPPPSWCKVKHPYKQHPSIKNHHI

SEQ ID NO: 173080 - protein, 259 aa, Oryza sativa
  Clone ID: PAT_MRT4530_71153C.1.pep
MPQGDHIELHQKRHGRRLDYEERKRKRAAREVHKRSRDARQLLGAKGKRFAKKRYAEKAQMKKTLKMHDESTSRQKVDDVQEGALPPYLLDRDQTQRAKVLSNTIKQKRMEKAGKWEVPLPKVRPVAEEEMFKVLRTGKRKTKQWKRMVTKATFVGPGFTRKPPKYERFIRPTGLRFTKAHVTHPELKCTFNLDIISVKKNPNGQMYSTLGVLTRGTIIEVNVSELGLVTPAGKVVWGKYAQVTNNPENDGCINAVLLV

SEQ ID NO: 173081 - protein, 74 aa, Oryza sativa
  unsure (1)..(74): unsure at all Xaa locations
  Clone ID: PAT_MRT4530_71154C.1.pep
MAATNVSSAAPSYPMASLIMLXXLHPDVTEAMLFDKFASAGPVLSIRVCRDMITRRSLGYAYVNFQQPADAERA

SEQ ID NO: 173082 - protein, 271 aa, Oryza sativa
  Clone ID: PAT_MRT4530_71155C.1.pep
MDALREAEAKLTVYVHPSNAADVRRAVARQLSSLLFSRKEGEMGVIGTAISHGMMVLDASKLPRDSLFPRGVIDFHICRYEDRFDGVLLAHEATVESEQGKILNGLVPYFGVPVHANLLLYSPKPDMMLEGKVEMLGKESIHAIVLGVFSAAIMLDDIHEKFKFKRKKYGGKFVSRSDKQHVIKKGSMIRFSVKRVDAEMNCHVTGSLIPPHTGSMLWLSVHDDEYALEINSGKRSRDNKIKTEQHEQDHSVKSSGRKHKSKSRKRSFEER

SEQ ID NO: 173083 - protein, 158 aa, Oryza sativa
  unsure (1)..(158): unsure at all Xaa locations
  Clone ID: PAT_MRT4530_71156C.1.pep
VFSWTSWLQPQGDHIELHQKRHGRRLDYEERKRKRAAREVHKRSRDARQLLGAKGKRFAKKRYAEKAQMKKTLKMHDESTSRQKVDDVQEGALPPYLLDRDQTQRAKVLSNTIKQKRMEKAGKXWEVPLPKVRPVAEEEMFKVLRTGKRKTSSGRDGH

SEQ ID NO: 173084 - protein, 71 aa, Oryza sativa
  Clone ID: PAT_MRT4530_71157C.1.pep
CGLYTVLFILYDTASICYQHFWVAISMVFLIAATTFTLLKLSGKVSWISFLFFDLHYGMSYLLCVFKHCRL

SEQ ID NO: 173085 - protein, 89 aa, Oryza sativa
  unsure (1)..(89): unsure at all Xaa locations
  Clone ID: PAT_MRT4530_71158C.1.pep
MCGGAILDXLIPVPSCAARATKRVTDSHLWPAGSKNAVRSKSKSKMQXKSFANITXLEAGLQQFEDDSNCNDPEEEDEGHLRFGVKSRV

SEQ ID NO: 173086 - protein, 55 aa, Oryza sativa
  unsure (1)..(55): unsure at all Xaa locations
  Clone ID: PAT_MRT4530_71159C.1.pep
VSHMAGKSSIXRALPKGVLAKAYRLSRXEAQRLKQNKGNKVGAFAPPQYKSYQTV

SEQ ID NO: 173087 - protein, 161 aa, Oryza sativa
  Clone ID: PAT_MRT4530_7115C.1.pep
MASEELRTSFSDLVVGSSSRTDSQVESSGDPSSEGGVQVTCFTEDLHDVILHFQIIRFSKQIYAWVGCNTAKFGHLYAAASTRPGNGVSVTSVLGGTSDNTGSGMARRLVLKTGLNIVLACNIPKDSPMLEAAAERKLIEKLRGLGYVRPRAGEANTSTAQ

SEQ ID NO: 173088 - protein, 977 aa, Oryza sativa
  Clone ID: PAT_MRT4530_71160C.1.pep
MWELKVDKIFHIHNYSEEKKLAMASLEFEDYALIWSRDIQCFKCGGRGHVVRECPNNRAIIVIEHGEFDSASEDAENGQRNNLFQTRAKVGGKVCKVIVDGGSCHNLASKDMCDKLGLKLLRHPHPYHVQWLNDSGDIKIGHRVKVSFKIGEYEDEVLCDVVPMTVCHLLLGRPWQFDRSSRHCGRTNQFSIKWKGRNFVLKPMTPQQIMAEHMQKSSEVRIESEKEREQNKFSDIHKSVSKSHKPNMSDKKKREGENFVMLATKSEMRDEYEDVFPMETPAGLPPLRGIEHQIDLIPGAALPNRAPYRTNPQETNEIQRQVQELLDKGYVRESLSPCVVPVILVPKKDGSWRMCVDCRALNNITVRYRHPIPRIDDMLDELSGSMIFSKIDLRSGYHQIRMKIGDEWKAVFKTKFGLYEWLVMPFGLTSEPSTFMRLMNHVLRTFIGKFVVVYFDDILIYSKSLSEHASHIKQVLDVLRKEKLFANIEKCTFCTEKVVFLGFVISGQGVEVDESKVEAIKDWPTPVNVSQVRTFHGLAGFYRRFVKDFSTIAAPLNELTKKGIEFHWGESQKDAFQKLKRCLTEAPLLVWPDFTKTFEIECDANGIGIGAVLMQDKKHVAYFSEKLGGAQLNYSVSDKELYVLVRVLETWQHYLWPKEFVIHSDHEALKYLKGQAKLNRRQAKWVEFIETFPYVVKYKKDGQTEVVNRTLSTLLRMMIKKNLKEWEDCLPLVEFAYNRAERTNMDASKRAAYVKKIHEKTKEEIEKKARSNTAKVNKHRKKVVYETGDLVWVHLQFRTTPFQEGEDDVPQPLSHDDEHIPATPDVNKGDVNNGDGSHHKSHEENEDDVNHVDGLCLNKNDQAYHGPITRSRARKIQQEVNSLFAQLNPNFCENFILPKCSTFLLLRFTPEEIITTPRRMGYIEDDKGYVEDDKGYDEEEPAHPKPVAVYANKKMVYSAKDSTSKACVTQPVNFLHA

SEQ ID NO: 173089 - protein, 249 aa, Oryza sativa
  Clone ID: PAT_MRT4530_71161C.1.pep
MPSALSSLKFVNERNWERGAKERDLGEAEVAASDGGDRGRRPRMLLDEHIPATLDVNKGDGLRHTSHEENEDDVNQVDGLHFTKNDQAYHGPIMRSHARKIQQEVNSLFAQLNPNFSENFILPKCSTFVLLRFTPEDIITTPRRIGYVEDDKGYVEEESVHAQPVAVYANKKMVYAAKAQLPRLVRPSQSKDGLHAYMVGKRDKSNFQCIKPHLNIIFQEKVMAFLLKPVQELKGCARTRENALHSHLC

SEQ ID NO: 173090 - protein, 75 aa, Oryza sativa
  Clone ID: PAT_MRT4530_71162C.1.pep
PWAPWILVMSTPGKPLSRVAGKHNLIPEATLHHGPRMLHAYYKEVLRSGYTVAAVRRGAIQFNTVYLLHSGENQL

SEQ ID NO: 173091 - protein, 70 aa, Oryza sativa
  Clone ID: PAT_MRT4530_71163C.1.pep
MYAALAGERVIVVSHGASIEELCRHADPTSSVRRRIPNTSICVFNISGSTGHWILERFGDVAHLNEDDFP

SEQ ID NO: 173092 - protein, 497 aa, Oryza sativa
  Clone ID: PAT_MRT4530_71164C.1.pep
MYLYLQKRLNLKTNSNTNDVPNGKRKPRLGPIITSVTWELGRNPKTHRNRLAPGRTPRQRDPHHLLQRLGGDYLYRARLVIQPGVSHSTHVVTLVLCSDEIPRKRSLSARAGNRTPASPPTVDHAHGEGGTEGAADRVSRLGCAEVAPTWRLRGCHAGRLEEDEGAGREWTAGGGGFSGTPCDDEGRRGVHRNDKGEREGVSQWLGFTGGCSTVAICGGGHRRQEKRETATRRLGFNSSGLEHLRDLGIAFLAPDWAELRQEKLATSGGLRRRAATAARPRQAEEEGEGASEVPFRVLARAGSSDTHDDERRRQNRGDSGVAARDENEGDWRREELGFIRATMSVWDRGTDIGRSSRRAGARLAAKTTTGGDAGDGRKKKKGRGKGGLPPCFFGKRKRERGRRGRRRRSSASVPWKLARGERGREGEREGEREKEKEKDEPRGNRPTEPKGGKIDFCGGIELGRKIEIRDLNSTMDRGFEIRNGTETDCKRRNNFRN

SEQ ID NO: 173093 - protein, 35 aa, Oryza sativa
  Clone ID: PAT_MRT4530_71165C.1.pep
KHKAVSTLLTKIKRTGKGFLNFINFHKGNFGHHIT

SEQ ID NO: 173094 - protein, 451 aa, Oryza sativa
  unsure (1)..(451): unsure at all Xaa locations
  Clone ID: PAT_MRT4530_71166C.1.pep
TRVRRAHAQPHGSRWTARTGRVERRERLTGSADSVVPRWHXRGAYVAASRVGWRKTKTPAANGRRAAAASGGANHGDTGESEHTGWLHETRGDEPTARIRWRELDGGGLRRRPPVERKGENGDEVMRGRFPAARASKRLRESVPCAGLGGNASREAGDERRFRARAATAASTRRATAKVGAAPASYGEATLTRADGAKRDRFGLGPRKRRGRARPESPSASSLVPAPPTRATTIGDGEQGRQRRGGEXDKNEGDWRREELGFIGATMSVWERGTDIGRSSRRAGARLAAKTTTGGGGREGDEEEPCLLSLEARAGRGGAELMTTAMTAGRAAGPGGADGAGAARAATTRARVREQRCAGADSAGGELARDRGGERESEGGGTLGAAHAHARAARGQSGERERERERERGREGDGPRGIRPIEPGGGEIDFCGGIDLEGFGFGIEFDDRSGI

SEQ ID NO: 173095 - protein, 43 aa, Oryza sativa
  Clone ID: PAT_MRT4530_71167C.1.pep
TLPLRNRETKQNHGSIISLAQQSNYVNKLGTHETRWETSSNQR

SEQ ID NO: 173096 - protein, 155 aa, Oryza sativa
  Clone ID: PAT_MRT4530_71168C.1.pep
MVPREEATSLKVADKDILGGGGRGCNLRHVLQERGVGTHNGKNALVFTPRRRRSGGHKVSFRDQGQRSPFPDQTLRGGQRGRHDRQIPQLGRASGEIGRQTISRRARALAVEGAGMGTAEDNGSSDPAWAWGEWFWFSRVEGEEEKDWELGGQEE

SEQ ID NO: 173097 - protein, 236 aa, Oryza sativa
  Clone ID: PAT_MRT4530_71169C.1.pep
MGMGTFTTDESDKHEESYLSLGLTVSQSKKNNTEYPKVLLLLAAYLDRSVQKNEDLLDSNKIKDSSTIFHGHRAPDLSIKLYAERIFKYSECSPSCFVLALIYMERYLQQPHVYMTSLSVHRLLITSVVVAAKFTDDAFFNNAFYARVGGISTVEMNRLELDLLFNLDFRLKVDLETFGSYCLQLEKETMVLVIDRPIQQVHGVNSTKDLSRNSSIDESCKSELMRYSSQALQGCS

SEQ ID NO: 173098 - protein, 96 aa, Oryza sativa
  unsure (1)..(96): unsure at all Xaa locations
  Clone ID: PAT_MRT4530_7116C.1.pep
GRSTVACRXTRRPWSQAGCASRGVRRSPCACGFXXGTREYFAALSVGGPFTRSRQAQDKATRGESKPGRIXRSIWYPVRNLRLVTVVSGPXSITVK

SEQ ID NO: 173099 - protein, 53 aa, Oryza sativa
  Clone ID: PAT_MRT4530_71170C.1.pep
LGDEMTRVIWKGIKDKLIFPFLDLDIKYYDLGLPNRDATGDKVTIESAEATLK

SEQ ID NO: 173100 - protein, 84 aa, Oryza sativa
  Clone ID: PAT_MRT4530_71171C.1.pep
MGSGGARPMRRRSQRRREDNHGSLHRRPKGAKWWAHRRGEGIRAPASFGGKQVVAKVRADSVSATAALAAVARGRRWAVAAKLG

SEQ ID NO: 173101 - protein, 101 aa, Oryza sativa
  Clone ID: PAT_MRT4530_71172C.1.pep
RKIGFIPTGLGLKEDSHHRFTRGVNPGRKTEIGGKFTGSGGRHDRCLDYFWPPKNRVITVLGEEFSDRRGIITWAIPQEHHPHYNHGCQHYNGNGRFGQLQ

SEQ ID NO: 173102 - protein, 88 aa, Oryza sativa
  unsure (1)..(88): unsure at all Xaa locations
  Clone ID: PAT_MRT4530_71173C.1.pep
KVGCEYMVLMVVLITIKDRFTSYCCETFTVPTTSQRGQRLYLLYSMIHYGVPDCEAARSPWGSRGSPLPLVXGGDYDQERCNVVSCVV

SEQ ID NO: 173103 - protein, 107 aa, Oryza sativa
  Clone ID: PAT_MRT4530_71174C.1.pep
NSVNFSDRVLRIEIVAGDDAAGAKGAAGEGCSSLADWAHQRKRRREELRREKGERGFLPPPPLLLARSNPRWARERFRFDFGGAFVGLEPSISGELGGGGGASFSPR

SEQ ID NO: 173104 - protein, 71 aa, Oryza sativa
  Clone ID: PAT_MRT4530_71175C.1.pep
MAPTVEISHLSFTYPGIDGRPRTGAPAVIEDVCFSLHAGHRCLLLGSNGTGKTTILKILGGKYMVEPRMVR

SEQ ID NO: 173105 - protein, 254 aa, Oryza sativa
  Clone ID: PAT_MRT4530_71176C.1.pep
MAGVGEECGEVAALREALRQQAAAAEELRGELEEERQAAASGADEALAMIVRLQAEKAAERMEAEQFRRVAEERIQHDGDSLAFLKAVVFHQEMEISSLNRRLLAAGDGRAAAALRSTRRASPEIISEEEEDDDDHLISRHGEKARKPCNCSDRTAIAELGADMAQIKLNLQSLHTEFIKAKEATISRGDSQARLLAEICAKLDAISKTRQDSSSDDPVQVRVSREEGSSSKGRSYTNSELLMNHFIEAMMYIP

SEQ ID NO: 173106 - protein, 146 aa, Oryza sativa
  unsure (1)..(146): unsure at all Xaa locations
  Clone ID: PAT_MRT4530_71177C.1.pep
MAAVNHGTDASRAGPPYASAPRGNQVAPASGHDSGDGSTAYGYCSQNCRCTNCKNREYYEDFVEERVDMIKMKNPRAFDPKIVRVQDASEIEPQSSNAVPENEHGCXANGCRCQKSKCLVHSCECLKPESRGIFGCASAHQIEKDF

SEQ ID NO: 173107 - protein, 62 aa, Oryza sativa
  Clone ID: PAT_MRT4530_71178C.1.pep
MAASLHEDFAAAASPAAAGGGGRAADHQPSAGTGTYRIIGVGGLRIGTIDVTNRCRTRNRHL

SEQ ID NO: 173108 - protein, 76 aa, Oryza sativa
  Clone ID: PAT_MRT4530_71179C.1.pep
PSKRLTRARGKREGAPGPPGGQRGKFPRGKEKKFGPPNPKKGPARGVNLAWGPEWPTPGKGLGKPPSGGNQRKNPG

SEQ ID NO: 173109 - protein, 45 aa, Oryza sativa
  Clone ID: PAT_MRT4530_7117C.1.pep
WRINYWAIQLFNLAPPNVYCIFLWFLQPHKMSSVTVIKSHFKGAT

SEQ ID NO: 173110 - protein, 91 aa, Oryza sativa
  Clone ID: PAT_MRT4530_71180C.1.pep
MGAAQRHGPWGNGCSAKWPLDQFSCAWKLANSSIAMGAAGRIERERTRSCTSIRWGALGSTCFGVCHDDLATGYLLNEFTDDCHANVWIHR

SEQ ID NO: 173111 - protein, 77 aa, Oryza sativa
  Clone ID: PAT_MRT4530_71181C.1.pep
VAMCSKMLMTPTMTAQDNHQDGLLMSPRRHRRASFSHSSRSKWLLISCVFLDSRFWKAKVPLRFVLRSTKKITRIRF

SEQ ID NO: 173112 - protein, 370 aa, Oryza sativa
  Clone ID: PAT_MRT4530_71182C.1.pep
MPISTGPAIIESEDGVVMTPVDYMSKDPPAEAENGTSTTSGPEKDPNAAKSCSSHKRHEPTGTTSGAIKAWCPFHRTSKHTLQACSVFLDVQAETSSMQFTSTSELVANQVHKDYKCSSPELSEYLAELRKLEKRFDGIEVRHVYRKGNIEPDNLARRASRRELLEPGTFLDILMKPSVKEANDEGSTVAPDISLGAIEAEHVVADIETTDDWWTPLIKFLSSDELPEDDAEAEKITRQAKIYCMISDDLYKKAPNGVLLKCISSDDGKHLLLDIHEGICGSHAGGRKLVGKAFRQGFFWPTTLKDACNMVQRCEACQLHSKHTRLPAQALQTIPLTWPFSCWGLDILGPFPRGQGGYKFLFVAIDKFIK

SEQ ID NO: 173113 - protein, 213 aa, Oryza sativa
  Clone ID: PAT_MRT4530_71183C.1.pep
MDVEQLQQHARRLLSNGRVVSAAAAAGASPGPAGRVLEGGAAAAARRPAPFSSLDATVITVLSLLLCVLVVGLVLHAIARCAFRVTRRMCYGQEPPGDHGDEAAAERCARVARKKPGRAIAEKIPAIVCPAGGLDRLAGCGSTECAICLSEFAQGHRVRVLPRCGHGFHARCIDRWLAARQTCPTCRREPFAAAAAVQLQVYPDAAGGQHETP

SEQ ID NO: 173114 - protein, 131 aa, Oryza sativa
  Clone ID: PAT_MRT4530_71184C.1.pep
MRHQVSNLLLFTARVLANPDEIFESRRWGEWATAEGFRRGKRVPLVQWQCVKRLKWCGDPNMHSWPEAAMHPQQQRLEHLQASSGLYNNLSKPKFGNFSKKATPIFAHRDLQHCRREHRLSFSLAVGRLQR

SEQ ID NO: 173115 - protein, 564 aa, Oryza sativa
  unsure (1)..(564): unsure at all Xaa locations
  Clone ID: PAT_MRT4530_71185C.1.pep
MRRQGFRHVQTLSVRAPASTPDLGAMPNNSMIPPSEASQLHDAGASPMFLDNTSATTTSFTNLVEPDDSSAGLGMKQIETDQGANEDSQTRKASEKMTPKVGMKFNSEQEAYDFYNAYASEIGFSIRRSSYHYMGNTKIIKNRTFCCSREGTRGVDKRTEALGYGNSFNRPETRCKCQACMKISLIDGFYQVYHFVPEHSHILATKSQAHQLRSQRKVNEAQVASVEVAKSVGISTKAVVDLLAKQSCGYENLGFTRVDMKNKLYSKRSLQTKQGDTGGVLEYMEKKSSEYIKFFYSIQVDEDDLITNIFWADSKMIADYEDFGDVVCFDTTYRKLNDGRPFGLLVGVNNHKKTTVFGAALLYDESADSFVWLFNTFLNVMSGKKPKTILTDEDAAMAKAIKLVFKGTHHQICVWLLGDKRYEEVKCDFRATQSTPRPKAELRILRDVVEVYTPAVYKIFEEEVMQTLNCDIFYCGDVDEQKVYKIKSHGKHHEHVVKFSPLESSVKCSCKKFEFAGILCSHALKVLDINNIKSVPQXDIEKCLKIRCNPDLETSSSPQGVKEN

SEQ ID NO: 173116 - protein, 501 aa, Oryza sativa
  unsure (1)..(501): unsure at all Xaa locations
  Clone ID: PAT_MRT4530_71186C.1.pep
MSTAVAIISSVSATAAAVVMLALIKRCRRYRRKMKKKMLARIAHEATEQHREMEARDAADSVMIEIGPVEKFLNEILSEKPMRFTSEQLAACTGNYSSELGSGGFGVVYRGELPKGLQVAVKVLKVSMNKKVQEAFMXEIGTIGRTYHVHLVRLYGFCFDADTKALVYEFLENGSLEKYLYGGGGEDRGKKLEWRTLHDIAVGTAKGIRYLHEECQQRIVHYDIKPANILLTADFTPKVADFGXLARLGERENTHMSLTGGRGTPGYAAPELWMALPATEKCDVYSFGMVLFEVLGRRRNYDLAAQAESQEWFPKWVWDRYEQGDMECVVSAAGIGEEDRAKAEMMCKVALWCVQFQPSARPKMSSVVRMLEGEMAILQVPPPPEHLEQQHPVAPAAARPPGVRRRVRVPHGGRLRRVAVRAGGRRRRVPLAVVVDVVPVLPPLPLGPVRAAERGDGCHGHRCGDGQDHHRGRAEGGGGASSHAGVKGMEKHTRSHHGLRA

SEQ ID NO: 173117 - protein, 787 aa, Oryza sativa
  Clone ID: PAT_MRT4530_71187C.1.pep
MGIVSVLMGLGNEWAVQALVLFSFTLQVTLLSLAWIRRHSIATMPKLVLWVAYQLADSTALFTLGHMAISSRSREEQPLMAFWAPFLILHLGGQDNITAYSFEDNRLWLRHLQTLVVQVMGASYVLYKYMPGKETLVMAAAVLIFVVGILKYGERIWALREATFDNIARCLDQQEDYASAREREGDDLLQHVLQGRSSMDEENVLIGAHGLLDICRGLFIGSRGGRRGYLRHVLLSFQMYVRLDKLMELELSLMYDILYTKATVIHTWIGCCIRVIALAATVTATFLFLLSSKHGHSRKDLAVTYVLLAGALLLEMISMVRAVFSTWTVVFLYKLKWYWLYGEVLSIRRVFRRLARTRPAIGSQPGVRAFKALGLDGSLGWRTIQDIGFEDSIMAWHLASDICLFSDRSNKLDLHEGVAVLSNYMMFLLVHRRYMLPGPVRRTRYEQVRDDLNKFMHRKGRARSPQDLFVWALRRGLHDHLNSDDPPAQYDTGVRLAAVLYHRLDRLDIIFGELCLFLTAPRTVHCMQEPCRLRRHTSRIRRIVNPARLLRAVVAVGLAPLGTWEDRMVLEAVLKAVPADLLPVLAVKEMTKDAWDAIKTMRVGVNRVRKSKAQELRKQFDAIEFKEGESVEEFSIRLSWLVNNFAYSGSSLRNQDTLSLEQLTGVKNSGPLVPRNRQSGEGSSGKKQASTTAAAVGKKKTEGAANGERCARDQLRDKCKNCGRLGHWEKDCRQPKKQAEAHAVQGEEEDDEPVLLMAHAVELAQPPPSPPPTEPFDLVEPKVFTLL

SEQ ID NO: 173118 - protein, 180 aa, Oryza sativa
  Clone ID: PAT_MRT4530_71188C.1.pep
HDLFIHLVLLFFLLNLHNYRTQVAIPHPSIHATVPLPTRSSGNELASPYPSSSSFPAKCSRRRICGTGEAAPRALPYHTTHKLTTHSTAHAHLYSTYLSKRKASCVSSTPPPMSSCALGVSPRGRPRACCTNWTSLNRDSFFFPLPNFLSDFEWPLLCRWPRQSRGKHVSSPPVFQRKCA

SEQ ID NO: 173119 - protein, 70 aa, Oryza sativa
  Clone ID: PAT_MRT4530_71189C.1.pep
GAPLLPFLLPARFFCVLVRGYQFCHCNRALLMFTSSFMSSLYRVSWCCSWARSVFSGCIPCLGPGSGCRC

SEQ ID NO: 173120 - protein, 42 aa, Oryza sativa
  Clone ID: PAT_MRT4530_7118C.1.pep
MLGGCRLPLGICFPWGSPRRSGTPRRMRAGARGLHASAHASP

SEQ ID NO: 173121 - protein, 71 aa, Oryza sativa
  Clone ID: PAT_MRT4530_71190C.1.pep
PRPPTRPKKKDNKTKKKKKKKGDIGELRGGCPTNCCRCVECFHGARSSGHISGVLVKMIQKPGSCHSLPET

SEQ ID NO: 173122 - protein, 95 aa, Oryza sativa
  Clone ID: PAT_MRT4530_71191C.1.pep
GARARHRGARGQLRGGGRCRRPPGRDGQRRASVATFSTSILDSSARRERRAAAGERGESGGGGGWEGRGGRWHWCSRDREGEGGGGRRRRRAEGV

SEQ ID NO: 173123 - protein, 81 aa, Oryza sativa
  Clone ID: PAT_MRT4530_71192C.1.pep
NLRCVCVDHICIDLPPSVCISVGSSSGYVALEHFQGQILYIPFFVTSHRIVGWRQRHWNQERPFCPIQCIVIQKEEKFTEP

SEQ ID NO: 173124 - protein, 117 aa, Oryza sativa
  Clone ID: PAT_MRT4530_71193C.1.pep
MTGTHRGKAAGISAASVETTTNFEWIRRSQPRERPFIIDPTVAAAEFDGDSREQIHYCQPWEGLSLRDPAAAARGGTDQPLLTSRASLPRRFSDSDRVRSGSTIAGLKNATPLQIRG

SEQ ID NO: 173125 - protein, 84 aa, Oryza sativa
  unsure (1)..(84): unsure at all Xaa locations
  Clone ID: PAT_MRT4530_71194C.1.pep
VPPRRCLEAAALRRVPRXASPPCAAAAAVGKPPPLASGRQNKDYSEXGKSSLFLEHVDPNCEIVLFTNKIACNDEHPTCDYAMP

SEQ ID NO: 173126 - protein, 64 aa, Oryza sativa
  unsure (1)..(64): unsure at all Xaa locations
  Clone ID: PAT_MRT4530_71195C.1.pep
RGKTGKGGGKKRKKKKKREAKKLKKKREKLGRIHKTSGVKRQKKGXTKSHKGGEKLKKKNREGL

SEQ ID NO: 173127 - protein, 1125 aa, Oryza sativa
  Clone ID: PAT_MRT4530_71196C.1.pep
MGELQVSSAHSAVDSLLGRLIRILEDEARLLGGVRGDVQFIKDEMESINGFLLHVLHLDRPDHQLQGWTRQVKDLARDCDNCVDVYMQRLAGAGSGGSARRLLRLLTLPARRRIATRIRELKSRACDVGERRRRYGVVVPRTRNNAAAAAAARRGGQRGLAKRQLSEAGGGDHHADASSAGNTTKQDHRRRALLEEETPANLFAGETDTLVGWLLAAADEHRRPKVISIIRPDDEELVAAAIDPVKRALDDPRILELFQIRQWHSGQSHPGWVYQDMMTQILPMIQHMHRALGGMVSDYDKRNKRRYTRLKKKKKRIVVSNFSRKNLGSKGNKFPVGTTFDEVKEFIGGTASDKEEEEEEEEGFLQAAAMEVHEGFAMDVAKIISETMASEMGFHQGMTFQEMMENFLKDKSYLIVLDDVPDESLWRGIESAFPGNTAHSAILLTTRSPAVAYSCSPHDRVFPPLDHLIDFFHAKAVSLVENYPSNGNLDEVIRSILSKCASNSTDMCIRAFLHVLYANPNRNREELQGLCDSLHDSHGLMLDENMQQILMFWYNDLPVHYKSCLTYLSLFIQDDGSSSNSTMMIRRTSLVRRWAAESINTERNGQTALDEAERCFGVLLAKRFVLERDIGASGKIKSCAVNGLISKFITKVAREDNFVDADLQPDFAHRVSIWNRSQLQQVLAELQASPRPSSSSCWNMRKHYDQPLDDLTIFLKSLPAFSRLGLLKVLDLEGCDGLKDHHLENICKLFQLRYLNLRRSKLTKLPKKIQNLQQLETLDIRETTVSSFATKSLVLPMLKHLLSGYTQQQNEQTEKFSTVRMPRGIGSMTNLQVLCHVVVSGIEDELMDIGKLLQLRKLGVVFHGDQNSFKHLVQAIEKLHKSLISLSIRVEVPDGCENFPDMNMAEPTAFSYPKLLESLNICGIRCGLPRWIKELSRLAKLTLCDTHLGEQDMAVVGNLKALRYLRLRCRSYVQSKLTLGEKQFQHLKVLLIHGEDITDISFSKNPKLEKIVWSFREMKSISGIERLPSLRSFELHGDCNPDKVEIALKDHPNHPDLEHHGNRQGQGDAAGSLDADAASTCASVSAPNHPDVKHPDNRQGHGDDSAASTSASASASAPKHIQSIT

SEQ ID NO: 173128 - protein, 852 aa, Oryza sativa
  Clone ID: PAT_MRT4530_71197C.1.pep
MAYKMGETGTQARQYLRTAMDGTSAKVVLFIGASFSFFLITHAQQQATRCRPQERDALLSFKQGITNDSVGLLSSWRRGHGDCCSWAGITCSSKTGHVVKLDVNSFLTDDSPMVGQISPSLLSLNYLQYLDLSSNLLAGPNGSVPEFLGSMNSLIHLDLSYIPFSGTLPPLLSNLTNLEYLDLSFTSFSGTLPPQLGNLSNLRYLDVSEMQNVVYSTDLSWLSRLHLLEYIDMSNTILSKITNLPAVLNKIPTLKHVLLLNCSIPSANQSITHLNLTQLEELDLSLNYFGHPISSCWFWKVTSIKSLRLDETYLHGPFPDELGEMVSLQHLDFCFNGNAATMTVDLNNLCDLESIYLDKSLSSGNITDLMDKLQCSSKLYSLSSISNNMIGMLPSSIEHFTSLNHIDLTNNSVSGVMPRGFQNMANLEYLHLSSNRLSGQMPLLPTSLKILHAQMNFLSGHLPLEFRAPNLENLIISSNYITGQVPGSICESENMKHLDLSNNLFEGEVPHCRRMRNLRFLLLSNNSFSGKFPQWIQSFSSLVFLDLSWNMFYGSLPRWIGDLVTLRILHLGHNMFNGDIPVNITHLTQLQYLNLADNNISGLIPLSLSHFNEMTLKAVGDSISTLAFDESFDTFSLGMKHQILKYGSHGVVDMVGIDLSLNRITGGIPEEITSLDRLSNLNLSWNRLSGKIPENIGSMKSIESLDLSRNYLCGEVPSSLTDLTYLSYLDLSYNNLTGKVPSGRQLDTLYLENPSMYNGNIGLCGPPLQRNCSSNGYAQGHGDHKGQEKDSNSMFFYYGLASGFVVGYWVVFCALLFHKSWRVTYFCLVDKVYDKLYVYVVITWTRWMNTTN

SEQ ID NO: 173129 - protein, 45 aa, Oryza sativa
  Clone ID: PAT_MRT4530_71198C.1.pep
VYSLSCNQGIIGLFLSRHMVSQAKNVMHVMSENLQVSRISIVCQA

SEQ ID NO: 173130 - protein, 71 aa, Oryza sativa
  Clone ID: PAT_MRT4530_71199C.1.pep
NLGCARKLTSRSARSRRRRRRKRRRRRTRRSVTPMRPRSPMPVRPQRRRSRRRRRRSRRAATRNKCSCPPL

SEQ ID NO: 173131 - protein, 579 aa, Oryza sativa
  Clone ID: PAT_MRT4530_7119C.1.pep
MAVVSRAGQVFDEMSLEETNPAVVEEEEGKPGSAEEDAVAYGEVQVFDEMPLNETDPPAAAEEEGEPGIAEEDAVASGEDRLSEMPDMVLHHVMSFLKAWEAARTCVLSRRWRHLWASAPCVDILLTSDRQPPPMNRRMRHHRASAPCPCADVLWTRDRNAPSDTRRFVNRLLLARDELAPVDTLRLRSAHVDGFGDKFKNVDVEKWISEAIKRKARVIQLEDHYGMFVVFAHQVFASNHLKILKLSYAELDDDVFRGFSSRCPSLEELELKKCVVSAREISSVTLKSLIMVECKFTMNLSVGAPNLVFLQCITPMKWVPVLKDSGSLVTGSIMIDDSLLIGDSKKGHEVDGFSSDYSYGGSSEDYFDDLSSDISDDYDYNYENDINSDADTYEYNEIVNEYKFEQYKDHDDGGDCSMGGKYHGSSSNNGFNDDKTLGGQNVLHSLSNARSLELLAHSGEVVLSRESRSCPTFSNLKTLSLGEWCISMVADFDILILFLQNSPNLEKLFLQLEMSYNIQKELEKGIKPKGGSFACKRLSTVKIRCTKDDLRVHMLAQLFNSNGLSLEKIFVRRSGSFPG

SEQ ID NO: 173132 - protein, 128 aa, Oryza sativa
  unsure (1)..(128): unsure at all Xaa locations
  Clone ID: PAT_MRT4530_711C.1.pep
MGQSERSVEGKKKKCGESFFLIQEGLVSTHGYKYVHRGHCKLSHRSIQLLSAHCHXYFLRFLLITAELXHLTRDCIGFXSPAKGXVQCSACPGNCIGCIGVVQGCIASTSWVALVWFIYFPTYLSYIF

SEQ ID NO: 173133 - protein, 77 aa, Oryza sativa
  Clone ID: PAT_MRT4530_71200C.1.pep
PRVRSFLCSSGGVHQINEDDPLLNMVVISILRTKKELSSGWRNLCSVCLYRCHLGAILPVHISVPFCLKPQEPFWMV

SEQ ID NO: 173134 - protein, 212 aa, Oryza sativa
  unsure (1)..(212): unsure at all Xaa locations
  Clone ID: PAT_MRT4530_71201C.1.pep
LLQVAGDLLKQYQEKFKGGTLSATWNYLRDSMGTYLSQPNPVTSRWEGEDHLRDPNFQLDAFRYRTSRLLHSVAARLQKHSKTLGGFGAWNRCLNHLLTLAESHIESVILAKFIXEAVKRCPDXKHGNWLKLVCDLYALDRIWKDIGTYRNVDYVAPNKAKAIHKLADYLSYQVRLVAQELVDAFDLPDLIIRAPIGMQSEAYAQYTQHVGF

SEQ ID NO: 173135 - protein, 103 aa, Oryza sativa
  unsure (1)..(103): unsure at all Xaa locations
  Clone ID: PAT_MRT4530_71202C.1.pep
KRRNWKNLGFTKLNRFEKNPLFPSWEKTKKARTNGFFKKLPTLNGKWNPLFRGHXSAGGGGVTPRGTFKFASPLAPVLFVFFLSFLATFAGFPLKVLNGGFFL

SEQ ID NO: 173136 - protein, 102 aa, Oryza sativa
  Clone ID: PAT_MRT4530_71203C.1.pep
RVPAMARRSISRTSPARSDAEGTDHAGMDGTEDPARWRETGEKFELFDTSSLLYSLGRGVLEKKKLNRTIQKTSTKKKIQSGQANCWQGGVDWRVNFWLHLL

SEQ ID NO: 173137 - protein, 66 aa, Oryza sativa
  Clone ID: PAT_MRT4530_71204C.1.pep
MGLKCWCSDDGTRAIECVLRLGSSKGGDMDLGLPRVSSRVPCDKELAFYVGDVEEVWVRLVAVEWI

SEQ ID NO: 173138 - protein, 49 aa, Oryza sativa
  Clone ID: PAT_MRT4530_71205C.1.pep
VLSCSTSVSMCTMNNYAGSTVFAVSVGPDVFVFATSSFTSMANCCPFLF

SEQ ID NO: 173139 - protein, 75 aa, Oryza sativa
  unsure (1)..(75): unsure at all Xaa locations
  Clone ID: PAT_MRT4530_71206C.1.pep
GLGIXLPXXFLGRTPHQNAVXAEGRKKKAAGXATTNPPPXRSAPSPGLIDGVQEDPXGVXDLRRTLPPHAXRSXG

SEQ ID NO: 173140 - protein, 247 aa, Oryza sativa
  Clone ID: PAT_MRT4530_71207C.1.pep
MAGNRGGDAGEGEWLKVAELRATVEAQDPHAKEVDNLTLRRFLRARDHNVEKASAMLLKALRWRREAVPGGSVPEEKVQSDLDDDKVYMGGADRTGRPILLAFPAKHFSAKRDMPKFKSYCVYLLDSICARIPRGQEKFVCIVDLKGWGYSNCDIRAYIAAIEIMQNYYPERLGKALMIHVPYMFMKAWKMIYPFIDNVTRDKFVFVDDKSLQEVLHQEIDDSQIPDTLGGKLAPVSLKNNARINLD

SEQ ID NO: 173141 - protein, 279 aa, Oryza sativa
  Clone ID: PAT_MRT4530_71208C.1.pep
MAGNRGGDAGEGEWLKVAELRATVEAQDPHAKEVDNLTLRRFLRARDHNVEKASAMLLKALRWRREAVPGGSVPEEKVQSDLDDDKVYMGGADRTGRPILLAFPAKHFSAKRDMPKFKSTSPLDSYSPTIMTLPLQSLTCGGIEGWNPYTGYCVYLLDSICARIPRGQEKFVCIVDLKGWGYSNCDIRAYIAAIEIMQNYYPERLGKALMIHVPYMFMKAWKMIYPFIDNVTRDKFVFVDDKSLQEVLHQEIDDSQIPDTLGGKLAPVSLKNNARINLD

SEQ ID NO: 173142 - protein, 163 aa, Oryza sativa
  unsure (1)..(163): unsure at all Xaa locations
  Clone ID: PAT_MRT4530_71209C.1.pep
PIRSTQRPRLSLGQDGDRHPATTFXAGRGPGAEDLPWSPHQDYHSIRLGTFMTVFGTTRRSGVQEQQGPAAVPVTSEKLIQLGTPHGHRGAEKTMVGRRRALRASVMVQRREAVCPPGAGGTSGVRTDPTDALLVETNITLLDTDVPLCGHGRSELSTGHLCA

SEQ ID NO: 173143 - protein, 99 aa, Oryza sativa
  Clone ID: PAT_MRT4530_7120C.1.pep
MERMRSEGKGGRGGRMARAGGASGELWAGGTAAQAAGMAWVGGAVWTGGRRRGWRGRRSRSDVRSRKVVECEAELVAPPSYCIANRFTRDWAVQRALSS

SEQ ID NO: 173144 - protein, 161 aa, Oryza sativa
  unsure (1)..(161): unsure at all Xaa locations
  Clone ID: PAT_MRT4530_71210C.1.pep
KFPSKLPAAAKKKIGDSLAPALPWVGGPPLPXAFEFHSQIKELGGFFNPLFSQMFQGPGADMAGGMDKDNSPPAGGTGVGPQIEGVALARNFFLFPPSSFFFAFLGFLFCWVKKLCCFAFFLSPWFVWAAPFNLKTALGAFLELLIGWEIFFFWGLPPPFF

SEQ ID NO: 173145 - protein, 761 aa, Oryza sativa
  Clone ID: PAT_MRT4530_71211C.1.pep
MAVASYPLPIPRSPRPDAALPPDASTDTAPSLDFGDPASVVALRALTDAGAATRLLHECVAYQRALDARLDALLARRPDLDRAAASLLRSAPPLLSLAASDAAALRDSSSSTAALAEALSSRVRHLDAAHSRAEAALARAEAALDRSRALDAARRALAADDLTAAATAAHDFLAIDARFPTDDDLRRDLLDIKRRLEGLARRRLADAVDALNHPAVLRLVRLFPLLALADEGLQVYVAYLKKVVALRARADFEHLAELTSATQPTSERPDFVGCLTRLFKDIVLAVEENDAVLRELRGEDGVAYAIIELQEECDSRGTQILRRYADYRKLARLASDINSYTKNLLSVVSSVANAAGGNEGPDPREVELYLEEILSLTQLGEDYTEFMVNKIRGLRDVKPELGPQAMKSFRNGSFNKMVQDLTGFYVILEEFFMVENVRKAIRIDEPVPDGLTTSMVDDVFFVLQSCCRRAASTASINSIFAVLGGAASLLSNEYQEALQWRMREPNLGAKLFLGGVGVQKTGEEIATALNNMDVSSEYVLKLRHEIEELCSEAFHAPADREKIKSCLSELGEISASFKKILHSGLEHLVASVAPRVRPVLDTVATVSYELDDAEYGENEVNDPWVQKLLLTVNTNVAWLQPVMTSNNYDSFVHLIIDFIVKRLEVIMMQKRFSQLGGLQLDKEVRSLINHFSEMSQRPVRDKFSRLSQMSTILNFERVSEILDFWGDNAGHLTWLLTPAEVRRVLGLRIDFRPEAIAALRL

SEQ ID NO: 173146 - protein, 636 aa, Oryza sativa
  unsure (1)..(636): unsure at all Xaa locations
  Clone ID: PAT_MRT4530_71212C.1.pep
TRSCIHQGVHPPRESIIFXVLXATVDFXTCESIXMSQQVDRTGIRTLAVVTKSDKAPEGLLEKVTVDDVRIGLGYVCVRNRIGDETYKKARKAKARLFAEHPLLSRIDKSMVGVPTLARRLTQIQARIIARSLPDIVKQINDKLSRSSDELGQMPPELCTVADAVREFFHIVNQMRASLEKVLVRGEFDEYPNDRHHHGTARLAKMLEGFARRLPAAAATDGEPFLVEEMRVLKETKGINLPNFMPRSALHVLLNRKVKSIAQVPHDLVRQVWDYVEDLVLKELQRHSRSYPQVQPSCRPAVQSFMDKARERSARYVNELIDMEMVANYTANPEYIKTWTSMMDGQSRLREALEDRSKPVAKLRSFSKPPAVALPGFGETDVSHLHQLPPEQVELAMQAFDLKARLAAYWNSVVLRVIDGLALHVLYSIKRLAEKDLEDELAAQVMGNNMDGVERMLVPTPAAAAKRDCLKKSIKLLRESREVVANIMDRLTRQAPTIDELSQMPPKLCTVADAVREFFHIIYAGEEEMRVLEETKGINLPNVMLRSVLHNLLNQKIESIAHVPHDLVRQVWDYVEDLVVKVLQHHSWSYPQVQLSCRRAVQSLNVMDKAFTGTIGAARVRAIGLACSLRGIGLVF

SEQ ID NO: 173147 - protein, 197 aa, Oryza sativa
  Clone ID: PAT_MRT4530_71213C.1.pep
MGHLLPPPHSGELKLVKIKHLLHAFVLKHGGRLAAALGGAKALLLTIAARGSIAGLRNKIRRRRGRNTKKPRCRGSGGDAMMTMQLKLLLPAAVAVPPPSEIAGGGVEPFDAELAYYDSSWNTMIPAEEQLLRPITGYLSWPEQEAEEDDDQGEEEEDEKNEIDRLADKFIERCHERFILEKQESYRRFHEMLARSL

SEQ ID NO: 173148 - protein, 74 aa, Oryza sativa
  Clone ID: PAT_MRT4530_71214C.1.pep
TGTAKHLNHQPKPPPPPPPPPRVRREAADVLSWPPPPSSRPRPPPSSPRPAGSGRSPSAPLSPPPPWSSGSSSP

SEQ ID NO: 173149 - protein, 295 aa, Oryza sativa
  Clone ID: PAT_MRT4530_71215C.1.pep
MAKMVSQCISPRQSFRVPRFSSARPTLSSRLAIGYAKGSFCGVKRSNRPSFIAAALDVPKSMSSPNSESSLPLKEVIWAWCNADAVCFDVDSTVCLDEGIDELADFCGAGQAVAEWTAKAMTGSVPFEKALAARLSLFKPSLGQVEDCMEKRPPRISPGIAELVKMLKAKNVDVYLVSGGFRQMIKPVAMQLGIPPENIFANQLLFGTSGEYVGFDPSEPTSRSGGKAVAVQNIRQKCGYRTLFMVGDGATDLEARQPNGADLFICYAGVQMREAVASKADWLIFDFDELMGYLV

SEQ ID NO: 173150 - protein, 56 aa, Oryza sativa
  unsure (1)..(56): unsure at all Xaa locations
  Clone ID: PAT_MRT4530_71216C.1.pep
SCQLPVELEDRAYXAIRNWNMDFEGVGEWRMMQIALVPFSFKVHIPFSCSHQGSTH

SEQ ID NO: 173151 - protein, 35 aa, Oryza sativa
  Clone ID: PAT_MRT4530_71217C.1.pep
SKLSRGGTAHHIRVPLGGASAAEDEVLIGGDIGGF

SEQ ID NO: 173152 - protein, 137 aa, Oryza sativa
  unsure (1)..(137): unsure at all Xaa locations
  Clone ID: PAT_MRT4530_71218C.1.pep
HVHAAAADERRILIHYAENDCGYGYKMEIAQPITNVDENIVYKXQDLSGQHEPPXMRQANLWNKTTSQHATTIIEQPPFVVVRKPLPNHVSKLERQATILQGCKVGIGKRNNTNIADLRLEATKRKLNDTYQEAENS

SEQ ID NO: 173153 - protein, 498 aa, Oryza sativa
  Clone ID: PAT_MRT4530_71219C.1.pep
MGLSYIRDHAVESYVWSNMVFYEEDLAVIRMVFAKLFVLAVIMDDTYDCHANIEECRKLHEAIQRWDESAISFLPDYMKTLYNEIMNNFKEFEDQVGVKGRYRVAQTKKEFQKLSTYYLQESEWSHQNHKPNFKEQMELSTMTAGGPLLCVCTTVGRDDTLTKEAFEWAASDTGAIRAYANMVLKNFGGNPSETKGVLNVELAVGNKTIPTTFFVIDGKGSYSLLLGRDWIHANCCIPSTMHQCLIQWQGDKIEIMPADSQLKIESPSYYFEGIVKGSNVYTKDTVDDLDDKQGQGFMSADDLEEIDIGPEWVSSIVPVIKKNGEVRVCIDFRDLNKATPKDEYPMPVADQLVDAASGHKILSFMDGNAGYNQIFMAEEDIHKMAFRCPGAIGLFEWVVMTFGLKSAGATYQRAMNYIYHDLIGWLVEVYIDDVVVKSKEIENHIADLRKVFERTRKYGLKMNPTIRRWYPRIRNELFGITTRRWYPRLFWKVNLYGS

SEQ ID NO: 173154 - protein, 175 aa, Oryza sativa
  Clone ID: PAT_MRT4530_7121C.1.pep
PHANEASGSDLDGDLYFVTWDEKLIPPGKKSWNPMDYSPPEAKQLPRQVSQHDIIDFFLKNMISENLGRICNAHVVHADLSEYGAMDEKCIHLAELAATAVDFPKTGKLAIMPPHLKPKVYPDFMGKEDGQSYKSEKILGRLYRSIQEASNGDVVSQEVCTPNDLPYDIDLEVPG

SEQ ID NO: 173155 - protein, 126 aa, Oryza sativa
  Clone ID: PAT_MRT4530_71220C.1.pep
FFFFFFFFFFFFFFFFFFFFFFFKKKKGDSHGGGTLGNRRGNLRVQGPHQVNLGQLKRKGVSGGFSLPWKKKHGEAFTNRAFKPGIRLNLWDGKGFYGRIFAKGGESGGGKGAPFLSQMGGPALIF

SEQ ID NO: 173156 - protein, 92 aa, Oryza sativa
  unsure (1)..(92): unsure at all Xaa locations
  Clone ID: PAT_MRT4530_71221C.1.pep
VVVLEEFLWEFNDNIPTDXAVGAVGKAASDRXKYLTEADNDPYVAXANKLKAEYNKAIAAYKQGREHCXKAPPKEEEDDHQXEFDKSKSEVY

SEQ ID NO: 173157 - protein, 98 aa, Oryza sativa
  Clone ID: PAT_MRT4530_71222C.1.pep
GGGWLYFRERRHKKLRAGAAARSAGRCAHGVRGHANKAAASPIDRSTDGTGGGSCLPRTGSRLAQPSDEPRVRNRAMRASMQTPTTHGRLPLTHSLRN

SEQ ID NO: 173158 - protein, 286 aa, Oryza sativa
  Clone ID: PAT_MRT4530_71223C.1.pep
AEYEAVLKGLQLLKDVEADAIEIMGDSWLVISQLAGEYECKNDTLMVYNEKCRELMKEFQLNIEANDLAQGASGYKPMIKDIKVKVAALIADDWRYDVYQYLQNPSQSASRKLRYKALNYTLLNDELYYRTIDGVLLKCLSANQAKVAIGEVHEGICGAHQSAHKMKWLLRRAGYFWPTMLEDCFKYYKGCQNCQKFGAIQRAPVSTMNPIIKPWPFRGWGIDMIGMINPPSSKGHKFILVATDYFTKWVEAIPLKKVDSGDAIRFVQELIIHQFGIPQTITTDQG

SEQ ID NO: 173159 - protein, 1696 aa, Oryza sativa
  Clone ID: PAT_MRT4530_71224C.1.pep
MEGNKSSSNDSLCRHHAEDIEEGEICNPGGGDGCYVLGSGTEEDNEEEKVGMQPVTCKWCRLKDILALPSPMPSSSGSEGTINDHGAGNAAAVLRLEASPCHLCSREFGNMKAVHGHKRVHQKSESQQRFLMAEKPPASPSSASKDDSSKSKTQKPGSSKDGEVQQVADGAAQSSDKGAADGFQGVQGDGSQGVQGVGSQGIQGDGSQGFQGENLNQDGNTAQLQFNNFQDRIDYVVQHALINQSGVLVNTLSNMVKSMVDGSIAEYQATGLVYLPGGVFSNYRPLITNNQPTVQPVPPNVPSAQPTAPVSAPAPAAPSSAPGANLNYQYQPPSPQTQYQQGGPAQPQFIPQYNQFEPVPQQAQGAPQQRPWTDMIADVMREQFGLKPKDAGNLYRHPYPEWFERVPLPNRFKVPDFSKFSGQDSVSTYEHVSRFLTQYGEASAVDALRVRLFPLSLSGSTFTWFSSLPCGSINSWADLEKHFHSYFYSGIHEMKLSDLTAIKQRHDEPVQEYIQRFREMRNKCYSLALTDAQLADLAFQAEWVRSKKVIPCQWVKNSGEEERYDFDITKANKISDLLLREKQIQLPAGHTIPSAEELGKKRRSMTNSKRGIMKKMMAVLILIGAVSSLDFAGMKNQKRRVQRLRNRERFQEVEQEINHRLKKTKPRQEWRVKNQVPVADEAAADEAKRLAKGKRVVTASVNMVFTLPAEFGVKQADVDEVEEESAKLMLSPEQAVFENPEGIENRYLKPLYINSYVNGKPMSKMMVDGGVVVNLMPYATFRKLGRNAEDLIKTNMVLKDFGGNPSETKGVLNWQGDKIEIVPADSQLKMESPSYYFVGVVEGSNVYTKDTVDDLDDKQGQGFMSADDWEEIDIGPGDRPRPTFISKNLSSEFRTKLIELLKEFRDCFAWEYYEMPGLSRSIVEHRLPIKPGVRPHQQPPRRCKADMLEPIKAKIKRLYDVGFIRPCRYGEWVSSIVPVIKKNGKVRVCIDFRDLNKATPKDEYPMPVADQLSKEIEDHIADLRKVFERTRKYGLKMNLTKCAFGVSAGQFLGFLIHERGIEITQRIVNAIKKIQPPENKTELQEMIGKINFVRRFISNLFGRLRHYLLSNECTVICKADVVKYMLSAPILKGRVGKWIFSLTEFDLRYESPKAVKGQAIADFIVDHHDDSIGSVEVVPWTLFFDGSISSYGCGIGLVIISPRGASFEFAYTIKPYATNNQTEYEAVLKGLQLFKEVEADAIEIMGDSLLVISQLAGEYECKNDTLMVYNEKCRELMKEFRLVTLRHVSREQNIEANDLAQGASRYKPMIKDVKVEVAALTADDWRYDVHQYLHNPSQSASRKLRYKALKYTLLDDELYYRMIDGVLLKCFSADQAKVAIGEVHEGICGTHQSAHKMKWLLQRAGYFWPTMLEDCFKHYKGCQDCQKFGAIQRAPASAMNPIIKPWPFRGWGIDMISMINPPSSKGHKFILVATDYFTKWVEAIPLKKVDSGDAIQFVQEHIIYRFGIPQTITTDQGSIFVSDEFVQFADSMGIKLLTSSPYYAQANGQAEASNKSLIKLIKRKISDYPRQWHTRLAEALWSYRMACHGSIQVPPYKLVYEHEAVLPWEVRIGSRRTELQNDLTADEYYHLMADEREDLVQSRLRALAKVTKDKERVARHYNKKVVSKTFSEGELVWKLILPIGTRDNKFGKWSPN

SEQ ID NO: 173160 - protein, 2018 aa, Oryza sativa
  unsure (1)..(2018): unsure at all Xaa locations
  Clone ID: PAT_MRT4530_71225C.1.pep
DQINWHASISKGKFLTCTGVKQISRTSCFXTSTRFWHAWWDXQKSESQQRFLMAEKPPASPSSASKDDSSKSKTQKPGLSEVNESNIMPITPDKLKPEQQKDLEAMMQQAXNQFLNSFMETXVQKYKVKVIVDVPATGSSKDGEVQQVADGAAQSSDKGAADGFQGVQGDGSPRVQGVFXQGIQGDGSQGFQDRIDYVVQHALINQSGVLVNTLSNMVKSMVDGSIAEYQATGLVYLPGGVFSNYRPLITNNQPTVQPVPPNVPSAQPTAPVSAPAPAAPSSAPGQLINPWLLVREQPQHSGQNMNRLTXDQVTAMFLSPQPTVDXSSNNRFNRHHQGSRLCIRFXDTTKAAGCAARCESSCPRAFGSXCPTRPNDVMREQFGLKPKDAGNLYRHPYPEWFERVPLPNRFKVPDFSKFSGQDSVSTYEHVSRFLTQYGEASAVDALRVRLFPLSLSGSTFTWFSSLPCGSINSWADLEKHFHSYFYSGIHEMKLSDLTAIKQRHDEPVQEYIQRFREMRNKCYSLALTDAQLADLAFQGMIAPIREKFSSQDFDSLSHLAQKVXLHEQRFAQAKKNFKKVNHVCPYIYGSDDDDDDDSEIATAEWVTSKKVIPCQWVKNSGEEERYDFDITKANKISDLLLREKQIQLPAGHTIPSAEELGKKRYCKWHNSGSHSTNDCKVFRQQIXPAIEGGKIKFDDSKRPMKVDGNPFPVNMAHTVGRTTDGGRAKRFQGNSAKXIKKYHKKSDKQXKRHYEEDDGGMRVPFIEDCPXARIVQKFPVDPFNRSNRLKQTRVPVDQRLGPVNQDRNQKDNEDRKTQWCPSGIFTKNQKRRKAKPRQVWRVRNQAPVADEAAADEAKMLAKGKSVVTASVNMVFILPAEFGVKQADVDEVEEESAKLILSPEQAVFEKPEGTENRHLKPLYIIGYVNGKPMSKMMVDGGAAVNLMPYATFKKLGRNAEDLIKTNMVLKDFGGNPSETKGVLNVEMIVGSKTIPTTFFVIDGKGSYSLLLGRDXIHANCCIPSTMHQCLIQWQGDKIEIVPADRSVNVASDDLFFEGVVEGSNVYTKDTVDDLDDKQGQGFMSADDLEEIDIGPEFRTKLIELLKXFKDCFAFVYCEMPGLSQSIVEHRLPIKPGVRPHQQPPRRCKADMLEPVKAEIKRLYDACFIRPCRYAEWVSSIVPVIKKNDLNKATPKDEYPMPVADQLVDAASGHKVLSFMDGNAGYNQIFMAKEDIHKTTFRCPGAIGLFEWVVMTFGLKSAGATYQRAMNYIYHDLIGWLVEVYIDDVVVKSKEIEDHIADLRKVFERTRKYGLKMNPTKCAFGVSSGQFLGFLVHERGIEITQRSVNAIKKIQPPXNKTELQEMIDKINFVXRFISNLFERLEPFTPLLRLKDDQKFTWGVEQQKALDNIKEYLSSPPVLIPPQKGVPFRLYLSAGEKSIGSVLIQELEGKERVVFYLSSRLLDAETRYSPLEKLCLCLYFSCTRLRHYLLSNECTIIYKAGVVKYMLSPPILKGRVGKWIFSLTEFDLRYESLKAVKGQAIADFIVDHRDDSIGSVEIVPWTLFFDGSVCTHGCGIGLVIISPRGACFEFAYTIKPYATNNQAEYEAVLKGLQLFKEVEADAIEIMXGDSLLVISQLAGEYECKNDTLMVYNEKCQELMKEFRLVTLRHVSREQNIEANDLAQGASRYKPMIKDVKVEVAAITADDWRYDVHQYLQNPSQSASRKLRYKALKYTLLDDELYYRTYDGVLLKCLNTDQAKVAIGEVHEGICGTHQSAHKMKWLLRRAGYFWLTMLEDCFKYYKGCQDCQKFGAFQRAPASAMSPIIKPWPFRGWGIDMIGMINPPSSKGHKFILVATDYFTKWVEAIPLKKVDSRDAIQFVQEHIIYRFGIPQTITADQDSIFVSDEFVQFADSMGIKLLNSSPYYAQANGQAEASNKSLIKLIKRKISDYPRQXHARLAEALWSYRMACHGSIQVPPYKLVYGHEAVLPXEVRIGLRRTELQDDLTANEYYNLMADE

SEQ ID NO: 173161 - protein, 96 aa, Oryza sativa
  Clone ID: PAT_MRT4530_71226C.1.pep
HFLHGVLRHGVRGLFHWEHLTPDLMGGVERFRPAPRIGAQWKLSNCALKRVSLYNEGGSEPRFVMIEHLSKGLVCVRWLCECWRHRSLHAVKRCVL

SEQ ID NO: 173162 - protein, 1540 aa, Oryza sativa
  unsure (1)..(1540): unsure at all Xaa locations
  Clone ID: PAT_MRT4530_71227C.1.pep
MDEKPPASPASAGKDGSVKSKIQKLGLSEVDEGDIVTITLDNLTPKQQKDLEAMMQQACNQFLNSFMQTRKGTIVQKYKXSSKDREVQQAPDGAAQPSDKGATVGSQGVQGDGSQGVQGVGSQGIXGDGSQGFQGGNLNQDGNXWADLEKHFHSYFHSGIHQMKLSDLTTFKQRHDEPVHEYIQRFREMRNKCYSLSLTDAQLADLAFQGMIAPIREKFSSQDFDSLSHLAQKVTLHEQRFAEARKNFKKVNHVCPYIYGSDDDDDNDSEIAAADWVRSKKVIPCQWVRSSGKEERYDFXLPRLIRFSICYFERNRFNFLLVIQSHRLKXLSKRRPMKVDGNPFLVNMVHTAGRTADGGRARGFQVNSAKIIKKYQKKYDKQQEMHYEEDDGGFDPHWGCEFFRFCWNEGMRLPSIEDCPGCSNVAEGSSRSYNRGNQLRQARVPVHQRLGPKTKPKQEWRVKNQAPAADEANRLAKGKGVVIASVNMVFTLPAEFGVKQADVDKVEGESAKLILSPEQAVFEKPEGTENRHLKPLYINDYVNGKSMSKMMVDGGAAVNLMPYATFRKLSRNVEDLIKTNMVLKDFGGNPSETKGVLNVELTVGNKTIPTTFFVIDGKGSYNLLLGRDWIHANCCIPSTMHQCLIQRQGDKIKIVPADRSVNVASADLALWEMDGLDCLSGKVWDGDFLKMESPSYYSEASWRVQTFEGVMEGSNVYTKDTVDDLDDKQGQGFMSADDLEEIHIGPGDRPRPTFISKNLSSEFKTKLIELLKEFRDCFAWEYYQMLGLGLLIVEHRLPIKPGVRPHQQPPRRCKADMLEPVKAEIKRLYDAGFIRPCRYAEWVSSIVLVIKKNGKVRVCIDFRDLNKATPKDEYPMPVADQLVDAASGHKILNFMDGNAGYNQIFMAEEDIHKTAFRCPGAIGFFEWVVMTFGLKSAGATYQRAMNYIYHDLIGWLVEVYIDDVVVKSKEIEDHIADLRKIFERTRKYGLKMNPTKXEYEAVLKGLQLLKXEVEANAIEIMGDSLLVISQLVGEYECKNDTLMVYNEKCQELMKEFRLNPSQSASRKLRYKVLKYTLLDDELYYRTIDGVLFKCLSADQAKVAIGEVHEGICGIHQSAHKMKWLLRRAGYFWPTMLEDCFKYYKGCQDCQKFGAIQRAPASAMNPIIKPWSFRGWGIDIISMINPPSSKGHKFILVATDYFTKWVETIPLKKVDSGDAIHFVQEHIIYRYGIPQTITTDQGSIFVSDEFVQFVDSMGIKLLNSSPYYAQANGQAKASNKSLIKLIKRKISDYPRQWHTRLAEALWSYRMACHASIQVPPYKLVYGHKAVLPWEVIIGSRRTELQNDLTADEYYNLMADEGEDLVQSRLRALAKVTKDKERVARHYNKKVVPKTFSEAQEEGEKQQGGEVESREGDTGTDCNIVIGHDTTVRGEEEGNAGAGSEAATDPNVATGGRRGEGDTYASHVAAALLRRRSQLGRRPLCRHRGEKKGEEHGSDEQRSCSWLRPCHCRNKEREGARRRLGRNRMPDLSFPTATVCCF

SEQ ID NO: 173163 - protein, 704 aa, Oryza sativa
  Clone ID: PAT_MRT4530_71228C.1.pep
DFFVHERGIEVTQTSVNAIKKIQPLENKTELQEMIGKINFIRRLRHYLFSNECTIICKADVVKYMLSAPILKGRVGKCIFSLTEFDLRYESPKAVKGQAIADFIVEYRDDSIGSVEVVPWTLFFDGSICTHGCGIGLVIISPRGASFEFAYTIKPYATNNQAEYEAVLKGLQLLKEVEANAIEIMGDSLLVISQLVGEYECKNDTLMVYNEKCQELMKEFRLNPSQSASRKLRYKVLKYTLLDDELYYRTIDGVLFKCLSADQAKVAIGEVHEGICGIHQSAHKMKWLLRRAGYFWPTMLEDCFKYYKGCQDCQKFGAIQRAPASAMNPIIKPWSFRGWGIDIISMINPPSSKGHKFILVATDYFTKWVETIPLKKVDSGDAIHFVQEHIIYRYGIPQTITTDQGSIFVSDEFVQFVDSMGIKLLNSSPYYAQANGQAKASNKSLIKLIKRKISDYPRQWHTRLAEALWSYRMACHASIQVPPYKLVYGHKAVLPWEVIIGSRRTELQNDLTADEYYNLMADEGEDLVQSRLRALAKVTKDKERVARHYNKKVVPKTFSEAQEEGEKQQGGEVESREGDTGTDCNIVIGHDTTVRGEEEGNAGAGSEAATDPDVATGGRRGEGDTYASHVAAALLRRRSQLGRRPLCRHRGEKKGEEHGSDEQRSCSWLRPCHCRNKEREGARRRLGRNRMPDLSFPTATVCCF

SEQ ID NO: 173164 - protein, 246 aa, Oryza sativa
  unsure (1)..(246): unsure at all Xaa locations
  Clone ID: PAT_MRT4530_71229C.1.pep
CLYFSCTRLRHYLLSNECTVICKADVVKCMLSAPILKGRVGKWIFSLTVIDLRXESPKAVKGKAIADFIVEHHDDSIGSVEVVPWIXFFDGSVCTHGCGIGLIIISPRGASFEFAYTIKPYATNNQAEYEAVLKGLQLLKDVEADAIEIMGDSWLVISQLAGEYECKNDTLMVYNEKCRELMKEFQLVTLKHVSRXQNIEANDLAQGASGYKPMIKDIKVKVAALIADDWRYDVYQYLQNQSQSAS

SEQ ID NO: 173165 - protein, 78 aa, Oryza sativa
  Clone ID: PAT_MRT4530_7122C.1.pep
LSIRKLYWLFCSYPWNFNMFYGSSLNYITLVRLNPCFLMYYWLVAVLNTNWITLQCALFLLLVGFNIKKFLTSIFLPY

SEQ ID NO: 173166 - protein, 117 aa, Oryza sativa
  unsure (1)..(117): unsure at all Xaa locations
  Clone ID: PAT_MRT4530_71230C.1.pep
MAEKPPASPSSASKDDSSKSKTQKPGLSEVNESNIMPITPDKLKPEQQKDLEAMMQQAXNQFLNSFMETXVQKYKVKVIVDVPATGSSKDGEVQQVADGAAQSSDKGAADGFQGVQG

SEQ ID NO: 173167 - protein, 207 aa, Oryza sativa
  unsure (1)..(207): unsure at all Xaa locations
  Clone ID: PAT_MRT4530_71231C.1.pep
NVEFSPYYAQANGQAEASNKSLIKLIKREISDYPRQWHTRLAEALWSYWMACHGSIQVPPYKLVYGHEVVLPXEVRIGSRRTELQNDLTADEYYNLMADEREDLVQSRFRALAKVAKDKERVARHYNKKVVAKSFSEVELVWKLILPIGTRDSKFGKXSPNWEGPFQIYKVVSKGGYMLQGLDGEVYGRALNGKYLKKYYPSVWVNA

SEQ ID NO: 173168 - protein, 61 aa, Oryza sativa
  Clone ID: PAT_MRT4530_71232C.1.pep
SFFITVLVMIKLASCNLVEKRRTWLFFLVSLEVHSIFMSLCHLTSSRGLYANCLYLQLTLH

SEQ ID NO: 173169 - protein, 141 aa, Oryza sativa
  unsure (1)..(141): unsure at all Xaa locations
  Clone ID: PAT_MRT4530_71233C.1.pep
RGGKSRSESGGQTKKPKKRKVFSPFVAAGDGGGSGLGGPKIHSELRPIPFEDPFGDIYGEGVWRKFSRRASILNRNVVALASFNGEKRFFACTGFFIEWSGSKXMNFDISEALEILVNENKXIDENLRIKVXFLNNQCKEG

SEQ ID NO: 173170 - protein, 89 aa, Oryza sativa
  Clone ID: PAT_MRT4530_71234C.1.pep
RGKYFIVQAYINTRINGFLQFVMPSLLQNMHTLVVQKITMQRALVTKIFPSYATGDSHKSLCALPGSTSVRHPCPSCWPPAMSVDDAVS

SEQ ID NO: 173171 - protein, 57 aa, Oryza sativa
  Clone ID: PAT_MRT4530_71235C.1.pep
SDPQAASSPARSTPAAMSSSASPSATPSASTWKNTFKSWPSLEKTRPEKSWITWFKS

SEQ ID NO: 173172 - protein, 69 aa, Oryza sativa
  Clone ID: PAT_MRT4530_71236C.1.pep
MQCYVGNLHSFYAISIMHIEAEAVMFALPLILRKRVIFVMFDIQCYLLVLSLVALETFIQLDRLSSVLI

SEQ ID NO: 173173 - protein, 331 aa, Oryza sativa
  unsure (1)..(331): unsure at all Xaa locations
  Clone ID: PAT_MRT4530_71237C.1.pep
MRGTFSDWVKKVIMGSKVDVXVNDQVGPYFKTHKGLRQGDPLSPLLFNLAAEVLTLLVXRAEDNLLIGVLGDNDNNKMVILQYADDTIFLLFDNXDMQKNLKYILCLFEQLSGLKINFNKSEVFCIGETADKAEVFSQIFTCSVGSGGLGVLDLDIMNKALLGKWIWNLENKEGWWQEILRGKYLKNKTLCRIEIKQGNSHFWHGLMEVKDXFFKFCSKKXGNGKRTLFWKDSWIGGNPLNIQFPNLYNITLTKHVTIAKVKMKGLQCIKFRRDLDGDKMRDWVRIKNSLESLILXDDSEDKICWNLTRDGIFSVKSFYKALKMHQKLEAN

SEQ ID NO: 173174 - protein, 55 aa, Oryza sativa
  Clone ID: PAT_MRT4530_71238C.1.pep
LAAVDPMLLSWHCHCRENATATAVVVNALPKACHRRPRGGRRRIRSPHGCRETAT

SEQ ID NO: 173175 - protein, 74 aa, Oryza sativa
  unsure (1)..(74): unsure at all Xaa locations
  Clone ID: PAT_MRT4530_71239C.1.pep
PVRSYXFYAHLSVIAVLSLFRPKGTCQRVSWCLKGTLVFYILSLFLMSFPILLFSIYCPIGLNQLIDTQRFVVE

SEQ ID NO: 173176 - protein, 270 aa, Oryza sativa
  unsure (1)..(270): unsure at all Xaa locations
  Clone ID: PAT_MRT4530_7123C.1.pep
VRNSPVDPRVRTSQLPALPLXLMCLLIFVGTNGETYFNTASLVTCIQNFPKSRGPTVGILKGFAGLSSAILTQLFAVLHTPDHATLVFMVAVGPSLVAIGLMFVIRPVGGHRQVRPSDNNSFMFIYTICLLLASYLVGVMLVQDFVQLSDNMLVFITAVLFILLILPIAIPVTLTFSSKTEHPMEEALLAEPSKGQASTSQEKEPDVFLSEVEDEKPKEIDSLPPSERRKRIAELQARLVQAAAXEGGVRIRRRPHRGENFTLMQALVKA

SEQ ID NO: 173177 - protein, 725 aa, Oryza sativa
  unsure (1)..(725): unsure at all Xaa locations
  Clone ID: PAT_MRT4530_71240C.1.pep
MGIVGNVTVRKSSKKLMPNEGEIQVLNDKMVNFGKKLMADQVEEWKGYYINYKLMKKMLKQYVQQTQLGGKDREQVLKEFSRILDEQIERIVLFLLQQQGHLANRIEELGEQRAALLEQHDISQVFQLREAYREVGRDLIKLLRFVDMNATGIRKILKKFDKRFGYRFTDYYVTTRANHPYSQLQQVFKQVGIVAVVGALSRNLAYLQDHEGSVLSIYDHPSVTLKDPIIDQVNHAVQKLTHATSFLQFLGQHALIIQEDVQSGSEDLVDDQSYHFMSLILNLVNTFLYMVNTYIIVPTADDYAVSLGAAATVCGVIIGSMAVAQVFSSVYFSAWSNRSYFRPLVFSSIMLFAGNLLYALAYDLNSLTVLLIGRLLCGLGSARAVNRRYISDCVPLKIRLQASAGFVSASALGMACGPALAGLLQTRFKIYSLTFDQSTLPGWVMCIAWLVYLLWLWISFKEPGHFAKSSDTAQPAESGHQVNANLEEGLAQPLLTGSEEGQDQNAEDNDDNEEESKNSHGPATSISSAYKLLTPSVKVQLLIYFMLKYAMEILLSESSVITTYYFNWSTSAVAIFLAILGCTVLPVNAIVGSYITNLFEDRQILVASEIMVLIGIIMSFRYTPHYSVAXDVLSALITFVFAEVLEGVNLSLLSRVMSSRLARGTYNGGLLSTEAGTLARVVADATITAAGYLGPDLLLNITLLPPLVICIASLVATFCTYNTLY

SEQ ID NO: 173178 - protein, 114 aa, Oryza sativa
  unsure (1)..(114): unsure at all Xaa locations
  Clone ID: PAT_MRT4530_71241C.1.pep
MFATLPASPSPHLRLAXRXRALSASAPSIXXVXAXXHRFLAPPRPDPXXPXXCXXGXAMXXVXMVVXFLKGXXWLHPXPELASFLXXNKXVYLGMYLLPSVTXLMLXXFLYSTT

SEQ ID NO: 173179 - protein, 38 aa, Oryza sativa
  Clone ID: PAT_MRT4530_71242C.1.pep
KGLIKPSGIAAVAPTWAGPLGMVFGRGSDMETRYRLSV

SEQ ID NO: 173180 - protein, 64 aa, Oryza sativa
  Clone ID: PAT_MRT4530_71243C.1.pep
GELHDGHHIRDHLGLLYYGHGATAGLENAEEGGEGNDDKHERDWPRSNFHKHNSTQGHSIIRLS

SEQ ID NO: 173181 - protein, 1085 aa, Oryza sativa
  Clone ID: PAT_MRT4530_71244C.1.pep
MRCLRFLRRGLLSMLPTNKRAAGTDDDRPTDPKRPKVAQNGSTNGVVVPEIDEDLHSRQLAVYGRETMRRLFASHVLVSGLNGLGAEIGSSFYPLTLFVLCFFLFQIAFNCLLITTKNLALAGVKSVTLHDVKNVEMWDLSANFFLSENDIGKNRAAACVSKLQELNNAVLVSALTEELTTDHLSKFQAVVFTDIGLDKAYEFDDYCHSHCPPISFIKAEVCGLFGTVFCDFGPEFTVLDVDGEDPHTGIIASISNDNPALVSCVDDERLEFQDGDFVVFSEVHGMAELNDGKPRKVKNARPFSFCIEEDTTKYDMYIKGGIVTQIKEPKILRFKSLRDAMRDPGDFLLSDFSKFERSPVLHLAFQALDKFKKEYGRYPAPGCEQDAQSFLKCAADINEALTDHKLDTIDEKLFRHFASGSRAVLNPMAAMFGGIVGQEVVKACSGKFHPLYQFFYFDSVESLPTYPLDSEDIKPSNSRYDAQISVFGSKLQKKLEEANTFVVGSGALGCEFLKNLALMGVSCSPKGKLTITDDDVIEKSNLSRQFLFRDWNIRQAKSTVAAAAASAINPNLCIDALQNRACPDTENVFHDTFWEGLDVVINALDNVNARMYMDMRCLYFQKALLESGTLGAKCNTQMVIPHLTENYGASRDPPEKQAPMCTVHSFPHNIDHCLTWARSEFEGLLEKTPGEVNSFLSNPAQYAAAMRKAGDAQARELLERVSECLGKERCSLFEDCIRWARLKFEDYFSNRVKQLTFTFPEDAATSTGAPFWSAPKRFPRPLQFSVSDPSHIHFIMSASILRAESFGIAIPDWAKNTSKLADAVSEVAVPQFEPKKGVSIVTDEKATSLSSASVDDVSVIDDLLAKLEECAKRLPPGFQMKPIQFEKDDDTNFHMDLISGFANMRARNYSIPEVDKLKAKFIAGRIIPAIATSTAMATGLVCLELYKVIAGEHPIEDYRNTFANLALPLFSMAEPVPPKVMKHQDMSWTVWDRWSIKGNLTVAELLQWFSDKGLTAYSISCGTSLLYNNMFARHKERLNKKVVDVAREVAKVDVPEYRKHLDLVAACEDDDGNDIDIPLVSVYFR

SEQ ID NO: 173182 - protein, 149 aa, Oryza sativa
  unsure (1)..(149): unsure at all Xaa locations
  Clone ID: PAT_MRT4530_71245C.1.pep
PVFVLERGGVPRRRGSVVVGFKARHLRARPDELFGKLLSSILPLPKHYDFYMCCERTPASRDEETTRASWXSFSIRSLADAETRQEHALTPGLLKFQFFLAIVVNKFAHCCLFFPYTLPGERKKPTTQLFLHILITEILFQKKKKKKKK

SEQ ID NO: 173183 - protein, 82 aa, Oryza sativa
  Clone ID: PAT_MRT4530_71246C.1.pep
RFMEEDINVLGSDLRLAPFGSGRRVCPGRMMGLSTAYLWFGRMLQEYKWAAAQPVKLTECLRLSMEMKKPLVCHAVPRSKTG

SEQ ID NO: 173184 - protein, 81 aa, Oryza sativa
  unsure (1)..(81): unsure at all Xaa locations
  Clone ID: PAT_MRT4530_71247C.1.pep
NTKQTKVRELQKQQGAARSYSNHNLSFPVSSAEITFFFTPTKTVIRGLLFAIKRXKSPDTIILSSVIAACTIFXIIYWLKK

SEQ ID NO: 173185 - protein, 56 aa, Oryza sativa
  Clone ID: PAT_MRT4530_71248C.1.pep
VIATAALLSFVEHCRLSGVCLTRCPHHRCTVFELLKQKVADQWFTEGGFQIDAQKS

SEQ ID NO: 173186 - protein, 77 aa, Oryza sativa
  unsure (1)..(77): unsure at all Xaa locations
  Clone ID: PAT_MRT4530_71249C.1.pep
RIPTTRKSIIASGRKGSSQAGRPSACKPTTVKIXDLRRRGGRPSAKIIFAGGHWLVRSACENRNRPXCKKENFRLRR

SEQ ID NO: 173187 - protein, 143 aa, Oryza sativa
  unsure (1)..(143): unsure at all Xaa locations
  Clone ID: PAT_MRT4530_7124C.1.pep
RPAPSPSPSLSPSLSFPLPQAGGGDLSRAIVFPVASGGXRHHRPSPPTTLSALPLPATPXPPPAPDPAASATLRRLAAHRQAATSHGHPSKADPNSLALCRSLGSPMPEKKRWSPELKKKRTNREAHPMIRNLQDLRLYFLLT

SEQ ID NO: 173188 - protein, 120 aa, Oryza sativa
  Clone ID: PAT_MRT4530_71250C.1.pep
MEPMSVDGGGGCGGLDTQIEQLMQCRPLAEQEVKALCEKAKEILMEESNVQPVKSPVTICGDIHGQFHDLVELFRIGGKCPDTNYLFMGDYVDRGYYSVETGTLLVALKVRHPHRITMLR

SEQ ID NO: 173189 - protein, 322 aa, Oryza sativa
  Clone ID: PAT_MRT4530_71251C.1.pep
MEPMSVDGGGGCGGLDTQIEQLMQCRPLAEQEVKALCEKAKEILMEESNVQIAHSMCTYNSAKTFSKYLHVLFHGNLPVKSPVTICGDIHGQFHDLVELFRIGGKCPDTNYLFMGDYVDRGYYSVETVTLLVALKITQVYGFYDECLRKYGNANVWKIFTDLFDYFPLTALVESEIFCLHGGLSPSIENLDSVRSLDRVQEVPHEGPMCDLLWSDPDDRCGWGISPRGAGYTFGQDISEQFNHTNNLKLVARAHQLVMEGYNWAHEQKVVTIFSAPNYCYRCGNMASILEVDDCRNHTFIQFEPAPRRGEPDVTRRTPDYFL

SEQ ID NO: 173190 - protein, 167 aa, Oryza sativa
  Clone ID: PAT_MRT4530_71252C.1.pep
MELLPPPSSPKVRETGGGRSGDGRSSGGACSRLSSSNRRRRRPLRPGPVGRGREEQRTPPPSRRVCACRGGDGESKDAAAIVPRPDLAGRGQDMNKNPRPKKDVPSSLCLYLAHLRHASAFSSSLTAVDGFDDGVAHILRRQHTAWLLSTSASTPQLYRPPLYPSPS

SEQ ID NO: 173191 - protein, 572 aa, Oryza sativa
  Clone ID: PAT_MRT4530_71253C.1.pep
MSQSSPFFSVARAHAGAGGRAAAAALLLRHPVAQLPPRIHGLRYYPSAIVSPAKTLNSHLSLPHATISSFANADNGSSGQADATESEEEQNGESELSEMAKAFHISPRMAMSISVVIAFAALTVPLAMQSVVFHGTNKMKALAYLTLLSGFYMAWNIGANDVANAMGTSVGSGALTLRQAVLTAAVLEFSGAFLMGTHVTSTMQKGILVASVFQGKDSLLFAGLLSSLAAAGTWLQVASSYGWPVSTTHCIVGAMVGFGIVFGGVNAVFWSSLARVSSSWVISPLMGAAVSFIVYKGIRRFVYSAPNPGQAAAAAAPIAVFTGVTAISFAAFPLSKTFSIAILQALACGAIGAVIVNRVIQKQLGDLLSSEAEKIASADKANAQQVGFLSDIAGPTGAQLQIVYGVFGYMQVLSACFMSFAHGGNDVSNAIGPLAAALSILQGVASSAEIVIPTEVLAWGGFGIVAGLTMWGYRVIATIGKKITELTPTRGFAAEFAAASVVLFASKLGLPISATHTLVGAVMGVGFARGLNRVRAETVREIVASWLVTIPVGAVLSIFYTLLFTKILAYFM

SEQ ID NO: 173192 - protein, 420 aa, Oryza sativa
  Clone ID: PAT_MRT4530_71254C.1.pep
MENQPHAHLLPQRNDTQVERATAFGKEAIGITGSAIVAGVSGYKDIGKGAATTLLFKAGGFSLLVTFVSAVVLMHFQMHQPPAAPRSRCADLSSAVLVSLTGVLLVATNGMFVALMDRDNDTMLVILVLPVVLVLGMLAGADLPPTEGAVTAAAVAQDEAYEEAMKSSAELATFGATAAFAIEGALILGYLKYPSSLDGCGRSPPAQVDLAVASFASTVSVLAMAATALPVRTLFPSARARAVAVAGHLNRAMLAALVSMATILAVEFLQWWFMLSLLPEAIAVALNVAIMAWTTEGGANVVDGSVEAAAAAASAGARERRAKGFRAVATTSFTLMAGTYAVYLGQKKYDVYLRAAMLVMLTAVVSSLRQMLRPFGRSRARGWWAVAAGAVSLVFPGLALVIAIPLFVKIFVHFYFGHVN

SEQ ID NO: 173193 - protein, 77 aa, Oryza sativa
  Clone ID: PAT_MRT4530_71255C.1.pep
STFAPFKICGFNFPGRKKSFPIGFFQGGMIFFFPSFEGSQKASFLSRVKPNPPLFYFLKIGDPKVGKPFFFFRLFAP

SEQ ID NO: 173194 - protein, 72 aa, Oryza sativa
  Clone ID: PAT_MRT4530_71256C.1.pep
MARSRKGFKNMIIYIQGTQILILHSVSLPRTHYKITRTNPTKSFRQFVLTFFTEDDDRIDDFTCFRREEEIQ

SEQ ID NO: 173195 - protein, 99 aa, Oryza sativa
  unsure (1)..(99): unsure at all Xaa locations
  Clone ID: PAT_MRT4530_71257C.1.pep
MPCWRRPRARRAARPWCPRVRRAVAAASSGGGGGEAVTAVSAAAVGAPASAARDTVRRHTISVFVGDESGMINRIAGVFXRRGYNIEXLAVGLTRTKAC

SEQ ID NO: 173196 - protein, 124 aa, Oryza sativa
  Clone ID: PAT_MRT4530_71258C.1.pep
VPVRTFKKYDDLAYPQSKPMRLHATLWDGSYWATRHGDVKIDWSGAPFVVSYRGYSANACVNNNPAGGWSSSSCPEGTSAWIHRELDGAELGTVAWAERNYMSYNYCADGWRFPQGFPAECYRK

SEQ ID NO: 173197 - protein, 653 aa, Oryza sativa
  Clone ID: PAT_MRT4530_71259C.1.pep
MSSPSDIVKDIVIPAKVEDLSKEHKAEMEQKMQQLKEAYLNSFSVTQQGKVIQKYKFQMLEGEGSSGQPIENPSIEPQYCKVDPNVLQYQQIPGFNFNQFQPPSPLQYRQDTPPFVQAPAQPMYNQYEQQNQGGVQQQPLADIIADVVREQFGIKPKDNGIMYRHPYPEYFDRVPLPSRYKTPDFSKFSGQDNVTTYEHISRFLAQSGEASAIEALRVSGAQEMKLSYLTAIRQKSDESVPYYIQRFRDVMNRYFSLNLTDSQKVSAHEQCFQEAKKFKKVNYVYNYVSDSEEEDSEISLAEWPKIKKKTMCRWVKDINKEEKYDFDINKADKIFDLLLQEKQIQLPVGHVLPSAEELKKRKFCKWHNIVSHHTNECKVFSRRLINKYQKRHDIKFRGIFRIVVITKMIYIIKMTKMKNIIKVLLERWNEVAINQQLPWVWWIEFLQSVFPGIFTRSQKRRVQRLRNREQIQEVNEKIDHRLKRTRKEWRVESKIVIANEVENDKERNRISTSAEGKAIASTSINMPLYIKGYVNGKPMSKMLVDGGVDVNLMPYTTFRKFGRFERDLIKTNIVLKIFGGNSSETMGVLNVELIVGSKTIPTTFFVIDGKGSNSLLLGRDWIHANCCIPSPMHQCLIQWQGDQVEIVQADKSV

SEQ ID NO: 173198 - protein, 85 aa, Oryza sativa
  Clone ID: PAT_MRT4530_7125C.1.pep
AITKTPPSSGLFPVSERARARARAFAYYILSPPTFSRRRRRRWRLMESDRMPLQAGSIELAATIGGFLSPREGVKSVSLCRMVWG

SEQ ID NO: 173199 - protein, 66 aa, Oryza sativa
  Clone ID: PAT_MRT4530_71260C.1.pep
VSCATPFYYCRIHVSTVGAPGRGCVELPVEKCDGINFRRNPEINLINFDGSNLNLQSGLPFQFNLY

SEQ ID NO: 173200 - protein, 490 aa, Oryza sativa
  Clone ID: PAT_MRT4530_71261C.1.pep
MAKHLALSVAAAVAVSWLAASSAAAAGFYEKFDVVGAGDHVRVVSDDGKTQQVALTLDRSSGSGFTSKDTYLFGEFSVQMKLVGGNSAGTVTSFYLSSGEGDGHDEIDIEFMGNLSGNPYVMNTNVWANGDGKKEHQFYLWFDPTADFHTYKIIWNPQNIIFQVDDVPVRTFKKYDDLAYPQSKPMRLHATLWDGSYWATRHGDVKIDWSGAPFVVSYRGYSTNACVNNNPAGGWSSSWCPEGTSAWIHRELDGAELGTVAWAERNYMSYNYCADGWRFPQGFPAECYRKLQCREADKRVTTVCFAVLGYQISVVHAEFIEHNSSASAGGNKVFGKRFARPLSIRPQRLVFLFARVLRAVINVRNHEYFLLSNRSSGTLVRSNPSFSWDTNPRCVHLFLPNGAVVLKLGKGRATTPQRGAYYRCRTPPSAASSPCPVEPPPHAARRTPPSLARAAPPLLRVRDCFIQVRSRVLMVQCILDLDVVILDTAK

SEQ ID NO: 173201 - protein, 124 aa, Oryza sativa
  Clone ID: PAT_MRT4530_71262C.1.pep
FFFFFFFFFFFFFFFFFFFCNRGETRRNAGDVMLMIQQNAGYAMLLYFKTKIGSYKMGGRNKQFISNAQPSSSSFFLPYTPLTPDGGNNNNKVLEGEQLDQFFINNKSSRNLLYMKRRQAAKQD

SEQ ID NO: 173202 - protein, 119 aa, Oryza sativa
  unsure (1)..(119): unsure at all Xaa locations
  Clone ID: PAT_MRT4530_71263C.1.pep
TKPGXRXXGXXXRXGLXGSPPASXXLFXPRKLKSLVFLPGPGIXEFVPXFLFLYIXILTVMGVSXSSSKXCPTXRIQGLXXSFXXLXFRALYCTARXLXXGHSXXLLLXXXFLAQEXVL

SEQ ID NO: 173203 - protein, 208 aa, Oryza sativa
  Clone ID: PAT_MRT4530_71264C.1.pep
MAARETSRHASLCLWLALVAATLSLAQAVESEAELTKVTTKVFFDITINGKPAGRIVMGLFGNTVPKTAENFRAICTGEKGLGKSGKPLSYKGTPFHRIIPGFMIQGGDTVSGNGTGCDSIYGGMFPDENFKINHSAPGLLSMANYAKDTNGSQFFITTVKLTRLDGKHVVFGKVLSGMDVVYKIEAEGSQSGTPRSKVLISDSGELK

SEQ ID NO: 173204 - protein, 185 aa, Oryza sativa
  Clone ID: PAT_MRT4530_71265C.1.pep
MAATSSTSTALFSLAIPSSRVVSTRGHRKASSGSGPFRAARIRCSNAASPNASAGAASAEEAAPPPKPQIDLEFVGPKADADGSFPVDRAAAGSGEKLLRDVMVENKIELYAAYGKVMNCGGGGSCGTCIVEIVDGKELLNERTNTENRYLKKKPESWRLACQTIVGNKENSGKVVVQRLPQWKK

SEQ ID NO: 173205 - protein, 68 aa, Oryza sativa
  unsure (1)..(68): unsure at all Xaa locations
  Clone ID: PAT_MRT4530_71266C.1.pep
SSCSPNQPTPSTDGTHGRDAAVVLEATMICIDNSERMRNGDYSPLXFQAQADAVNLICGAETYSNPEN

SEQ ID NO: 173206 - protein, 201 aa, Oryza sativa
  unsure (1)..(201): unsure at all Xaa locations
  Clone ID: PAT_MRT4530_71267C.1.pep
HPPSQCTPHKPKPPPGRTPSRRRXQRNPLARPGKRVEALVSHPGLGSAXAAATSSRRHHHLSNAPPPPLILAARRHPPRSGRTARIWTERRCQHHQTPPPLLSPATSCRPTRSRRHGSGRPXATTDADADVAAAWPSAWATRRRHCLRAALAPPRVPAQIRPPGSRLAGAGSRRRRWRRAPVVRSRGAPTAAPGRGRRGAS

SEQ ID NO: 173207 - protein, 330 aa, Oryza sativa
  Clone ID: PAT_MRT4530_71268C.1.pep
MAAERVVVDECRGVLFVYSDGAVERRAAPGFATPVRDDGSVEWKDAVFDAARGLGVRLYRPRERGGGRLPVFFYYHGGGFCIGSRTWPNCQNYCLRLAAELGAVVVAPDYRLAPEHRLPAAFEDAENALLWLASQARPGGDTWVAEAADFGRVFVSGDSAGGTIAHHLAVRFGSASGRAELAPARVAGYVQLMPFFGGVERTPSEAACPDDAFLNRDLNDRYWRLSLPAGGATADHPFSNPFGPASPDLAAAEFAPTLVVVGGRDLLRDRALDYAARLAAMGKPVEALEFEGQQHGFFTIDPWSAASGDLMHAVKLFVDTDGGGGARLDG

SEQ ID NO: 173208 - protein, 147 aa, Oryza sativa
  Clone ID: PAT_MRT4530_71269C.1.pep
MSEHLRIFNIEEGDSIAEKEGKLKQGQRVEDLTEEDRHVLKQLNKRKLHWLDGVHAFFTAVVFLYVTFSDVGIQKCLFPITGHDTMELLKNMPLGMSFLSSFVFMIFPTTSHDIGFSDRTLVEKTFVVPVRNTPLVPVVQPGLRIRD

SEQ ID NO: 173209 - protein, 113 aa, Oryza sativa
  Clone ID: PAT_MRT4530_7126C.1.pep
KWDEKTRASPKGGGKRKEPPPGNSGKKGGEQTPKRKKHYDPDGKRKGPCRTWHKKGVKREKKNLKKATGPLGKGECTLGQKGHRGGSHTRLGIGPEELEGGLFPKGPGGGNNK

SEQ ID NO: 173210 - protein, 73 aa, Oryza sativa
  Clone ID: PAT_MRT4530_71270C.1.pep
FQWPSITIFTFYSWRSIQSPLYTPAARINHQQCTIYSEVTHFITRITAFSSAACSIISYTRHPSISASAACRH

SEQ ID NO: 173211 - protein, 1923 aa, Oryza sativa
  Clone ID: PAT_MRT4530_71271C.1.pep
MAEQAKAHDLSPSMSGDDGEPNPRRRARTPPPPPRQSPRREKALERAEGSATSISTGGGEGRRDGERRLLVYGDGSTPQGALQAAGALLRHPPVAHDPESPAQRWLDDVAKLVMTARQRLDAGGRSSATKASGAATTGSASSRRRARRAAAVVRHSAATPSSTPPTREDLRGGPDARISIERRRNGRRAPHATEGASLSGVSPHHGRGDQPSVPPVGGVGCRAFVASLRNVRWPPRFRPTIAEKYDGSVNPAEFLQVYTTGIEAAGGDDRVMANFFPMALKGQARGWLMNLPPASVHSWEDLCQQFTMNFQGIYPRPGEEADLHAVQRRDDESLRSYIQRFCQVRNTIPCIPAHAVIYAFRGGVRHNHMLEKIASKEPQTTAELFQLADRVARKEEAWTWNPSGSGVAASAAPGSAAQTGRRDRRRKKRSAHTDDEGHVLAVEGASRATRKGRPAGDKKKEAGAPSRERPTDKWCIVHNTSLHDLADCRAVKSLAERTRKWEEERRQERREGKSPAVPSGNRRSEAKQKAPAEDIDDGDDDLGFQEPGATIATVDGGACAHVSRRSLKAMKRELLAAAPTHEATRRARWSEVALTFDQTDHPPCVAREGQIAMVVSPTVCNVKLGRVLIDGGAALNILSPAAFDAIKAPGMVLRPSQPIIGVTPGHTWPLGHIDLPVTFGGPANFRTERVNFDVADLSLPYNAVLGRPALVKFMAAVHYAYLQMKMPGPDGPISVHGDLKVALACMEQRADRLAVASKPEGGDERLGTSAPATPRQRIVTCDEVPAGFIREVIHPEWLANPVVVPKANGKLRMCIDYTDLNKACPKDPYPLPRIDQIVDSTAGCDLLCFLDAYSGYHQIRMAREDEEKTAFITPIGTYCYTTMPFGLKNAGPTFQRTTRISLGSQIGRNVEAYVDDLVVKTRNQETLLSDLAETFESLRSARIKLNPDKCVFGVPAGKLLGFLVSARGIEANPEKIRAIERMRPPSKLRDTEEAEHALAQLKAYVSSPPVLVAPEPDEPLLLYLAATPQVVSAALVVEHDEDNPHFAHPHPVLAWPGREQGGEAPEPNGGPRPPTTGVGPLPACQTVPGAPEPQDGLRATGGRPHLSPSDPEANPVPARLGRVQGEETPEPNGGLRPLTTGVGPLPACPTTPGASDPQDGPEATVGRPPLSSSDPEVVGTEDERASRGRLDEERPRDVAPSEGDRPRRKVQRPIYFVSEALRDAKTRYPQAQKMLYAILMASRKLRHYFQAHRVTVVTSYPLGQILHNREGTGRVVKWAIELSEFDLHFEPRHAIKSQALADFVAEWTPAPEPVSVPEASSGPSQLPHTAHWVMQFDGSLSLQGAGAGVTLTSPSGDVLRYLVRLDFRATNNMAEYEGLLAGLRVAAGLGIRRLLVLGDSQLVVNQVCKEYRSSDPQMDAYVRQVRRMEHHFDGIELRHVPRRDNTVADELSRLASSRAQTPPGAFEERLAQPSARPDPLGETDAPDRPPMPVGVQASGPEGSAPSSLRLIAWIAEIQAYLTDKTLPEDREGSERVRRISKRYVLVEGTLYRRAANGILLKCIPREQGVELLADIHEGECGAHSASRTLVGKAFRQGFYWPTALNDAVDLVRRCRACQFHAKQIHQPAQALQIIPLSWPFAVWGLDILGPFRRAPGGFEYLYVAIDKFTKWPEAYPVVKIDKHSALKFIKGITARFGVPNRIITDNGTQFTSELFGDYCEDMGIKLCFASPAHPRSNGQVERANAEILRGLKTKTFNILKKHGDSWIEELPAVLWANRTTPSRATGETPFFLVYGAEAVLPSELTLRSPRATMYCEADQDQLRRDDLDYLEERRRRAALRAARYQQSLRRYHQRHVRARSLCVDDLILRRVQTRAGLSKLSPMWEGPYRVIGVPRPGSVRLATSDGAELPNPWNIEHLRRFYP

SEQ ID NO: 173212 - protein, 100 aa, Oryza sativa
  unsure (1)..(100): unsure at all Xaa locations
  Clone ID: PAT_MRT4530_71272C.1.pep
RYXDVFGKATLGCFYSCRLCGTCCRLCXPPKSPEPAGSCSSYLEHRFGFWPFTFASLANRWTVVFAPDFFFFKXKKTRVNRQMFKRISIFSSFGCKAPPP

SEQ ID NO: 173213 - protein, 1807 aa, Oryza sativa
  unsure (1)..(1807): unsure at all Xaa locations
  Clone ID: PAT_MRT4530_71273C.1.pep
MAEQAKAHDLSPSMSGDDGELNPRRRARTPPPPPRQSPRREKALERAEGSATSTSTGGGEGRRDGERRLLVYGDGSTPQGALQAAGALLRHPPVAHDPESPAQRWLDDVAKLVMTARQRLDADGGRGERQPLFAIRPPLLRQRLXPGKICVGDRMPASVSSAGVMADVLPTQRRAPPRPECHLTTDAGISPPCPXVGGVGCRAFVASLRNVRWPPRFRPTIAEKYDGSVNPAEFLQVYTTGIEAAGGDDRVMANFFPMALKGQARGWLMNLPPASVHSWEDLCQQFTMNFQGTYPRPGEEADLHAVQRRDDESLHSYIQRFCQVRNTIPCIPAHTVIYAFRGGVRHNRMLEKIASKEPQTTAELFQLADRVARKEEAWTWNPSGSGVAASAAPGSAAQTGRRDRRRKKRSAHTDDEGHVLAVEDASRATRKGRPAGDKKKEAGAPSRERPTDKWCIVHNTSLHDLADCRAVKSLAERTRKWEEERRQERREGKSPAVPSSNRRSEAKQKAPAEDIDDGDDDLGFQEPGATIATVDGGECAHVSRRSLKAMKRELLAAAPTHEATRRARWSEVALTFDQTDHPPCVARGGQIAMVVSPTVCNVKLGRVLIDGGAALNILSPAAFDAIKAPGMVLRPSQPIIGVTPGHTWPLGHIDLPVTFGGPANFRTEQVNFDVADLSLPYNAVLGRPALVKFMAAVHYAYLQMKMPGPDGPISVHGDLKVALACMEQRADRLAVASKPEGGDERLGTSAPAAPRQRIVTCDEVPEDALVSFLRANADVFAWRPADMPGVPREVIEHRLAVRPGVRPVRQKVRRQAPERQAFIREEVARLLEAGFIREVIHPEWLANPVVVPKANGKLRMCIDYTDLNKACPKDPYPLPRIDQIVDSTAGCDLLCFLDAYSGYQQIRMAREDEEKTAFITPIGTYCYTTMPFGLKNAGPTFQRTTRISLGSQIGRNVEAYVDDLVVKTRNQETLLSDLAETFESLRSARIKLNPDKCVFGVPAGKLLGFLVSARGIEANPEKIRAIERMRPPASLGMCNASPMVPGAPEPQDGLRATAGRPHLSPSDPEANPVPARLGREQGEETPEPNGGLRPLTTGVGPLPACPTTPGASDPQDGPGATVGRPPLSSSDPEVVGTEDERASRGRLDEERPRDVAPSEGDRPHRKVQRPVYFVSEALRDAKTRYPQAQKMLYAILMASRKLRHYFQAHRVMVVTSYPLGQILHNREGTRRVVKWAIELSEFDLHFEPRHAIKSQALADFVAEWTPAPEPVSVPEASSGPSQLPHTAHWVMQFDGSLSLQGASAGVTLTSPSGDVLRYLVRLDFRATNNMAEYEGLLAGLRVAAGLGICRLLVLGDSQLVVNQVWETDAPDRPPMPVGVQASGPEGSAPSSLRLIAWIAEIQAYLTDKTLPEDREGSERVRRISKRYVLVEGTLYRRAANGILLKCIPREQGVELLADIHEGECGAHSASRTLVGKAFRQGFYWPTALNDAVDLVRRCRACQFHAKQIHQPAQALQIIPLSWPFAVWGLDILGPFRRAPGGFEYLYVAIDKFTKWPEAYPVVKIDKHSALKFIKGITARFGVPNRIITDNGTQFTSELFGDYCEDMGIKLCFASPAHPRSNGQVERANAEILRGLKTKTFNILKKHGDSWIEELPAVLWASRTTPSRATGETPFFLVYGAEAVLPSELTLRSPRATMYCEADQDQLRRDDLDYLEERRRRAALRAARYQQSLRRYHQRHVRARSLCVDDLVLRRVQTRAGLSKLSPMWEGPYRVIGVPRPGSVRLATSDGAELPNPWNIEHLRRFYP

SEQ ID NO: 173214 - protein, 1396 aa, Oryza sativa
  unsure (1)..(1396): unsure at all Xaa locations
  Clone ID: PAT_MRT4530_71274C.1.pep
MAEQAKAHDLSPSMSGDDGELNPRRRARTPPPPPRQSPRREKALERAEGSATSTSTGGGEGRRDGERRLLVYGDGSTPQGALQAAGALLRHPPVAHDPESPAQRWLDDVAKLVMTARQRLDAGGRSSATKASGAATTGSASSRRRARRAAAAVRHSAATPSSTPLTREDLRGGPDARISIERRRNGRRAPHATEGASSSGVSPHHRRGDQPSVPPVGGVGCRAFVASLRNVRWPPRFRPTIAEKYDGSVNPAEFLQVYTTGIEAAGGDDRVMANFFPMALKGQARGWLMNLPPASVHSWEDLCQQFTMNFQGTYPRPGEEADLHAVQRRDDESLHSYIQRFCQVRNTIPCIPAHTVIYAFRGGVRHNRMLEKIASKEPQTTAELFQLADRVARKEEAWTWNPSGSGVAASAAPGSAAQTGRRDRRRKKRSAHTDDEGHVLAVEDASRATRKGRPAGDKKKEAGAPSRERPTDKWCIVHNTSLHDLADCRAVKSLAERTRKWEEERRQERREGKSPAVPSSNRRSEAKQKAPAEDIDDGDDDLGFQEPGATIATVDGGECAHVSRRSLKAMKRELLAAAPTHEATRRARWSEVALTFDQTDHPPCVARGGQIAMVVSPTVCNVKLGRVLIDGGAALNILSPAAFDAIKAPGMVLRPSQPIIGVTPGHTWPLGHIDLPVTFGGPANFRTEQVNFDVADLSLPYNAVLGRPALVKFMAAVHYAYLQMKMPGPDGPISVHGDLKVALACMEQRADRLAVASKPEGGDERLGTSAPRRPEAADSHMRRGAPEPQDGLRATAGRPHLSPSDPEANPVPARLGREQGEETPEPNGGLRPLTTGVGPLPACPTTPGASDPQDGPGATVGRPPLSSSDPEVVGTEDERASRGRLDEERPRDVAPSEGDRPHRKVQRPVYFVSEALRDAKTRYPQAQKMLYAILMASRKLRHYFQAHRVMVVTSYPLGQILHNREGTRRVVKWAIELSEFDLHFEPRHAIKSQALADFVAEWTPAPEPVSVPEASSGPSQLPHTAHWVMQFDGSLSLQGASAGVTLTSPSGDVLRYLVRLDFRATNNMAEYEGLLAGLRVAAGLGICRLLVLGDSQLVVNXDKTLPEDREGSERVRRISKRYVLXRAPGGFEYLYVAIDKFTKWPEAYPVVKIDKHSALKFIKGITARFGVPNRIITDNGTQFTSELFGDYCEDMGIKLCFASPAHPRSNGQVERANAEILRGLKTKTFNILKKHGDSWIEELPAVLWASRTTPSRATGETPFFLVYGAEAVLPSELTLRSPRATMYCEADQDQLRRDDLDYLEERRRRAALRAARYQQSLRRYHQRHVRARSLCVDDLVLRRVQTRAGLSKLSPMWEGPYRVIGVPRPGSVRLATSDGAELPNPWNIEHLRRFYP

SEQ ID NO: 173215 - protein, 343 aa, Oryza sativa
  Clone ID: PAT_MRT4530_71275C.1.pep
MIRTPAVSRDKPPPPPEEVTEGPLAQAEAILLRRAVRAAAAAGDFRFNARGPEDLQMHVWTGLAGEGGRGGRHGDGSGLQRAVSQIKEAASIATQTPASCHRSLAPSYRHTVALATGGGYGRRLGDYGSGRGCRAYTLISMNVHTHIPYPYESLRKIGPTNLEIDEVTNVSLSTGCINVPNIIPMGTLTGKTFTHRVHGCGYVLLSPEPINPWVENTRRPSPICRWRKAHNHQNPSGQATVAPHGTCHTPAHHRVGAHSRSTSRQPVSVAPMEGRDAARRSAVGRSAAAVLIGNSKDGEVSQRDNRLRPPLIQRKFIGFQELRVPTETSNTKSLSILRPFRNT

SEQ ID NO: 173216 - protein, 1933 aa, Oryza sativa
  Clone ID: PAT_MRT4530_71276C.1.pep
MAEQAKAHNLSPSVSGDDGEPNPRRRARTPPSPPRQSPRREEALERVEGSATSTSTGDGEGRRDGERRLLVYGDGSTPQGALQAAGALLRHPPVVPDPESPAQRWLDDVANLVMTARHRLGAGGRSSATKTSGAATTGSVSSRWRARRAAAVARHSAATPSSAPPTQEDLRGGPDARISIERRRNGRRAPHATEGASSSGVSHQHGRGDQPSVPPVGGVGCRAFVASLRNVRWPPRFRPTIAEKYDGSVNPAEFLQVYTTGIEAAGGDDRVMANFFPMALKGQARGWLMNLPPASVHSWEDLCQQFTMNFQGTYPRPGEEADLHAVQRRDDESLRSYIQRFCQVRNTIPCIPAHAVIYAFRGGVRHNRMLEKIASKEPQTTAELFQLADRVARKEEAWTWNPSGSGVAASAAPGSTTQTGRRDRMRKKRSAHTDDEGHVLAVEGASRATRKGRPAGDKKKEAGAPSRERPTGKWCIVHNTSLHDLADCRAVKSLAERTRKWEEERRQERREGKSPAVPSGNRRSEAKQKAPAEDIDDGDDDLGFQEPGATIATVDGGACAHVSRRSLKAMKRELLAAAPTHEATRRARWSEVALTFDQTDHPPCVARGGQIAMVVSPTVCNVKLGRVLIDGGAALNILSPAAFDAIKAPGMVLRPSQPIIGVTSGHTWPLGHIDLPVTFGGSANFRTERVNFDVADLSLPYNAVLGRPALVKFMAAVHYAYLQMKMPGPGGPISVHGDLKVALACMEQRADHLAAASKPEGGDERLGTSVPAAPRQRMITCDEVPAGFIREVIHPEWLANPVVVPKANGKLRMCIDYTDLNKACPKDPYPLPRIDQIVDSTAGCDLLCFLDAYSGYHQIRMAREDKEKTTFITPIGTYCYTTMPFGLKNAGPTFQRTTRISLGSQIGRNVEAYVDDLVVKTRNQETLLSDLAETFESLRSARIKLNPDKCVFGVPAGKLLGFLVSARGIEANPEKIRAIERMRPPSKLRDVQCVTGCMAALSRFISRLGEKALPLFKLLKRSGPFTWTEEAERVLTQLKAYLSSPPVLVAPEPNEPLLLYLAATSQVVSAALVVECDEDNPHSAHPHPVLAWPGREQEGEAPESNGGPRPPTTEAGPLPACQTVPGAPDPQDGPRATAGRQHLSPSDPEANPVPTRPGREQGEEAPEPNGGLRPLTTGVGPLPACPTTPGAPDPQDGPEATVGRPPLSSSDPEVVGTEDECTPRGRLDKERPRDVAPSEEDRPHRKVQRPVYFVSEALRDAKTRYPQAQKMLYAILMASRKLRHYFQAHRVTVVTSYPLGQILHNREGTGRVVKWAIELSEFDLHFEPRHAIKSQALADFVAEWTPAPEPVSVPEASSSPSQLPHTAHWVMQFDGSLSLQGVGAGVTLTSPSGDVLRYLVRLDFRATNNMAEYEGLLAGLRVAAGLGIRRLLVLGDSQLVVNQMDAYVHQVRRMEPHFDGIELRHVPRRDNTVADELSRLASSRAQTPPGAFEERLAQPSARPDPLGETDAPDRPPMPVGVQASGPEGSAPSSLRSIAWIAEIQAYLTDKTLPEDREGSERVQRISKRYVLVEGTLYRRAANGILLKCIPREQGVELLADIHEGECGAHSASRTLVGKAFRQGFYWPTALNDAVDLPAQALQIIPLSWPFAVWGLDILGPFRRAPGGFEYLYVAIDKFTKWPEAYPVVKIDKHSALKFIKSITARFGVPNRIITDNGTQFTSELFGDYCEDMGIKLSFASPAHPRSNGQVERANAEILRGLKTKTFNILKKHDDSWIEELPAVLWANRTTPSRATGETPFFLVYGAEAVLPSELTLRSPRATMYCEADLDQPRGDDLDYLEERRRRVALRAARYQQSLRRYHQRHVRARSLCVDDLVLRRVQTRAGLSKLSPMWEGPYRVIGVPRLGSVRLAMGDGTELPNPWNIEHLRRFYP

SEQ ID NO: 173217 - protein, 513 aa, Oryza sativa
  Clone ID: PAT_MRT4530_71277C.1.pep
MQPDPSGSGGDGNANAKAKLAPPPVTAAGGRPVSVLPHKTANVRDHYRIGKKLGQGQFGTTYLCVDKASGGEFACKSIPKRKLLCREDYEDVWREIQIMHHLSEHPNVVRIRGAYEDALFVHIVMELCAGGELFDRIVAKGHYTERAAAQLIRTIVAVVEGCHSLGVMHRDLKPENFLFASAAEDAPLKATDFGLSMFYKPGDKFSDVVGSPYYVAPEVLQKCYGPESDVWSAGVILYILLCGVPPFWAETEAGIFRQILRGKLDFESEPWPSISDSAKDLVRNMLCRDPTKRLTAHEVLCHPWIVDDAVAPDKPIDSAVLSRLKHFSAMNKLKKMALRVIAESLSEEEIGGLKELFKMIDTDDSGTITFDELKEGLKRVGSELTEHEIQALMEAADIDNSGTIDYGEFIAATLHMNKLEREENLVSAFSFFDKDGSGFITIDELSQACREFGLDDLHLEDMIKDVDQNNDGQIDYSEFTAMMRKGNAGGAGRRTMRNSLQLNLGEILNPSNS

SEQ ID NO: 173218 - protein, 59 aa, Oryza sativa
  Clone ID: PAT_MRT4530_71278C.1.pep
SRRHTTIITAMLCDELVDLDTPEMNVGRLDDHVAIDLNSAYDLEYSMYQKFMTPDPFFF

SEQ ID NO: 173219 - protein, 43 aa, Oryza sativa
  Clone ID: PAT_MRT4530_71279C.1.pep
MSIGVMHFTTDHFSLFPGLARGWALRHRTWASPWVGLGGVCAS

SEQ ID NO: 173220 - protein, 604 aa, Oryza sativa
  Clone ID: PAT_MRT4530_7127C.1.pep
MDDDDYSWVRRTKFSHSIVKSNSGREQFGAFLDPFDSSTAWRQKGFSGELMIHGHNLQPRAKGAVSKSPRPSIPLAKSPVSQAERKLKAKFSDGELKQRGKISDGSLREASKEKDRKVGHKGEGLSLDISCPILDRTVQDDSSDTLDFSFHSEEQSLRLLRVCSSPAPFYSKDTTTFGDSKIHSTSVKIVGEGSKPRRRAKSPMPTRVISEVFKEAKAATKRFSSPQRQRKSSSPHSPRSPDDSPRFGFPSMRTPGNLKARRASSWPRNYDNGVAKAVALDILERWTIDRSQLLIGQRFASGAYSRLFHGIYKEQPVAVKFIRQPDEEEDAELAAKLEKQFTAEVTILARLHHRNVIKLIGACNAPPVFCVITEFLCGGSLRAFLRKLQRQKLPLEKIICIALDIAHGLEYIHSQRVIHRDVKPENILFDGECCAKVVDFGVACEEVYCNSLEDDPGTYRWMAPEMYKRKPYGRKVDVYSFGLVLWELFSGSIPYEEMTPLQAAFAVVNKNLRPVVPSSCPAQLRLLIEQCWSCQPEKRPEFSQVVQILKNLKEALDRDGTLDKIPSTNCQEPPDQNKKRLSNWIQRLSYSQADFSGPPPPKLL

SEQ ID NO: 173221 - protein, 366 aa, Oryza sativa
  Clone ID: PAT_MRT4530_71280C.1.pep
MTNHAGFAADDAVTAAVPVQAAQGGRHFPPFLAPSSRLTDCKKAAAHVDLAGAGGVATVPGSWPRHAKPVSGAELDDWMEKHPSALAWFESVAAAAKGKEIVVFLDYDGTLSPIVADPDRAFMSDEMREAVRGVAKHFPTAIVSGRCIDKVFDFVKLEELYYAGSHGMDIRGPTAAASEYNHNMKAKQGDAVTFQPAADFLPVIEEVYHVLKERMASIRGSLVENNKFCLSVHYRCVDEAEWGVLDGKVRAVIEGYPDLRLSKGRKVLEIRPVIDWDKGSALQFLLKSLGYEGRNNVFPIYIGDDRTDEDAFKVLRNMGQGIGILVTKVPKETAASYTLREPSEVKEFLRKLVKIKINGDKGLIGK

SEQ ID NO: 173222 - protein, 80 aa, Oryza sativa
  Clone ID: PAT_MRT4530_71281C.1.pep
DPGAEAPGQQVRLLLTVHVTLPSPAWYSLHCSWIPTCRLDRSRVSLADASHPFSPLIIQTLLIYILWKAILGGERARTEA

SEQ ID NO: 173223 - protein, 575 aa, Oryza sativa
  Clone ID: PAT_MRT4530_71282C.1.pep
MEVTMEDVAGDFEFSGCGSTTTTSSASSLDDGTGMCYAWGELSPVADWANFCCSDDDGGHDLHGLIESMLCDDTLVGVDDDGQAGLHHADMFRDDLYCYGNGSNPSSTTTTNPGSPVFDDPTQGCPEKGLRLLHLLMAAAEALSGPHKSRELARVILVRLKEMVSHTASANAAASNMERLAAHFTDALQGLLDGSHPVGGSGRQAAAAASHHHAGDVLTAFQMLQDMSPYMKFGHFTANQAILEAVSGDRRVHIVDYDIAEGIQWASLMQAMTSRADGVPAPHLRITAVSRSGGGGARAVQEAGRRLSAFAASIGQPFSFGQCRLDSDERFRPATVRMVKGEALVANCVLHQAAATTTIRRPTGSVASFLSGMAALGAKLVTVVEEEGEAEKDDDGDSAGDAAAGGFVRQFMEELHRYSAVWDSLEAGFPTQSRVRGLVERVILAPNIAGAVSRAYRGVDGEGRCGWGQWMRGSGFTAVPLSCFNHSQARLLLGLFNDGYTVEETGPNKIVLGWKARRLMSASVWAPPPLPVPSSPPEGVCQPVVGMAPVATGGFARTEFDYIDSFLVEPAYALV

SEQ ID NO: 173224 - protein, 37 aa, Oryza sativa
  Clone ID: PAT_MRT4530_71283C.1.pep
VKKNYTEPLLPLLHNFKHTGFIFTMPELTFLFGTLSC

SEQ ID NO: 173225 - protein, 80 aa, Oryza sativa
  Clone ID: PAT_MRT4530_71284C.1.pep
MGDKGRTAQIRSTSLGGRAGRPWEVVATAELGRRAATKVEVADELSGGGICEEGCCIALVVDENRSGLADSTQHKQRAVQ

SEQ ID NO: 173226 - protein, 876 aa, Oryza sativa
  unsure (1)..(876): unsure at all Xaa locations
  Clone ID: PAT_MRT4530_71285C.1.pep
MAQDAGDTVLPSSRITVDRHLSLPRKIMPDGAVVRAGESWPRYPERSVHLLSFAMXGLIPPFSRFFHEVLDFYEIHALHLAPNAVMTLAIFAHLCEMFIGVRPTMQLFQAFFIPQLLQGAVVGGCYFQPRPGTAGQYIESHLRKKWEDWKKDWFYTALPDHPRLRVPAGPPERSAAWLAVSELGEEYDTVWDRLRGLRSLGLTGAMVFGVYFRRRIAPLQERSRGAWEYTGPNDPMRMHVGERWDRGEEDAKMVIRRVLGLDSAEQTLIPDGILPLCCDRDWESILAVMSVVGAGRSQPSRGSASGSTVGAGGGGGGAERAIDRPPAGHKRPAGPEVGRKKKRLRKIGQTEPCRGSFIEPPKWTFNRPPHRESQGRTLRGGRNPNDRSGPGPANPRPRGLRSLAVLAAADSTVREGLNVQVQALAKERTAVDAEWAQLAANHARVDEGCRAVDDMVRLGRKMRQTQLAEIQALDSVMRETEEEQHAALIASSVLDEELGDIRLARTAALEAECRALDDRARSAQEFEATIRRRIVVLDRGQREQNARGXEQAQRAQELEERARLLDQWESTLAAHKRTAAEVEASLRLREEAAAKCDRITLAGKASADRRAEELRLREEACREWDATLAEREAEVNRREVALRRLGEQLAKREEAVAGRVARTLEDPXAERAAIAAKASELEAREKDLAAGGPLGGVGLASQLAMAQNTLADLERLVQDQAGEIAALRLTNEIGPGQLSDAVDRLERAGRRVGISVRRDSKLPPTQPALMLRLDELAADLERLEEEVGETIKLSSASLARAAVELVLASHQAREPDFVPWRALEDFPPGTEARAREQVREAADAIVSNFDGSAPRFAFGLASDEESRSGGDNDDVG

SEQ ID NO: 173227 - protein, 47 aa, Oryza sativa
  Clone ID: PAT_MRT4530_71286C.1.pep
EICSLTQVPLPSPFPFPPPITLNPRTVLKLVLCRIFSCNRGRPRFFT

SEQ ID NO: 173228 - protein, 1011 aa, Oryza sativa
  unsure (1)..(1011): unsure at all Xaa locations
  Clone ID: PAT_MRT4530_71287C.1.pep
MAQDAGDTVLPSSRITADRHLSLPRKIMPDGAVVRAGESRPRRRYPEQSVHLLSFAMAGLIPPFSRFFHEALDFYEIHALHLAPNAMMTLAIFAHLCEMFIGVRPTMRLFQAFFIPQLLQGAVVGGCYFQPRPGTVGQYIESHLRKKWEDWKKDWFYTALPDHPRLRVPTGPPERSAAWLAVSEQGEEYDAERSRGAWEYTGPNDPMRTHVDERWDWGEEDAKMVIRRVLGLDSAEQTLIPDGILPLCCDRNRESILAVMSVVGAGRSRPSRGGASSSTVGAGGGDATVGGSRTSGPGGGGGSRAPGLSRGPGDDSASDPKGKRKGVSGSDPSRGTKSERSEQSGPGKSRAAGSSQPRGGTHRTHTGPDPERPSAGTRPAAGDDSGDVPPRGGSETRVHVERHPGSGGEGGHSSRVETRGGPEPEVEVEAGGGPELEVEVEARGGPEPEAEAESTRGPKAGGERDSCSPLRLGRLWGWSRRRGAXEQPPVSRGIQQYPVVPGPDRGFFFPDSGEYGATSAXGRRAVDDIVRIGRKMRQTQLAKIQPREEALDSIMRETEEERQAALIASSVLDEALGDIRLQYEAYAEDLARRIRDARGILDAAAAHERRASEADASLRARTAALEAERRALDDRARSAQEFEATIHRRIEVLDRSQCEQNARGQEQAQRAKDLEERACLLDQRESTLAVHERTAAEVEASLRLREEAAAERDRITLTAKASADHRAEELRLREEACRERDAALAEREAEVNRREVALRRLGEQLTKREEAVAGREAQHLESARAERAAIVVKASELEAWEKDLAAGGPPGGAGLVSQLAMAQNTLADLERLVQDQAGEIAALCLTNEIGPGQLSDAVDRLESAGRRVGVSVCRDSKLPPTQPALALRLDGLAADLERLEEEVGETIKSSSASLSRAVVELVLASHQARDPDFVPWRALEDFPPRTEAKAREQVREAADTIVSNFERSAPRFTFGLASDEESGSGGDDNDVGNEDWDDVISGAGLGGPGTP

SEQ ID NO: 173229 - protein, 867 aa, Oryza sativa
  Clone ID: PAT_MRT4530_71288C.1.pep
MAGLIPPFSRFLHEVLDLYEIHALHLAPNAVMTLAIFAHLCEMFIGVRPTMRLFQAFFIPQLLQGAVGGGCYFQPRPGTAGQGLWSLGLMGAMVFGDYFRRHIAPLQERSRGVWEYTGPNDPMWTHVGEPWDWGEEDAKRVIRWVLGLDSAEPTLIPDGILPLCCDRDRESILAVMLAVGAGRSRSSRGGASGSAVGGGGGGATAGGSRAGGPGGGGSRAPGSSRGPGGDSAGDPKGKRKVTYSRPPSPPRVGGAERATDRSLVGHKRPAEPETRRKRKRLRKIGQTEPCRGSFIEPPKWTFNRPPRSQSKAAGFSQPRGGAQRSHTGPDPERPLGGIRPTAGDRSGDARLEGSSRTRAHAEHHPGSGGEGRRGPGAEARGGPEPEAKAEAEGGPEPEAEVEAEAGPEPEVEAEAEGGPEPEVEAEAESTRGPEVGAEIQAREEALDSVMRETEEELQAALIASSALDEALGDIRLQYEAHVEDLAKRVRDARGILDAAAAHERRASEANASLRARMTALEAERKALDDRARSAQEFEATIRRRIEVLDRNQREQNARSEEQARRAQELEERARLLDQRESTLATHERTAAEVEASLRLREEAAAERDRITARKSYGCGKRHAGNGMLHLPSAKPRWAAASTRAERAAIAVKASELEAREKDLTVSGPSGGAELASQLATAQSTLADLERLVQDEDGEIAALRLTNKLGPGQLSNAVNRLERAGRRVGISARRDSKLPPTQPALALRLDGLAADLERLEEEVGKTIKCSSASLARAAVELVLTSHQARDPDFEPWRALEDFPPWTEARARVQVREAADAIVSSFEGSAPRFTSGLTSDEESGSGGDDGDDDWDDIVSGAGLGGPGTP

SEQ ID NO: 173230 - protein, 141 aa, Oryza sativa
  unsure (1)..(141): unsure at all Xaa locations
  Clone ID: PAT_MRT4530_71289C.1.pep
KKISFNGTLTETPTPQPYSPTHKIRDEDITPLDIHNNPPPVIKKPITRARARXLNLERTKRRLEKDLEAWKXIKGTQINMEAQXKSTSSIIRSPRLVCTKTDAQIAYMLGLGCSLYGWKAKKITFPMVLVPRPNSFQVNRN

SEQ ID NO: 173231 - protein, 60 aa, Oryza sativa
  Clone ID: PAT_MRT4530_7128C.1.pep
AIRDQGVQKTFLDYHFKAGARRQDRATFALLSASTSGDSSLDVYMCIYRRITERNMVIVS

SEQ ID NO: 173232 - protein, 891 aa, Oryza sativa
  Clone ID: PAT_MRT4530_71290C.1.pep
MLVHRSIEKDVFEPLVMRISEIAQHYFGTVGSSETGEKGPTVPEFPEKIKWEVQHLEELFEGIKEDKEEVYEGFKSVSLAISEWQRRLAIAYQNAARDPRPFEGMKWAMEYHEIYVKTAQGGSEAHLLESIKSGMQCIKNVLATIRSRKEADNRSWCIVEQVFSPLLKLLKTINHLVSEAAARNNKSENYKILVKIDAEVNCLQDALDLIDRNKNEVYENFRLIEDLILPLLTFLKATYNDQSESLSFLDAVKHGVNYLEGVLDKIEQKQRDGNDNFHIVKAAFSPLLTCMYTFRRISLETLAHEDKSDAFILLDRIRDDLSQLKDVLQMVQEKENGIYSNFDAIEEHIDEIYDGHMNVEGSLKLNQMGGLRDKLQLIHEEITNIRGKVDDSFKVQEVSCHVMRMAAAHEASSSHQLSASNTFCITMESAQMWQLKVIIDELETRLRHCLLCLAVFPVDAIIKKRLLIHWWIGECFVTSVSEGKSFFNKLLLSNGFITPVKKYHCDKVHSCKVQPWIRGLLIEAAKSKAFVELSSDGSSRNDFTRTRRACLHAGKILTNFHPDVLTIYNIKQQYVELNKTWFSEKNRLTTLQLGQWHDASYDPRAHHVEINNAKFLKQVKSCKQLKYLSLRGISRIEALPNSIGKLSRLVILDLKACHNLEDLPKEIVKLVKLEYLDVSDCYLLSGMPKGLGKLFQLEVLKGFVLSNAKSKDLCHLNELVMLKKLRKLSIRIGYSIDSGQFANFGELCALRSLTLIWGAHPISTHGSSPSHAAPHAMPCVLPLGLEKLELRCFPLVELPHWVSPEKLRKLKKLYISGGNISDLGDLKSWEVTVLRLRFLKHMNYSWTALHDSFRKLDVLEAHECENLQPWPSCGKGLWRKEPNGTIAPVLT

SEQ ID NO: 173233 - protein, 794 aa, Oryza sativa
  unsure (1)..(794): unsure at all Xaa locations
  Clone ID: PAT_MRT4530_71291C.1.pep
MAQDASDTVLPSSRITADRHLILPHKIMPDGAVVRAGESRPRPRYPERSVHLLSFAMAGLIPPFSRFFHEVLDFYEIHALHLAPNAVMTLAIFAYLCEMFIGVRPTMRLFQAFFIPQLLQGAVVGGCYFQPQPGTVGQYIESHLHKKWEDWKKDWFYTALPDHPRLRVPAGPPERSTAWLVASELGEEYDVVWDRLRGLRSLGLMGAMVFGDYFHRRIAPLQERSRGTWEYTGEEDAKRVIRRVLGLDSAEPTLIPDGILPLCCDRDRESILAMMSAVGASWSRSSRGGASDSAVGAGGGGATAGGSRTSGPGGGGSRAPGPSRGPGDDSAGGPKGKRKVAESWPPSPPRGGGSERATDHPPAGHKRPARPKARQKKKRLRKIGQTEPCRGSFIEPLKWIFNRPPCSLAVGPKGHIPDTYRTRTRPAGDDGGGDVPPEGGSKTRVHAERHPGSGGEGGRSSGAETGGGPEPEVEVKAEGGPEPEVEAEAGGGPEPEAQAESTRGPQAGGERDSRSPLRLGRPRGWSRRRGXREQPPVSRGIXQYPVAPGADRGLFFPDCGEYGATSAEGLNAQVQARAEERTALDAEWAQLAADRARVDEGRRAVDDMVRVGRKMRQTQLAEIQACKEALDSVIRETEEERQAALIASSALDEALGDIRLQYEAHAEDLAKRIRDARGILDAAAAHERRASEADASLRARTVALEAERRALDDCARSAQEFEATIRWRIEVLEVIMPWCALEDFPPRTEARAREQVREAADAIVSNFEGSAPRFTFGLTSDEESGSGGDDGDDD

SEQ ID NO: 173234 - protein, 918 aa, Oryza sativa
  Clone ID: PAT_MRT4530_71292C.1.pep
MLVHRSIEKDVFEPLVMRISEIAQHYFGTVGSSETGEKGPTVPEFPEKIKWEVQHLEELFEGIKEDKEEVYEGFKSVSLAISEWQRRLAIAYQNAARDPRPFEGMKWAMEYHEMWVEDNNIIGAGDEILDFDEHELFESLRYVKTAQGGSEAHLLESIKSGMQCIKNVLATIRSRKEADNRSWCIVEQVFSPLLKLLKTINHLVSEAAARNNKSENYKILVKIDAEVNCLQDALDLIDRNKNEVYENFRLIEDLILPLLTFLKATYNDQSESLSFLDAVKHGVNYLEGVLDKIEQKQRDGNDNFHIVKAAFSPLLTCMYTFRRISLETLAHEDKSDAFILLDRIRDDLSQLKDVLQMVQEKENGIYSNFDAIEEHIDEIYDGHMNVEGSLKLNQMGGLRDKLQLIHEEITNIRGKVDDSFKVQEVSCHVMRMAAAHEASSSHQLSASNTFCITMESAQMWQLKVIIDELETRLRHCLLCLAVFPVDAIIKKRLLIHWWIGECFVTSVSEGKSFFNKLLLSNGFITPVKKYHCDKVHSCKVQPWIRGLLIEAAKSKAFVELSSDGSSRNDFTRTRRACLHAGKILTNFHPDVLTIYNIKQQYVELNKTWFSEKNRLTTLQLGQWHDASYDPRAHHVEINNAKFLKQVKSCKQLKYLSLRGISRIEALPNSIGKLSRLVILDLKACHNLEDLPKEIVKLVKLEYLDVSDCYLLSGMPKGLGKLFQLEVLKGFVLSNAKSKDLCHLNELVMLKKLRKLSIRIGYSIDSGQFANFGELCALRSLTLIWGAHPISTHGSSPSHAAPHAMPCVLPLGLEKLELRCFPLVELPHWVSPEKLRKLKKLYISGGNISDLGDLKSWEVTVLRLRFLKHMNYSWTALHDSFRKLDVLEAHECENLQPWPSCGKGLWRKEPNGTIAPVLT

SEQ ID NO: 173235 - protein, 280 aa, Oryza sativa
  Clone ID: PAT_MRT4530_71293C.1.pep
MAQDAGDAVLPSSRITADRHLSLPRKIMPEGVVVRAGESRPRPRYPERFVHLLSFAMAGLIPPLSRFFHEVLDFYEIHALHLAPNAVMTLAIFAHLCEMFIGVRPTMRLFQAFFIPQLLQGVVVGECYFQPRPGTAGQSAAWLATWELGEEYDAVWDRLKGLRSLGLTGAMVFGDYFRRCIAPLQERSRGAWEYTGPNDPMRTHVGERWDWGEEDAKRVIRRVLGLDSAEPTLIPDGILPLCCDRDRESKGPGATPGGGRHDCFELRGVGPPVHLRTYLG

SEQ ID NO: 173236 - protein, 128 aa, Oryza sativa
  unsure (1)..(128): unsure at all Xaa locations
  Clone ID: PAT_MRT4530_71294C.1.pep
VGNREDGHTGSAVGVRRSGGPAVRVAPIRTALAPLLLARIACHRHDARGRRGPPPPFAHLPPAASSPTICAPRPPGCSPPPPPXCQLGRPAAAVAHAERRGEESCGSRQKREGERMEKSVERSREKRM

SEQ ID NO: 173237 - protein, 584 aa, Oryza sativa
  Clone ID: PAT_MRT4530_71295C.1.pep
MAQDAGDAVLPSSRITADRHLSLPRKIMPEGAVVRAGESRPRPRYPGRSVHLLSFAMAGLIPPFSRFFHEVLDFYEIHALHLAPNAVMTLAIFAHLCEMFIGVRPTMRLFQAFFIPQLLQGAVVGGCYFQPSPSTAGQYIESHLRKKWEDWKKDWFYTVLPGPSGTSSSRWPSRKERSRGAWKYTGPNDPMRTHVGERWDWGEEDVKRVIRPVLGLDSVEPTLIPDGILSLCCDRDRESILAVMSAIGADRSRSSRGGASGSAVGGGSSGATAGRSRAGGSGGGGSRAPGSSHESGDDSAGDPKGKRNLHGMKAEGAAEKTCQARFDQLSPNLSKKRIHSLQEDLPAGQFASGEQLTDEEVVESAHTEQVHLAQLSPSPSRKRARLSQFAPGALPLTALEEEDSPNIDFLDGLPQHAEAVAMTPVRYEKSKRKKSSKLVKCLYEQDRSASDERFWSIEHMVLYNNIFSKKQCADNKWIDWKNIRDLPAMPYVEEACRDVGLHELMAIKQNWHEELIKQFYSTLSINESRTSLTWMTGRNKKITVTKRFCQKVLLVPSEHVTKIKHLTDAQEEELKSADGNQVIV

SEQ ID NO: 173238 - protein, 33 aa, Oryza sativa
  Clone ID: PAT_MRT4530_71296C.1.pep
MRLTSSKVDVHLRAVSSVRSYAVDKCPAGRVGG

SEQ ID NO: 173239 - protein, 1152 aa, Oryza sativa
  Clone ID: PAT_MRT4530_71297C.1.pep
MAQDTSDAVLPSSRITTDRHLSLPRKIMPDGAIVRAGESRSRPRYSERSVHLLSFAMTGLIPPFSRFFHEVLDFYEIHALHLAPNAVMTLAIFAHLCEMFIGVRPTMRHGGGGCYFQPRPGTAGQYIESHLRKKWEDWKKDWFYTALPDHPRLRVPAGPPERSAAWLATSELGEEYDAVWDRLRGLRSLGLTGAMVFGDYFCRRIAPLQERSRRAWEYIGPNDPMRTHVGERWDWGAEDAKMVIRRVLGLDSAEPTLILDGILPLCCDRDRESILAMMSVVGAGRSRSSRGGASGSVIGTGGGGAITGGSRAGGLGDGGSRAPGLSRGPGDDSTGDPKGKRKVAYSRPPSPPHRGGAERAADRSPTGHKRPAGPEAGQKKKRLRKIGQTEPYRGGFIEPPKWTFNRPPRSEIPSQGISGSNPPQGTRTGPDPERPSGGTHPAGGGRGGDAPPGGGSGTRVHAEHHPGSGGEGGRGLGVEAGGGPEPEVEVEAGGGPGPEIEAEAGGGPEPEVEVEAEGGAGLEAEAEAGDGPGPDAEAEAGGGPEPEVEVEARGGPEPEPEAEAESTRGPEAGGERDSRSPLRLGRPRGWPLKRGGREQPPVSRGIQQYPVVPGADRGLFLPDSGKYGATSAEGLNTQVQALAEERAALDAEWAQLAADRARVDEGRRAVDDMVRVGRKMCQTQLAKIQVREEALDSVMREAEEERQAALIASSVLDEALGDIRLQYEAHAEDLAKRIRDARGILDAAAAHERRASEADASLRARTTALKAERRALDDRVHSTQEFEATIRCRIEVLDRNQREQNARGEEQAQRARELEERARLLDQRESTLAAHERTAAEVEASLRLREEAAAERDRTTLAAKASTDRRAEELRLREEACRERDAALAEREAEVNRREVALRRLGEQLAKREEAIAGREAHHLESARAERATISAKASELEAREKILAAGGPPGGAGLASQLAMAQSTLADLERLVQDQAGEIAALRLTNELGPGQLSDAVDRLERAGRRVGISVRRDSKLPPTQLALALRLDGLAVDLERLEEEVGETIKSSSVSLARAAVELVLASHQARDPEFMPWRALEDFPPGTEARAREQVREAADAIVLSFEGAAPRFTSGLTSDEENGSGDDNGDDDWDDIVSGAGLRGPGTP

SEQ ID NO: 173240 - protein, 313 aa, Oryza sativa
  Clone ID: PAT_MRT4530_71298C.1.pep
MAQDTDDAVLPSSCITADRHLSLPFKIMPDGAIMRAGESRPRPRYPERSVHLLSFAMTGLIPPFSRFFHEVLDFYEIHALHLAPNAVMTLAIFAHLYEMFIGVRPTMRLFQAFFIPQLLQGAVVGGCYFQPRPGTAGQYIESHLRKKWEDWKKDWFYTALLDHPRLRVPAGPPERSAAWLATSELGEEYDAVWDRLRGLRSLGLTGAMDWGAEDAKMVIRRVLGLDSAEPTLIPDGILPLCYDRDRESILAVMSAVGAGRSRSSRGGASSSVVGTGGGGATTGGSRAGGKTIALLEPPSGTGQTEAATTGGRG

SEQ ID NO: 173241 - protein, 68 aa, Oryza sativa
  unsure (1)..(68): unsure at all Xaa locations
  Clone ID: PAT_MRT4530_71299C.1.pep
AGHMACKCEKFLSRIVNMESFFFYYIKIDRHISTFYLXKKKKKKKKKKNRGRSRSTNAWTNAWTNAWT

SEQ ID NO: 173242 - protein, 193 aa, Oryza sativa
  Clone ID: PAT_MRT4530_7129C.1.pep
MEHLLLPLLPHRPSQPLLLLLRHRRRPSIPRASSGDPSPTAADAPTDAQSATPPSSGAKPTGVKNRLRARNQARRVQEFTPPAPLGITMKSKSSSSSRPAASKSSASASASAATRREKQTRRKEWEEMSMAEKAGELYVGEKGLLFWLNKFAYASIFIMVGAWILFRFVGPSIGLYQLDAPPLAPTDVFAGSP

SEQ ID NO: 173243 - protein, 322 aa, Oryza sativa
  Clone ID: PAT_MRT4530_712C.1.pep
MSGGGEGAAAAERQELQLPPGFRFHPTDEELVMHYLCRRCAGLPIAVPIIAEVDLYKFDPWHLPRMALYGEKEWYFFSPRDRKYPNGSRPNRAAGSGYWKATGADKPVGTPRPVAIKKALVFYAGKAPKGDKTNWIMHEYRLADVDRSARKKNTLRLDDWVLCRIYNKKGGVEKPSGGGGGERSNMMSHGETASAGSPPEQKPAVLPPPPPPYAAAAPFSELAAFYDVRPSDSVPRAHGADSSCSEHVLTTSASSGGVVERPEVQSQPKIAEWERTFAGAAAPAGAVSTAGPILGQLDPAAAVAGGGDPLLQDILMYWGKPF

SEQ ID NO: 173244 - protein, 886 aa, Oryza sativa
  Clone ID: PAT_MRT4530_71300C.1.pep
MWLFQAFFIPQLLQSAVVGGCYFQPRPGTAGQYIESHLRKKWEDWKKDWFYIALPDHSRLRVPAGPPERSAAWLATSELGEEYDAVWDRLRGLRSLGLTGAMVFGDYFRRRIAPLQERSRRAWEYTGPNDPMQTHVGERWDWGEEDAKRVIRRVLGLDSAKPTLIPDGILPLCCDRDRESILAVMSAVGAGRSRSSGGGASCSAVGTGGGGATLSGSRAGSPGGGGSRAPGSSSGPRDDSAGDPKGKRKVAYPRPPSPPHGGGAERATDHSPAGHKRPAGPEAGQKKKRLRKIGQTEPCRGGFIEPPKWTFNHPPRSDPLQGTKSERSGQCGPGQSKAVGFSQPRGGTQRTRTGPDPERPSGGTRLAAGDRGGDAPPGGGSGTRVHAEHHPGSGGEGGRGLGAEAGGGPEPEAEAEAGDGPEPEAEAEAESTRGPEAGGRGAESSSQSREGSSSTPSSRGRTTAFSSPTPTSMEPLLQVLAAADSTVREGLNTQVQALAEERTALDAEWAQLAADRARVDEGRRAVDDMVLDRNQREQNARGEEQAQRARELEERVRLQDQRESTLATHERTAAEVEASLRLREEAAAERDRITLAAKASADRRAEELRLREEACRELDAALAEREAKVNRREVASRQLGEQLAKREEAVVGREARHLESARAERAAISAKASELEAREKDLAAGGPPGGAGLASQLTMAQSTLADLECLVQDQARKIAALHLTNELGPGQLSDAVDQLERAGCRVGISLRRDSKLLPTQPALALRLDGLAVDLERLEEEVGETIKSPSVSLARATVELVLASHQARDPEFMPWHALEDFPPGTEARAREQVREAADTMVSSFEGSAPRFTSGLTSDEENGSGGNDGDDDWDDIVCGADLGGPGTR

SEQ ID NO: 173245 - protein, 38 aa, Oryza sativa
  Clone ID: PAT_MRT4530_71301C.1.pep
MDVSRGFAIPLAGYLNYRGGPLRVTGGKCKKLRKKSWK

SEQ ID NO: 173246 - protein, 70 aa, Oryza sativa
  unsure (1)..(70): unsure at all Xaa locations
  Clone ID: PAT_MRT4530_71302C.1.pep
KRLSRKTLVQPYKPKGVEDVLLKTAQSGGXISKKGFXKRLISLLGQINTPPSKQTKVTFQRRRRVLYDND

SEQ ID NO: 173247 - protein, 490 aa, Oryza sativa
  unsure (1)..(490): unsure at all Xaa locations
  Clone ID: PAT_MRT4530_71303C.1.pep
MGTAPAPAHVLVFPWPIQGHLNVMLHLAVALAGAGXPRHLPPHRLQPPPPWRRRXAAVASPWLRFMSVTDGLPDDHPRTVANLGEISRSLHTAGRAAYRALLASSSQLVPADAAGGGAFPPVTTVVADALLPFAIDVAEELGVPALAFRTASACSFLAYMSVPRLVELGELPFPPGGDLDEPVRGVPGMEGFLRRRDLPSPCRHHGANNNDDAAALLGRLADAAVHCSKARALILNTAASLEAPALAHIAPRMRDVFAVGPLHAMSPAPAAATSLWRADDGCMAWLDCQADRSVVYVSLGSLTVISPEQFTEFLSGLVAAGNPFLWVLRPDMVTARRRHADLQESVTAAAGDSKARVVGWAPQRDVLRHRAVGCFLTHAGWNSTLEAAVEGVPTVCWPFFTDQQINSRFVGGVWRTGLDMKDVCDAAVVARMVREAMESGEIRASAQSVARQLRRDVAEGGSSAMELKRLVGFIGELATPIQHAKSESEV

SEQ ID NO: 173248 - protein, 107 aa, Oryza sativa
  Clone ID: PAT_MRT4530_71304C.1.pep
FSPEMDNDLVQRYQGLMKDSSKLPLFDLRKLNASLPVASVPNNTVNILVVGASSDFIVDAEGLSETARFYNVQPVCIEGIAHDMMLDCSWDKGAGIILSWLEKLTPR

SEQ ID NO: 173249 - protein, 269 aa, Oryza sativa
  unsure (1)..(269): unsure at all Xaa locations
  Clone ID: PAT_MRT4530_71305C.1.pep
MGVDDGGRGRRRRAPTRPPPTIPRHRGLRRRASAWREARTAEDVAAATSPAXGATAEDVAASDVVAGLPPGAPAPPSAIHGAAVNAHLRLHPRGRPVSSDTSXYHLICGRIAWIPGRYQDLIHRKHHPQRGKNRMIPDRISFVKPDDTRHDTDEDHDTSQVSCDSTTYQISDDSYHVSDDTREDSPPFMRPCPTSELAGGRVLHAGARRRQPRPSRRSSAAAAASAPPASASSALLPWGPALSHLREVDWERSRWDSIPTGYRYIAAPK

SEQ ID NO: 173250 - protein, 348 aa, Oryza sativa
  Clone ID: PAT_MRT4530_71306C.1.pep
MASEDGCGGGNPPGDAAAAPPVWNAAPAAGAGCGDLEEDLRFQCCVCLELLYKPVVIEDEKRVDTYSPQIIEFLNSKSNNCEIDGENRPEESNSRPPQEVTSDGNTINGHPKKVKLEDVSCALCKELLYQPAVLNCGHVYCMSCLSSLDDGALKCQVCGGLHPGDFPNVCLDLDHFIEDYFPAEYDLRREKIKLLKGECNQGSSSGTSCIKEGRGRPTNKENRAHQDDDLSDVHIGVGCDSCGMYPIRGKRYKCKDCTELIGFDLCEECYNTKSKLPGRFNQHHTPDHRMELDHSALFNRLMRLQGIHEEGPGEIIIEGAFVAPDAVVHIIADDHEEIEDNGEDDHLL

SEQ ID NO: 173251 - protein, 405 aa, Oryza sativa
  Clone ID: PAT_MRT4530_71307C.1.pep
MRPPPTSPRHCGLRRRASAWCEARTAEDVAAATSPAWGATVEDAAASDVVVGLPPGAPALPSAIHGAAVNAHLRLHPRGRPGSKETRWDAKNLLTWLWLAVECGRIIFYVVSHDPPKVSPMKPGETGHDTKEDHHTSQVSCDSTTYQISDDSYHVSGDTREVSCDSYQVSCNFYDVSGVILVRYHIHMIPTRYQKLGIKVLRHRRRRPRPPPSTLHTEPEPRHRQLHPLPSTVHIGARRQRPRPLSGARHRRPCPSSTPQPVSASSTPELVAGAAATTTQDPPPSTPHAGARRWRRLCHHAGLSAVHVTMLHAGACRRPRPSRWSSSPAAASSTPELGGGGCVRATGVSLVCAAPMVAYALVSEGGGLGAIPLGQYPNGIPVDHGSSEPGGSRPAASAPCRHGNG

SEQ ID NO: 173252 - protein, 510 aa, Oryza sativa
  Clone ID: PAT_MRT4530_71308C.1.pep
MFIESFRVESPHVRYGAAEIESDYQYDTTELVHESHDGASRWIVRPKSVRYNFRTTTTVPKLGVMLVGWGGNNGSTLTAGVIANREGISWATKDKVQQANYYGSLTQASTIRVGSYNGEEIYAPFKSLLPMVNPDDLVFGGWDISNMNLADAMTRAKVLDIDLQKQLRPYMESMVPLPGIYDPDFIAANQGSRANNVIKGTKKEQMEQIIKDIREFKEKSKVDKVVVLWTANTERYSNVCVGLNDTMENLLASVDKNEAEISPSTLYAIACVMEGIPFINGSPQNTFVPGLIDLAIKNNCLIGGDDFKSGQTKMKSVLVDFLVGAGIKPTSIVSYNHLGNNDGMNLSAPQTFRSKEISKSNVVDDMVSSNAILYELGEHPDHVVVIKYVPYVGDSKRAMDEYTSEIFMGGKSTIVLHNTCEDSLLAAPIILDLVLLAELSTRIQLKAEGEEKFHSFHPVATILSYLTKAPLVPPGTPVVNALAKQRAMLENIMRACVGLAPENNMILEYK

SEQ ID NO: 173253 - protein, 181 aa, Oryza sativa
  unsure (1)..(181): unsure at all Xaa locations
  Clone ID: PAT_MRT4530_71309C.1.pep
MLNTGIPSRRDRIDTNQSTLLLPSYSFYNISLTRAAATKSTTSSGVAWVWMTDDAVTGDELRRGRPRRAPGIADSGDELQRGARTAEDVAAATSPAWGATTEDAADSDAVAGLLPGAPAPPXPSTAPPLTPTSGSIRVASRCALRQRPNSVAGPLQSSPSSLAAXVDPAATKRQDGVQRAC

SEQ ID NO: 173254 - protein, 178 aa, Oryza sativa
  unsure (1)..(178): unsure at all Xaa locations
  Clone ID: PAT_MRT4530_7130C.1.pep
YKSTYRLQFLGVVRTAFNQMIWKSWASSPKCKFFSWLLAXSKIVYEQRAYWKKKNGKTKRFAXLCCTVDESTVHLLAXAKCRVTKRVWSKIXRWTSKDLQIAKWNDCHSVEHLTTLANPSTLVILVSREIWCERMQELFATNVAMLASILAKIKEEVAAWVKEXAGRLREFGILEDIA

SEQ ID NO: 173255 - protein, 52 aa, Oryza sativa
  Clone ID: PAT_MRT4530_71310C.1.pep
LTWIGLICFVHIHIGGVDRFLMLDAAAQRCGTFDFVFLLSQQANMTNVTVST

SEQ ID NO: 173256 - protein, 175 aa, Oryza sativa
  Clone ID: PAT_MRT4530_71311C.1.pep
MGDEWETRMAADKPEVNKQAIWSDISMDVVEGFPRVAGKSVILTVVDRFSKYAHFITLAHPYLAESVARAFYTDIVRLHDVPASIVSDRDPVFTSTFWQALFAATGTKLHMSSVFHPQTDGQSEAVNKAIAMSPCPSGRLPPGLHARRPSSRRPPGLLARKPPRPLPSDYWLSVP

SEQ ID NO: 173257 - protein, 127 aa, Oryza sativa
  unsure (1)..(127): unsure at all Xaa locations
  Clone ID: PAT_MRT4530_71312C.1.pep
QIGSKIFLSPATISRLLRTLAPPPTSPSPPXPPSPPPPPSPPPLPPSPPPPPSPPPPPSSPPPPPLSLYTDRRRPSSLSPPASSPTRTAAPTKAGDVLPHRRRRRRPPPSPPPPPLSPPGRPHVSPP

SEQ ID NO: 173258 - protein, 58 aa, Oryza sativa
  Clone ID: PAT_MRT4530_71313C.1.pep
MIFSYTALPLYINPPFYHAIKRPHSFIFGWSCFPPPYIKFPRSELFFLFLLLDSDIFF

SEQ ID NO: 173259 - protein, 148 aa, Oryza sativa
  Clone ID: PAT_MRT4530_71314C.1.pep
PPPAFPRDHTTSPRLLLLFPRCRPPSSRPCRRVGTPSGRAVTSPGVAVTSPSPACPRFRRNAVARAGLALCLAGVPSATPSAVPVRRPTSPSSPASQRQGRPRPRLPSTRTPPVFVIVISIRPRRRLLRSVVPPRRLVVSLRRHHRRH

SEQ ID NO: 173260 - protein, 425 aa, Oryza sativa
  Clone ID: PAT_MRT4530_71315C.1.pep
MQVELADRAAARPSETGEAPPSSPAAAAAASAAAEDAPLLPGGGGGVRRRVVVSERFRQRSGSFRREVRRAAEETYLLTRLTLILLRYLGIGYRWIRQFLALCCYTFLLMPGFIQVVYYYFFSSQVCRSVVYGEQPRNRLDLYIPTDRTGLKPVVAFVTGGAWIIGYKGWGALLGRRLAERGILVACIDYRNFPQGTIGDMVEDASQGIAFVCNNIASYGGDPERIYLVGQSAGAHIAACTLLHQAIKESGEGDASTWSIAQLKAYFGISGGYNLLNLVDHFHKRGLYRSIFLSIMEGEESLQKFSPLVMVKDPAARSAVSLLPRIFLFHGTSDYSIPSAESEAFFDALQQNGAKADLFLYDGKTHTDLFLQDPLRGGRDKLLEEIVTVIHNDNPDTSAQHLAVPVARRLVPEFMLMLAGRVSPF

SEQ ID NO: 173261 - protein, 78 aa, Oryza sativa
  Clone ID: PAT_MRT4530_71316C.1.pep
QNKCCESFLGNNGVKGANDAVSDSNSNFSRIFYPTSVTVSLCKYRWPAAFDVQCPHLIAVTILLQKRRKRFYPTEAVM

SEQ ID NO: 173262 - protein, 63 aa, Oryza sativa
  Clone ID: PAT_MRT4530_71317C.1.pep
CHFGMQLEFISSSVKSFQVLAVTCLHEGMGLATQSHDMISLSHDYCNILIRIFVFRHNGLIKY

SEQ ID NO: 173263 - protein, 88 aa, Oryza sativa
  Clone ID: PAT_MRT4530_71318C.1.pep
MDQTELGQPGAGAAGGGASVVVTKTMRDQFAPVRRLLAALDDCPMRQPQPPPSTGTTAADSVATVAKSKDGYSSGRLRRRPWHPALLP

SEQ ID NO: 173264 - protein, 138 aa, Oryza sativa
  unsure (1)..(138): unsure at all Xaa locations
  Clone ID: PAT_MRT4530_71319C.1.pep
ARSNSRRRGRRSCSRRACPRRCPWRAAPSSSPPRTPCTRPSRRRGETCCSXPRRWRRPWWPPPTPPRRAPPRARRRSRRGRSTGPPRRRARPCTCRTSPACRSRCGTPTPPSSSARRGTSSRHLRRRRRRRGRRRRVA

SEQ ID NO: 173265 - protein, 161 aa, Oryza sativa
  unsure (1)..(161): unsure at all Xaa locations
  Clone ID: PAT_MRT4530_7131C.1.pep
MLWTSREWRSFDSCTHRSRPPTGCAASSAGPCTARRHGCPTSCSMISSSQGTERRERTIGAAALRWPGGCDAGGKICSRVTRFRGGXVAXGEDRGELRDGAVEKKTAPALCSDWMSTAARARGSCGCVGRRRRTSTARRRXGVVSKATTAVLEATGRRWRP

SEQ ID NO: 173266 - protein, 67 aa, Oryza sativa
  Clone ID: PAT_MRT4530_71320C.1.pep
TGCCRVEPSHKRMLVEALQLHNEVVAMTGDGVNDAPAHHVLWFPDLLNSCHLASCALLAGLHHSATT

SEQ ID NO: 173267 - protein, 844 aa, Oryza sativa
  Clone ID: PAT_MRT4530_71321C.1.pep
MARLNAIVRSLPSVETLGCTTVICSDKTGTLTTNMMSVSKVCVVRSVHQRPITDEYSISGTTFAPDGFIYDAGGLQLEFPPQSSCLLHIAMCSALCNESTLQYNPDKKCYEKIGESTEVALRVLVEKVGLPGFDSMPSALNMLTKHERASYCNRYWENQFRKISVLEFSRDRKMMSVLCSRKQQEIMFSKGAPESVMARCTHILCNDDGSSVPLTMDIRNELEARFQSFAGKDTLRCLALALKRMPEGQQSLSYDDEANLTFIGLVGMLDPPREEVRNAIHSCMSAGIRVIVVTGDNKSTAESLCRQIGAFEHLEDFTGYSYTASEFEGLPPLEKANALQRMVLFSSFTGCCRVEPSHKRMLVEALQLHNEVVAMTGDGVNDAPALKKADIGIAMGSGTAVAKSASDMVLADDNFATIVAAVSEGRAIYNNTKQFIRYMISSNIGEVVCIFVAAVLGMPDTLVPVQLLWVNLVTDGLPATAIGFNKPDSNIMTVKPRLHHSATTTIRWLTDAHGKQCFGIAFIVDVMGVDGDLDQCEHGLLCRLDGGGISSDEDVSAIQKIWHCLVQQTAALTNPLRHCLRLVQCIAAAVSPTFLKLLPIGWTACCASPSLLCEGDTVLAYQQLVLLLIEVNEAVVNGWLFFRYLIIGAYVGLATIAGFVWWFVYSEDGPRLPYSELARKPLLHALLLARKWDKMMWSNNHTSSYQQKPISLIKEIPSIGPQVNFDSCSTRQTSYPCSIFEDRHPSTVSMTVLVVVEMFNALNNLSENQSLLAIHPWSNLWLVGSIVLTMLLHISVLYIEPLSALFSVILIDEVLKFFSRSSRGRRFPLRLRRREILPKESRDN

SEQ ID NO: 173268 - protein, 133 aa, Oryza sativa
  Clone ID: PAT_MRT4530_71322C.1.pep
NSTILERLRVNSLEHHYRLAGRGRTRSCCILAVDCRCRGGDVGQGRGGRGGRHLLGFFPRNAHGSLRRLEVARVEDGEVAFLGSGDDHRREPQHQLPPATKLPHPSADTHGRPRHDLLQCCRDRRGPPLRGAL

SEQ ID NO: 173269 - protein, 95 aa, Oryza sativa
  Clone ID: PAT_MRT4530_71323C.1.pep
MARKLAVEVLSEGSIGLAGQTGVEWAVRPASARSDRHRLGLTDYGSVGSVSATSSSTISASRGPAASWWWAAGKRARTVHPVDAASTAVAVVPTA

SEQ ID NO: 173270 - protein, 128 aa, Oryza sativa
  Clone ID: PAT_MRT4530_71324C.1.pep
MRFTSDRVFQCPLCMIIGDGVEFRTDKDIKSASVRIYRCSTSPTEYFKGIESKNGSYDGCEKGKCPNCPATVIGRTSGASTPNPRINGDQGGSAEPGLGPLGLAFDVGGIESAFNSRQQQPPEREALS

SEQ ID NO: 173271 - protein, 322 aa, Oryza sativa
  Clone ID: PAT_MRT4530_71325C.1.pep
MEAKQRTRHRDGEERRLVAAADGGAEEYDPWTAWLYKPHTISVLLVGACLLIWASGALDPEGASYHSSATSIKRGVWAMIAVFLAYCTLQAPSTILIRPHPAVWRLVHGLAVVYLVALAFLLFQNRDDARQFMKHLYPDLGVGNIFTSKGFTLEIKYCRRNGADKHFCTLMQNCRRDLMELTAVCIWAGMHTVRYFDGKTYEWVGLSRQPSIMGKVKRSLSQFTPAQWDKDQWYPFMGPLRFVQVLFLCVVFMTVELNTFFLKFCLWIPPRNPLVVYRLILWWLIAIPTIREYNSYLQNRLSQFPCTPNSIAHFLQFYLMAC

SEQ ID NO: 173272 - protein, 46 aa, Oryza sativa
  Clone ID: PAT_MRT4530_71326C.1.pep
GGVLIISYGIRSKQNKFWLCLNICVPFSENYQYRGFGSCLGRLIYW

SEQ ID NO: 173273 - protein, 333 aa, Oryza sativa
  Clone ID: PAT_MRT4530_71327C.1.pep
MAKRFDLVLKLGYYEAHIWALPTFLWKKVLLECLVFATLPKFRYYQISNKKERKKVREVGILKKDPEAILEQIEKLEKMKADGALDKARKHKKRQLEDTYNLIVKKRKEYEEKMKEKGEQPIMFSHLGPPKRRPAAEEDDRAKNPKPEDSVYYHPTLNPSGAPPPGKPPMYKSSIGPRIPLPSSSAGASSSMPGTEEAGPSTLPPPPPPPPLPASSEPVDPSAASLPPLPPPPPPPPKPANIAGAPGLPLPPPPPPPPGPPPREIVPGQTLLPPPPPPRPLQPSPLAGTNEFANKQTIGEGASLTDSAQAKGALPPPPPGLIRNSSEMQNANE

SEQ ID NO: 173274 - protein, 149 aa, Oryza sativa
  Clone ID: PAT_MRT4530_71328C.1.pep
EWKIPIKVRGFETQMEKWMGACDCIITKGGPGPIAEALIRGLPIILNDFIPGQEVGNVPYVVANGAGVFSKSFRETVKLVAPWFGPDFDELKRMSEKALKLAQPKAVFDIVRDIHELFREQGVISQISSSLTSSFFIPSPETPTPIQLM

SEQ ID NO: 173275 - protein, 575 aa, Oryza sativa
  Clone ID: PAT_MRT4530_71329C.1.pep
MAASSSSSSSMASPRGRSIRETVLETVAAYHQQQRMRRKFRKSLSYAGELSSAGRARGEGGASSSASTTSLCGPDEDDEPFWEEEEGTVELVQLGANRAKNVLILMSDTGGGHRASAEAIKDAFRIEFGDDYRVFVKDLCKDHAGWPLNNMESSYKFMVKHVQLWKVAFHTTSPRWVHCFYLAALASFYAKKVEAGLKKYKPDIIISVHPLMQHIPLWVLKWQGLQNRVVFVTVITDLNTCHPTWFHADVNRCYCPSEEVAKRAALDDLQPSQIRVFGLPIRPSFCRAVLVKDDLRKELELDPELPAVLLMGGGEGMGPVKKTAKALGESLFDKELGKPIGQLIVICGRNKTLSSSLQALEWKIPIKVRGFETQMEKWMGACDCIITKAGPGTIAEALIRGLPIILNDFIPGQEVGNVPYVVDNGAGVFSKSSRETAKLVARWFGPDSDELKRMSEKALKLAQPEAVFDIVRDIHELSREQGPTVDVTIDLALSILSLIPRCHVDSNDDVEERREEREEQPPLVQGATSTQVSRNGREREKYIGSSMIWTKLDVTTGFRLLFSLWSLMVGMGLFD

SEQ ID NO: 173276 - protein, 541 aa, Oryza sativa
  Clone ID: PAT_MRT4530_7132C.1.pep
MERDSGFNFFSQLPSVLGSSAASFNIYSQVSSSSAAHAPRAGLDGLDLNFNLQGAEEFPHIGEYENYLQSGGDQGGSTTRGSGLPTLRTQRTLGVRNLWMSYEEEQKPNVRYMRQITTKFSESMDISQQVIQQAHFVKMESKKEKEYFSVKKCQELAFECGIEHDSAEVYAMGKMFQDPFQREFFCGLPSASARLNYLKRWLPLCSSTSRMSSVEALAMFLWIVGTPQSVRQVEDRFVRSLETVSHTFDGVLRSVLKLAANIINPKDLEFSTVHPCLENPDFWPHFNDYIGALDVTHIPVVVPKSKVVQHINRHNETSQNMLAIYDFDMRFTFVLAGWPWSVHDMRVFNDAMTKYGDKFPHPPLGKLFYLSCKYFFNFRWSYMSLYVPEAVGKYYLVDAGYPNRPGYLSPYRRTRYHVEQWQEGPLPQGMKETFNHAHSQVRNDIERSFGVLKMKWRMLLDMPKFSARKQTRIIVACMALHNFIRESRIADREFDMCDADANYFPMPHSSQDNWPEDEPLAEDTNMNAFRDELANALFNGL

SEQ ID NO: 173277 - protein, 125 aa, Oryza sativa
  Clone ID: PAT_MRT4530_71330C.1.pep
DAWVPIEGNYSRGNLMFQRIRSYIAFLEQRLEELETVEDINHLIFTDSDIAVATDLGHIFEMHPHCHLALTFRNNKGQPLNSGFVAIRGTRDGIFKAIEFFKEVLEAYYLKYMEAYRMLGDQLTL

SEQ ID NO: 173278 - protein, 235 aa, Oryza sativa
  unsure (1)..(235): unsure at all Xaa locations
  Clone ID: PAT_MRT4530_71331C.1.pep
QWTCIEVKQISQAIVFSHQQPPRSAYSCPQGLERYRLICRVIGCENFSILVDDIKLVLEAEKNTTWLKFKESFGYPAADEGRLKRAAFKNIGNYWKIIKSRLVAEYVLNPATPKPYGLFPFITPRVWEQFYEKKSTPKSRAKSEAYQELXARNLHSHRLGTAGYARKEQQWXEEDETVGESNTPPVFGDIPHPXARNWARAKGHKNDDGTISSPNPQDQQVYENIKELVASQEAS

SEQ ID NO: 173279 - protein, 200 aa, Oryza sativa
  Clone ID: PAT_MRT4530_71332C.1.pep
SLLTQLIKLKLLLTASLATMSNTTEKKMPQQQQVERPTALAPADAEIERVFTRFDADGDGRISPSELAAVTRAIAPPPSESAGGREVAAMMNELDTDRDGFVDLGEFAAFHGRGRGDAEHEAELRAAFDVYDVDGDGRITAAELGKVLGRIGEGCSAEECERMIASVDVDGDGCVGFEEFKKMMCRDAAATGGADKAKTE

SEQ ID NO: 173280 - protein, 76 aa, Oryza sativa
  Clone ID: PAT_MRT4530_71333C.1.pep
MALVVSSSSTMRSICRSPFLSGKRCSASASKVALAIALLSSHWELDGDIHMLPNGTSMAASMLSEAHIEPSLSITN

SEQ ID NO: 173281 - protein, 322 aa, Oryza sativa
  Clone ID: PAT_MRT4530_71334C.1.pep
RRPLVGGEEAAAAAAASTMVWFQCEDCGDDLKKPKLAGHFRSCSAYRLSCIDCGEFFTQETVQGHTQCISEAEKYGPKGQNKASNNAQGKQDKPKPNADVDINVGLSTYPPWFCSLCKTTTTSKQTLLSHADGKKHRAKAKAYHASQKQANGVEQTPKETVGAPVTESAQVNNERSTENERGVDNDAAKRKRANDTTSEEPDNTKRQNNLSVNSGEVVQSSNEEAETKAKSKGTKDELVSSANLKGSKKQKIKWKKIITKVLQTNPDGVLKLKKLQKLVTKELLECGLTEDKEQMHAILMDKISSSSRFSVDGKRIRLVAKD

SEQ ID NO: 173282 - protein, 89 aa, Oryza sativa
  Clone ID: PAT_MRT4530_71335C.1.pep
TCHRDTETSLNRNTRHPGSPNYTKPVIQRPSVILTPVLIYVAAELVWDPRGPTYQVSTSSLFPLFSVPSSPISSISRRPGLRVREQTAG

SEQ ID NO: 173283 - protein, 621 aa, Oryza sativa
  Clone ID: PAT_MRT4530_71336C.1.pep
MDVESCASSSPPPDAAVDWRGRPCEPRRHGGMRAAVFVLGIQAFEIMAIAAVGNNLITYVFGEMHFPLSQAANVVTNFVGTIFLLSLLGGFLSDSYLGCFWTMLIFGFVELSVEFNDDTAATGFILLSVQAHLPQLKPPPCNMAATDGGCEQARGIKASIFFAALYLVALGSGCLKPNMIAHGADQFAAAAGGGGAAAADNAKRLSTYFNSAYFSFCAGELVALTALVWVQTHSGMDVGFGISAAAMAAGLVSLVSGAAFYRNKPPQGSIFTPIARVFVAAYTKRKQICPSSSSDPVNAGVCEPAHLAGGSFRHASKFRFLDKACIRAAEQGPNTKPESPWRLCTAAEVRQAKTLLAVAPIFACTIVFNTVLAQLQTFSVQQGSAMDTALGGAGSSFRIPPASLQAIPYAMLLALVPAYELLLVPLMRRATGARSGITPLQRIGVGLCTVPLSMVAAATVEHRRRDLSLSAGGAPPRAMSVLWIVPQFLVFGVSEMFTAVGLIEFFYKQARGAGMQSFLTALTYCSYAFGFYLSSVLVSLVNRVTASRGGGGHGGWLGDNDLDKDRLDLFYWMLAVLSVINFFCYLLCARWYNSGGADDGCDASASAQVAAEGDGNGKEII

SEQ ID NO: 173284 - protein, 72 aa, Oryza sativa
  Clone ID: PAT_MRT4530_71337C.1.pep
MAVTRGGGPWWTRSTDRGRSGEPRGAHVAPTRRTRGCHVAATRRQHKSVTGGDRPAAKGGGIAATRTATASA

SEQ ID NO: 173285 - protein, 105 aa, Oryza sativa
  unsure (1)..(105): unsure at all Xaa locations
  Clone ID: PAT_MRT4530_71338C.1.pep
LIRDGNVCRFLDKACIRAAEQGPNTKPESPWRLCTAAEVRQAKTLLAVAPIFACTIVFNTVLAQLQTFSVQQGSAMDTALGGRXSSFRIPPAXLQAIPYAMLLAL

SEQ ID NO: 173286 - protein, 81 aa, Oryza sativa
  Clone ID: PAT_MRT4530_71339C.1.pep
DTRCLSLCLAVSMHADILYSLKWHEVCSLSWRECCSLVLGLLIFTGSGASVIGASADIYEYGHVSVSLLVCEVFLAAPSCA

SEQ ID NO: 173287 - protein, 221 aa, Oryza sativa
  Clone ID: PAT_MRT4530_7133C.1.pep
MTVDLLCAYVMLGRYTKISAKRHVINPLFLDIHCWSLGSSPTAEAKCDSPAVLVVAYAMLFLVMQQRCRSCFLQLQKSTFRPFRPAYLAGDGCCRRLLLRAEQPEHGGDHVSGGERQLLLQHQHLREQQRAGGDQLGAGQEQGGHERPRSSHPPPASSPPMPDQAEEEDGGGDGDDDSNGGHEELPVICRNDPHRHSGSAAVSSALYVDVLIDLILWGRGF

SEQ ID NO: 173288 - protein, 37 aa, Oryza sativa
  Clone ID: PAT_MRT4530_71340C.1.pep
SSAGADQKRIRGPLRNFPVRSPDPVDASEEDESKRPQ

SEQ ID NO: 173289 - protein, 89 aa, Oryza sativa
  Clone ID: PAT_MRT4530_71341C.1.pep
WRKSLERRCESLAVYADKCAPETAESSLAPPLHACSASRASSVLPRSIEFFSYRGTSVELIGITFRADCIVGWASGEILTPSPAARGST

SEQ ID NO: 173290 - protein, 351 aa, Oryza sativa
  Clone ID: PAT_MRT4530_71342C.1.pep
MAAAAAAPASSEKEVLPPSLTSSSEPPPLFDGTTRLYVAYHCPYAQRAWIARNYKGLQDKIKIVAIDLADRPAWYKEKVYPENKVPSLEHNNQVKGESLDLVKYIDTNFEGPALLPDDSEKQQFAEELLAYTDAFNKASYSSIVAKGDVCDEAVAALDKIEAALSKFNDGPFFLGQFSLVDIAYVPFIERFQIFFSGIKNYDITKGRPNLQKFIEEVNKIHAYTETKQDPQFLLEHTKKRLGEKIKLVPMDTNDRPAWYKEVYPKNTLPSLEHNNKIIGESLDLIKYIDINFAGPRLTPDTLFAGIKNYDITEGRANIQIFIKELNKIDAYMHTKQDPSEVIALTKKKLGI

SEQ ID NO: 173291 - protein, 114 aa, Oryza sativa
  unsure (1)..(114): unsure at all Xaa locations
  Clone ID: PAT_MRT4530_71343C.1.pep
RSSPSPVLWITFSSSNHLVPFPFIFPFPLPNPFAFPLPFPRPFPLPSGLLFFPLPSGLLFFWNLPSFKGHFXPPVVLVEFLEFTVFWGSGLDAGECGLAFWWLVLWVSWGVANG

SEQ ID NO: 173292 - protein, 86 aa, Oryza sativa
  Clone ID: PAT_MRT4530_71344C.1.pep
HMSPPSEHYLRSYVLSSLAQSALVLTVLSGAYHSSVCRCYPHKPQKRVYLKSAGQAELSFHKACRTGPTLDDVCSPHRLLVVVVLR

SEQ ID NO: 173293 - protein, 49 aa, Oryza sativa
  Clone ID: PAT_MRT4530_71345C.1.pep
MGLAFGKLSSRLSAKKEMRILMVGFDAAGKTTILHKFKLGRGSAPPVPT

SEQ ID NO: 173294 - protein, 102 aa, Oryza sativa
  Clone ID: PAT_MRT4530_71346C.1.pep
MKEEARRLLLVWNLELLEGSPPSSASTSIAVSFACCRLSAHLIHPQALSAVSPPLSSGHCLLHPPPKVVGSRLELCLLHLAPKVTDCRLSVTPSSLALDPVS

SEQ ID NO: 173295 - protein, 254 aa, Oryza sativa
  Clone ID: PAT_MRT4530_71347C.1.pep
MTRRVAGVAAAAAAVAAAVVVLAAASCCEARDFYVGGRDGWTTNPAEPYNRWAERNRFQVNDRLVFRYNKEDSVVVVSQGHYDGCNATDPLLRDAGGDSTFVFDSSGPFFFISGDPARCQAGERLIVVVLAVRGNATATPTTPSPPPPPTVPAAPTPRPSPPPPAAGTNGTARAPSPPVPAPAPAGSPPPPPPPPAGGNFTAPSPAGGMNFTAPAPGTNGTAAPPPRPSSAPSVRGGALLMLLVVATAGAMALV

SEQ ID NO: 173296 - protein, 938 aa, Oryza sativa
  unsure (1)..(938): unsure at all Xaa locations
  Clone ID: PAT_MRT4530_71348C.1.pep
ASMLIFCLTELEMAGAIVSASVGVLNPLLTKLSSLIEGEYKLLKSVKKDIIFLRNELSSISVLLEHLSNKEDKLDGPTMEWRNNMLELAYDIEDCIDLFIHKLSCGDANANFVRKIGSKIKKLWGKHQITECIQELKNRVMEEDQRRKRYQIDDFISEPSMVEIDPRLLALYEEVERLVGIDGPREKIVKWIMHKDWSSEQRKVVSIVGXGGLGKTTLANELYKTIQGDFKCITFVSISRTPNIRKVLVDMLKGLGSNGDVSEDEQNLISHLRGFLKDKSIIITTTRNAAVAKACSRTTSEGYLHSMQPLAEQESQRLFYRRAFNSENCCPPHLEDISHAIISKCRGLPLAIISIASLLATKSDSEDQWVQVHDTIGASLNSEARVRKILMLSYYDLPYPPKKYPLYLSMYPEDYXIDRQDLIWRWIAEGFIVEVKNQTQEQVGENYFNELINRSLIQPVSIQYDGSAKYCRVHDIVLDLIISLSTGQNFVAIVDEQQHWSSFKKIRRTWFPSNGTDNRIVKKITNNCSQVRSLLFFENPKPKQIPQFKKCHALRVLDLYRCRNLDSXHINSLTYLLQLKYLKVFGVNVTELPKDIGRLQQLETLTIHAGDVDEINIPSSVCRLQKLQRLNFNYPMRLPDEIGVLQALEVLYLNSIRYSIKCLQELSXLTRLRQLRILCPGIYDFGGDVARFQRYKEAFYFTLNELGKNSLRSLHVTCSPEFSDTLMDSCCSSAPDLKELFIDGNGISKFSDRMVSLCNLASLRLWNITSIDQKVVVLLGXIPKLLYLEVFLSRGLGDGLTVGCSGFPCLKEFIFDNSRLHWLLFEPGAMPXLQRLCFSLYAREAASNLGLEQSYVHLSSLQHLTFYLCCTNATITDVKAVEATIRNVISIHTRRPTLVLRRYLQDRMVKEDEEEQLKDNQSAGLYMYACLLHFDHSN

SEQ ID NO: 173297 - protein, 95 aa, Oryza sativa
  unsure (1)..(95): unsure at all Xaa locations
  Clone ID: PAT_MRT4530_71349C.1.pep
RHPLCAEQFNDTLAYIECQFLRCSEIANTLSSDHDTQLNPVWNHPSCDGSSDSAGGDDGAVYFWMAAMILSLSRVANAFTHAXAHAXAHAXAHAF

SEQ ID NO: 173298 - protein, 60 aa, Oryza sativa
  Clone ID: PAT_MRT4530_7134C.1.pep
SISNSFSKLRSLNTDIANSLFNLASQTNKLSISSLQNNNGPTCQPLLFFPSLSLLFPSFS

SEQ ID NO: 173299 - protein, 946 aa, Oryza sativa
  Clone ID: PAT_MRT4530_71350C.1.pep
MAGAFVSASVGVLNPLLTKLSALVEGEYKLLKSVKKDIIFLRNELSSISVLLEHLSTKEDKLDGPTKEWRNNMLELAYDIEDCIDLFIHKLSCGDANANFVQKIGSKIKKLWGKHQITECIQELKNRVMEEDQRRKRNQIDDFISEPSVVEIDPRLPALYEEVERLVGIDGPREKIIKWIMTKGKPLEQRKVVSIVGLGGLGKTTLANEVYKTIQGDFKCITFVSISRTPNIRKILVDMLKGLGSNGDVSEDEQNLISHLRGFLKDKRYLIVFDDIWDIGAWKVVNCAFPENNLGSIIITTTRNTAVAEACSRTTSEGYLHSMQPLEEQDSQRLFYRRAFNSESCCPPHLEDISHAIISKCRSLPLAIISIASLLSIKPDTEDQWMQVHNSIGVTLNSDVEVRKILMLSYYDLPYPLKNCLLYLSMYPEDYVIDRQELIWRWIAEGFIIEAKGKTREQVGENYFNELINRSLIQPVYIQYDGRASCCRVHDIVLDLIISLSTGQNFVTIVHEQQHWSSFKKIRRTWFPSNGTDNRIVKEITNNCSHVRSLFFDSPKPEQIPQFKKCHALRVLVLDGCMSLESQHINSLTYLFQLKYLKLNVANVTEMPKDIGRLQQLETLIIRGGGHVNEINIPSSVCRLQKLERLIVDYPMRLPDEIGFLQALEMLSLFYNIEYSIKCLQELRRLTRLRYLRIRTPFGGDVARFERYKDAFYMTLDELGKNSLQSLHVHVTTKFSDTLMDSCCSSAPGLRELSTSGVGISKLSEQMISLSNLAYLVIFYNTRSNDQKDINLLGCIPKLLYLKVIFAQGWEDGLTVGCGGFPCLKELMFRHSRLHWLLFEPGAMPKLQRLSIELFAQKAASKLGDVKALEDAIRNVASIQTRCLTLEILRRYEDEMVKEDEEEQLKGSTEGGGTEEHHIQQPLIIVGNQKRWKPVLFGNSDKVQAS

SEQ ID NO: 173300 - protein, 323 aa, Oryza sativa
  Clone ID: PAT_MRT4530_71351C.1.pep
MRHTHRCTAADQNVHIIFLFFIFGMDELSVCRWYELVPGFTKPMEFHENRSDFMKPLGLGYENRSVLAGFRTVLTYGVDRKSSPPYNRLVLHQRKVLLLGNNRIPRRDVNGSKSFRISDVFSLFGKSDALVLSTGMINPFIPIRVRRIHLSLITGGAQAPYNETSELKYREYVLAGPLQNHWKTGSYWSRSTGIRSSTGNGGRSGAPSGLDNGDDLRQRWRAVAGLAEDGGRGAASEGQRQVRPVMDGSGGKWVRSGSRRQRSGRERRRRPLPARDLETAPLSCPDPAIEALNLEAAAATWPGTVWRSSPSGFGDDDDELRRS

SEQ ID NO: 173301 - protein, 857 aa, Oryza sativa
  unsure (1)..(857): unsure at all Xaa locations
  Clone ID: PAT_MRT4530_71352C.1.pep
AGAIVSASVGVLNPLLTKLSSLIEGEYKLLKSVKKDIIFLRNELSSISVLLEHLSNKEDKLDGPTMEWRNNMLELAYDIEDCIDLFIHKLSCGDANANFVRKIGSKIKKLWGKHQITECIQELKNRVMEEDQRRKRYQIDDFISEPSMVEIDPRLLALYEEVERLVGIDGPREKIVKWIMHKDWSSEQRKVVSIVGXGGLGKTTLANELYKTIQGDFKCITFVSISRTPNIRKVLVDMLKGLGSNGAFMYDHSSTLMRKYDDRIINLIVLTYLIVVDDIWDIGAWKVVSCAFPENNLGSIIITTTRNAAVAKACSRTTSEGYLHSMQPLAEQESQRLFYRRAFNSENCCPPHLEDISHAIISKCRGLPLAIISIASLLATKSDSEDQWVQVHDTIGASLNSEARVRKILMLSYYDLPYPPKKYPLYLSMYPEDYXIDRQDLIWRWIAEGFIVEVKNQTQEQVGENYFNELINRSLIQPVSIQYDGSAKYCRVHDIVLDLIISLSTGQNFVAIVDEQQHWSSFKKIRRTWFPSNGTDNRIVKKITNNCSQVRSLLFFENPKPKQIPQFKKCHALRVLDLYRCRNLDSXHINSLTYLLQLKYLKVFGVNVTELPKDIGRLQQLETLTIHAGDVDEINIPSSVCRLQKLQRLNFNYPMRLPDEIGVLQALEVLYLNSIRYSXKMFTRALCWLTRLRQLRILCPGIYDFGGDVARFQRYKEAFYFTLNELGKNSLRSLHVTCSPEFSDTLMDSCCSSAPDLKELFIDGNGISKFSDRMVSLCNLASLRLWNITSIDQKXSSSLGIPKLLYLEVFLSRGLGDGLTVGCSGFPCLKEFIFDNSRLHWLLFEPGAMPKTPEALF

SEQ ID NO: 173302 - protein, 257 aa, Oryza sativa
  Clone ID: PAT_MRT4530_71353C.1.pep
AASAAAAAAEATTRPAGVDTFWTSCNRCRMQYEYLRIYLNHNLLCPNCHHAFLAVETGFPCNGSSSSFSWSTKQQPQNNNSTKHSYGSTSRTSSIPGTGHGGYQQDGTYDSYNNQSFQWNQYSKTTPAAGTNAYGTQALEKPKRKHEESYSYNYSATGNSYGHERTNSRRGRFSKRRRHSNDGYTTMDFGGDNRETVAASTETTAFTDVAVAQVNGTSGEKLRSAVSGRRANVLREISQIDTALLIEKAKAAIQEKL

SEQ ID NO: 173303 - protein, 175 aa, Oryza sativa
  Clone ID: PAT_MRT4530_71354C.1.pep
MDVSVFNNGGGGRSTNVNSNDIVGGTMIPMAFGVDGRRPLVSESIVPRQAALEWLLLLCIHWIASPSKGTRRRYMHQANMHKYVDNKGKANVAIYSLHIVLFLKPSLFVQPYFFRFTINLTKIWQCQNLICASRCLVMALSVRSEAATITGIQTKIHFIVDFLQALKLSSAMGLI

SEQ ID NO: 173304 - protein, 181 aa, Oryza sativa
  unsure (1)..(181): unsure at all Xaa locations
  Clone ID: PAT_MRT4530_71355C.1.pep
LLFWIWNFFFRRLSDDCLPPPPQPTSPIRSPVVVPRPLKSPRTVSTGITAATAVPPPLKSSRIAGLLRQTALATSSSASASTAAYTEPRRRSSAAERLNFLIASQTFAWSSTGNNLQTFFEGAEYNFTWGLSSEDAVERLQLSGASRLENIKFLSFMWNPLSXVIWAATVMALVLANGGCK

SEQ ID NO: 173305 - protein, 146 aa, Oryza sativa
  Clone ID: PAT_MRT4530_71356C.1.pep
LVFPPCYRAHVAPLRSAERGRCGLTPAPAGAPEVYRVPRGYGWCAVRGGYRQRREAGYRRCRWLRCATVVSAATVVGYAPAGRRATPTGTGRNWSGGALMGHSVCYAMLMRATMHACMPIVIIVSFGVGTMLSVGVNCVGCPIWCF

SEQ ID NO: 173306 - protein, 113 aa, Oryza sativa
  unsure (1)..(113): unsure at all Xaa locations
  Clone ID: PAT_MRT4530_71357C.1.pep
MEFVRQQYGIAASPCDAQCSCMLQLRNXQVWATAAGWWCNSAHYQDINIXVQAIAQQLQLPRSLDDALLWARNLTQAQAQALLALNCPSRYGYATLRYYXAPSTITTLAGVLY

SEQ ID NO: 173307 - protein, 391 aa, Oryza sativa
  unsure (1)..(391): unsure at all Xaa locations
  Clone ID: PAT_MRT4530_71358C.1.pep
ITFSSSTTSPTLPITLSMVPATDRVPMDAEVSGRLDRMNCNAGALKLEIADTGRLSGTFVNSRAGRYLDVWFRHLVLPAVLVDVVIINVRRASTLSVQMSLKNQRISAGIGIASDPMMSRRSGKKLAMEDISICLCSPXGVEQLSFFGRLGGHGGDGAARAVSKIFPENVATLLSHHETKEKVLSYSDASDVLRYAFTMTEAAIDHEYEGCTATVLLIWFDQKKDCFAQCANLGDSACVMSVNGKMIEMTEDHRVASVTERARIARAGQALKAGEVRINGLNLARMFGDKFLKEQDSRFSSEPYVSQAVHITKACTAFAVIASDGLWDVISTKRAVQLVVEGRERNSGDSASADKVANRILSEARNLRTKDNTSVIFVDFDILRTDHCIAK

SEQ ID NO: 173308 - protein, 103 aa, Oryza sativa
  Clone ID: PAT_MRT4530_71359C.1.pep
MAATASPAASFALFVLLLAGLTMGGGGDGGEAGVGGSTSSAGSGGSGSGGDGVHGGNVEQRRRGRLPSPPSRAAWSSNTPALWRPPPSPRASIRRSCRPAIDA

SEQ ID NO: 173309 - protein, 803 aa, Oryza sativa
  unsure (1)..(803): unsure at all Xaa locations
  Clone ID: PAT_MRT4530_7135C.1.pep
GRHCNVHLANDAWVGRFSLMEDEKKRMIRPFTMDEVNQVIKSMKSQTAPGPNGFPVGFYKQLWEHFGGLIKEMLDDFHIGALNIDRINYGVITLLPKIKDACTIKQFKPICLQXVILKIVTKTVTLRFSEIADKVISWTQTAFIPVRNILEGCVILHEVLHELNKKQLSGIVFKIDFEXAYDRGKWDFLYEVLXKKNFDPVMINWIKKINEGGKVSININGEQGPFFKTFRGLRQGDPLSPLLFNLVGDALAVILDKAKESGVLKGLVPDLVPGVITHLQYADDTILFAQVSDQNILSLKFLLFCVEEMSGMKINYQKSEVYVLGVSKEEELKVANMLNCNVGKMPFTYLGLPMSIEKIVMRDLCYISQKVEKRMQSWRSGYLSYGGREIKINSCLSSAPLYAMGFYSLPEGFHAKMDAARSKFYWQGTGEKRKYHMIKWEALCRPKXFGGMGFMNTRVMNICLLCKWIMKLENGAPDMCFEVLRRKYLRGSFFQSSXSGGSQFWKGLHHCKKFLQRLVEKKVHDGSRTDFWGDIWCGNVPLRVVFNNLFDISVHQKATVRELWNNGDWILSFRRILSTEREQELNDLKRMLQSVQIEGGCDEVIWPYTKHKSFTAKSMYNQLIFGGXKDSVMWAVWKSRIPLKIKHFLYLVGRGKLPCAVQLVKRNWKGGNELCKLCGKNETSDHILFHCPLAVFTWCVIKEALHLKRRPFSFWDCTSFVWDRGXKRVWMVLLASICWALWLIRNDWVFKDVLVSSPLQVVYKSLSLAQKWKVFLRGEEQKVLDGWHEAIMDKLRQVKPLVL

SEQ ID NO: 173310 - protein, 76 aa, Oryza sativa
  Clone ID: PAT_MRT4530_71360C.1.pep
HAPTGRFYTSSSLAPAAMVARDLLLLGATVTSTHAARLLDEQLSTGAIPAIPGGPGETEEGPGIPVTLRLPREPVV

SEQ ID NO: 173311 - protein, 446 aa, Oryza sativa
  Clone ID: PAT_MRT4530_71361C.1.pep
ARGSAVQYRREEERGGVSKSKLGDRARSMEPNIVPAYGCSGNLAAAAAPPEYRCVTRLRHRRLLTFLWLHGFRSTFEAMAEETKVLVSLPRLERLITSSMWDDAIGYICRFLPPSSGSTGQRRRRGSHLSEEAQTLLLFLHMHKSFADVVAGNKAGAAWSDKHRRLYAQSSGLSPYSHAARIRRSILSFVLSDRTRESLDWGRVREQVAQIVRSLLHSTPELVGFVDLPGGMVKPHNVLPIGFGFRSKRHVRQQSHPQASTIAKLYLEMKRCFTVNSAPVTTGNHTYFYTEGLSNKARSWMADILDLSLRAGCKRSEHHEGYPLQSSSLVAAITQTMFSTITTDTENSGIASATKTGVPASTVLQTLIGTMISPGKKSGISSVTNAGTDMHSSQEDCHTENYCQGFTPRKHPREEVEPEEDISPKRQQTTVKFGEASVSSTTYSVD

SEQ ID NO: 173312 - protein, 195 aa, Oryza sativa
  unsure (1)..(195): unsure at all Xaa locations
  Clone ID: PAT_MRT4530_71362C.1.pep
SYPPLSPSPPPLYRGSAGGGRRAVAGAASPSLACRLDLEKRMAAQLGXAVLDDLLILSSSPDAAATTAYDIDAVQRILAGYLDHEGDAPAVPPRLDCTTDDDFSSAASRPHNDVAQVGRLMENYLAKIASDENLSIDXFTALAELIPXHARFNEDGMYRAIDIYLKVRXAAQNDRLPVQTVVQVLYHEQRRLRAP

SEQ ID NO: 173313 - protein, 37 aa, Oryza sativa
  Clone ID: PAT_MRT4530_71363C.1.pep
MLKLNQSEKIKDEGEFTLPQLSGRFPAILEGGFADRC

SEQ ID NO: 173314 - protein, 123 aa, Oryza sativa
  Clone ID: PAT_MRT4530_71364C.1.pep
MKKLRNQNGGENLGDNIVRWRTVKNANGTTSCESNARIVKWKDGTMQLLIGNEVLDISVHEAHHDQSHLFLRNGKGSSLLHGRLLRKMRFMPSFLSSKSHRFFTCFCEYQIKKYLYDSIIDRF

SEQ ID NO: 173315 - protein, 303 aa, Oryza sativa
  unsure (1)..(303): unsure at all Xaa locations
  Clone ID: PAT_MRT4530_71365C.1.pep
MAAAGAGASGPAAETAAATFRRVYGTLKAELLKDPSFDFNDDAIQWLESMLDYNVLGGEKNMLFRNNATKPNNGTLRYGWQLQAYFLVLDDIMDNSQTRRGKPCWFRLPKVGLIAINDGLVVXNYGKSDPACVAKVKDLYNELHLQRVFSEYERESYEKLISAIEAQPNEAVRAVLKSFMHKIYKXASRTRLKRTANFCIXVLYYAQVKHILVEMGVYFQSQDDYLDCFGEPEIIGKENYGKSDPACVAKVKDLYNELHLQRVFSEYERESYEKLISAIEAQPNEAVRAVLKSFLHKIYKRSK

SEQ ID NO: 173316 - protein, 95 aa, Oryza sativa
  unsure (1)..(95): unsure at all Xaa locations
  Clone ID: PAT_MRT4530_71366C.1.pep
TPKLLIFWDGGSSIYIACYSWRLPPLRRLVEELLGDLSEKIMEEARCRXVSGLEFTTFGVKEELPRVIEAWVVLSMGRLPPCPPLYKGCVRWLRG

SEQ ID NO: 173317 - protein, 161 aa, Oryza sativa
  Clone ID: PAT_MRT4530_71367C.1.pep
MGKVVGIDLGTTNSCVAVMEGGKPTVIANAEGFRTTPSVVGYAKNGDRLVGQIAKRQAVMNPGNTFYSVKRFIGRKFDEITNEATEVAYSVVKDGNGNVKLDCPAQGKQFAPEEISAQVLRKLVDDASKYLGETVTQAVITVPAYINDSQRQATKDAGKIA

SEQ ID NO: 173318 - protein, 119 aa, Oryza sativa
  Clone ID: PAT_MRT4530_71368C.1.pep
PSRTHWNSNSGGASPPTKFKSKDPDLLPDPINIPPDCIVVLNDDDEPADRPVTPPAIIQAQAQETLPSLTLSLSLSLPGAAAAAAEVEVAPPRPGHWQLLLRSKTAAADHHRHRVSCCR

SEQ ID NO: 173319 - protein, 449 aa, Oryza sativa
  unsure (1)..(449): unsure at all Xaa locations
  Clone ID: PAT_MRT4530_71369C.1.pep
MAYATYFWSNTLNAFLFNQGPMTPTLLDITMLTGLDVVNRPPLTDVEFPRLEPTTNDDGEEVTHRRCMSYGEAASTPADSGAKLSAKLLKDWFCSFYEGFQRDARVWFPYEDSVNFDLPANFRFEDIDSEKFDKSREVFSAAISPCILPVGIHQGRNIQVSYEFYHPMSSARQFEMGQLPIGLFFADKIYIENIELARFKSRNFDRWWVEWKQHIFHQSASMYMTDLFPDVVPQTTESSPPRKSNSGRDIIYAPGLLPNGGGLALPVIGYHAPGPQKKKTTVRKKSAATTLKLARPEVTKLRKNNKPAAPAIPVLTDLFSFDIKDYLDEIEEDTTSKAIAPLSDDVKRTLEDISHRLEASSLDSLVVDCGSIRTRLHEIQSLIPDDLANILTLAVYLEQHQFRLEKAKQRLADRREREDIEATKXNRQLVHEEKAKLDQLSVGPIQSNI

SEQ ID NO: 173320 - protein, 30 aa, Oryza sativa
  Clone ID: PAT_MRT4530_7136C.1.pep
SGAYTWKQMARGADVDSANLGVRPNFWAAS

SEQ ID NO: 173321 - protein, 85 aa, Oryza sativa
  unsure (1)..(85): unsure at all Xaa locations
  Clone ID: PAT_MRT4530_71370C.1.pep
EARRVSDYRENHRLSGYYHGKYXTMXKQLMWKSSDVTHLLKALEEAYKAYPEALVXMITLDSLRHGPTTSWIAYTPPCCQEPACN

SEQ ID NO: 173322 - protein, 178 aa, Oryza sativa
  unsure (1)..(178): unsure at all Xaa locations
  Clone ID: PAT_MRT4530_71371C.1.pep
DQEHRSRNFDRWWGXWKQHIFHQPASMYMIDLFPDVVPQTTESSPPRKSNSGRDIEYAPGLLPNGGGLAPPVIGYHAPKTSSDGGTNHGDGDAVGGGALMAHGSGGCGATCAHRKRREVGGCGSAVWAGLGRNGWRLGKTTTRRVPGSAGPSPSKEGRLNKGVDEDSEDEGGETGDDL

SEQ ID NO: 173323 - protein, 712 aa, Oryza sativa
  Clone ID: PAT_MRT4530_71372C.1.pep
WYKCVSASKQVRWDELGIGQALALTLANSAKDEPLMASATYFWSNTLNAFLFNQGPMTPTLLDITMLTRLDVTASANPMSLNTKNQFDFRTKSIGGWSGYVAAYMGKGSVTPWEHTSFLLMWLEKFLFCGSSCGPTTNWQFPMGKILLGYLFQMLSNASSKIAIGSVVGAGGPWWLLQTWLNLVVMKVVNRPSLIDAEFPRLEPIIGDDGEELTHRRCMSYGEAASTPADSGAKLSAELLKDWFYSFYEGFQRDARVWFPYEDSVNFDLPADFRFEDINSEKFDKSREVFSAAISPCILPVGIHQGRNIQVSYEFYHPMSSARQFGMGQLPTGLFFADKIQCRGEISSTLMMDRLLNIPGPPLGSIDNIELARFRSRNFDRWWSEWKQHIFHQPASMYMTDLFPDVVPQTTESSPRKSNSGRDIEYAPGLLPNGGRLAPPKKKTVVRKKSAATTLKSAPPPPPPPSPPMQQMSSDRTPSATGSHHVEEEEQTAAPAVPALADLFSFDIKDYFDEEAEEESTSKALAPMDENVKKTLEDISLRLESSLDNLVADCVPDDLADAITPAVYLEQHQFKLEKGKQRIADRWERKDIEATIQTNRQLVHEEKAKLDQLSVGPIQSNIDRLEARKIDLIAQLEECNAELDLEKQKLANLPNAVEEQKSRLKSAIKNVADMTKSLKIISGTDTQDIQAIEEVDQIRQRAVSAIQHYLSR

SEQ ID NO: 173324 - protein, 387 aa, Oryza sativa
  Clone ID: PAT_MRT4530_71373C.1.pep
MASSSDEQPKPPEPPAAAAVAGTAVATAAAAVPTHAEWAASLQAYYAAAGHPYAWPAQHLMAAAAAGAPYGAPVPFPMYHPGAAAAYYAHASMAAGVPYPTAEAMAAAAAAAAGAVPEGKGKGKGAAASPEKGSSAAPSGDDASRSGDSGSEESSDTRDDDTDHKDSSAPKKRKSGNTSAEGEPSQATLVPYAAVESPYPLKGRSASKLPVSAPGRAALPNATPNLNIGIDLWSTPPALAVPAGQGEASPGLALARRDGVAHLDERELKRERRKQSNRESARRSRLRKQVGYLYGSGSRWQTWKETLILLGAAIFLAGGIECRIDAYTTDGYDVSTSPDVGLSAHGQYAQQAMLQETDKQHAPHKNTNNNSNGNYVGGSHKPEANSR

SEQ ID NO: 173325 - protein, 165 aa, Oryza sativa
  Clone ID: PAT_MRT4530_71374C.1.pep
MSSVFSGDETAPFFGFLGAASALIFSCMGAAYGTAKSGVGVASMGVMRPELVMKSIVPVVMAGVLGIYGLIIAVIISTGINPKAKPYYLFDGYAHLSSGLACGLAGLAAGMAIGIVGDAGVRANAQQPKLFVGMILILIFAEALALYGLIVGIILSSRAGQSRAD

SEQ ID NO: 173326 - protein, 61 aa, Oryza sativa
  Clone ID: PAT_MRT4530_71375C.1.pep
ISFHVQINNAYTLSKKSQFQLCYVFFNLALSSMADNLNLHLSSLPDNLNVYTLNMLCSHKP

SEQ ID NO: 173327 - protein, 106 aa, Oryza sativa
  unsure (1)..(106): unsure at all Xaa locations
  Clone ID: PAT_MRT4530_71376C.1.pep
TWRGSGQLDPKRGRPPPSSLKGAAAAPPRARPPSRGATWVWGRPDPXLGGGSRHNTPGSTPLGESHLGGGSHRSTPGLIPPRGEPRGFEGGLLPLDVIPPGPYHRQ

SEQ ID NO: 173328 - protein, 122 aa, Oryza sativa
  unsure (1)..(122): unsure at all Xaa locations
  Clone ID: PAT_MRT4530_71377C.1.pep
MEGSGQLDPKRGRPPPSSLEXAAAAPPQAQPPSGGATWVWGRPNPKLGGGSRRNTPGSTPLGESHLGEGSHRSTPGLIPPRGEPRGFGXRLDPKLGGGSRHNTPGSTHLGESHVGLRAASSL

SEQ ID NO: 173329 - protein, 410 aa, Oryza sativa
  Clone ID: PAT_MRT4530_71378C.1.pep
MPPMSMSWWWAGAIGAARKRHDGGGGEQQPPFRSVALVVGSTGIVGTSLVDILPLPDTPGGPWKVYALSRRPPPPWSPPPPAAVTHLCVDLADAAAVAEALAPLTDITHVFYVALAAPHLAEARSREANAGMLRNVLAAVVPTCPALAHVALQTGSKHYIGPPESIGKLPVETPFSEDMPRHDYPNFYYDQEDVLFDAVTSSSSSSSSRRAAAVTWSVHRPSLIFGFSPRSAMNVVCSLCVYAAICRKERRELRWPGSLGAWEGFSNASDADLVAEQQIWAAVADAAAKNEAFNCSNGDIYKWKQLWPVLAGKFGVEWAGYEGEERRVGLTAAMAGKEAVWAEIVAEEKLVATELGEVANWWFVDALFMDKWEFVDTMNKSKEHGFLGFRNTLRSFEAWIDKMKLYRIVP

SEQ ID NO: 173330 - protein, 163 aa, Oryza sativa
  Clone ID: PAT_MRT4530_71379C.1.pep
AERKVDDVVRSSHSLHTQRSWQRDQGGSRRRTSMRMSVWSRMPVKRTREASPALTGSGVVIVDCFCLHQFVCCRLGSSCGVVSYLARRRVPTPSAAGASPCSPAAASLSPRVPAAFARRDGEGERRGGRYRKGKPVRRHLFPAGAPQPPPLTTTTTASPSVAH

SEQ ID NO: 173331 - protein, 98 aa, Oryza sativa
  Clone ID: PAT_MRT4530_7137C.1.pep
MGASRLARFAVDDARRMKVVEMGGAQELLNVLEGAKDDKTRKQILKALHALSKSEEAAGFLDKAGAYVIVSSTPNSLEYAEIETYKTSLLKAFDELKS

SEQ ID NO: 173332 - protein, 385 aa, Oryza sativa
  unsure (1)..(385): unsure at all Xaa locations
  Clone ID: PAT_MRT4530_71380C.1.pep
TRNRKSSSIKYPRISPTAPGRTLKGGSHSLPLERVTPRQLARQVGGAFVIFEVLLSTGVVSVAPPQRGKAQHSQGCRATPGRGQGPPHPHQVILATRSLWRVFGMSEGPQSSRPXLTKKYDDGTDPSESLXICTAIIEAVGGGDRVMANVFPMALRGQARGWPMNLLPPQWLALVPPAGYGARLGLTDRPFKLXRLALDPSAGYGARXAQLWTGIAGSRIFRLSHSCESNRPXRRKRDWKEATERKERTKCVALGRRLKISSQPKVRDCESPSSWSEKGAWALVPAKNGEETGPTSXTRRVASTLANRGRFWSGLTPGATVGDMSPGXVGASDRSVTGXMTDGTTTMYPRPVXCVRRRAACSVPSHHNDEGLHSLLPRSELVQPL

SEQ ID NO: 173333 - protein, 123 aa, Oryza sativa
  Clone ID: PAT_MRT4530_71381C.1.pep
MWRGSGQLDPKRGRPPPSSLEGAAAAPPRARPPSGGATWVWGRPNPKLGGGSRRNTPGSTPLGESHLGGGSHRSTPGLIPPRGEPRGLGELPDPKLGGGSRHNTPGSTPLGESHVGLRAASSL

SEQ ID NO: 173334 - protein, 169 aa, Oryza sativa
  Clone ID: PAT_MRT4530_71382C.1.pep
MRWTCLAGSAGVLPGRATHVLLTLSRGERQFTILPFALLFPCFLGCMYGLLVAVLYKDNIETQEAVRKECVPVCVVGKNMKAKSTVFVVGAERSFWRPLEIYGVLSLLIPSLSVFGKQILWFLGYACVCSVREKAGKLRDRAPCFPLSLSLMNFDGLGKCNMHPFLKIS

SEQ ID NO: 173335 - protein, 81 aa, Oryza sativa
  Clone ID: PAT_MRT4530_71383C.1.pep
MLAGSDKAAAQRITRHCAGDEARLGFGHAHIKTVEKRARAKRERGNRRMNKGREEIHLCCAVGKRPQRQQSRRRFSPEERI

SEQ ID NO: 173336 - protein, 159 aa, Oryza sativa
  unsure (1)..(159): unsure at all Xaa locations
  Clone ID: PAT_MRT4530_71384C.1.pep
MAATSANPLHFVWLGAHGAWSSPNVTTMLWSTVVGTPGSLGVDSTTLHLLAKCRLTKRIWTEIQRWTCTDLQMGSWETCHSVGQWWTLVAESPNTPXKPLKTMIILVSWEIWCEHNARIFRNSASSPSSILAKIKEEGRAWVKAEATTLQEFGILGDIT

SEQ ID NO: 173337 - protein, 96 aa, Oryza sativa
  Clone ID: PAT_MRT4530_71385C.1.pep
ANIEVSNSISKVLWMATLSPTSLPNWNRMRISVNTITQNRAKSLRRLLASLRNTYYVDDEVVPISFNMDSRVDAATLNAVNSSDAEPVLINKTCPS

SEQ ID NO: 173338 - protein, 36 aa, Oryza sativa
  Clone ID: PAT_MRT4530_71386C.1.pep
RMRTTAGRKVLKRRRAKGRRVLCTKTNSPTGKKRMF

SEQ ID NO: 173339 - protein, 401 aa, Oryza sativa
  Clone ID: PAT_MRT4530_71387C.1.pep
MRRSSQGKSSSGGGVGGVRRYDVHGGGNLLACYAKAARPRPSKWDDAQKWLSRAGDDDCGGEATRRRSSCASADDGLLLPPPPAARKGAGGWRSWSNVEWEGAPAAMAPALKAARGDEGVDTKVVDAVQAYVPQRCVVSLRDVGTEMTPGGSKEPSRANTPRVVAPAATARVVARGTASPGQCDGGSRDSAVAGGVVDLRAARKRADQGHDEVAGTITAVSPATAWGDAERAKYMARYRREEMRIQAWENRERRKAELQMRTAEEKAERMRLRAQARTAGKLATAQAEAKARRARAEAELALGPPGRRCQGLAAHAERELEQRQRPLALLSLAPVAAAVPLRKIHCHSQKARDRSESFRCLLKAVSDVLLVPGTEEFYLCTINEDPFSFPKVFPKNITSNF

SEQ ID NO: 173340 - protein, 130 aa, Oryza sativa
  Clone ID: PAT_MRT4530_71388C.1.pep
HRSAPPHPGIRSISPPRLRSTAATRTTSLHRLHRLRLRATGALAVAAALRLRHRLHRSKPSTGHRLVPPIPHRAALPSVNPSRHRLCELRPSFPVAGTAAACVTVTTGRATSAIAASGRNSPRYRAPPPF

SEQ ID NO: 173341 - protein, 54 aa, Oryza sativa
  Clone ID: PAT_MRT4530_71389C.1.pep
MRAGRRDRLNPFSTREEALSPHTEIKAAAAEKAILAGLQLHSTAQKHYTSEKGE

SEQ ID NO: 173342 - protein, 457 aa, Oryza sativa
  Clone ID: PAT_MRT4530_7138C.1.pep
MAPPSMDYWLGFFRGAGDSIFDAIDAAIAVAASDHPAALRSRRDAIAERLYTAHLVPGAPPAGPPAGGGAATADAPTAQLLLHPEGAASVPSLCSSDRAEVITDDGAVPRRDDDPVAAETERIKAILLNDQEKSEATLLELLRRLQQLELTVDTLTVTEIGKAVSSYRKHNSKQIRHLVRLLIEGWKRIVDEWMSSRDAIVDHTPQSMHPSGLEQDERGLSSPSMDEGALFATPSTSIRLSELPLSFPQENQGSKFFDGMDDDGNTRSNGGRDNGRLYTRNQEPARRPLPPMAQQYDPDQSWKQEQSAMRQSRPQELSNGQTREQFIAAMLARPSNPESGPGRPQPRTKQHQDASPAQGRSQPMPSDKSASHHDENSVRAKLELAKNAKLELTNSAKLEVTKRKLQEGYQEFDNAKKQRTIQMVDPQNLPKQANRNWQPNGRPRNNSNFNNNRNWSR

SEQ ID NO: 173343 - protein, 348 aa, Oryza sativa
  Clone ID: PAT_MRT4530_71390C.1.pep
MATGGGGATRATSEGEIEGEGGMLTKLAQRRGDNGNAAAMDSSGRHGNGGTPATSGEGGAAGAQHSLGERIEGLGREEEARYRGELRPEAAMAEVARVRGEGVVSVVARRKEAVAGLGIAAVKPVVTVTQCGGGSSHGERRPELAKAMAARVDRGEGGSVGDWRNEAVAGARLGAVKPMAQAERRGDGQGSGGAQPESVEAVERGGARGGGASETGRGNGADAGVRKNSTLFSGGKSTPKVPQLVIELQNRPPTAKPDIRRPSTYQTAASGGVPDAVAQQPLQEHPGGVRRCQLRAHRPVAEPADRRRVAAVRAREAGAGHRRVAQRVGVRADRRGAARAGDHRGPWT

SEQ ID NO: 173344 - protein, 137 aa, Oryza sativa
  unsure (1)..(137): unsure at all Xaa locations
  Clone ID: PAT_MRT4530_71391C.1.pep
MEEAAMEGHVIVPLEKLSLELNNGGIMLNHDKDISALQGDFSSKINVQRHLDHRRQEALDKLIDLKGSIRVFXRVRPSILTNNFMTKPPVTVENEKIVVRAVGIKKEFSVDRVFDQESTQEDVFQEVKPILRSALDG

SEQ ID NO: 173345 - protein, 167 aa, Oryza sativa
  Clone ID: PAT_MRT4530_71392C.1.pep
MALLLPFIYMLFFFSVFLVMRITYKASQAIDTAVIFNKPISSSVELVGVRGLDPSLAPGAAASPAFDLLLRLDNGDACGDQYREGGSVKVSYAGVPLAHGSTPGFRLGARSSATVAVNATSDGVGVPEELFRLMSAEQRLGVAQLDIGLQLGWPGWESYYWSVDLDG

SEQ ID NO: 173346 - protein, 1239 aa, Oryza sativa
  unsure (1)..(1239): unsure at all Xaa locations
  Clone ID: PAT_MRT4530_71393C.1.pep
MCTFFHTEMCILATEASKKKFMGGRSGTEGRTVEQQVLESNPVLEAFGNAKTVKNNNSSRFGKFVEIQFDKYGKISGAAVRTYLLERSRVCQVSDPERNYHCFYMLCSAPPEDVKKFKVGDPRSFHYLNQTNCYEVANVDDAREYLETRNAMDVVGIGQEEQDAIFRVVAAILHLGNINFSKGQEIDSSKLRDEKSVYHLKIVAELLMCDEKALQDSLCERVIVTPDGNITKPLDPDSAALSRDALAKTVYSRLFDCFEQLCINLTNEKLQQHFNQHVFKMEQEDYTREEIDWSYVEFVDNQDVLDLIEKKPGGIIALLDEACMFPKSTHETFAQKMYQTYKAHKRFSKPKLARTAFTINHYAGDVTYQADQFLDKNKDYVVAEHQALLNSSRCPFVANLFPPLPEETSKQSKFSSIGTRFKQQLQALMETLSTTEPHYIRCVKPNAVLKPGIFENFNVLNQLRCGGVLEAIRISCAGYPTKRTFDEFIDRFGMLAAELVDSSDEKAACAAICDKMGLKGYQIGKTKVFLRAGQMAELDARRAEVLANAARLIQRRIKTHLTRKEFINLRKASIQSQKFWRARLARIFFEHMRRNAASIRIQKHARTHSARKSYLQMYESAIVIQTGLRAMAACNEHRFRRETKASIIIQEARETGALKEAKDKLEKRVEELTWRLDVEKHLRIDLEEAKGQEISNLKSVLQEMQEKLSEAHAAIEKEKEDAKLAIEQAPPKIVEVPVVDNAKVELLTRQNKELEDELVTFRTKAEDLEKRLLEVQKESDELSREILEKDSKLNQLQEMIERLETNLSSLESENQVLRQQSLLASADDDKSKQIESLESKIAILESENQLLRSKSSVAVQAVITPEVIQPSAMEEEVVVPPIKNLSKQKSLTDRQQENHDVLIKSLAEDRRFDNGRPAAACIVYKSLLHWHSFEAEKTNIFDRIIHTIXHAESSTELAYWLSTTSTLLYLLQNTLKSSSSAXNARSSSLGSGISSGYSGMVGRPDTASKVCTPDISMPIVNIRRYNFVNNLSISQAPRAVRVPPMIIRKTFNQAFAFMNVQLFNSLLLRRECCSFSNGEFLKAGLQELEQWCSVTTEEYAGTSWDEFQHIRQAVGFLVLHQKTHKTLEEITDELCPVLSITQIYRIGTMFWDDKYGAQGLSQEVIGKMRTMATDDSITTPNSSFLLDDDSSIPISLDDIARLMLDIDLSDVEPTPLLRQNSQFHFLLQHHATQTDGIVC

SEQ ID NO: 173347 - protein, 232 aa, Oryza sativa
  Clone ID: PAT_MRT4530_71394C.1.pep
MAASLLGRMRIGPSAENLSGTTAPDPGSKTLRPPKMLRIIYVHVQPRRKGACLGLRWRWDAWQQRIWAWLMVIGCASVEPAGSTSVDAHQLSPGMDDYRMDDRHMDGLEGDGDDPTEQPIPKANDDTVLPMPGSEAEPSAPSTERAECWRHFEKIRVMVDYNIVEKLCLHLLVQEQDISNGFTVITNLHNKIRQAVSIIEGSSNQQASTSSWQDCSLTDAATSPRRADEEEQ

SEQ ID NO: 173348 - protein, 95 aa, Oryza sativa
  unsure (1)..(95): unsure at all Xaa locations
  Clone ID: PAT_MRT4530_71395C.1.pep
DDSWCRCSALXHMVGGIYRKLGPTDVGHPMAEVFTGCRKGVLXRMAASLLAFCNVDIPNGTGGVCYWLGYPRTPRTGLWATKASCVYDSVGLLNN

SEQ ID NO: 173349 - protein, 246 aa, Oryza sativa
  Clone ID: PAT_MRT4530_71396C.1.pep
MGGNGNGADDKARDVTDQSKALGGNSCEDRALPSAVRVTVSGDPVGTFGSFGNMADYNVHLHQPDEGDDHGDSTECSSSFGPSCSASSDDDDDDTKSEMDGMEVDSPFLGPTRTGDSRVEKDCWANNVAMPMVGVAYEESLITENKNSGVQTDGPLVNGGFDSSVVEDIESTDDALVENDRSADDVLIDNQAAKEGYQLFEKVKPEEHSELGAKEQHCQRTRERFNWEDGRSGKDDILGQSTMDMR

SEQ ID NO: 173350 - protein, 54 aa, Oryza sativa
  Clone ID: PAT_MRT4530_71397C.1.pep
PLATPSTPSAFFSVAFWKNVLVVFSAPMLPGSFSLFNYWRQQLQQQRRSFFNPP

SEQ ID NO: 173351 - protein, 49 aa, Oryza sativa
  Clone ID: PAT_MRT4530_71398C.1.pep
CVSVVTQLHAIVHRPHIHVSSPMRSLYAFITCRASVPAGSRSFASAYTF

SEQ ID NO: 173352 - protein, 103 aa, Oryza sativa
  Clone ID: PAT_MRT4530_71399C.1.pep
SETKFQWGAKIRGSPRGLLPPQAKQGDWGPYPSLGTPGKQLPGLIGALSSLIEAAVLSSKPPKGTSGWGGEGPPRLNRGRGWLRLRQEHRRRGLDPGDVAARA

SEQ ID NO: 173353 - protein, 61 aa, Oryza sativa
  Clone ID: PAT_MRT4530_7139C.1.pep
IFYINDPSNKKMHIVRDGKRRIVGVDNVVDEEEYNQNLLVRPHIDLNEDPQEAVEYARSDQ

SEQ ID NO: 173354 - protein, 442 aa, Oryza sativa
  unsure (1)..(442): unsure at all Xaa locations
  Clone ID: PAT_MRT4530_713C.1.pep
PQIQQLRVQPRRVVEEWAAKTTPDRFVGFNGVDPHEPSVLHGLEDRESSSSNTPCEVNVIDGEGTSDAAARATVDLTRTPAQHLNTINSILRESPFDPVLHPDGDLWVQRIWDTVANLNNAFAAVAEPPARDLPRLXDPINGCRREQRDQDDAHHPQCRPPPRRNDNANQGGHPSENRDRQDRQGHHDDPSSSSSSSSSSSARPPRRQHGHRRPLVLGGGCRAFTPTLREVRXLKKFRPGAIEKYDGSTDPEEFLHVYSMVLYAAGADDNTLTNYLSAALKGSAXSWLVHLPPRSISSWEDLWQQFVANFQGTYKHHAIEDDLHALTQNPGESLRDYIRCFNECRNTIPEITDASVICSFKSDVLKSCLDVYIFTSPKRTRLHLIHLSSIVHHGKSATIWSTSAARPPSSRPPSSAGSQETGAEEEEERESKDADAVRLAPG

SEQ ID NO: 173355 - protein, 95 aa, Oryza sativa
  Clone ID: PAT_MRT4530_71400C.1.pep
SICVFVALLKKMFVRMANNQFTWVFSDSHATPCRKKLRVSMGGTLKDTLVKINFLIFILVGAKKLEKMFCISVCIYTQLGVQGHKSCNFMCACNL

SEQ ID NO: 173356 - protein, 65 aa, Oryza sativa
  unsure (1)..(65): unsure at all Xaa locations
  Clone ID: PAT_MRT4530_71401C.1.pep
YSRLNNVKXKAQWGASTDVAVATSWXRAAPPSVHWDTIHVIYLNLKQLYSAKTPKINNAKGLGSX

SEQ ID NO: 173357 - protein, 512 aa, Oryza sativa
  Clone ID: PAT_MRT4530_71402C.1.pep
MGLPGRRNPLLSARRAAASLRRSRRLPVYVAAVFFVASVLLMFRDEILYLTTARSPSSSLPTTGGSAGGAGLARKEELVSVNKPVLLGHGGKPEKHHSVTERHRPKVSAKRRPNKKAAKAARKKFMASPSVAAGAEVNVPETCNLSKGKWVFDNATYPLYREQECEYLTAQVTCTRNGRRDDGYQKWRWQPRDCDLPLAFDARLFMERLRGKRLMFVGDSLNRNQWESMVCLVRPALSPGKSYVTWWDGQRVVLHAWEYNATVEFYWAPFLVESNSDDPKAHSIRDRVIKPEAIAAHAGDWVGVDYLVFNTYIWWMNTVNMKVVLPTRHDQFTVIRRPTGKTWEEYDEVGRIEAYRRVLDTWATWVNDNVDPARTSVFFMSVSPLHISPEAWGNPGGVRCAKEDAPVQNWHGPLWLGTDWDMFRAARNASRAAGRVPVTFVDVTAMSELRKDGHTSVHTIRQGRVLTPEQQADPATYADCIHWCLPGVPDVWNLMLYARILSRPPAAAGHVA

SEQ ID NO: 173358 - protein, 455 aa, Oryza sativa
  Clone ID: PAT_MRT4530_71403C.1.pep
FQLRFSSFTVQLRFSQVQRHNRQFHRICSRNIALLAFTHLTVRSSLIDPDGGALVDLVAAPGRAALRGEAEALPRVRLAPVDVEWAHVLAEGWASPLRGFMREHEYLQSLHFNCIRLPDGAGVVNMSLPIVLAIGDREKEEIGSSPDVALHGPDGAVLAILRRVEIYPHNKEERIARTWGTTAPGLPYVDEAIAQAGNWLIGGDLEVIEPIKYNDGLDHYRLSPQQLRNEFDKRGADAVFAFQLRNPVHNGHALLMNDTRRRLLEMGFKNPILLLHPLGGFTKADDVPLPVRMEQHSKVLEDGVLDPETTIVSIFPSPMHYAGPTEVQWHAKARINAGANFYIVGRDPAGMGHPTEKRDLYNPDHGKKVLSMAPGLEKLNILPFKVAAYDTVAKKMAFFDPSRSKDFLFISGTKMRAFAKSGENPPDGFMCPGGWKVLVDYYNSLQTEEAAVATV

SEQ ID NO: 173359 - protein, 846 aa, Oryza sativa
  Clone ID: PAT_MRT4530_71404C.1.pep
MAPGTSGQPESKGQKKTINIGYELAHQAWDFKIQQGSCRAKIPSNIPRQYDPIQNLDSVLIFDLMDNSNGLHCLEIMTNCLHKNILHAPIVQKKEDVDCISVWHEPYTGNLLAYLESTLLGAKHMVGEKVVLPTPVLQNLISQVFDGLKMLRLCGKYHGNFTLEKTYYYKKNGNEIIVKLANFEVKDQVKSTPVLQAKDCQAVGDALRKISKMAKDRKDLDFDCSQIDSLAEELREFSFDANVLEWPWLELIWAMRRNLQLFSVAFIRFKFVSNGDLCNIEKKIGGHPFFWVFDDRKFLLTCSIPLAMNKRAFRQKIEGNEDLIALPWDKEDYDGLINLMMKYRADHMIKKFDINSRVDYVLCVSGMYAHEKELKYNVRALQRMNWQLQLYLSRKMLRVKIAHSLPLDQIARSIIRGLSALKAGRIWRVGNGSSIDIWEDPWIPAGVTRRPITPRRGTVLNKVADLIDPATGWWDKPLVEEIFWESDARNILAIPVRLDTNDFVAWHFDTRGMYSVKSAYHVLEDQRERSAKKQEGGSSSGAVNQRNFEWDKIWSLQCIPKVKQFIWRLAHNSLPLKLNIKRRVPDAETLCPVCKRFDENGGHCFLQCKPMKLCWRILCLEDIRLSLTQLVSARDVVQTILKLENDRRMEVFFLLWVWWYARNKVNSGEDVIRVEEVVHKVKQLICDHASLRKGKHPKVNVQRNKWVPPVDGNLKLNFDGAFRAVNKSGGYDFLVRDHRGCAVLAGAGCLEHVHDAFAAEAEAGLAGLKSAISHGFDQNQQCHRGEDPIWEENSLNILVEFMLGRSIQSFLGRVGPFHEAVIRKYAKHILHGQEEHSTDKKEMQDK

SEQ ID NO: 173360 - protein, 101 aa, Oryza sativa
  Clone ID: PAT_MRT4530_71405C.1.pep
DINCSYLKLLNILHMFVDLALIQDALILNHLLVAQRNDLVIGFPCSCDSGILRSIKPNRWLFYAIGFKHTNHHKEPLKYANLFSIIKASNDPIMTCSLPCY

SEQ ID NO: 173361 - protein, 665 aa, Oryza sativa
  Clone ID: PAT_MRT4530_71406C.1.pep
MPSHESKNLLTKLKTQHQIAKDIKVIKKQVIEVSERFTRYKVDEGTSKLQNSTIDPRVCAIYKDASDLVGIHEPVEDIIKCFTYEDELAKDLKVVSIVGFGGLGETTLANQVYRKLAAKFECRAFVSISRNPDIRSILKSLLSQICNQEYVQTDAWDENQIISTIKKLLEKKRYVLKLSRGHPRCFPLEICSGPTKSTLRYWYLTESFPIVESNNAHPAQLDPTIGNDLVPYRFFVQPFDRSLVQPLEIRIDGQARSCRVHDTIHDFLLSKSIEENFAATINYPQLTCLSTPDMKIPTIFWGAKQLPTFSNFSTLRVLDLWFCAECGLENHHLETVTRLSQLRYLTIQGKKITELPRKFGDLKCLEVLDVIATSVKELPKSTTQLQRLAVLYVNDGTKLPDQFKNMQMLEEVVGIDVFRHSMEFLEGLCELKNLWRLSINWDIDRLEGNKVRYKEIIASSLCKLEACNLHDLSIHVHLRNNDDFSSLLLPLNSIKSFVLRGESISMVNIWQSSLVSIRRLALTIKDIDQDDLQVLGSIPSLTNLYLCLDPDQNERSIAISDIHGFQQLEPFTFQSTHTGLMFEAGSMPRLGQLSFGINVANFKSTYGGFCLGIQHLSCLTMVSVSTNRLGAKLGYVEAVEDAFRCMVEAHPNQPTLEIETDNLCE

SEQ ID NO: 173362 - protein, 73 aa, Oryza sativa
  Clone ID: PAT_MRT4530_71407C.1.pep
HSSPTTHSTTRRNTHSSSSPSPRAARAAAAAAAAAEVERARAIRITQIGRLMALRSSPSLLCFRCNSDLGLVP

SEQ ID NO: 173363 - protein, 128 aa, Oryza sativa
  Clone ID: PAT_MRT4530_71408C.1.pep
FFFFFLDQPVYVLLATKYVRTTLYMYTGFSHRDSLRTTLGVFSSNFFSKLPTFHHIKPFIHTQLFSHIVSNFNQILNFGPIQTQPLSITKQLQLSARSSFPQSLPLSLQTRSILAVHPWSALKISLAT

SEQ ID NO: 173364 - protein, 41 aa, Oryza sativa
  Clone ID: PAT_MRT4530_71409C.1.pep
QRDVLSRLLQEANIYAETWLYAIKRVQGHLRNKHSCPHCGQ

SEQ ID NO: 173365 - protein, 173 aa, Oryza sativa
  Clone ID: PAT_MRT4530_7140C.1.pep
MAGVGRTMIAPLLVLNLIMYLIVIGFASWNLNHYINGETNHPGVAGNGATFYFLVFAILAGVVGAASKLAGVHHVRSWGAHSLAAGAASALIAWAITALAFGLACKEIHIGGYRGWRLRVLEAFVIILAFTQLLYVAMLHGGLFSGNHAAGAGGYGGDYPADHHHKPAAAARV

SEQ ID NO: 173366 - protein, 59 aa, Oryza sativa
  unsure (1)..(59): unsure at all Xaa locations
  Clone ID: PAT_MRT4530_71410C.1.pep
RFSRKQYTVSWRTNISYYALIPREIFAVRCHALLRLNLTKDTFLLFXFLHNYYLHLKGF

SEQ ID NO: 173367 - protein, 37 aa, Oryza sativa
  Clone ID: PAT_MRT4530_71411C.1.pep
LIAKVEVFQHALCQVLWLKSRTSEVWLERRTNYTRSL

SEQ ID NO: 173368 - protein, 401 aa, Oryza sativa
  Clone ID: PAT_MRT4530_71412C.1.pep
MKSEGARMRLRDYSIRFKNELFVILINFTFSCSSFKQRRGKVTGGGGGGGGPGATASARSCGAAVLVTQDPALRPRAKMELGCLMRANIAANDDAHTCALQWEDDDGSGGRPKPPRIGLRGVFRPPATAPGVPSVHPLNLARWSFGAIVYGHHAAASYVPERIWIRRRRDRLIRGESHTVDSNAPSVNYVHAGDFLWALFNTFTPTNNYSRVMSNRSINCLRAAETVSLVFQSAALANGQLIDLIMLQRICNMEINLSICESVLRSVIQSYFRQWLIIIGGVFVQGVTSEGNNVHSSRFHRRMQLYYATEVAVADVTRVATIEMNWAIPVRRERARACMYRTDSAEKEYYSRHGTSASSGRDVRGQLLLSNTLSLVEKPFVVPVRNPPLVPVSKPGVPIRD

SEQ ID NO: 173369 - protein, 132 aa, Oryza sativa
  Clone ID: PAT_MRT4530_71413C.1.pep
MVFQTQGSNLRALLVEDIKVNRMILSQMLRKFQVETTVVQNGKEAVELFLGGETFDIVLTDNLMPIMTGPEAISKIRAMGATDVMDCGVSVDANSMEEFKDAGADLCVPKLKLEILEHILQETRSKKNKSSA

SEQ ID NO: 173370 - protein, 140 aa, Oryza sativa
  unsure (1)..(140): unsure at all Xaa locations
  Clone ID: PAT_MRT4530_71414C.1.pep
QNKTRXVSTCSVXMSXRXEHTXVDNMXASRQVXRKYRXEXXXPXMXQRTAGXFSXEXQXIVVXGSLKXXDCXXSLXSTXVXXXXXXXLQGXPXXVSRGTRXXXXXXXXGGXXMXXXSSXXXYQEAITXLXKXMXVXNXVN

SEQ ID NO: 173371 - protein, 489 aa, Oryza sativa
  unsure (1)..(489): unsure at all Xaa locations
  Clone ID: PAT_MRT4530_71415C.1.pep
EKAAAMGAGAGDVAASWRVAAVALLGAVNCVVSFVVFSFLDLLDMVLCVVYKVVDYAVEAEWKACYCSAAARDGAAAAIFVPPASASAAPGPKVVRLSPSSAKMQLEDVSDTLYVRPSLLSDATKKSGPAAPSLTVSPAIAELIRGKIGRAAPRPPRHAAPCWSDCDCKVCHSWSASSRSSHLYVHVQSPTTASGVETEDVVFVHGFISSSVFWTETVFPAFSEAAKGRYRMFAVDLLGFGRSPKPADSLYTLREHVEMIERSVLQRYRLRKFHVVAHSLGSVLALALAVKYPDAVQSLTLLAPPYFPVPEEEAGAATQYVMRRVAPRRVWPPIAFGASMACWYEHVSRTICLTICRHHRTWDRLFRLFTRNRMRTFLIEAFMCHTHNAAWHTLHNIICGSAGKMDSYLDVVAGQLACEVAVFHGRDDELLPVECTLAVGARVPRXARVTVYDHKDHITIIVGQEKLFATELEDIWRRSAAAAAAGDGE

SEQ ID NO: 173372 - protein, 54 aa, Oryza sativa
  Clone ID: PAT_MRT4530_71416C.1.pep
TTITNLQRLNDGQGPKRDGDLGLHKDKSQHQIYVIYLIEANIRLLHNILENFTD

SEQ ID NO: 173373 - protein, 143 aa, Oryza sativa
  Clone ID: PAT_MRT4530_71417C.1.pep
MAMAYKMATEGMNVKEECQRWFMEMKWKKVHRFVVYKIDERSRAVLVDKVGGPGEGYEELVAALPTDDCRYAVFDFDFVTVDNCQKSKIFFIAWSPTASRIRAKILYATSKQGLRRVLDGVHYEVQATDSSEMGYDVIRGRAQ

SEQ ID NO: 173374 - protein, 69 aa, Oryza sativa
  Clone ID: PAT_MRT4530_71418C.1.pep
ITRTGNQPQGLQDVLGAAFPFKTSLKMAGRTKGRDPEVLGHLTANPPGVKDPTKKPPVRRNFNGGDRHP

SEQ ID NO: 173375 - protein, 223 aa, Oryza sativa
  Clone ID: PAT_MRT4530_71419C.1.pep
MAQPSSKKTPSVYLYIPNIIGYFRIIINFIAFAVCYSNRVLFAILYFFSFFCDGLDGWFARKFNQASTFGAVLDMVTDRVSTACLLALLSQFYRPGLVFLMLLGLDITSHWFQMYSSFLSGKTSHKDVKDTGNWLLKLYYGHRPFMAFCCVASEVLYIVLFLFADEKSTSLLNVCGNLLKQSPLTVFFFISTLVGWALKQVINVIQMKSAADACVVFDLKRGK

SEQ ID NO: 173376 - protein, 640 aa, Oryza sativa
  Clone ID: PAT_MRT4530_7141C.1.pep
MDHLSIRNPLSLLLSLQLSLLLFNPLSVADLTSEKQALLDFASAVYRGNRLNWSQSTSLCSWHGVKCSGDQSHIFELRVPGAGLIGAIPPNTLGKLDSLQVLSLRSNRLAGSLPSDVTTLPSLRSIYLQHNNFSGDLPSFLNPNLSVVDLSYNSFTGEIPISLQNLSQLSVLNLQENSLSGSIPDLKLPSLRLLNLSNNDLKGQIPQSLQTFPNGSFLGNPGLCGPPLAKCLLPDSPTPSPASPSSAPTPMSAHHEKKFGAGFIIAVAVGGFAVLMFVVVVLVVCNSKRKGKKESGVDYKGKGTGVRSEKPKQEFSSGVQIAEKNKLVFLEGCSYTFDLEDLLRASAEVLGKGSYGTAYKAILEDGTVVVVKRLKDVVAGKKEFEQQMELIGRLGKHANLVPLRAYYYSKDEKLIVYDYLTNGSFSTKLHGIRGVTEKTPLDWSTRVKIILGTAYGIAHVHAEGGAKLTHGNIKSTNILLDQDYSSYVSDYGLTALMSVPANASRVVVGYRAPETIENRKITQKSDVYSFGVLLMEMLTGKAPLQSQGNDDVVDLPRWVHSVVREEWTAEVFDVELIKQQNIEEELVQMLQIAMACTSRSPDRRPSMEDVIRMIEGLRHSASESRASSDEKMKDSNPPSV

SEQ ID NO: 173377 - protein, 190 aa, Oryza sativa
  Clone ID: PAT_MRT4530_71420C.1.pep
MAQPSSEKTPSVYLYIPNIIGYFRIIINFIAFALMLFYVSASTFGAVLDMPEIISLFKLLLLRVSTACLLALLSQLYSMFLSGKTSHKDVKDTGNWLLKLYYGHRPFMAFCCVASEVLYIILFLFADEKSTSLLNVCRCFLKGSPLTFFVFISTLVGWALKQVINIIQVCYKAEEKVLMHWLAHMLYIRV

SEQ ID NO: 173378 - protein, 1132 aa, Oryza sativa
  Clone ID: PAT_MRT4530_71421C.1.pep
MMQGISPSSVMKTLDHAKNIISGKNGKLKKILKSLEKITEEGSQFLLLLERTIGSGTNGNGISNPANTSIRSTTSSPTQIIIGRDKERDEIVRMLRDTGDEPKSWIIWAMGLKNYGLRLVFTMLSLIWAKIGWAITGLGPRLDPARSEATGDCEQSCRNSKCCYSVISIYGIAGSGKTTLAQNVCSYEKINNYFFPVMWIYVSPSFSVDKIYQKMLEAATGKPSSEFSNLDTLQMKLEAELTGKRFLLVLDDIWHEKDAIAQDKLNQLLSPLKVGKKGSKVLVTTRFKDVAMSLSSQRIIPVPNFNEEDFFNLFMHYALDDAVSLDGQERETFYTIGREIARKLKGSPLAARIVGSRLRKHLDVTVWTRVGDQHLLTDTMGALWWSYQHLNVQLRRCFAYCSMFPQGYDFKRDELVDLWMAEGFIKTTDSAEQMDVVCQSYFDELVSCSFLQPKDIFGSKNKWFTMHDLLHELAAMVAGTDCFRVESGDMKEIPPDVRHLFIRSNDQTKFAEKICKLKKLRTLILITTFGGLGITIEELEAMLKKLKKLRVVHVDVQGQMVSIPGCICELKHLRFLRIHSPWSEKVNLPKKLDTTYHLQILELCGAGVLDFSNVQNMSHLISLRDIRNSGFVFPNTDVPGFPGIGELKSLRELSDFRVRKDKGYELKQLKSINHLRGRLRISGLESVESKEDALEAKLTDKKFLTSLSLEWSQFSSVQHSCPPDLQVEILEGLCPPSQLTELEIQQYNGLRCPSWLSSENQNGIFTNLQDLQLCRCYNLDHLPEIGKLFVSLRQLKLVVFPKLKRMPRLPGTLKNLHIQQCKALVMTCSEDVNMIRSLFVETATQIEPSLNITATEVAEIERFAGEQPDRFEKILCDIFSRCGSLPGELIRGHIREEDYSELTLPATVVDRLIISYCFVTNTVLHRCLTGSANLVSLNLRCLPFLTEIPSEVMESMAKLSDLSIEDCIQFTHLEGLNNLSRLQHLTIAKCPNLRALGEDQKVRSLNGLAIDDIPLVPQLLSREGCSSLWSLRIDESEQLRGGDILEQLTSLTSLDFSCCSWDRLPENLVNLTSLENLRLDCCKKIQSLPELPASLQSFEVEDCDALFMKSCQKAGDQNCQKIAHVPVKRFSS

SEQ ID NO: 173379 - protein, 71 aa, Oryza sativa
  Clone ID: PAT_MRT4530_71422C.1.pep
SPSPSNPSLIICRDQKKQIDSTFICTSTLLFIPWGNYFLITGGACSLLKTLPPFFFQNHHHPFRSKKKKKK

SEQ ID NO: 173380 - protein, 55 aa, Oryza sativa
  Clone ID: PAT_MRT4530_71423C.1.pep
QGQNQHADGGYRFPTRKGLIKLTSKTDVILTPPPEASRPDPPLPPFKLREPQEGN

SEQ ID NO: 173381 - protein, 972 aa, Oryza sativa
  Clone ID: PAT_MRT4530_71424C.1.pep
MKIPFVTKWSHRSHEPAAPSNPAAQQQPPPPSPAGVSSAAAAAVVEEAEMETGGDDFITQEEEYQIQLAMALSASASVSAPSGGGGSGDTEGEQIRKAKLMSLGRGDLSAAADRGVGDSAEALSRRYRDYNFLDYNEKVIDGFYDIFGLSGESARQGKMPSLAELQTSIGDLGFEVIVVDHKFDSALQEMMEVAQCCMLGCPDTTVLVRRIAEVVAGHMGGPVIDATEMFTKWLGKSIEQRTSHQTSLLPIGRIDIGLSRHRALLFKILADSVGIPCKLVKGSHYTGVEDDAINIVKMNNEREFLVDVMAAPGTLIPADVFISKGTPFNLTKPLVQNQVVELASNIENDPSAAHSEHVGNRLHMFGNGNSLSENQSGCEKTMIAGSEVSQLWTLAPQMQSDQQSTSAGAHSMQKEDLKLTPDSQENEESKKQISETDSFRGIELGKSSLAFKGLNNRNNEYQRHRENIAPAPGRSQQPLVMKNWSACNDISNKQYNIAERLVRRRNTSDNAASSSQLAWSTAKHYNPNGRERNDRLCAAPGRNYDNRKVGASTTATASATGERLDRPNLAPVHYYDDKPNGISSVNAASTSGIVKVAEKGPHDLEKVPIYSRFDSQIYSSMQGYSPEVKENKENYDRHDNMRLHPDPRRSPLDRFMDTSRQNSESVSPPQAGSSTVDMVLGEVSECEILWEDLLIGERIGLGSYGEVYHADWNGTEVAVKKFLDQEFYGDALAEFRCEVRIMRRLRHPNIVLFMGAVTRPPHLSIVSEYLPRGSLYTIIHRPDCQIDEKCRIKMALDVARGMNCLHTSVPTIVHRDLKSPNLLVDNNWTVKVCDFGLSRLKHGTFLSSKSTAGTPEWMAPEVLRNEQSNEKCDVYSFGVILWELATLQMPWSGMNPMQVVGAVGFQDRRLDIPMEVDPLVASIIQDCWQKDPNLRPSFSQLTSYLNTLQRLVIPCHQETAGSYVPQEISLYR

SEQ ID NO: 173382 - protein, 108 aa, Oryza sativa
  unsure (1)..(108): unsure at all Xaa locations
  Clone ID: PAT_MRT4530_71425C.1.pep
RHEVNPEVLDRVGFVLIVCVGLWVISAVFCCWPSGGRSHLATAGXDTSLLLDLCVGAVGVWVVIXFSFFLVTIFQGCNLVIFFYSINITSHRHRLVRVIKKKKKKLEG

SEQ ID NO: 173383 - protein, 419 aa, Oryza sativa
  Clone ID: PAT_MRT4530_71426C.1.pep
MVTGSFSRSTSARLTARGGVGSPRVSAAAAAHRKWWWWAPSGPSFECAALAFFLSSVALVLACALYLYLFRYQGRGHAVAEFAGDNLESCDVFDGSWVPDRRYPLYNSSDCPFVERGFNCLANGRKDTGYLKWRWKPRGCDLPRFSARDVLERLRGKRVVFVGDSMSRTQWESFICMLMAGVENPKTVYEVNGNQISKTIRFLGVRFASFNLNVEFFRSVFLVQQSPAPRSSPKRVRAILKLDKMDNISRKWENADVLIFNSGHWWTPSKLFDMGCYFEAGGLLKLGTSINSAFKMALETWASWVKEKVDLKRTHVFFRTYEPSHWSGSNQKVCEVTEFPTAEAKGDDRSEFGDILAGVVVNMSVPATILNVTLMGAFRSDAHIGIWSHPSTILDCSHWCLPGVPDAWNELVISHLLTN

SEQ ID NO: 173384 - protein, 230 aa, Oryza sativa
  Clone ID: PAT_MRT4530_71427C.1.pep
MAAATLCDGDKDGVDLQLERRLSPQLPQRAREEGGGGEASSGPFLVVVVLRGRRPPDLFLSPPPSCARWRKPRRRPPPLPPRPVDARAFRPPVDARTHPRLPIDDGGDGGAALPVAKKSPSSSSSRALDRDAAEAEVCRRLTSSRREALGLYRDILRGRGSLSAAATPCNRRSTDSPRHPTAWSRPRRPSADASHRGGRAAAGWWRTWGAAITTASRREAQRAGVGAQRA

SEQ ID NO: 173385 - protein, 156 aa, Oryza sativa
  unsure (1)..(156): unsure at all Xaa locations
  Clone ID: PAT_MRT4530_71428C.1.pep
MNIIFFIALLAIAACIASGKFDAATQVYTEYQMQPHLMLHQQMLTPCGEFGRNDRRTWAAPFFQSPVLQLINCQAMQQQSCPPITMIAXQSLCQNIIIVHPIVQHLQLPQTXGGYFDHAQAQXQVMLDLNLPTICDIYPSYNTAPCHIPTDGDICD

SEQ ID NO: 173386 - protein, 134 aa, Oryza sativa
  Clone ID: PAT_MRT4530_71429C.1.pep
MAFSAEPAAEEAEEEALPPVTGPGEVTAEEWRRWGTSSPLPAAVAAVVGELLEMEAEAGQKMRFGGVGSKIKGDFKDMEDKKHRAVYQTLADSDKKLQYFSARQIACRLLGSRGYLCQKRSYTMQQSGLNGLFN

SEQ ID NO: 173387 - protein, 1089 aa, Oryza sativa
  Clone ID: PAT_MRT4530_7142C.1.pep
MAMVLDSFVTRCTASLEDFAGQEACGALGIGDDVRCLLATLRRVQAVVSHEERRGRVLSAKVDAWVAQVKDAMYETDDVLDVSMVEGGKMLAEGDSPPTPKARCSLMFSCFKPASAPKFHHEIGFTFREIDAKLREIEEEMPRLPAGSLHSESRRDWFSRGICSNFSDAIRPLAVGTQVQKSLDGLVPRMIREGKKKVDVLAIVGAVGIGKTMLAREIYNDERMTETFPIRVWVKMTKDLTDVDFLKKIIIGAGGGVNVGEIESKKELLGIVSSTLSKRFLIVLDDLDNPGIWDDLLKDPLGDGVARGRILITTRSEEVATGMKAMVHRVDKMDAENGWALLCRQSLPECSSEELASLKDVGIKIVERCDGHPLAIKMVAGVLRSRGKSKAEWEMVMRSDVWSMRPIIPELPQALYLSYVDLPSELKECFLHCSLYPEELPIQRFGLIRRWIAEGLVSDKDNKLLEDSAEEYYAELVSRNLLQLYAGNLDQCWITHDLLRSLARFLITDESILISGQQRLSTDPLSLSKPRHLTLCNMENRFDDPISVKQQMSLRSLMLFNSPNVRSIDNLVESASCLRVLDLSKTALGALPKSIGNLLHLRYLNLDETQVRDIPSSIGFLINLETLSLQNCQRLQRLPWTVRALLQLRCLSLTGTSLSHVPKGVGDLKNLNYLAGLIISHDNGGPEGCDLNDLQTLSELRHLHIENLDRATSGASALANKPFLKDLHLCEQAPLIEEQQSEQEQENQDDQKETEEEEKEVLDVTNSQFSREESIKASEKIWNELTPPQNIEKLVIKNYRGGKFPNWLTGPKLGISFPSLVYLDIDNCMSCTALPALGLLNQLQSLQISNADSVVTIGPEFLGAASSSSATASFPKLEILKLRNMKKLEEWSLAVEENQILLPCLKSLHIQFCPKLKALPEGLKNVSLRELHVEGAYSLTEIKDLPRISDDLQLKDNRALQRISSLPVLQSLTIDNCPKLKHVSGLDTLQHLRLAFPPSTETFYFDELIIFWSIAFPRWLELLIRKRDGLCHFELQCSLSLLRSCLDGGKNWSIVQQIPEVRITSTDGKRYIRYNKRRCIYETNAQSED

SEQ ID NO: 173388 - protein, 315 aa, Oryza sativa
  Clone ID: PAT_MRT4530_71430C.1.pep
MATTTAPEDAPSAAKGAKGEAKRKQSNWRGGGGGGGGRGDGGQGQKRKRKEVFVYGNYRNYYGYRIDRNVDEDPRLKIFKREWFESKDCLDIGCNQGLVTIGLAAKFKCQSILGVDIDSGLIETANWNLRRMSRLDKVVVENTKAHKSSDSPSESCPEKVAPEISNGDISNGSHHDIFKVVSFRRENFVDSMCTSSEQYDTIVCLSVTKWIHLNWGDDGIITLFVKIWRLLRPGGVFIMEPQPWTSYRRNRLVSEVAKENFNTILIHPDKFREILLDKIGFRSVEVVTDKLEGAVTGFDRPIEVYHKVMGTGSSS

SEQ ID NO: 173389 - protein, 55 aa, Oryza sativa
  unsure (1)..(55): unsure at all Xaa locations
  Clone ID: PAT_MRT4530_71431C.1.pep
FFFFFFFFGNQLVKHLNFQMPXVXELXVSSKQXCCQKXTMGXQXNTIXHAXXTNT

SEQ ID NO: 173390 - protein, 46 aa, Oryza sativa
  Clone ID: PAT_MRT4530_71432C.1.pep
CCKIDAIKHSVCMFLYLHIHPITEILSMHRCTYDKKKHFGTVIFTY

SEQ ID NO: 173391 - protein, 80 aa, Oryza sativa
  Clone ID: PAT_MRT4530_71433C.1.pep
MAVQILEVFGWWAVLGYGHPLENIPSRCQLRASGRFGRTGQPRTARDSRTRGGSTERVAALGTSGRRGGRQVSAARVLAL

SEQ ID NO: 173392 - protein, 714 aa, Oryza sativa
  Clone ID: PAT_MRT4530_71434C.1.pep
MGYAAADLGAWKNTRQQYSPSSPISLGSSVFSESSLELSTTTADGSTANAVLAAIVASIGNLLQGWDNAAIAGAIMYIKNEFNLQNDPMMEGLILAMSLIGATIITALSGMITNSIGKRPLLSVAAILYSISALIMFQASNEYMLLLARLIYGFGSGLVVTYAPLYISETAPTNMRGLLNTLPQFNGSLGMLLSYIMVFLMSLTLNPNWRIMLGSLSIPSFVFLLLCIFYLPESPVFLVSKGKIEEAKNVMKRLRGTNEVSSEIAFLIQGLTVDQDNYIEDYMIGHNNDEFDDQSISNTETTKLYGHEEGVTWFARPFKGKNVVESDHSPIPNLLDPIVTLFDSIHGNILNTPEFTSSGNMSNDIEQPKTDLESQEDLDTDYEDDLGHPLLFHQGSYMEGIDDACVNGGWHIAWKFVQRENEFGQTQDDFQQIFLQGDILQAGRVSHATALVSTPSFHHSIGPAMVHPSKFNLSTEGQSWSDLLQPGVKQGLIVGVTIQILQQLAGISGILYYTPQILEQAGAGILLKWFNVSSSSSSILTSALTTFTMLPSIGIAMKCMDRYGRRSLLLYTIPMLIVSLIILIVVNVMNLEAIFGAILSTFGVIIYVCCFVMGFGPIPNVLCSELFPPSCRNRCMSICTLTFWIVSIIVTYAFPVMLSSIGLIGVCGIYAVVCIVSFIFVLIKVPETKGMPLAVIANSLAVGARLSVKRNENI

SEQ ID NO: 173393 - protein, 229 aa, Oryza sativa
  Clone ID: PAT_MRT4530_71435C.1.pep
MMSSLAADAQEDGTEARSTSSSPSSQRMRTSQNVVPAASPRLHVLSRHYGLIELPLAPWPPASPTRSGGWPPFTLKEMEMTPDPAIDAFNVRQCVISSLPSSGSSVTKLDDATMDVDLEFKVTRAAESYSKYGCCRLGRLIKRISRCCLTPHLPDAAPLQLAASIEIMRKKEERWKDGEERRWVSLHFSDLKCHKDVMRDEDLANMPSGRHLSHNRAQYYLRDCICTGF

SEQ ID NO: 173394 - protein, 94 aa, Oryza sativa
  unsure (1)..(94): unsure at all Xaa locations
  Clone ID: PAT_MRT4530_71436C.1.pep
AAYAPERDAMVWKVKSFPGXKDYMCRAEFSLPSITAEEAAPEKKAPIRVKFEIPYFTVSGIQVRYLKIIEKSGYQALPWVRYITMAGEYELRLI

SEQ ID NO: 173395 - protein, 986 aa, Oryza sativa
  Clone ID: PAT_MRT4530_71437C.1.pep
MAPAAKRNLGKAPIVDDSDESDCDGELSRRELDDIIYEIFRKEVVKDVKKEILNRKSCSHAFRYAKVNYTFDFNFYIACCYDNKLKEAAKIDSSFTRFSTKYFCRVISALSPHQKTIIQGAGFQNLLEFNSNYVPNKFATWIAKHVDFKTSQIILRDKVISVTKQTVCDIFGLPSGGLEFGKDFEAGKEYILSMYGLSCLPSVRFFGDQFIKKEPLTNEKVITSFLIVALACFLCPNSSILPSTKYLTIFQDVNNLRNYDWSKFIYDWSMNYMKKFVKTNSLGGCLYMWAVVYLDNVEFGDNNVSNEIPRICVWKSDMIHAYSEFDKIDDDTFGLRPLRDFKSTCYFQPQPCDERRISFQQKLDCALQNMLPVYMKEKICSMFDSHCTSLHTIDDSSCGDLLISVLAMIGEASCNESDQNVVIEENVIENVGTSKADDDIGISSAGISALYFVNAFVLYAEVHVPNDNVLPHSPIHNAFHGNEDAFVSKSAVELNDSRQCDDDLNFVTPQVGNANHSKQSVDDLLDGSGIAAAAAAIHRVAKKFRSRFNDYGNVENIFNQSRPLFSLLDSEDDVSDYEHVFSVQNEDEGSENVSPSSTQPFISFQSLPETPDNDTCNTVINENPGTSAAHNSQNSNKRLFKDVTNSPDVVCLGENKICDSSKRMCVKAEQLYNSTNQLNKYIRGMSSSGGKLPIHGPRRVLVPARHASDPFVFSPRRRFTVSDQENRYYIAICRLSDSSKWQSYYAVDIDNVKAKFYSFGHSLKKNCIVSPYVISVFCRVLFQDSHPSKSKRNYFFLSIGAELINDISDKGLEKVKKSFEGATNARKLHLCDMLYFPILHLQHWFLFIVDLKDRMLVILDCVYHEGDDFYEPIMTQLINNLQTFWDKFECSPMNFSNFKLKFPSVLAHISSADSGIFVMKSMELWSPRVILQNEFSNDNISNIRVQYANRIFFHPSNKLLSTEVEDVVLNWFDPAKFPRVDTPGAA

SEQ ID NO: 173396 - protein, 114 aa, Oryza sativa
  unsure (1)..(114): unsure at all Xaa locations
  Clone ID: PAT_MRT4530_71438C.1.pep
MSCNGCRVLRKGCSDACVLRPSIEWIDGAQPQANATVFVAKFFGRAGLVASLAAVPLHHRPALFRSLLYEACGRTINPVSGAIGLMWTGNWDLCQAVXDAVLRGDSLRALSAVP

SEQ ID NO: 173397 - protein, 770 aa, Oryza sativa
  unsure (1)..(770): unsure at all Xaa locations
  Clone ID: PAT_MRT4530_71439C.1.pep
MAPAAKRNLGKAPIVDDSDESDCDGELSRRELDDIIYEIFRKEVVKDVKKEILNRKSCSHAFRYAKVNYTFDFNFYIACCYDNKLKEAAKIDSSFTRFSTKYFCRVISALSPHQKTIIQGAGFQNLLEFNSNYVPNKFATWIAKHVDFKTSQIILRDKVISVTKQTVCDIFGLPSGGLEFGKDFEAGKEYILSMYGLSCLPSVRFFGDQFIKKEPLTNEKVITSFLIVALACFLCPNSSILPSTKYLTIFQDVNNLRNYDWSKFIYDWSMNYMKKFVKTNSLGGCLYMWAVVYLDNVEFGDNNVSNEIPRICVWKSDMIHAYSEFDKIDDDTFGLRPLRDFKSTCYFQSRPAGMQAKCCIEXNVIKNVGTSKADDDIGISSAGISALYFVNAFVLYAEVHVPNDNVLPHSPIHNAFHGNEDAFVSKSAVELNDSRQCDDDLNFVTPQVGNANHSKQSVDDLLDGSGIAAAAAAIHRVAKKFRSRFNDYGNVENIFNQSRPLFSLLDSEDDVSDYEHVFSVQNEDEGSENVSPSSTQPFISFQSLPETPDNDTCNTVINENPGTSAAHNSQNSNKRLFKDVTNSPDVVCLGENKICDSSKRMCVKAEQLYNSTNQLNKYIRGMSSSGGKLPIHGPRRVLVPARHASDPFVFSPRRRFTVSDQENRYYIAICRLSDSSKWQSYYAVDIDNVKAKFYSFGHSLKKNCIVSPYVISVFCRVLFQDSHPSKSKRNYFFLSIGAELINDISDKGLEKVKKSFEGATNARKLHLCDM

SEQ ID NO: 173398 - protein, 52 aa, Oryza sativa
  Clone ID: PAT_MRT4530_7143C.1.pep
LIGSTTLRILAPYPSIVTHWCPPIKSAVIPHISSYPSAQINYHNFKHCTLRF

SEQ ID NO: 173399 - protein, 192 aa, Oryza sativa
  Clone ID: PAT_MRT4530_71440C.1.pep
MGGGREEEAAAAASKVGYSSGDLPPSAPPHLQGQDPQQYQYGTFQPPPHHHAASGELARPPVGFPQPAPPPGFAGASGGGGHYHHHHQQQPYAPAEPYYAQGYQTGPGYGPIAEGRPVRMRRLPCCGLGLGWLLFIAGFFLAAIPWYVGAFILICVRVHDYREKPGYVACTVAAVIAAIVIPLGLTKGAHVW

SEQ ID NO: 173400 - protein, 120 aa, Oryza sativa
  unsure (1)..(120): unsure at all Xaa locations
  Clone ID: PAT_MRT4530_71441C.1.pep
LKXSQETQRXFLKNPLNYQISYDSINQASQQQGVAIQLPVQPVFGHPLASKLIATQAGPHQRSRRLHLDVFSHNFGPHFVLRQHLSASSICVWXIGHILCVSIHEPSRSQKYFPYPLASK

SEQ ID NO: 173401 - protein, 68 aa, Oryza sativa
  Clone ID: PAT_MRT4530_71442C.1.pep
FVFFFFFFFFFFFFFFFFFFFFLVSFLVFVKPFPIACRLSVLRILFYIGVVCEIGVCCELFLTAHPFA

SEQ ID NO: 173402 - protein, 204 aa, Oryza sativa
  Clone ID: PAT_MRT4530_71443C.1.pep
AHIVGNLPVGQIKVEQRSCELAIDDSKIPGTSLHRATCSTGPCVAISKPIEEAKTIYRILCQCDHPNVLKPIGVWKNPSDDASAYLVLEEVEASLGSKDREFMFSVEDSFIYGFSNIGFKIFRALCNVVNYINGLYMNSAAGTSSSVAGAIPLTPIKLNSSMIFYKLMVEGEVEVVVTDFCVRQPRDLVKKTRKGRPKGPYCFK

SEQ ID NO: 173403 - protein, 251 aa, Oryza sativa
  Clone ID: PAT_MRT4530_71444C.1.pep
MHLCLLHYDTCTSLCKDNMACCSSLLRLMILPVAFAVLVIASVAHGAVVEHTFNVGNLSISRLCQPEMIITAVNGQLPGPTINVTEGDTVVVHLVNESPYNMTIHWHGVFQRGSQWADGPSMITQCPVGPSDNYTYRFNVSDQEGTLWWHAHISFLRATVYGAIVLNPRAAAPFPAKPDTEHVVLLGEWWNANVVDLERMAFLTGIPARNADAYTINGKPGDLYNCTAANQTEVFRVRRNETHLLRIINAA

SEQ ID NO: 173404 - protein, 103 aa, Oryza sativa
  Clone ID: PAT_MRT4530_71445C.1.pep
MAGGAMPLVVLLLATIPLLFFTIKRSAQRRGGGGGGEGRLPPGPWALPVIGHLHHLAGDLPHRALSALARRHGALMLLRLGEVQAVVASSPDAARDIMRTHDA

SEQ ID NO: 173405 - protein, 51 aa, Oryza sativa
  Clone ID: PAT_MRT4530_71446C.1.pep
MSCCGGNCGCGGCCQCGWPCGGCTKFSVVAPSSVSPTPYFFSSSPYLFFLF

SEQ ID NO: 173406 - protein, 372 aa, Oryza sativa
  Clone ID: PAT_MRT4530_71447C.1.pep
MIQPANIPADSSTVIGDDSMRKNKYFMGISLGTPPVFNLVTIDTGSTLSWVQCKNCQIKCYDQAAKAGQIFNPYNSSTYSKVGCSTEACNGMHMDLAVEYGCVEEDDTCIYSLRYGSGEYSVGYLGKDRLTLASNRSIDNFIFGCGEDNLYNGVNAGIIGFGTKSYSFFNQVCQQTDYTAFSYCFPRDHENEGSLTIGPYARDINLMWTKLIYYDHKPAYAIQQLDMMVNGIRLEIDPYIYISKMTIVDSGTADTYILSPVFDALDKAMTKEMQAKGYTRGWDERRICFISNSGSANWNDFPTVEMKLIRSTLKLPVENAFYESSNNVICSTFLPDDAGVRGVQMLGNRAVRSFKLVFDIQAMNFGFKARAC

SEQ ID NO: 173407 - protein, 54 aa, Oryza sativa
  unsure (1)..(54): unsure at all Xaa locations
  Clone ID: PAT_MRT4530_71448C.1.pep
LRSVPTSKLRCQRENQXLTXSAXXNAARGRXLRSIXTGRSXGMGKWELCLXXGR

SEQ ID NO: 173408 - protein, 653 aa, Oryza sativa
  Clone ID: PAT_MRT4530_71449C.1.pep
MAAAIIGGGGCIRTRQEKKKKQREKNSKDQEIEAMAKQLTRVRTVGRGASGAVVSLAADDVSGELLAIKSAGDGGAAAQLRREGSVLSGLCSPHVVKCLGFVDAAGGCGGGEHQLFLEYAPGGSLADVVARNGGRLDEGAVRTYAADVLRGLDYLHGKLVVHGDVKGSNVLVGADGRAKLTDFGCARVAMPGGSKQPVLGGTPAFMAPEVARGEEQGLAADVWALGCTVIEMATGRAPWSDMDNVLPALHKIGYTDAVPDLPRWLSPEAKDFLRGCLQRRAGDRPTAAQLLQHPFVASAAALEGWREPAKQTRASPKSTLHDAFWDSDTDDEDDEMPTGAAERIGALACAASALPDWDSDEGWIEVHDEVSFAAVTPPASDADYFVWAELSDPEMEQFAVAADGVNHVPRNEAEAIESSIRQGSYLHVHLGSGKNEIFHPFDTDGTESVRFDCVCNRNRVIKLNSAQKKKKKKKNVSINVANKTAAIEQRVTSMACSPSSVPDWDSGNQGWIDVLSSVSISIANKLETATAADNVSSECPAKWVRAMACSPSSVPDWDSDQGWIDVLGASPDVVAAEEFDVAAAADQISGQAVGSIVVGVGSSEQSVVVENQEDEFTSLSSCSERVLLVGVHAADNNAASRKAGIKRCSNFSC

SEQ ID NO: 173409 - protein, 85 aa, Oryza sativa
  unsure (1)..(85): unsure at all Xaa locations
  Clone ID: PAT_MRT4530_7144C.1.pep
GVFLLRNKQVRKQLVLGGDLFFVRVLXVVQAIGLQLPLQQFGDLCFDWNMVGVQSXVVFWRGFRYGVYFRWYGALCPVATLDGVL

SEQ ID NO: 173410 - protein, 525 aa, Oryza sativa
  Clone ID: PAT_MRT4530_71450C.1.pep
MAAAIIGVGGGGWTRLRSIGHGASGATVSLAADDASGELFVVKSAGDAVAATARQQLRREWSVMSGLSSPHVLRCLGFVQAAAGAGGEHQLLLEYAPGGSLADVVARNGDRLDESAFRAYAADVLRGLDYLHEKLVVHGDVKGSNVLVGADGRAKLADFGCARVVMPGGSKQPVLGGTPAFMAPEVARGEEQGPAADVWALGCTVIEMATGRAPWSDMDDVLAALRMIGYTDAVPDLPPWLSPEAKDFLRRCMQRRAGDRPTAAQLLQHPFVSKSCGLKKEVVKATWVSPTSALDAAAALWESETSSSTDDEEADDMSNSPTGRIIAMASSGGQTLPDWDSDDHGWIEVLGTVSINIAKKKTAAAEDYEASESPAKRVRAMACSPSSVPDWDSDNHGWIDVLSASPADDNGGEGNAPEEFDVVAAADQIFGEAVGSIVVGVGSEQSVVVENQEDEFISLSYCSERILLVAVHAADNNAASRKAGIKECSHDPRPSIPSRCAHNLFLSLIFIQIDNSNVVPFAPKY

SEQ ID NO: 173411 - protein, 451 aa, Oryza sativa
  Clone ID: PAT_MRT4530_71451C.1.pep
MAKQLRRVRTLGRGASGAVVWLASDDDSGELMAVKSASAGGAAAQLRREGRVLSGLCSPHIVPCLGSRAAAGGEYQLFLEFAPGGSLADEAARNGGCLPEPAIRAYAADVARGLAYLHGNSLVHGDVKARNVVIGSDGRARLTDFGCARVMDSAGPIGGTPAFMAPEVARGEEQGPAADVWALGCTIIEMATGRAPWSDMDDILAAVHRIGYTNAVPEVPGWLSAEAKDFLDGCFERNASDRSTAAQLLEHPFVASAAALDRWPEPAKQERASPKSTLHDAFWDSDTDDEDDEMPTGAAERIGALACAASALPDWDSDEGWIEVHDEVSFAAVTPPASDADYFVWAELSDPEMEQFAVAADGVNHVPRNEAEAIESSIRQGSYLHVHLGSGKNEIFHPFDTDGTESGLDAHRLTALQKHQWNLSSRLPHSSWIDRTFGSDLDIGVQLATTC

SEQ ID NO: 173412 - protein, 55 aa, Oryza sativa
  Clone ID: PAT_MRT4530_71452C.1.pep
CISIANQLRQLAPISWHLDHNLQTRPSNKQSFLPSVSKPSFLPASYLHNAELIID

SEQ ID NO: 173413 - protein, 178 aa, Oryza sativa
  unsure (1)..(178): unsure at all Xaa locations
  Clone ID: PAT_MRT4530_71453C.1.pep
PSPGFLCRRGVEPCRRVISRRHPPARCHAPPAVPGERPPPSRPPCPSAPLAVRWPPPPXLLPCLFWLPLLPLPSAPPLPSVLAALLPGPPXPPRPCVPSWRRSVPAVRPFPLPPLFWRCGHLRPLSCALSPAPPAPPVLPSCPPSARVPPPPSPFRTXPSFADPPLPSAPVALPAPPH

SEQ ID NO: 173414 - protein, 248 aa, Oryza sativa
  unsure (1)..(248): unsure at all Xaa locations
  Clone ID: PAT_MRT4530_71454C.1.pep
THPRPGPISDRVETPAAAPPGWPLPGTHPPRVFFVVVASNRAAVSSXRRHPPARCHAPPAVPGERPPPSRPPCPSAPLAVRWPPPPRFFPASFGCPXAPPIRPSSPFCSGGPPAGPPXPPPSLCPVLAPFGPRGAPFSPAPPVLALWSSPAPLLCLPAPLLPAPAAFRRAAAGTRAPPQPELAPPSXPXPAPPAPPVLPSCPPSARVPPPPSPXPHRPHPSPTPPCPPPLLPCPHRRIPPTPFPPLTV

SEQ ID NO: 173415 - protein, 105 aa, Oryza sativa
  unsure (1)..(105): unsure at all Xaa locations
  Clone ID: PAT_MRT4530_71455C.1.pep
MSDLGMQXPTAFXPFAEANAXDSGAAXXXXXXRSXRXPXRXGRFFSFPCPXLXEVGGGGXLLFVLXXVFCCGGAVVRGPXLGSVFLLLGVYRSPRSSFFVLACFV

SEQ ID NO: 173416 - protein, 301 aa, Oryza sativa
  Clone ID: PAT_MRT4530_71456C.1.pep
MDPKVVVALALSLIGGLSTSLGALLAILNCAPNNKTLGMLQGFATGLMLSMSFFDLAYDAVNAIGFLKGNLWFFAGALLFSTIAEVFPEPDCNLADENDKHLENKTGNNNIAGKELMMRHRRRVIFSVVVTAIVAGVSLQNFPVGTAAFLGTTKGFRVGLNLSLAIALHYIPEGISVALPAYFATCSKWQAFKLATLSGFAEPLGVIIVAYLFPSNLNPEILEGLLGLVGGVMAFLTLYEMLPIAFEYAGRKDAVKAVFVGMAFMSMSKKYLAEIGYNKILRSKFGLWHRGCTFAKAGMSA

SEQ ID NO: 173417 - protein, 240 aa, Oryza sativa
  unsure (1)..(240): unsure at all Xaa locations
  Clone ID: PAT_MRT4530_71457C.1.pep
MDKTYWQIWLRDKGFTYSNVYNKGKTIVXSKVPLPDYRADLDERHGSTQQEIRMSNETERRVESLLAKAKSNSNDSASTSTLTTRQSRPSTSSSVTESTKDIDKERLSSELRDIQNSRKMMPSARSMQSFRDKLPAFKMREEFLKAVAANQVLVISGETGCGKTTQLPQFILEEEIDNLRGADCSIICTQPRRISAISVAARVASERGEELGDTVGYQIRLESKRSAQTRLLFCTTGVLL

SEQ ID NO: 173418 - protein, 957 aa, Oryza sativa
  unsure (1)..(957): unsure at all Xaa locations
  Clone ID: PAT_MRT4530_71458C.1.pep
MDKTYWQIWLRDKGFTYHLMPFSVSLTYTWRLTNSIFIILFLTWGKXSNVYNKGKTIVFSKVPLPDYRADLDERHGSTQQEIRMSNETERRVESLLAKAKSNSNDSASTSTLTTRQSRPSTSSSVTESTKDIDKERLSSELRDIQNSRKMMPSARSMQSFRDKLPAFKMREEFLKAVAANQVLVISGETGCGKTTQLPQFILEEEIDNLRGADCSIICTQPRRISAISVAARIASERGEELGDTVGYQIRLESKRSAQTRLLFCTTGVLLRRLVQEPDLVGVSHLLVDEIHERGMNEDFLIIILRDLLPRRPDLRLVLMSATINAELFSKYFGEAPIMHIPGFTFPVTELFLEDILEKTRYKINSERDNFQGNSRRKRLASVKSDPISDAFELLDPSSSKCKAYKFYLHSTEPHKDVDIYKEYGNYSVATRQSLEAWSATELNLSLVEGTIEYICRHEGEGAILVFLTGWDEISKLLDKIKGNNLLGNSNRFLVIPLHGSMPTVNQREIFDRPPANMRKIVLATNIAESSITIDDVVYVIDCGKAKETSYDALNKLACLLPSWISKASAHQRRGRAGRVQPGACYRLYPKVIYDAMPQFQLPEILRTPLQELCLTIKSLQLGAVASFLAKALQPPDPLSVNNAIELLKTVGALDDVEELTSLGRHLCTLPLDPNIGKMLLIGSVFQCLDPALTIAAALAYRNPFVLPIDRKEEADAVKRSFAGDSCSDHIALVKAFEAWKEARRSGRERSFCWENFLSPMTLQMMDDMRNQFFDLLSDIGFVSKTRGLKAYNYYGKDLEMVCAVLCAGLYPNVVQCKRRGKRTAFYTKDVGKVDIHPSSVNAGIHQFPLPYLVYSEKVKTASIYVRDSTNISDYALLLFGGSLSESKTGEGIEMLGGYLHFSAPRRIIELIQEKRLRGELDKLLQRKIEEPALDIFSEGKGVVAAAVELLHSQNVHH

SEQ ID NO: 173419 - protein, 110 aa, Oryza sativa
  unsure (1)..(110): unsure at all Xaa locations
  Clone ID: PAT_MRT4530_71459C.1.pep
APRLIVELTTFDVCIYICGNYKQCQIMSSKNWHIPFLHVVVSLLDMSLNKGLVLVLGSKQCLVSHDIFTEMFHRIYVCMQENFCLYYYCVIYRTYLSLRASXLTSSKKKK

SEQ ID NO: 173420 - protein, 500 aa, Oryza sativa
  Clone ID: PAT_MRT4530_7145C.1.pep
MAEERESFESQWAPSDVTDENLKEMVAHGVLPAKEIIGWRPACGEAFLTPDTHEVVVFSHFLYGGFPLPTSKFFRGIVEFYGISLHHLNPNSIVHIANFIHVCEAFLGIRPHFALFRRIFFLKPQPNKNKPCVVGRGTGFQLRGTLSQKYFSMPFKTSNKGWHANWFYVQNPELALPEYSCLPPTYQDTRNSLPMGDEAAQALSLMERMLKLKEQGLQGEQITRHFIKSRLAPIKERSRTAFEFDGKNDPNREDPESLEFKIMKERMYKIFSNAIAVSCSHLLPVVPYNAFNPPPPEFSLMKSDPPIAQRRSPRRQAGQASGGPKIRSDAQPSISKPTNQSDSRKRKLILSDDEGDNVEKAGNKEVTGKQPRQANPKKKTSSRPIPKIRKSSRIHLRNEAKTATLEKLVPHHGTLEETRAQLHETRELARKTEHDLRDRIAKLQDSNFELSGSSKVQVAKITELEKRIKALEKDKGELTKQRDSALKDIEGSIRHLGQQN

SEQ ID NO: 173421 - protein, 81 aa, Oryza sativa
  Clone ID: PAT_MRT4530_71460C.1.pep
KAAPRTSTKFALREGAKGGRLFFISNLDSLIFYEFKLYIYIYIYIYIYIYIYLYIYIYIYIYIYIYIYIYIYIYIYIYIYI

SEQ ID NO: 173422 - protein, 142 aa, Oryza sativa
  unsure (1)..(142): unsure at all Xaa locations
  Clone ID: PAT_MRT4530_71461C.1.pep
LSRGLLTLGVAPIRGSLGTADDLLPIRRRYTRARAVEVQSKGHQGNLHTLKLMGYGNPTVPSPNLVKLKEARTPFDFKTGVKKRMKTAYTGMAQSTXRMQEPRDHWCAPHRHTCKTKAAKKDRIRXKKLEQCADTVAEKLHK

SEQ ID NO: 173423 - protein, 89 aa, Oryza sativa
  Clone ID: PAT_MRT4530_71462C.1.pep
AREQRASEGAQATMYHTTHTHWCFVQHQPQHQIFVHNHISLGDVFLMRWAKVSRAMEPIDSPRSKRDLQEVEDTGTHRRLVLYMFIRSL

SEQ ID NO: 173424 - protein, 74 aa, Oryza sativa
  Clone ID: PAT_MRT4530_71463C.1.pep
MGQRTTIEDTHDNQYTPTRSHNIQAKIRQDKPPDIDIRDTPGSTLSVGRELEEEGYPVVDYESDRQTAMSTTVR

SEQ ID NO: 173425 - protein, 226 aa, Oryza sativa
  Clone ID: PAT_MRT4530_71464C.1.pep
MGLEIMTDEAAAAPSPAAAAARVEIYPLCRYYFGARDVAAGGAGAGLETAADRALRLKANFAAHGLRTSVHGVLLVELFDHPHVLLLQVRNSSFLLPGGRLRPGEQDVQGLKRKLSTKLSVAGHQDDEDGDGDDEWQIGECIGMWWRSEFDAAPFPYLLPNARAPKECIKLFLIKLPVSRQFVVPRNMKLLAVPLSQIHDNAQVYGSIIAGIPNLLSKFSMNIISD

SEQ ID NO: 173426 - protein, 78 aa, Oryza sativa
  unsure (1)..(78): unsure at all Xaa locations
  Clone ID: PAT_MRT4530_71465C.1.pep
MNLLNLKYHAGRPLPPPPLLLPPCPRPTVIIPAVASDGSAPPPPPXPMLPPPSSMPLPLSLMQPPPPPLTWPPSPGMG

SEQ ID NO: 173427 - protein, 126 aa, Oryza sativa
  unsure (1)..(126): unsure at all Xaa locations
  Clone ID: PAT_MRT4530_71466C.1.pep
GPGYRQYQLRSPVLVHQHVFSPYNXFLRPPFGITASPFLQTGGFQLRNHPVWPPPPLGGPPSPFRALNLFRALGPQLQPPPFGGFSFVRNLAPAPALLAFYGPPKYGFPPRGFGAPRPLPPPGGVL

SEQ ID NO: 173428 - protein, 93 aa, Oryza sativa
  unsure (1)..(93): unsure at all Xaa locations
  Clone ID: PAT_MRT4530_71467C.1.pep
WXRAAAGGXDGGGGVATGGATVQCYLXLRAHLRTATSARAAAWXHRQPLRKPSSAPTGVSXAARASRETLGACARRGARLXGRHAYRALMTRF

SEQ ID NO: 173429 - protein, 88 aa, Oryza sativa
  unsure (1)..(88): unsure at all Xaa locations
  Clone ID: PAT_MRT4530_71468C.1.pep
YSTGILDSSDETNFFDTAPTGKNFSSGVGKXSKTECYLMYSASHTGRVGYDAGYIQGRRKEATTAGSPLPCLGESGSDKGRRRAHPAP

SEQ ID NO: 173430 - protein, 95 aa, Oryza sativa
  Clone ID: PAT_MRT4530_71469C.1.pep
SLMYTPRTDLTNLAAKYANTRGRALPDPTSHQTLNVRPRIAQSRGADRSESKIYPIQTKATDPNKNNNGRVQRENPIPNAAWLLGLGGRERMGVT

SEQ ID NO: 173431 - protein, 228 aa, Oryza sativa
  Clone ID: PAT_MRT4530_7146C.1.pep
MSSWEDDDSAAAAAAAAAASTDVELLKRAWRNEKASPEILRFDSPLVSRVREQIQLLEETLDDFGESGVDDLVVSLYQMDLDRTLFLLRSYLRLRLQKIEKYMMHISKSEDLLSRLSQQEQRFAKSCTEMMEKHLEQSVLSKLPYGYDSVTRQSLSSTEDDMGIPFDPIIIPEPQLDTFVFCKTKSDVGAFQLDDIGEEVVDLVADDLYVLRYKSIKGLVESGQIDLI

SEQ ID NO: 173432 - protein, 1020 aa, Oryza sativa
  Clone ID: PAT_MRT4530_71470C.1.pep
MADLLQKLGIDSHLVCPVYAQDPETANHIILDCVFAQSWRPAGVDEGGEELPAVGHRRLLWSGGRLELTKSAGGCCSAPVAGHGDGEIGRSGGVVPVVEKKRTVGGRRMSELEVYSLLQKMAAMRDGGDWPAGAELELQELYTVLEKVQRKMAHAEPLVVVDSGNSARAAYSLFLADLRRVTFTVDQALDSYSASARRSPFMHRVRSVALMGMAAYGVFAFLSARSSSLLQEKLLPQPLELRPKIARKLEEAVKDVRMLLRLFSTYVADLLPPPEHQQPEPGEDAESFWWSLNSDLNEGLINKKHLLVLDGVWNEDPRKWKELMDLLYGNCTQKTKIIVTTRIPAAAAAISSAVIYHLHPFSVEHTLEMLQTINGELPEKLLGGGSSNATVSTAAAKELSKRKVAEKCSGLPTIIKFLSSSLESICANEVADPLKQFDMMCAGNQGLLHIAEASYNHLPPHLKRCFLYCSLFPYHHIFDTDEMISLMVAEGLTQTTSREAQVDGDISRLQSECFDLVNNPGSNGGIRRGCMMHRVLHILARHKGQELYKAIVGDHSAALKEHSNIRYMSLTVDHTTTELPGSLTAHTDLRTLILLRTQKMVLSGQKSEIKEIPSDYCRYLTYLRVLDLQATKINKLPEKVEMLSNLRYLNLSQTDIDKLPESIGRLQYLDISNLKNVKELNVLECPSLDKMPCGLSALTKIEALPRYIATSGDNNPILELRDLVKLKRLGLENIANISNEDAEKIQLQKKHELEHLTLNCNMDAENRKSSSEVKELLDCLEPNPGLKILEIISYAGETFPCWMANTNPQLKKLTQIRIIRLINLKCSSLPPLGQLHQLETLEISGMNAIKNVSSELHGELNADTFRSLKKIVFSHMVNLQCWPVENGAICEHLKELSIIQCPKFHKLSMNLNIEKLTLLMSPHELLGREGLAGVARSLKSLSISLCEELSASSNCEGLTMLSNLEELKISGCDELENLPPGCSSQGNPIMQQTTRKQQQQEQRQWKPMNEYPIPQAIAWN

SEQ ID NO: 173433 - protein, 54 aa, Oryza sativa
  Clone ID: PAT_MRT4530_71471C.1.pep
LPFEKLNVPRTLIFQYIYMNSAKWQTSTYADRCIPISCMFSFSCTQACLPQSCL

SEQ ID NO: 173434 - protein, 49 aa, Oryza sativa
  Clone ID: PAT_MRT4530_71472C.1.pep
SFASEPHRIYPFSDPYISVFCFRRYRAPVLRIRYDEWHSIRDSRIGIWT

SEQ ID NO: 173435 - protein, 51 aa, Oryza sativa
  Clone ID: PAT_MRT4530_71473C.1.pep
CLCSLTSTAYIPVWLLQFWSTSRSLNLYRCVIPVLKLANRPFKSSNLFDCV

SEQ ID NO: 173436 - protein, 371 aa, Oryza sativa
  Clone ID: PAT_MRT4530_71474C.1.pep
MADQPKIKITLVASALQHFLTCHLVMNKKNLMYLHLAEIHRSNLQRQADTGSGSSSVCNSASMVFGKAGFGKIYYNNWCFSFGARILEKRMQAGDQSNRIAIIISPRAGSSKILPFELVNGAANAGSQRHADPAESTPEAHHHLWHPVDLPKIKPPVPLVKKVGAEFFGTFTLIFTVLSTIIMDEQHKGVESLLGIATSAGLAVTVLVLSLIHISGCHLNPAVSIAMTVFGHLPPAHLLPYIAAQILGSITASFAVKGMYHPVNPGIVTVPKVGTVEAFFLEFVTTFVLLFIITALATDPNAVKELIAVAVGATIMMNALVAGPSTGASMNPARTLGPAIATGRYTQIWVYLVATPLGAVAGEGFYFAIKL

SEQ ID NO: 173437 - protein, 378 aa, Oryza sativa
  Clone ID: PAT_MRT4530_71475C.1.pep
MASALGAQASVAAPIGAGGYGRSSSSKGSNTVNFCNKSWIGTTLAWESKALKSRHMNKIFSMSVQQASKSKVAVKPLELDNAKEPPLNLYKPKEPYTATIVSVERLVGPKAPGETCHIVIDHGGNVPYWEGQSYGVIPPGENPKKPGSPNTVRLYSIASTRYGDSFDGKTASLCVRRAVYYDPETGKEDPTKKGICSNFLCDSKPGDKVQITGPSGKIMLLPEDDPNATHIMIATGTGVAPYRGYLRRMFMEDVPSFKFGGLAWLFLGVANTDSLLYDEEFTNYLQQYPDNFRYDKALSREQKNKNGGKMYVQDKIEEYSDEIFKLLDGGAHIYFCGLKGMMPGIQDTLKRVAEQRGESWEQKLSQLKKNKQWHVEVY

SEQ ID NO: 173438 - protein, 43 aa, Oryza sativa
  Clone ID: PAT_MRT4530_71476C.1.pep
SDKKISIFQRATRHVDTPKTILNYNILDAHTFHTPLKVVGTSG

SEQ ID NO: 173439 - protein, 77 aa, Oryza sativa
  Clone ID: PAT_MRT4530_71477C.1.pep
RKLGTRKLGPLEGYLERRSRSRTFSTLSPASQALVICPPHWLAMAALELPCLTTSCCPLLRGFHCHFSVPWRWPEPH

SEQ ID NO: 173440 - protein, 87 aa, Oryza sativa
  Clone ID: PAT_MRT4530_71478C.1.pep
YTACAKFKIGGWVGFKNVHLTVQQRKLQCAVYNISFKHKRSLKVNNRPKPAAVFYSLPVELVFDVESRDFICDVTWCDIYLSLTSTI

SEQ ID NO: 173441 - protein, 103 aa, Oryza sativa
  Clone ID: PAT_MRT4530_71479C.1.pep
NFARQYNIINTIQLAPSKIEQRIMYYPPLMPFLSSNQNETTSITPKKDCKSSNSVPIFPFTTQKGKNLVTRNTKLEVCEHPSKGHTANRRSTTCPLTSHDHSS

SEQ ID NO: 173442 - protein, 94 aa, Oryza sativa
  Clone ID: PAT_MRT4530_7147C.1.pep
MAEERESFESQWAPSDVTDENLKEMVAHGVLPAKEIIGWRPACGEAFLTPDTHEVVVFSHFLYGGFPLPTSKFFRGIVEFYGISLHHLNPNSIV

SEQ ID NO: 173443 - protein, 325 aa, Oryza sativa
  Clone ID: PAT_MRT4530_71480C.1.pep
MCRRWRRAGWANVEQGDHGARRRWWRRMVRREAVEEEGVSGHGTRGTGRRQIFLERQHRPHCAPATTPVIDPIHQELSRAPLRCSLAGQRIFGPLKLAPIGVTDPSKVFGKLLAPDLKKNEKKRKKKESPPPGRAPPPAGQPPRRRRPPRRRRAYAPPPARAPPASPRVAASPRAAAEPVRRRQPARRPPALAPPSPRAAASPHAAAEPVRRHRQPARRQPARRRLPPNLAGEDGRGERGWEEEFRGSSMAFLCKYIKILKGSGSFGVEWSSGAAKTQLHPRSTNLWSCSANSAPKNREFVPFGTAPALGKLELGAGAVPNGAFI

SEQ ID NO: 173444 - protein, 76 aa, Oryza sativa
  Clone ID: PAT_MRT4530_71481C.1.pep
TVRSLYAQQTQKLISVYSDQAFASPQSTIYGSSPSMQHQLVELSPVTICGSLLKLSSEVALWAQKWKSCHCFSSLL

SEQ ID NO: 173445 - protein, 90 aa, Oryza sativa
  Clone ID: PAT_MRT4530_71482C.1.pep
KVFNGMRIMTLQICKQLIREFYPLIPTLVCCHHMHVRGALGDLCSKLLTPLMPLDVIVPPSVANIFSRWSTISISVFVQIMERHKQAWRP

SEQ ID NO: 173446 - protein, 51 aa, Oryza sativa
  unsure (1)..(51): unsure at all Xaa locations
  Clone ID: PAT_MRT4530_71483C.1.pep
WLLRSSRGRXCYGEVVPLRHILFALHPSPRRPLAWRGPHAISPTSPSRARV

SEQ ID NO: 173447 - protein, 79 aa, Oryza sativa
  unsure (1)..(79): unsure at all Xaa locations
  Clone ID: PAT_MRT4530_71484C.1.pep
MPRGGQRRDDGRRRHGGGEAHTLSDAAAAEEEEVRREPRGGGHVVHAELGALVIEVVVLXARGCASGGGGGGEVMYSSM

SEQ ID NO: 173448 - protein, 224 aa, Oryza sativa
  unsure (1)..(224): unsure at all Xaa locations
  Clone ID: PAT_MRT4530_71485C.1.pep
TPSPSHSPSPSHTLLLLSAGSSASSSRRRAPPWRRRRWSPRQRQQLSCRRPPAPCLWPRQRRWSQHQRQRSWRRTWRXRWSRLQRCCCCWRRRRRRRAPCRWRRRRWSWQRWCSAAAPAPRGRRRGGSWDGCRARRRRPARSSGDGTTPPAPASTPWRPRGAGAHHHARPATARRGDGSWTGSPAQLQRTFATTTATASHSPSSSPLSTTATATAATRRCSRSP

SEQ ID NO: 173449 - protein, 48 aa, Oryza sativa
  Clone ID: PAT_MRT4530_71486C.1.pep
MLDLSATSDGTEVAGGEGLGKRRLLASEEQKGVVPSRRGSPAKNGGEH

SEQ ID NO: 173450 - protein, 662 aa, Oryza sativa
  Clone ID: PAT_MRT4530_71487C.1.pep
MTSTSSENAPDHDHDHDASSPAPATATAAALPPMIPACDPHDGPACLELIEVLTTRAAAVQRRVLAEVLAMNTGTDYLRRFLGDEVVAAAGGEDELAAAFKERVPVVEYEDVKPYIERIANGAPSSLISSKPITELLTSSGTSGGQPKLMPATEEELDRKTFLYNLLVPVMNKYVEGLDEGRGMYLLFVKPEITTASGMVARPVLTSYYKSRHFRRRPDSPYTRYTSPDAAILCPDSRQSMYAQLLCGLARRGEVLRVGAVFASAFLRAVKFLEGHWRALCADIRAGRADPAVVTDAACRGAVDAVLAARADPDLADAIAAECGGASWRGIVRRLWPRTKYIDVIVTGSMAQYIPLLEFYGGGLPLVSTMYASSESYFGINLRPLDPPEEVVYTLLPNMCYYEFIKVEKDGDGEKVRDGEVVDLVGVEVGAYYELVVTTFTGLYRYRVGDILQVAGFHNAAPQFRFVHRRNVVLSVDTDKTSEDDLLRAVTAAKPLLDPLSCVLAEYTAYADTSSIPGHYVLFWELTPSPSPPPPPCHDDADDAADIGEDKDKVAHVMAACCAAVEAGLDSVYRRCRSRDRSIGPLEIRVVAPGAFDALMDMCVSHGSSVNQYKTPRCIKHPDAIAVLEQRVVGRFFSDAVPHWEPLKVDGAAAAPATGSDQ

SEQ ID NO: 173451 - protein, 151 aa, Oryza sativa
  unsure (1)..(151): unsure at all Xaa locations
  Clone ID: PAT_MRT4530_71488C.1.pep
IRTNFSLQQYTATATTTTTPPRTTWTTTGGAPDHHGRRPPSRSLPIKLLKPLLLFVVLVAGFLVVAALLLLGGAGASCSRGAVDAATGGERLAXHEQRGAALGGVDGATGSVVWSEARRRATKWHKLDTQGTRYQSIPRYQGLIPTYQLDT

SEQ ID NO: 173452 - protein, 96 aa, Oryza sativa
  Clone ID: PAT_MRT4530_71489C.1.pep
TLLSSSSSLHHQLSPAATIRLRASSPPWRTTGHRPPSRPPPSSPPPLMTTAPCLRHGHAHQRLRRAGAPPPLGRTGPSPPAPCPPPPRQPPPAPPP

SEQ ID NO: 173453 - protein, 724 aa, Oryza sativa
  Clone ID: PAT_MRT4530_7148C.1.pep
MAEERESFESQWAPSDVTEENLKEMVAHGVLPAKEIIGWRLAYGEAFPTPDTHEVVVFSHFFYGGFSLPTSRFFRGILEFYGISLHHLNSNSIVHIANFIHVCEAFLGIRPHFALFRRIFFLKSQPNKSKPCVVGGAGFQLRGTLSQKYFSMPFKTSNKGWHANWFYGQNPERALPEYSCLHPTYQHTWNSLPMGDEAAQALSLMERMLKLKEQGLQGEQITRHFIKSRLAPIKERSRTTFEFDGKNDPNREDPESLEFKIMKERMYKIFSNAIAVSYSHLLPVVPYNAFNPPPPVCNRHLGLSDGILLSFARKLILSDDEGDNVEKAGNKEVTGKQPKQANPKKKTSSRPIPKIRKSSRKPSDIDPSGKDSEPTSMETGPTTETGLTAENRPSSNQPATDNIEASNEPPTGNQSAEADQEPPTGNQLGPMIGDEEEVLRIQSAEDSRPPILVKWWDDEMQPQGIVINKQKEDEEGSLLAKTLNQATRLVNRIHLRNEAKTATLEKLVPHLGTLEATRSQLRETRELARKTKHDLRDRIAELQDSNFELSGSSKVQAAKITELEKRIKALEKDKDRKIKSQAQFDVLVNKIKKLEGARDEVANAATPLIQAMFFNNNGPSSFDAVEIFDKLRAAPDTYFKNIKEAGCMGASMVLAMTKSLNPRIDIDAVECFADGTSEEDALDLINDAQKAADKIVVDAVERFLDNNLRPTVSDDSDNGKIESD

SEQ ID NO: 173454 - protein, 138 aa, Oryza sativa
  unsure (1)..(138): unsure at all Xaa locations
  Clone ID: PAT_MRT4530_71490C.1.pep
HCATPPLIFFLPPSPSALAGGHHPPSRELSSMENHRPQAPAGTPPMAPLPVPPPIAPIPAPPPXPPHLSRPPPPSPPPPMTTVPXPSPWPCPPTTPPCGRAFAAWKNGSGLDGGLARKMETADVGVGGVDGMEHDHGV

SEQ ID NO: 173455 - protein, 481 aa, Oryza sativa
  Clone ID: PAT_MRT4530_71491C.1.pep
MPERTKIPLLLPSSTSDKGCLAGSPLPRPPHPPPPPLPFLPDNPRLVRLHLRTPSSPPRPTPTDDPVVTLHAIRATDADVGGLRLSCQPAVLATPVLPGGGGAPARRSRWWAWPWRRRGAVVIGGAGDGGGGRDGCGGSRRAGLGWGRMGGGTGRGAMGGVPAGACGLWFSMEESSREGRWWPPARADGDGGRKKMRGGESDKLIFERLQREFEAARTAQTEEIPIDDEQWNDGLLATIREKVHMEADRKAMANQANVPADPQFQSRTTYRVKNKVIYCLDGARIGIQYETYFAGEPCEIYHCVLESKSFLEKMTVIEHTLPFFLPIREVESEFLSSNAIKFIDHLEEILQSYVDRREQVRLIKELYGNQIGELFHSLSYNLIEFVMEDFECKVTVSIRYSDLLFTLPSQARVLAWPLRSSRGISVTERRASRSASAQLVPFRLPYAEDALKTLSLPEAFAEIVLSLPRALKRILSSQESD

SEQ ID NO: 173456 - protein, 52 aa, Oryza sativa
  unsure (1)..(52): unsure at all Xaa locations
  Clone ID: PAT_MRT4530_71492C.1.pep
VSIPVLVRLHXIADCLDDLLLRYLPSGCTRLYFNXFNHDKYYQSTQKKKKKK

SEQ ID NO: 173457 - protein, 318 aa, Oryza sativa
  Clone ID: PAT_MRT4530_71493C.1.pep
PPPPSTPRASCAAAPPARTWATATSGPVAPRASTTSPSRSRSRSCRRRRRPRPSRRRRRPPRRSRWRLPRAALREEARAHIGDTGLLDHLLRHIADKVAPGGAERFRRRHNAGGGLEYWLEPAELAAVRRKAGVADPYWVPPPGWKPGDPPAPAPAPPSPAPVPASPPEARPARGAAGGGARPHWRHGPPRPPPQAHRRQGGARRRRAVPAAAQRRRRAGVLARARRARRRAAERRRGRPVLGASSRMEARGPRLAGTSRTSTAMAPPPPPPPAAMVAAGREHRGSAACASPSRRARSSGRRRACRSRRSSPRRRRRR

SEQ ID NO: 173458 - protein, 58 aa, Oryza sativa
  Clone ID: PAT_MRT4530_71494C.1.pep
LFGLDKKDIEGYWVRILCFSLITPLMISKKLHTTSCDANTNPLRITGKQKCTISFVVI

SEQ ID NO: 173459 - protein, 54 aa, Oryza sativa
  Clone ID: PAT_MRT4530_71495C.1.pep
PTITTTTMSCRHACYFLSRGGGDCLSHEELTPKLRERELPAFLNKQTHRLPIYR

SEQ ID NO: 173460 - protein, 49 aa, Oryza sativa
  Clone ID: PAT_MRT4530_71496C.1.pep
LLAKAPPDPTSHMLYVPANCKMIWYLHSEYTWRFIFPSLPLLHAGQHLY

SEQ ID NO: 173461 - protein, 86 aa, Oryza sativa
  unsure (1)..(86): unsure at all Xaa locations
  Clone ID: PAT_MRT4530_71497C.1.pep
MCRSRGHGMWSPANVPMTSHMRWDKRXFISCISLNKRRLFNFLLRFESTTKNKLAYLNGNIDILQSKLVVIEVRASRATTSPCAFN

SEQ ID NO: 173462 - protein, 197 aa, Oryza sativa
  Clone ID: PAT_MRT4530_71498C.1.pep
MGNTPAAAADLRFCLLEEGRPPPVAAACNPTPPWLLAIRVSRVDFLSFFFLAGFDRSLMWLLPQWFCIIAAVAMVAVFAAEIFPWCESKGDVALCAIALAGALLMGPILGLAMTACAADDDEAAARIPSRYTRSEENMGRAAIMAVALLGLYVIYLAAVRGGDSGRFLDAACYVMMGLGLIVGHSVTWIEGCFLRRD

SEQ ID NO: 173463 - protein, 93 aa, Oryza sativa
  Clone ID: PAT_MRT4530_71499C.1.pep
MTKSELIEKLIALNPSLPEKAVEDGVKDILENIMLTLEQAKRVEIRGFGSFSLHYRQPRIGRNPKTGASVKLDAKYVPHFKAGKDLKERVDLV

SEQ ID NO: 173464 - protein, 613 aa, Oryza sativa
  Clone ID: PAT_MRT4530_7149C.1.pep
MTKNNIRANKPGTQVCSQVAYWKFIQTLDKDQLQAIDDLGFGGLTKMNGVQIRRILCKQIAREYDEHTGAFNINGTMHEITIEDVDHILGVPSEGVELVEVPQAIQADVDDPKEKEKNEALQATKAALFALYKDKRETKITLSALRDSLNLNKSCDDHFKRQFVLYTIGLILCPTTERFVHSDYLNLLINIADIKRTNWASLTLNHLKRSIVSFQHDKVNLKGNQILLLVAVISIQVMVYACMEKFRVSHIHPSIDYTGRDRPLIQYWDVKKARKREKILYGVGQIVNDIKLPIEATKEYTTKDHSGTDANQPSNMDNTKAQTTDMVDVQLQLKTMNEHLIILRKEIQAKKKKDTSNSPIAKRVQTTGRARTSTVQLNTDFVYPENPKNKQKATPAPPPNTFRRHALHKCFKNFVTQHFIFVIEINWVVIAEFTCTEEDEFLIDYINTSPPDRVLIIDTYIMYLEHKYLEESQARRRVYMMKTFITGKISIDCVHEISKRQLEKGYISRITNQIAQNEQIFIPINRNKNHWYLAVVHVKQRQIQLLDSSPSTGLSFYRSSCGLFMLKCMEHWNGSKLTTKFKQGDIDIFRRKLAAILVGSTSNDNTDIPTYNK

SEQ ID NO: 173465 - protein, 118 aa, Oryza sativa
  Clone ID: PAT_MRT4530_714C.1.pep
MATATAEVAAAAAAAGEAPPPPPPAVVEEAKEALEAPKPEEAPKAEEGEEKKAEGEKEKEKAKKERKPRARKPRSAGPHHPPYFDVRGKSIDRSMRVASIEVIVCHFLPQDDMLWVRN

SEQ ID NO: 173466 - protein, 74 aa, Oryza sativa
  Clone ID: PAT_MRT4530_71500C.1.pep
MERIQWGEDLRGVDSDCRTVPTSDDRHDFMRSLIWACKYFMEILSSLLSNGSSPMSISSSAAKNNGVLFRSKSS

SEQ ID NO: 173467 - protein, 172 aa, Oryza sativa
  Clone ID: PAT_MRT4530_71501C.1.pep
MASVLAVPLLLCLLASASAARFAPADNHLLACGATAPAVLPDGRRFVPDSGCASTRLRSPAPTLPSAASSAAPQPTPLHAAARVFSCRASYDLAVRRRGYHVLRLHFYPFEPALASARFHVGAAGFLLLHNFSASAPVVKEFILPVHSDVLVLTFVPESGSNAFVNAIELVS

SEQ ID NO: 173468 - protein, 53 aa, Oryza sativa
  Clone ID: PAT_MRT4530_71502C.1.pep
CYCYSSVMTHEVSWDHELCVYLWAKLYFYNKKFIKTPGKRGGTKWLKVDLCYP

SEQ ID NO: 173469 - protein, 617 aa, Oryza sativa
  Clone ID: PAT_MRT4530_71503C.1.pep
MDAAGSLQGEREFHNEIAVASHLLASSSAPGSPPVPDAAAKPGGKGRDSILLPFAYSMSSAARGEGRPRRMMLVYDLMPNGSLQDALLGRRCPELVAEWPRRLAVARDVAAALHYLHSVVKPPVVHGDVKPSNVLLDTDLRARLADFGLSRINSDADADGKPESGAIAEGCDVDGGCDDDASVIAESTVTTTVNGEGNPKSPEDDDGFTSASPAEAASTSGFDRTSVESGMNSRSCNGGGSRTGGTMGSGTGSDWWWKQDNGGGSNGVKDYVMEWIRSEIKKERPKNDWIAGAAITNPAADRKKPKRRAREWWREEYADELAKKQKRRALAKSKSEQAGLQWWERDIDDDLDAKGRSKWSMMKSWSRRSNGSTGNGNGNGNGSINWWVNGARSTRDWASGEFVPKSSGAVSSTPSMRGTVCYVAPEYGGGGPLSERCDIYSYGVLLLVLISGRRPLQVTASPMSEFEKASLISWAKHLARVSRLIDLVDPALQDVNRDEVLLCITVALLCIQRSPARRPSSEEVLRMLSGEGEPPHLPLEFSPSPPGGFPFKSRKKVRIAIADLKYEGQPGHYVFWKGFIEAKSFILRLVWMQRSIAECPNPFGLWFQVEENLLSSK

SEQ ID NO: 173470 - protein, 104 aa, Oryza sativa
  unsure (1)..(104): unsure at all Xaa locations
  Clone ID: PAT_MRT4530_71504C.1.pep
GXGXKAGXXXKXGAXXRYRXFXGXXGGTXRFXFXSGXAAVAXXGXRHGXXXPNXEWXRXLXSPXFKGPRXQPXWLGXPPSPSFSXDEXTARLDXXXXSLXWEAE

SEQ ID NO: 173471 - protein, 231 aa, Oryza sativa
  unsure (1)..(231): unsure at all Xaa locations
  Clone ID: PAT_MRT4530_71505C.1.pep
MSSSSSSFKPNPLSLSVPDPALDRWLRDSGYLDILDSSASASASASTSSSPSATTTTAAASSTSTLINPTSAAAAVLAFARTLASVLALNPFARLSTTDLAAPTPSWSLAFLGPPGAASYSWPPTSTQARLRVQENVRRYARNYAALSILVFACCLYRMPMALLGMLAILIVWESVRYCRERWGLATRAPGVGQFLLHSAQIATAILVYVCSLQFALVYXIXXEYAVMMLH

SEQ ID NO: 173472 - protein, 270 aa, Oryza sativa
  unsure (1)..(270): unsure at all Xaa locations
  Clone ID: PAT_MRT4530_71506C.1.pep
LPGGQGAVLGGAAVTTRSSPLRPDLAGXRLAAARVGATAAGRATAMSRAPAAVPPRSAPLGRSCRVAAVGRRXLATTRTTAGGSWRRSRPDLDTGGSWXRRRLCGVVGGAGSGQAKTWWLPCQLATVVEAMALSCXLLGGGGRRCSKGFAEAVXDVGGGEGVGYELGIMTAREVQPMAVEAGSARKARPAXMKAGLARKARPMKEGRIGARGASSRGGRLSAKRRARRXRRRPRCEEELPWRSVTLSGGQSGASLLLVVCVGDVGVWVVV

SEQ ID NO: 173473 - protein, 291 aa, Oryza sativa
  unsure (1)..(291): unsure at all Xaa locations
  Clone ID: PAT_MRT4530_71507C.1.pep
AAAGATAAQARAAAAGSEARLLWPAARCLAATAVVPPDPCLSAGSGGWEQSATIATVWRRRRRQLATAVSAGSGRRRWRRWWRSPAVVAAVSSGDGGGRHGVGLLAARWWRVTAQRRFAEAVVGVGGSGDGGCDSGGGGDVGGGEGVRGEVAGCSATKAVVVXGRRGIVRWRGRKPAWHKEAQPMAAEAGSARDARAAEMEAGLAREARPMEGGWIDTRGAAGGEGRLGAERRGRRWRRRPRCEEELPVGVARSLAQEGWPAGDAGEGVPHVSKACGVVEHRCASRAFVGL

SEQ ID NO: 173474 - protein, 166 aa, Oryza sativa
  unsure (1)..(166): unsure at all Xaa locations
  Clone ID: PAT_MRT4530_71508C.1.pep
RRWRRRRRGRSRERGGWVFGSQGCGGGDRVCGHRRHGGLGXLAEGVGDGCIWPAWHRAVEGSETGLAQRSAADGSGGRLGARXAGGGDGGRLGAERRGRXWRRRPRCEEELPVGVARSSTHEGWPAGDXGAGVPHVGKACVVVEHRCVKRGFAESRLCPFVGLVAV

SEQ ID NO: 173475 - protein, 270 aa, Oryza sativa
  unsure (1)..(270): unsure at all Xaa locations
  Clone ID: PAT_MRT4530_71509C.1.pep
LPGGQGAVLGGAAVTTRSSPLRPDLAGXRLAAARVGATAAGRATAMSRAPAAVPPRSAPLGRSCRVAAVGRRXLATTRTTAGGSWRRSRPDLDTGGSWXRRRLCGVGGGGGSGQAETWWLPCQLATVVEAMALSCXLLGGGGRRCSKGFAEAVXDVGGGEGVGCEVGMMTAREVQPMAVEAGSAREARAAEMEAGLAREARPMEGGRIGARGASSRGGRLSAERRGRRWRRRPRCEEELPWRSVTLSGGQSGASLLLVVCVGDVGVWVVV

SEQ ID NO: 173476 - protein, 65 aa, Oryza sativa
  unsure (1)..(65): unsure at all Xaa locations
  Clone ID: PAT_MRT4530_7150C.1.pep
TWHLTWGCIGFRSPAKGXVLRSAGPTNCIDYIGIVQSYIASTSWIALVWLVYLHTYLSYILVNLV

SEQ ID NO: 173477 - protein, 390 aa, Oryza sativa
  Clone ID: PAT_MRT4530_71510C.1.pep
MEGGGAGSGMERWREMFRGADIYDVIRNAILIAGADSPRELLRRRQGIIEWLFAVAPVTVPVPAPLACGRVVDGAGNRLPPAAIPDGGGHHHDDNDGNFAAAEAQTSLIDQQILEALYDEIEEDTQVINEVLRIKDILINYKEQSVDTLFDGLRRLQLMRLSISVLKSTQIAEAVAPLNKHRSPVICKIARDLAKGWKGVAADWVGPSSANADTSPDISNPSTVEDDFGLPTPPMDVGAFFLPQSAAEQYVSEFLHKADDDDDESLIPNAKNDCGFGGYKMEIAKPVANMDENILRKGKDLSRQHGPPMRQANLQMKLAQHHAIAITEQRPIAVVRKPLPDHVSKLERQATILEGCKVGIGKRNNTDIADLRLEATKRKLNDAYQEAENS

SEQ ID NO: 173478 - protein, 240 aa, Oryza sativa
  unsure (1)..(240): unsure at all Xaa locations
  Clone ID: PAT_MRT4530_71511C.1.pep
MPGGDGSGAPRSVPLGRIWRMGAVGDGGGGSWXRRSRPDLDAGGSWRRRRRCGDGGGGGTGPAAVGDGGGGXWWLPCHLATAAEDMASGYYLYGGGGRRRNSXFAYAVVGVGGSGDGGCDSGGGGDVGGGEGFGGEVAGSWRREAQPMAAEAGSAREARAAEMEAGLAREARPMEGGRIGARGASGGGGRLGAERRGRRWRRRPRYEEELPWRSATLSGSRSGTSLLLGVCVGDVVVWVV

SEQ ID NO: 173479 - protein, 101 aa, Oryza sativa
  Clone ID: PAT_MRT4530_71512C.1.pep
WRGGASLLFPLQLQPPPPSLPPDLAEERTPPPPLPSPKAATSPPAKSGRWENTAPAAIRGHRLPHRRIRRRGGHAARLLPRPAPAAPPPAAACPPPSAAGC

SEQ ID NO: 173480 - protein, 298 aa, Oryza sativa
  unsure (1)..(298): unsure at all Xaa locations
  Clone ID: PAT_MRT4530_71513C.1.pep
RRSKHGQQRQARRRSCCGRWLDAWRRRQRCPQIRASRLDLEDGSSRRRRRRCGDGSGGSWPMAVGDGGGGCGGCRVIWQRRRKTWRRAASCSVVEGDGGAAICRGGGWRRWQRRRRLXLWRQWRRRRRGRSRGRGGWVFGNQGCGGGDRVCGHRRHGGLGXLTEGMGDGCSWPARHRSVKGSETGLAQXSAVDGSGGWLGARGAGGGDGGRLGARGAADGGRPEWRERRVRWRRPVWREWRGRRWRRRPRCEEELPIGVARSLAHEGWPAGDAGAGVPHVGRACVVVEHRCVSCGFAG

SEQ ID NO: 173481 - protein, 220 aa, Oryza sativa
  unsure (1)..(220): unsure at all Xaa locations
  Clone ID: PAT_MRT4530_71514C.1.pep
LVTTAAVWCRRRRRQWAGGNVVAAVSTGNGGGSHGVELLAARWWRATVQQRFCGGGGDVGGGEGXRVRGGDDDGEVVGCSAAAAVVVVTVFAVTGGIAASVDXPRAWETAASGRRGTVRWRGRRPAWHREVQPMAVEAGSAREARAAEMEAGLAREARPMEGGRIGARGASSRGGRLSAERRGRRWRRRPRCEEELPVGVARSSAHEGWPAGDAGARVPH

SEQ ID NO: 173482 - protein, 485 aa, Oryza sativa
  Clone ID: PAT_MRT4530_71515C.1.pep
MELMDDDGSSSLLEELMAPLRRGTPTTTPEDLWLQAYPMMMSPMCGDGVMLGDLLVGGGNARNTLASPPPPSFPLPVPLTTTTPCPPLHEVSFEFDSIDCLGEVCNPYKRSGGAVRATAAAQVMVAAMDPRREAASSAVAVAAVEEEERCKARRGAGGGGDSGELAPMFVFGGGGGAAASVRPRSCRPPQPGAPSKNLMAERRRRKRLNDRLSMLRSVVPRISKMDRTSILGDTIGYVKELMDRIKNLQVEAATGDSSSSSTENLSMLKLNTLKPPPSSSSGEETPLIRNSTRFEVERRENGSTRIEMACAAIPELLPSTLAALEALGVEIEQCVISCFDDFAMQASCLQAAAREQRSRFYIFRRCVAMLLCWYKYRNITPLRAPKTATPTGSSSSHLGRLLHRRPRLSAPSRPPPPDAPLAPIRPPSIGCASRAKPASISAARASRAEPASAAIGCASLRQAGLRPFHQTMPRRPEAAVSHALG

SEQ ID NO: 173483 - protein, 479 aa, Oryza sativa
  Clone ID: PAT_MRT4530_71516C.1.pep
MAPFQLRFGLRMSPSRSSDEEEEDDEDEEGFEYEEILSDDGTDSPPPLMMQAEKGGGGLVGAVVGALRRSLVMCSAGKVGEEEDSEDEEEEGMEIGRPTDVRHVSHVTFDRFGGFLGLPADLEPEVPSPTPSASVNVFGVSPTSLQCSFDHKGNSVPTILLMMQRKLYEREGLKIEGIFRINAENSQEICVRKQLNSGVVPDEVDLHCLAGLIKAWFRELPTGVLDSLTPEQVMHCNTEEDCALLASMLPPVEAALLDWAINLMADVVEHENYNKMNARNIAMVFAPNMTQMADPLTALIHAVQVMNFLKTLILKTLKEREAAGTPKTTEPCSGSPNGQDKPPTPENLERPIICSDQKGIDKPMFDMATCDQLLFGPKQFLDHRENNKFEGPEKHDIGQPKRHSEASPLGNDSNNQVSSPGKEFGNRNVEGLFDKFSFRKGVERLCRHPVFQLSRSMKKSADVVVFDAPGEARQAWGLI

SEQ ID NO: 173484 - protein, 35 aa, Oryza sativa
  Clone ID: PAT_MRT4530_71517C.1.pep
RGPRSAMMCNAMDLPVVEDKVGAMALMHDSHCCEP

SEQ ID NO: 173485 - protein, 165 aa, Oryza sativa
  Clone ID: PAT_MRT4530_71518C.1.pep
TSKASMLGASKAELLTTKVVVVVVAPMRRKPEDEDPPRLGRPQLLLPRCSRRPARRLRARSPLHRNAMAADCGRRGGIEQVREGMALAVGFPVRCRHFVLRTPCRRPDLIHADAQISGGGLGMAARDGESLGAGIVGELGLPLRCAREQGERVACTVDGERGGGG

SEQ ID NO: 173486 - protein, 70 aa, Oryza sativa
  unsure (1)..(70): unsure at all Xaa locations
  Clone ID: PAT_MRT4530_71519C.1.pep
KIKSGESDEIRRRKFRLXKSSHFKNGYKNTTRWSXRTRRFNLLAWQFGGHNXQKGFXGXQGNGFHGLGQS

SEQ ID NO: 173487 - protein, 178 aa, Oryza sativa
  Clone ID: PAT_MRT4530_7151C.1.pep
MAATHGLGHRRRPVHSGLLLLAVTNTVEVVVSSLPLSFSHSIWRERGRIHTYSGGGGSISLVERGESSTLLILSPSLWTNRRRHPPVVSPPPRSEPPIVAQFLGSARRDYSIFVNVYFIFINMSTGGGVNGEHVGSGIGGDENDNTNRGNNNKQQCLILRSVLWVYYSINLSVKKATR

SEQ ID NO: 173488 - protein, 332 aa, Oryza sativa
  Clone ID: PAT_MRT4530_71520C.1.pep
MGSYVQGEDEVPVYESGAEIVQKLQEKWKSTAAPFPAMYSSVLGGIILDPAMMSVPLDDHMVHRGHGVFDTAMILDGHLYELDPHLDRFLRSAAKARIGTPFPRDTLRSILVQMTAASNCRRGSIRYWLSAGGGDFLLSSAGCAGPAFYAVVIPTDYSQCRHGVRAVTTSVPMKPPLFATMKNVNYLPNVLSIMDAEDRGAFASVWVDGEGNVAEGPMVNVAFVTAAGELVLPAFDKILAGCTAKRLLALAPRLVESGLLKAVTTRHIAADEAKRCSAEMAFVGSGLPVLPIVEWDDQLIGDGKVGKTMMALSDLLWEDMKSGPDRIAVPYK

SEQ ID NO: 173489 - protein, 425 aa, Oryza sativa
  Clone ID: PAT_MRT4530_71521C.1.pep
MTFVVTKSSPSVLVRPSEPTPAATIRPTSTDMTRLGMSFTSFHVFERGVDEPAETIRRALSRALVHYYPFAGRLAGSGDDVVFSCTGEGVVFVRATANCTLEDVNFLGAPVVMSLADLAVRYGGPCRAASDPLMMMQVTEFACGGFVVAATWNHGVADACGLAQFLRAVGELARGLHSPSVVPVRYDESLPDIPQLATILLKRLAAGVKFEHVDFAYCDVIIPWSFVNRVKAEFGSRHAGDRPCSVFEAVTAAMWQCRTRAINGHGGGALAPLVFAANVRKHVGAKDGYYGNCIMSQVVVATADAVANGDVVDLVKLIKDAKERIPVLLSTKTLGLDDSGGGELVAALCGYGALYASSWAGLGLDGVDFGGGRPARVIPYSEVKMLPSISPGAPCSMMDGHGVNVVASCVTDEHLEGFRAQLARL

SEQ ID NO: 173490 - protein, 97 aa, Oryza sativa
  Clone ID: PAT_MRT4530_71522C.1.pep
ITGSFMLISPKSLLSFLKLVRNLCTIAPSFHVHMWLPNRCCTFCTAALQVYLVHSSFSFAAPRFHVVLPFSKFPFSLHWVIFPLQRVICGYSKWINL

SEQ ID NO: 173491 - protein, 229 aa, Oryza sativa
  unsure (1)..(229): unsure at all Xaa locations
  Clone ID: PAT_MRT4530_71523C.1.pep
KNGTSDPAAKSAAARGRRRAAHARTPRAAGGGVXRECRASHCVARSAHRSGGAGRRGXVGARGPATGTVEVLGXTTSSASLPPPPRWCVPRSRTGPSALATTRRRSSSLRPPPPASFLPGGGWASAXWELLLLRNHGVAKKLAVADLAHLSPPAPSLSSIPASPPTMSSXASSTGGQREEKGGDSWIWGNRLASVPSRVKELXAGHPSTRMRERESKGAGRSWVKQRDD

SEQ ID NO: 173492 - protein, 64 aa, Oryza sativa
  unsure (1)..(64): unsure at all Xaa locations
  Clone ID: PAT_MRT4530_71524C.1.pep
MAALAPNHLDRLDISHVMSLPXCRILLLRSAKRPECRILLSRTAGGSGGSRELVPPVRTLCRWR

SEQ ID NO: 173493 - protein, 512 aa, Oryza sativa
  Clone ID: PAT_MRT4530_71525C.1.pep
MLPPASPPAVRQCLSFTSHRIAACRREAPLMKGESEEEETQALTAQSSHIHQEAHTAAAPPHPGLLTPPGGGATARTPAAAASAAAAYKAAAAAAAVGANSAGGVDLTPAAARRNKKRKLPEKQLPDRVAALLPESALYTQLLEFESRVDAALHRKKVDIQEALKSPPALQRTLRIYVFNTFANQAPRTIPPPKNAEPPTWSLKIIGRVLEDGAELDPASVVPKHNPVYPKFSSFFKRVTIALDPSLYPENPLIIWENARSAAPQEGFEVKRKGDKEFSANIRLEMNYNPEKFKLSQPLMEVLGVEVDTRSRVIAALWQYIKAKKLQNPTDPSFFMCDPQLKKVFGEDKLRFAMLSQKISQHLSPPPPINLEHKIKLSGNGAHASACYDVIVDVPFPLQKEMSAFLANTEKHKDIEACDEVISASIKKIHEHRRRRAFFLGFSQSPVEFINALIASQSKDLKLIAGEANRNIERERRADFYNQPWVEDAVIRYLNRKPASGNEGPGGGAGGS

SEQ ID NO: 173494 - protein, 45 aa, Oryza sativa
  Clone ID: PAT_MRT4530_71526C.1.pep
HFGAQQHKRLPLHAWIQLFIISSVLILQSTNIQFLLNLPFFLTYF

SEQ ID NO: 173495 - protein, 90 aa, Oryza sativa
  Clone ID: PAT_MRT4530_71527C.1.pep
NTHFSFFNNNPKLFFPQYAPELPWPPTLLLLPVYQSYHLPSFPPPFFCEVKTLFSNNTDPPVRPPSFITLKNPPLKKFYPPGTIFSLLSK

SEQ ID NO: 173496 - protein, 55 aa, Oryza sativa
  Clone ID: PAT_MRT4530_71528C.1.pep
FVFRWRNRTYGVVSANIMCVVVSCSCFSTFPPGQRSSCVILAGEIVDAPFSNKTT

SEQ ID NO: 173497 - protein, 80 aa, Oryza sativa
  Clone ID: PAT_MRT4530_71529C.1.pep
TSKTICSSKKQHGIGGIVDCSRINRGNGGDNSITENAEKATSLSKHSYMTSDSDSDSDEEKLFNSVLGSLQNAKNSSLPG

SEQ ID NO: 173498 - protein, 58 aa, Oryza sativa
  Clone ID: PAT_MRT4530_7152C.1.pep
MVSCLTVSCGGGAIRGIGGRAIESPSAALSLRASALLLPASIPRHALPHRRRFLHQIE

SEQ ID NO: 173499 - protein, 100 aa, Oryza sativa
  unsure (1)..(100): unsure at all Xaa locations
  Clone ID: PAT_MRT4530_71530C.1.pep
MTVGTIGMVGNTLQPPLGINPSCPSKPCIHRRHGWFGXTLWFGRTMGWPNPAHLRLAASFVVLLRRLVNFGPMCRVISEFLAHSYISLVLDTIRLIYRRS

SEQ ID NO: 173500 - protein, 100 aa, Oryza sativa
  Clone ID: PAT_MRT4530_71531C.1.pep
MTVVTVGMVGNILQLPLGINPSHPSKPCIHRRHGRFGRALWFGRTMGWPNPSHLQLAASFVVLHCRLVNFGLMCHVISEFLAHSYISLVLNTVRLIYRLS

SEQ ID NO: 173501 - protein, 71 aa, Oryza sativa
  Clone ID: PAT_MRT4530_71532C.1.pep
SGISGLTHGSEGAPVGDSVNKLGMWGLFTRGPPLGFVMIGTFPGGQWGLFYAFKVMVGLPPTGGVAPPPPK

SEQ ID NO: 173502 - protein, 59 aa, Oryza sativa
  Clone ID: PAT_MRT4530_71533C.1.pep
SKEISALVPRGIKFKVVAPPERKSSVWIGGSILASLSTCHQMWVVQPEYDESGPSNVHR

SEQ ID NO: 173503 - protein, 388 aa, Oryza sativa
  Clone ID: PAT_MRT4530_71534C.1.pep
MMKNMMSSATVRPWLMMMMISIVTLLFQVQQLAGAQLQRQVAAVFVLGDSTLDVGNNNYLPGKDVFRANKPYNGIDYPASKPTGRFSNGYNVADFIAMKLGFKKSPPAYLSLLQGPAAAANLTLAIKALTGGVSFASGGAGVLDSTYAGKCIPLSTQLRSMEATRAAMVSKVGTRAVAAHLARSFFLLGVVNNDMFVFATAQQQQNRSATPAEVAAFYTTLITKFSAALTELYEMGARKFGIINVGLVGCVPLVRAQSPTGACSDDLNGLAAGFNDALASLLSDLAARLPGFAYSIADAHAAGQLAFADPAASGYTSVDAACCGSGRLGAEEDCQVGSTLCADRDKWAFWDRVHPSQRATMLSAAAYHDGPAQLTKPINFKQLARTTA

SEQ ID NO: 173504 - protein, 170 aa, Oryza sativa
  Clone ID: PAT_MRT4530_71535C.1.pep
MSGIYMNYPKKCLKAYHRRSRGACLPTPPPHPTVIAALGRPPPHAPLFPQIHSPRCRHTKGGRGGDMARGTAPRGHASPPGSLPAAHHRPPWRKREEKRSGRKKRFYVDVERQRRRSSSRPAASHCHFGLTHRHRSSPCSPRTAKGKDKGREREGDKGEGGREEGRREDM

SEQ ID NO: 173505 - protein, 145 aa, Oryza sativa
  Clone ID: PAT_MRT4530_71536C.1.pep
RKRPISARGPRRETWWKPPRFTQPHPPPPPPFNRFVGYDPTQTQASSRSRRARHGDGGAPPARLPRPRPRPSPRHQAVSAPAGGPAARRAAAGRAGGASRDAGGPGQGGGGGRGRGRVRGAGVRVHVAVAAGASVAAVLLLLVVL

SEQ ID NO: 173506 - protein, 66 aa, Oryza sativa
  Clone ID: PAT_MRT4530_71537C.1.pep
FNVSLGSSSCWFERLKALRWIGHRCQVGKFAYYNCRFQFRQVRYLHGTICVSKLGCQFAVVLGLEL

SEQ ID NO: 173507 - protein, 115 aa, Oryza sativa
  unsure (1)..(115): unsure at all Xaa locations
  Clone ID: PAT_MRT4530_71538C.1.pep
MLLCDRPLCGLRPQDRRTLEDVLPRSSAPRAMQTFIDAAAHYSREWTSLTALPAVSHRVFRAGDLSVYHTAHVPPGFVPRIRLAGGGSCEPHRAXPGRLRRLHGRKAVSSDSPLG

SEQ ID NO: 173508 - protein, 160 aa, Oryza sativa
  unsure (1)..(160): unsure at all Xaa locations
  Clone ID: PAT_MRT4530_71539C.1.pep
MGDGQRGTEGGGSLALPRTAPVAGSSGRPAGLSPALSRVDLAAGGAVATADEEEEEVAGNGVLGPTTAGPVPPDDDEEEEAAGGQWRRQPHAHARWADLRRPRRRQGRRRRRPGEDPLDSRFLFFRLGDRLDHAQVRRTXXLQRYYSNILLHLLHRASIL

SEQ ID NO: 173509 - protein, 94 aa, Oryza sativa
  Clone ID: PAT_MRT4530_7153C.1.pep
SASQSPKLDVARKLKAGIQTEKEKYKNEERCVTIYPVIKMETIHLILITEKSSKWNQNLPRSWCPASSTGTGYCQTLSLQIRCMIQLNTLMRPV

SEQ ID NO: 173510 - protein, 83 aa, Oryza sativa
  Clone ID: PAT_MRT4530_71540C.1.pep
YILAELSHLVGMFLNRPSHFLHGVTEFLVRILCILRRVFHDHFDWSPSIPGRTGVVHVGGALGVGVQKVLVDLLHPPRTRGRT

SEQ ID NO: 173511 - protein, 113 aa, Oryza sativa
  Clone ID: PAT_MRT4530_71541C.1.pep
MASKIAISLLLAALLACAAASGAAARRLEEEEPSSTTAPAEEEDQEEPNHPAAVFPELPVPEHELPPLPKVVELPPFFPEAHLPPFPEVDLPPKPEFPGVPEFHFPAEPEAKP

SEQ ID NO: 173512 - protein, 74 aa, Oryza sativa
  Clone ID: PAT_MRT4530_71542C.1.pep
NCKLTAVYSLDKMISRVRPAAAGEETKGRRQLPKRMNKYRSWMVFMILPVMLYSICPSELKEQICTDNIIDVYV

SEQ ID NO: 173513 - protein, 89 aa, Oryza sativa
  Clone ID: PAT_MRT4530_71543C.1.pep
TTHNETHKRTQKQINKKNKNIYKLRAGQLNHRGVGGLLLMVLGSPDCTDETFLAINVTQNICAPPTSPAFEPTPGWPTYLTCQHLPIFP

SEQ ID NO: 173514 - protein, 341 aa, Oryza sativa
  Clone ID: PAT_MRT4530_71544C.1.pep
MTKHPRDGEVISLSLSLTLGAAADSGERKKPRRGSSPAASGSGDFVCKTCSRAFPSFQALGGHRTSHLRGGHGRSVGLAPATAKGTTKKVQEKPAAAATHECHICGQGFEMGQALGGHMRRHREEAAAAAAAVQMLPLSGGGHRAGPNLEVFELGHVRSGIGATTLAVTKESDTRGLGINGASSCQALEGGRANATSGVAVSEECKARFQELRAGRAHRFVVFKIDDAMRQVVVDRVGPRDAGFDELTASLPADGCRYAVYDHDFTVSDATATAAAGEGGEAPRSKIFFVSWSPAAADVRSKMVYASSNEGFKKELDGVQIDLQATDPSELTLDVLKDHTS

SEQ ID NO: 173515 - protein, 99 aa, Oryza sativa
  unsure (1)..(99): unsure at all Xaa locations
  Clone ID: PAT_MRT4530_71545C.1.pep
YPLKEPVTSIPWKLILSKPPVWALIVSHFCHNWGTFILLTWMPGALIQVLKFNLTESGLLCVLPWLTMVLKCILXIMQSIGFLGPALFLTLLSKVRTPA

SEQ ID NO: 173516 - protein, 236 aa, Oryza sativa
  unsure (1)..(236): unsure at all Xaa locations
  Clone ID: PAT_MRT4530_71546C.1.pep
TISIGAPFFXDQMFLILMVPFAFFLGIGPLVKWRRDQVSAIRLPVIISFVLMLILGVXLPYWFIDRITIXLILGVMMAVIIVLLSLYELYQRATHRHSFLVGIFKLSRSHWGMVLAHLGVAMLVFGITFSQNFSIEKNVRMKVGDTVQIKDYDFTFKGIKITDGANYQGGTAEIEVHHNGKFEATLNAEKRFYNVSKMGMTEAAIDWGFSRDLYAALGEKLEDNSWGVRLYYKPFI

SEQ ID NO: 173517 - protein, 69 aa, Oryza sativa
  unsure (1)..(69): unsure at all Xaa locations
  Clone ID: PAT_MRT4530_71547C.1.pep
WIGNILLPPACFAACSHNLWKARNXSTFNSSQQSTSATLNLIKENLQLWEHRLKPCLRAHITAWVVKFD

SEQ ID NO: 173518 - protein, 73 aa, Oryza sativa
  unsure (1)..(73): unsure at all Xaa locations
  Clone ID: PAT_MRT4530_71548C.1.pep
EEPECKKVIVCYNCSEEGHYFQNCPQPKQXSTSHYRHLPRSRHFHRIVVTGANARPRRAKGNKPSEGDSKHKN

SEQ ID NO: 173519 - protein, 83 aa, Oryza sativa
  Clone ID: PAT_MRT4530_71549C.1.pep
MGEEAASLGKEKRKGEEPVWRASTAPLSPSGQPASPDCDGGGGADWVLVSVGSARGHQEIEKKDKGFIVWLFIIKFKQSEVIG

SEQ ID NO: 173520 - protein, 157 aa, Oryza sativa
  Clone ID: PAT_MRT4530_7154C.1.pep
YGTSDTTARAIAKAYPHVKFTVLDLSKVIDKAPNDGVVNYCAGDLFHTVPPAQARILKLVFHHWSDYDCVKIFTQCRKAIPSREEGGKVIIIEILVGPSLGPVMFEAQLMMDMLMLVNTRGRQRDERDWRDLFLKAGFNDYKIVKMLGARGVFEVYP

SEQ ID NO: 173521 - protein, 131 aa, Oryza sativa
  Clone ID: PAT_MRT4530_71550C.1.pep
MRKKKKPRLKQSRRLHIYIYIYIYIYIYIYICVCVCVCVCVYIYMCVCLYVYIYVYVYVYIYIYVYVYIYICIHIYTHIYTYIYIHIYIHIHTHIYTYIYIYIYIYLHIVLYIHMYVYIYSLHIVVKIEIL

SEQ ID NO: 173522 - protein, 504 aa, Oryza sativa
  Clone ID: PAT_MRT4530_71551C.1.pep
MAKKKKQAKNKSNEKGSNRELKRKRKTCKEKSSDNASKSGKKPEDWLKKRSIFFKLEYWELNKLRHNLDVMHIEKNVCDNLIGTLLDISSKTKDDLNARLDLVDIGIRPELHPTVDDKGKQILPPAPFTMSRENKEILCSVIQNIKTPDGYASNISRCVNMKDCTLNGLKSHDCHVLLEDILPIALRSCYPSKAVMHIVNGLARFFKKLCSKVIDVSELAELQQSIVMTLCDMERVFLPSFFTVMVHLLVHLVEEVKFGGPVHYRWMYPLERSFVRIKALVRNRAYPEGSIAEGYIAEECLTYCSRFLEGSTRFTRAPRNPEPSDNIKDIYMFESAGEPIGKAITIGRFDNQLLVQAHRYVLRHCDELEDFRKFHTMMREAGRSTQNSGVVNIADDGVNYYGRLSDIVELSYRKYKVVLFRCDWYDVHHKAGIKKDEFDFTLVNFSRKIHSGDKLDHDPFVFSSQVEQVFYAEDAKAKGWHVVTRFKPRDIFDMGVEQQSNETE

SEQ ID NO: 173523 - protein, 274 aa, Oryza sativa
  Clone ID: PAT_MRT4530_71552C.1.pep
MAMTAASVFGSGGCLELLTSSKAMRGKLWTRLAPFISKRHASTSQTSLSSSSSSCSVINPWLFVGLGNPGEKYQCTRHNVGFDMIDMFAQSQGISLTRHPFKALFGEGMVEGVPVLLAKPQTYMNLSGESVGPLAAYYKLPLNRVLVAFDDMDLPCGVLRLQPKGGYGRHNGSVDFIIMCFNELIRVKSLIYHFRKNREFGRLRIGIGRPPGQMDPKAFVLQKFNKTGRERIDSAIEEGVEILKLVVTKGLTEAARSSNVDQKYKHLTTHDMQL

SEQ ID NO: 173524 - protein, 403 aa, Oryza sativa
  Clone ID: PAT_MRT4530_71553C.1.pep
MATAVHANLPFHLHFLPIPSTSPCTDRWPAPTCHRHLRLRCLHLHCRSHKFIRVTSDQALEYIIPERLTYPRIGVFKKMTYPRIPVPRIRIRIRIPVSRSFVRIKALVRNRAYPEGSIAEGYIAEECLTYCSRFLEGSTRFTRAPRNPEPSDNIKDIYMFESAGEPIGKAITIGRFDNQLLVQAHRYVLRHCDELEDFRKEFLDEEKRKLPHTTNLTQSDVDRLINRSFADWLEQKVLQNGGVDIDEKTRALAAKPNKTVVCYSGYIINGFRFHTMMREAGRSTQNSGVVNIADDGVNYYGRLSDIVELSYRKYKVVLFRCDWYDVHHKAGIKKDEFDFTLVNFSRKIHSGDKLDHDPFVFSSQVEQVFYAEDAKAKGWHVVTRFKPRDIFDMGVEQQSNETE

SEQ ID NO: 173525 - protein, 246 aa, Oryza sativa
  Clone ID: PAT_MRT4530_71554C.1.pep
MPKIKSLSNACKVSFSPDGPISDEALERVRALLDEIRPIDVGLDNEAQIARNWNNSTRQPNGRRGRNGANQFTSPIKYLHIHESESFSMGIFCMPPSSVIPLHNHPGMTVLSKLLYGTLHAESYDWIDVTDPTDQLQELSVRPARLVRDREMSAPETTILYPNRGGNIHTFRAITPCALFDVLSPPYSAEKGRDCSYFRKSSVRETPPGIEINSAEVIWLEELEDHQPPEGFVVARGLYKGPVIRR

SEQ ID NO: 173526 - protein, 117 aa, Oryza sativa
  Clone ID: PAT_MRT4530_71555C.1.pep
MTAGAVWKGAATRAAGTGSGAAGTDGGGDQAVGHHGTYRDQVTSKASSPRRQVHRGEARMAKTMEQRRRRAKNRAGIPQVRRRLGRRPCAEGCMPKEGDFAMTSHALGRPKGPSQLL

SEQ ID NO: 173527 - protein, 806 aa, Oryza sativa
  Clone ID: PAT_MRT4530_71556C.1.pep
MANGHSTEDQEKVEEKPLELLLRKYLLLLAIMAATVTYATGFNPPGGVWQDTEAGHLAGDSIIRDTYYPRYLVFFYCNAAAFVLSIIVIILILSLAIAQEKKNFWIPMLPLRVAMVLDLLGLVGAYAAGTSRAVLKPRNAWVLAVIFVYMVIQLVLTSLSSCTGDGKKEEAKEQLQTADGKEEKINKLSQSGHKKEEEKERRRKLLLLLATFVMSVTYLAGLSAPGGYWDSSKEGHNAGDLVMREHHAIRLKAFFVFNAAAFVMSLLIIMLLLDKQLVIPLLQDQDQSMTSRVRTRFLKAYIIIALVGLVGAYATGSSRNSDTTIYVGCLVFAVLACILFLKVIISPHPQGSASDSNGRPSNGVKKNASNGGVQTNTSNADILEKAQSLVVLLSTLVTTVTYQAGLIPPGGVWQENWKEHEAGNPILLSIQPERYKVFFYCNSIAFAVSLVIIILVQYKPILKHHILELAMIMDLFGLIGAYSAGSCRDVTTSIYVIALAGVVLVYVVIHVIFITLDEDMGKKDGDKDKKDEGKRRKRLLLFAVLCTTLTYQAGLTPPGGFWLKDDEFGHHAGNEPANSQDEEERVVQKSPPAQDEDVIEQETQTLKPSETMSADEIKEDDRTTKSADIENAGEAKNNTSNETNEKEKQERAATESNEKEDESKKHAKRKYFMLLGVLAASVTYQAGLNPPGGVWQGNSNGRAAGNPVMHDNKRYRYLIFFYSNSASFVASVVVIILLLKEKLLREDWLFKVMNITIVLNLLGLLLAYMAGSRMRLESSGYFIALVIAALGIAAIHKIWSRNRESK

SEQ ID NO: 173528 - protein, 458 aa, Oryza sativa
  Clone ID: PAT_MRT4530_71557C.1.pep
MAEAKMSRITIHDVEPVTFRAMLRFIYTDELEEKDSMATDLLQNLVAVADRYDLSRLKLMCAQKLWEKVSVENVATMLIYAEMHGCPELKTSCLDFFVQEENFKVAVLNEGYAQLVQHFPSVIDEIKGRPVGGPGGLVDESKANNIVDVLAISARFNAAAEPKRRGSGDRRAQRKPREITAAVTITREIKLLLILMTNKENYCYSKLEEFDHTVLITLISVYNQDYGSWILFESIDRYISDSIPLAIAFWFAAPYAGMPDSGSLELILDYEATNHCAILVDGETFPAHRAVLAARSPVFRAELLGSMAEAKMSCITLHDIEPVTFRALLRFVYTDELPADDGGELNTTAMATERKKGGGCLLMGRRAGSGNHQAGKLASVRGEGGGGEADEQDGEPTSGTGRGGRRAGWGGRRAREEREKVGKGAEGDSHRAGRPMSLRGEGGGGEALSPSISLSWWP

SEQ ID NO: 173529 - protein, 322 aa, Oryza sativa
  Clone ID: PAT_MRT4530_71558C.1.pep
MSKNEQQYLDLAQKILAEGNLKGDRTGTGTHSLFGTQMRFDLQEGFPLLTTKKVFFGLIKSELLWFLRGDNNIRFLLQHNNHIWDEWAFKNWVESNDYTGPDMTNFGHRAETDPEFAAVYQTQKAIFVDKILNDDAFMEKFGYVGDVYGKLWRGWETSSVTAGAETVESSCGLVEEIKTTPDSRRLILTAWNADTTPQAPLPSCHVLSQFYVADGKLSLQLYQRSGDFFLGVPFNIASYSLLLHMMAAQTGYEVGDFVHTIGDTHIYNNHVAQITEQLSRPMHPLPKLWLNPDVKSIFDYTMADIKVLDYESEAPIKAPVAV

SEQ ID NO: 173530 - protein, 112 aa, Oryza sativa
  Clone ID: PAT_MRT4530_71559C.1.pep
PTRTTSRTFHWTSSSLPITLVAYRAILAGLSTLFLIIILVHLIDGQRLRRRPSNERRRRGARPRCARRRRTHSIGDTVRRARLHGACDEDARRQSCALLTACGEERPAQKLL

SEQ ID NO: 173531 - protein, 90 aa, Oryza sativa
  Clone ID: PAT_MRT4530_7155C.1.pep
MDEVGGRWTFSRANEGYTSCGPVVEMSWQRVGALLLGAQSCLPVPGVPAVGRIGSVSEEEDIVSCLPKLRKTAGSASEVEEALKPAVKQE

SEQ ID NO: 173532 - protein, 317 aa, Oryza sativa
  Clone ID: PAT_MRT4530_71560C.1.pep
MAYDAGYECVRSHDQIVSGIDWSRSSNKIVTVSHDRNSYVWTQEGHDWVPTLVILKLNRAALCVQWSPKENKFAVGSGAKSVCICYYEQDNNWWISKVVRKKHESSVTSVAWHPNNILLATTSTDGKCRVLSTFIKGVDTRGSHASTSTDWKFGEQIAQLDLSSMWAFGVRWSPSGKTLAYAGHNSMIYFIDDVETSPAAQNLALRDLPLRDILFLSERTVIGVGFDCNPMIFSADETGLWSFVRYLDERKVTTSTSRASQLSEAFGKLYGQSKQVASSDTVEPSKPRGGVHENCITYYPLLPFCSSKADSYQLHID

SEQ ID NO: 173533 - protein, 42 aa, Oryza sativa
  Clone ID: PAT_MRT4530_71561C.1.pep
MAAARPPVAFMGGSGGVGGFHGHMIFAPRFVQQLPWMRSTGS

SEQ ID NO: 173534 - protein, 96 aa, Oryza sativa
  unsure (1)..(96): unsure at all Xaa locations
  Clone ID: PAT_MRT4530_71562C.1.pep
SSGSGGSTVLAAAGEEGRRQRWSGRRLRMRKQRHLVDLTAXVAHLRRDNAHVATALGLTTHTQGLLAVDAENAVLRTQAAELAARLASLNDIVSPH

SEQ ID NO: 173535 - protein, 80 aa, Oryza sativa
  Clone ID: PAT_MRT4530_71563C.1.pep
GSLCCRTLLAPFSWRAATACRTVTNIKNPLLLLLHRRRHHRGVWVHLGHARSLCGAAQQGKSRARRGEGFSYKRMPRSPQ

SEQ ID NO: 173536 - protein, 427 aa, Oryza sativa
  Clone ID: PAT_MRT4530_71564C.1.pep
MLTCIACSKQPGGGGGEPLHEPPEDEDAVDGGGGGGGATPSTRLAIKALTAQVGFSIKDIALKASGAYRHCKPCAGSSSAAGASRRHHPYHHRGGGGGFGDPDAASGSDRFHYAYRRATSSAASTPRFRGGGGGGALSSGDATPSMSARSDFPIGDEEDEEEDDDDEMVSTGGGGGGKEEDAKEWVAQVEPGVLITFVSLPQGGNDLKRIRFSREMFNKWQAQRWWAENYDKVMELYNVQRFNHQAVPLPATPKSEDESSKEDSPVTPPLGKERLPRSFHRPLSGGGAVGSSSSDSLEHHSNHYCNGGHHHHGHQCYDSVGLVSTPKLSSISGAKTETSSMDASMRTSSSPEEVDRSGELSVSISNASDQEREWVEEDEPGVYITIRALPGGIRELRRVRFSRERFSEMHARLWWEENRARIHEQYL

SEQ ID NO: 173537 - protein, 428 aa, Oryza sativa
  Clone ID: PAT_MRT4530_71565C.1.pep
MAMEMMTNTTIVRLPAYMREANKGLFEPRVISIGPYHRSNESTHDMEAYKERFLRQCFAPPLGHMNLEQCIQDIARNSLAEALENYSGNVGDYTAEMLTLDGCFIIELLIRWNMGRLNHDSYVRSMRNSIYYDLLLVDNQIPFFILSRLFHKLKGDEELDNADPARRGKPGLVDLVTEFFNNRQGQLPDATNQQIRHLLDLQYKLVINNNMGIEPNNRNCPFSLCINICPNTIVPRGIPAASELQDNGVRFRVRGLSEQVKMFDATFQGKIIRIPRFQINFGSKILLANLFAYDQIKGEPADNGAAVGPVTSYVVLMNALINTREDVAVLQRKGILDNLLSNEDEVASFFNELGRCALVDVSNHRYTSMFEDVNRYWRNGFCCKYFAICCMRHCKNPLTCLSLLAAFLLLSFSCTSMVFAILKYYTRG

SEQ ID NO: 173538 - protein, 346 aa, Oryza sativa
  Clone ID: PAT_MRT4530_71566C.1.pep
MSAHHPPHGIAAGDARKAHHLGGDPKNLSWCGVGVGDHHFLPRKLVGGGGPSAAKLALVSFLAVILVLAVDLSLTGAGANRRLRLQYLHYIGDGGGGGGGGGVGGGGEEAKNNELPWLSVPDPSNFTEELIDRWLTPGGTPCRDSRTANISIPVLDDAAAAGEVTTLGSAEIHEFTFWALDDAGQRRCLGGDFFEIDLAGDEWKSRPPVVDHGDGSYSLRLQVAPRFAEGDFRLTIILLFRSFEGLKFSSLRFKYHAEMRRIPLLFGPSNSTRFLPALETCRAADFARDVWSGRWTRLAKNDSCEEVDDAGRYRCLEPQHPCEAPWCAGPLGALESNGWVYSAHCS

SEQ ID NO: 173539 - protein, 57 aa, Oryza sativa
  Clone ID: PAT_MRT4530_71567C.1.pep
SFPCGYYHSLLQFARARAPDRRELRIVRGTDAQMTGELRVLDAPIINVEQEGFQDRC

SEQ ID NO: 173540 - protein, 86 aa, Oryza sativa
  unsure (1)..(86): unsure at all Xaa locations
  Clone ID: PAT_MRT4530_71568C.1.pep
VRIPSPRVTQASEPSNLPGSPARRFGSHPTTAGAAHATATGRLSGDRPGGQSPGXCTCGRXRGGDRCARCSRGLELRRRDDDAVPG

SEQ ID NO: 173541 - protein, 1268 aa, Oryza sativa
  Clone ID: PAT_MRT4530_71569C.1.pep
MAESAAAAAGDGKVEKAANGGVNGCDAAGEGKKRADQAVAFHELFTFADKWDLVLMAAGSLGALAHGAAMPLFFLLFGDLINGFGKNQTDLRTMTDEVSKYALYFVYLGLVVCASSYAEIACWMYTGERQVIALRKAYLDAVLRQDVGFFDTDARTGDIVFGVSTDTLLVQDAIGEKVGNFIHYIATFLAGLVVGFVAAWRLALLSVAVIPAIAFAGGLYAYTLTGLTSKSRESYANAGVVAEQAIAQVRTVYSFAGESKALNSYSEAIQNTLKLGYKAGMAKGLGIGCTYGIACMSWALVFWYAGVFIRNGQTDGGKAFTAIFSAIVGGMSLGQAFSNLGAFSKGKIAGYKLLEVIRQKPSIVHDHKDGKLLAEVHGNIEFKDVTFSYPSRPDVMIFRDFSLFFPAAKTVAVVGGSGSGKSTVVALIERFYDPNEGQVLLDNVDIKTLQLRWLRDQIGLVNQEPALFATTIHENILYGKPDATMAEVEAAATASNAHSFISTLPNGYNTMVGERGIQLSGGQKQRIAIARAMLKNPKILLLDEATSALDAGSENIVQEALDRLMTGRTTVVVAHRLSTIRNVNMIAVIQQGQVVETGTHDELLAKGSSGAYASLIRFQEMAQNRDLGGASTRRSRSMHLTSSLSTKSLSLRSGSLRNLSYQYSTGANGRIEMISNADNDRKYPAPRGYFFKLLKLNAPEWPYAVLGAVGSVLSGFIGPTFAIVMGEMLDVFYYRDPNEMEKKTKLYVFIYIGTGLYAVVAYLVQHYFFSIMGENLTTRVRRMMLSAILTNEVGWFDEEENNSSLVAARLAVDAADVKSAIAERISVILQNMTSLMTSFIVGFIIEWRVALLILATFPLLVLANFAQQLSMKGFAGDTAKAHAKSSMVAGEGVSNIRTVAAFNAQNKILSLFSYELRIPEQQILRRSQTSGLLFGLSQLCLYSSEALILWYGSHLVRSHGSTFSKVIKVFVVLVVTANSVAETVSLAPEIVRGGESIRSIFGILNRATRIEPDDPESERVTNVRGDIELRHVDFAYPARPDIQIFKDFNLKIQAGRSQALVGASGSGKSTVIALIERFYDPTGGKVTIDGKDIRRLNLKALRLKIGLVQQEPVLFAASILENIAYGKDGATEEEVIQAAKTANVHGFVSQLPNGYKTAVGERGVQLSGGQKQRIAIARAVLKDPAILLLDEATSALDAESECVLQEALERLMKGRTTVLVAHRLSTIRGVDRIAVVQDGRIVEHGSHSDLVSRPEGAYSRLLQLQHHA

SEQ ID NO: 173542 - protein, 198 aa, Oryza sativa
  unsure (1)..(198): unsure at all Xaa locations
  Clone ID: PAT_MRT4530_7156C.1.pep
MPRPAKIRKKHENVFDQLIKAIKAPVDFDLPPVLKEWKSNYYVPIKRNAYITRKRVEDDGIFCSCTPSGSSATCDKDCQCGMLFSCCSSTCKCENKCANKPFQHRTLRKTKLIKTEKCGNGVVAEEDIKKGEFVIEXXGEVIDDRTCEQRLWKMKRQGDTNFYLCEVSXNMVIDATNKGTXSRFINHSCEPNTEMQKW

SEQ ID NO: 173543 - protein, 534 aa, Oryza sativa
  Clone ID: PAT_MRT4530_71570C.1.pep
MSAAAVTATPRHARPSPLNPNARAAAAAAAAAPPNAVSTTRTHLANLDRLLVRPPPLPLPLQNKGAPPADDLGDGGGAATTDDRSGRCGLLNALNLSTFLPFVRKPAVDEMSPRSLAHLQRLLTLSPRPSPKGSIAGEWRRYHSEGGWDGLLDPLDQNLRREVLRYGDFVQAAYTAFHSMPSSSSAAASQHSQHRTLVLPDRSYRPTRSLFATSSLSIPAWARRRSAPGWLTQRSSFVGYVAVCDNEGEVQRMGRRDIAIVLRGTATCPEWAENLRAGLVPVDDDDDDDVGSPQNAPKVAKGFLSLYKTAGDHVPSLSDAIVDEVRRLVEVFEGEELSITVVGHSLGASLAVLAADELSACLSADVAEHRRRPPPIAVVSFGGPKTGNRAFADRLQNGRGVNVLRVVNAGDVVTRVPAPAMAREGEGHVHAGAELRLDSRDSPCLRPDAGPACCHDLEAYLHLLDGFAGSGRPFRADASRSVARLLTYQRPNVRGAYVERARVLGFEPATPRTATANGAGGGAEGHYGYLASPT

SEQ ID NO: 173544 - protein, 50 aa, Oryza sativa
  Clone ID: PAT_MRT4530_71571C.1.pep
SSGPLCSADGERRPSPAKPRRVLAAHGLDVLGDPFVFLNAPRREVHMGRN

SEQ ID NO: 173545 - protein, 1002 aa, Oryza sativa
  Clone ID: PAT_MRT4530_71572C.1.pep
MAASTRALFLSCFHGSGGGGGTSEVSRRLVLRPRYPSMPRRPRSAAVAGEGGEGGGGGGDGDLEAAAVGAEEEEKVAVFEVSGMTCAACAGSVEKAVKRLQGIHDAAVDVLGGRAQVVFYPAFVSEEKIRETIQDVGFEAKLIDEEVKEKNILVCRLHIKGMTCTSCASTVESILQVVPGVQRASVALATEEAEIRYDRRIVTASQLTHAVEETGFEAILITTGDDQSRIDLKVDGTLNERSIMIVKSSVQALPGVEDIKVDPELHKITISYKPDQTGPRDLIEVIESAASGDLTVSIYPEADGRQQHRHGEIKRYRQSFLWSLVFTIPVFLTSMVFMYIPGLKDGLEKKVINMMSIGELLRWILSTPVQFVIGRRFYTGAYKALSHGSSNMDVLIALGTNTAYFYSVYSILRAASSHNYMATDFFETSSMLISFILLGKYLEILAKGKTSEAIAKLMDLAPETATMLIYDHEGNVVGEKEIDSRLIQKNDVIKVVPGGKVASDGFVIWGQSHVNESMITGESRPVAKRKGDTVIGGTVNENGVLHVRATFVGSESALAQIVRLVESAQMAKAPVQKFADQISRVFVPLVIILSLLTWLAWFLAGRLHGYPNSWIPSSMDSFQLALQFGISVMVIACPCALGLATPTAVMVATGVGASQGVLIKGGQALESAQKVDCIVFDKTGTLTIGKPVVVNTRLLKNMVLREFYAYVAAAEVNSEHPLGKAVVEHAKKFHSEESHVWTEARDFISVTGHGVKAKISGRAVMVGNKSFMLTSGIDIPVEALEILTEEEEKAQTAIIVAMDQEVVGIISVSDPIKPNAREVISYLKSMKVESIMVTGDNWGTANAISKEVGIENTVAEAKPEQKAEKVKELQSAGRTVAMVGDGINDSPALVSADVGLAIGAGTDVAIEAADIVLMKSNLEDVITAIDLSRKTFFRIRMNYVWALGYNIIGIPIAAGVLFPSTRFRLPPWVAGAAMAASSVSVVCWSLLLRYYKSPKLGR

SEQ ID NO: 173546 - protein, 44 aa, Oryza sativa
  unsure (1)..(44): unsure at all Xaa locations
  Clone ID: PAT_MRT4530_71573C.1.pep
TRSGSRGTDAGCXGTAWWCFWSTTCRSRRNSRSLSDGYMTTVYV

SEQ ID NO: 173547 - protein, 178 aa, Oryza sativa
  Clone ID: PAT_MRT4530_71574C.1.pep
GLWFERDSSLWMLPSMNDNLLDHLKGRGVSTIPALLGLSREELHRLLQPFSASELYQDLQHFPCVDVKLKLQNEDKDQSRPPILSIRLQMKDARRSTSRAFSPRFPKAKQEAWWLVLGNIRSSELYGLKRINFMDRVVNTRMELPAMFDIQETKLILVSDSYLGFDQEYSLGHLAKGV

SEQ ID NO: 173548 - protein, 152 aa, Oryza sativa
  Clone ID: PAT_MRT4530_71575C.1.pep
MEGLAKIGPWGGDGGDPQDIALGAGAAPHRLVSIEVRSGGAIDALSFTYAAIDGAKHAAGPWGGSGGEKHKVKLGEAERVTEVSGTLGPWGPHACVVRSLAFVTSAGKTHGPFGEEVGGAAFRVPVKGGGRVVGFFARSGWLLDAVGVYVHP

SEQ ID NO: 173549 - protein, 1104 aa, Oryza sativa
  unsure (1)..(1104): unsure at all Xaa locations
  Clone ID: PAT_MRT4530_71576C.1.pep
RAKKQCARCMDHSALVLFFPARSPILLVRRRRGRRREVPASNGGCRMTRLRSLSSSARLAAAEWAAPMKLQVRVVEARGLPAVRVDGTSDPFVKLQLGKRRAKTAVARRTLAPAWDEEFSFLVGDIAEELVVSVLNEDKYFSNDLLGKVRVPLADVMETDDLSLGTAWYQLQPKSKKSKKNAGEVCLCISLSTRTHVSEESQSVNPASDDASSSDRSIEHKDAVLSTTSSYIDLSACASAMDRASQSSMEQLADSIVDQPPRSSMEQLDAESVDQFQEPKVCSEDHETPESGTSSESSLDELLKTMESKDQGCEMPANLPGGVLIDESYVAAPTELNSLLFSKNSDFWPAVSELQGTSGFQIEPWKLDNNETCLQRTLTYTKAASKLVKAVKATEEQKYLKAAGNSFAVHSVVSTPDVPCGGCFKIEILYCITPGPSLSSEEQTSHLTVSWRVNFVQSTMMKGMIESGAKQGMAEGFAHFSEILSQKIKVAEADDANSNKEKILSSLHAQKESGWRLIVRFLFNFTFIFSVIIASYVIAHLHLSKPNAMHGLEYFGIDLPDSIGEVVVCAVLILQGQNIFNIIKRFLNAWKQKGSDHGVKAHGDGWLMTVALIEGTGITNSNSKELFDMYAVFTCNAKRKTSSVKFQTSEPKWNEIYEFDAMDDPPSRMDVAIHDANGPFDQSPIGHAEVNFLKSNLSDLTDVWLPLEGKCDQTSNPKIHLRIFLNNSRGTEVVMNYLAKMRKEVGKKTCSISIMTEQIMQINLRSAQTNAAFRKLFNLPPEEFLIDDFTCHLKRKMPLQGRLFFSPRIIGFYSNIFGHKTKFFFLWDDVDDIQVIPPTLSIGSPSLTIILRKGRGLEAKHGAKGTDPNGRLKYYFQSFVSFNDAHRIIMAIWKMRSLSPEQQGDMIEKESDTKELQLEEXGTLFTHEDVKMSEIFSSALSVDVSSLMEMFSGGPLEHRMMQKAGCIDYSPTEWELVSRNIYQRQISYKFDKNLSRYGGEATTTQQRYALVNQEGWAIEEVMSLQGVLLGDCFNVQMKYTVVNVPSKPNTCSVQVLLGIAWLKSTKQQKKITKSVISNSSIRLKELFAEVEKDLTSRSGSIFNP

SEQ ID NO: 173550 - protein, 194 aa, Oryza sativa
  unsure (1)..(194): unsure at all Xaa locations
  Clone ID: PAT_MRT4530_71577C.1.pep
MTLATTRAPRVRIYARGARRCMRSYVALSNTTVHGVTPPAPPPPNPPNGVPPPAPPNPPTGPTLPMPPPTPPSGPVTPLKTAPPLLPKPPPXPPPTAGKPGRSPMPPTPTKXSSCPPRPRRCPPPPPPGATPPSSSRRRRARPWPPPRRAPWRGRAGGTTRRRSCTTSPSSTLASLALDLDLYSLCVSCSAARA

SEQ ID NO: 173551 - protein, 304 aa, Oryza sativa
  Clone ID: PAT_MRT4530_71578C.1.pep
MNNMISVSTSRCELHTELASGHREIDLGITSRFEVLKFSIVLTKRSTNLNIEIVEQYCSVAFFTLFPVLPKRQILDGHVSAEWYSDERISITRLLVSFSDVSMEDKICTKFSSSKISQTEAGKPMYYYSSRKRSHYLLQAAMIRHESFWFRRCECDEGRTGRFQLLFSDVDFVSGGVRRRPNLSLLADRCTTPRELAVVHAAMLVSGRLADDAFAATRLLAAYAVLSPPDAVLRLFATSHERRPEFRAERRRNELCRLVLAAASAQRQRRGRRMEAVVRRGRSLVAEAAAAEEDEEKGEGRKGV

SEQ ID NO: 173552 - protein, 60 aa, Oryza sativa
  unsure (1)..(60): unsure at all Xaa locations
  Clone ID: PAT_MRT4530_71579C.1.pep
MAVLATACWLVFVKRNTSRPSGXRLPPGSRGFPIIGETLEFLTESPANQLPAFFKRRLDR

SEQ ID NO: 173553 - protein, 46 aa, Oryza sativa
  Clone ID: PAT_MRT4530_7157C.1.pep
TKKHPPAFFGGKKDKLKMVVKAIPHKEFLVFLGPPMGVYVPGKGAF

SEQ ID NO: 173554 - protein, 499 aa, Oryza sativa
  Clone ID: PAT_MRT4530_71580C.1.pep
MSQKHATTLISSLCSRGAVCHARALFDEMPERDVVAWTAMLSGYASNGLRREALDVFRRMVAAGAAPNEYTLSSVLTACRGPCAPAMAMPLHAVAVRRGVDRMPYVVNALIDSYASLAEGVVDARRLFDALGSGRTAASWTSMIAGYARWGQERTGLRLFKTMLKQLHLQCIKKALDVNLAVVNSLIDMYCTCARILDARSLFDGTPERNLITWNTMIAGYSQCDPLMALQLLLEMNDEPNCFTLTSITSACADLAALRCGKQVHGAVLRRSYSDDLQMGNALVDMYSKCGSITNAKNVFDRMGCKDKFSWTSMIAGYGMNGYGNEAVQLFSSMIHAGVHPDHVVFLSLISSCSHAGLVDEGWNFFRSMINEYNLQPNKEVYGSVVNLLARAGRLREALDLIDTMPFAPDEYVWGALLGASKMHNNVEMGRLAARKITEINPDDVKNYIMLASIYAAGSKWGEYAFTRRSLRGIGSRKEAGISWIELSQAKKAEYGAFY

SEQ ID NO: 173555 - protein, 563 aa, Oryza sativa
  Clone ID: PAT_MRT4530_71581C.1.pep
MSFLKVVAVPFSFPIVIGPVEIGVTNLEHQVPLPGAPLSTRDTRGLDDYGIGIDMEKPHIKMEVDEFDVTDKIVVYVFDEISRRQCAANPDIVRCGGNSTVLGSKMNGSRGTSFESAMLSKYFSGTCDPIIPSLRSPIRLLAIVRTSGVILSLERVTFLLSGEFGANPNAFQSSCILGFANLVNVDHECLHGHEFAAIFAMIKVEALKHIPHHLAYHKVNETGIFTDIFINEVWDNSDAPPPPPPPPSHRAHSRSNRAPRAPADDIGDQTRTAGQVPALESNFSQGSSSKTISCYIGVFGNMALRAQHAVARNAYPNLGDLLAFFTLLPKLALPAPPVATAHASIIFEQAAYKLEPLLSFLPSPPSICTMPPTLPITEYPRFDVFGMSQSMATSPHVEGAYSLIRHPLAERVASYDRKAKEAHDVQKELDDALNKPNDPRIDQLLPLVGTLPNLNITVYVRRNARIRDTYNGKWINPVARASDRVVAQNKTGSCSNNGSKSRPKKKLKKLEEIVEMPILATPQPTPKKKIKELANFCGLDEKKLVLEAEKEFSRKKEQTDPNA

SEQ ID NO: 173556 - protein, 123 aa, Oryza sativa
  unsure (1)..(123): unsure at all Xaa locations
  Clone ID: PAT_MRT4530_71582C.1.pep
KKKTKRGERWGAFLGFPVSFPGFCLFYTFFMGKFLAFPGRRFLGVALVESRGYPFGCPFPFPLLKNTGKSLEGGLSLLFGYWCRPWWGFCSPFFLLLMGGGSRFFSHXFLVFFPGPRVPFFPF

SEQ ID NO: 173557 - protein, 85 aa, Oryza sativa
  unsure (1)..(85): unsure at all Xaa locations
  Clone ID: PAT_MRT4530_71583C.1.pep
FHHLNLMTIADTDHRVRQVRNYADLSKLCDDTFAKMIQSGGSPEELYDTVCKQEVEIVLTAYPTXINRWTLQYKHLRIAHQLEFI

SEQ ID NO: 173558 - protein, 156 aa, Oryza sativa
  Clone ID: PAT_MRT4530_71584C.1.pep
MCALCQGHRNSSRASAAAAAAAAAAQSRPPPQMRSGGDGGDDGGGGERQLGRSSASPSAPPWPTALVPAFTYSRSVRRNVGGDDGEEEETAAAAAACSVCLGAFQLGETVRLLPACLHLYHAECIDPWLDAHTTCPLCRSDTGDPSPVDAGRIPPV

SEQ ID NO: 173559 - protein, 53 aa, Oryza sativa
  Clone ID: PAT_MRT4530_71585C.1.pep
SRDNVQSEGARKQTFDTIDYSEFLGYTGKRSVITVTVYNEQYIIGIEGICFFY

SEQ ID NO: 173560 - protein, 426 aa, Oryza sativa
  Clone ID: PAT_MRT4530_71586C.1.pep
MGDVSVQYRVNFNGVLTEVIKPSRGLRQGDPLSPYLFLLVAEGLSSMLQGAENRGDLVGIRVCREAPMISHLLFADDSLILMQADRNNADHLKAILDTYCQNSGQKISEVKSSIFFSGNTAVEDKAAVCGSLDIMTEALNDKYLGLPAMIGVDKSDCFRHLIDRVNNRINGWKEKMLSTGARREDFVAWHHTRSGIFSVRSAYHCQWNAKFGSKERLPDSASSSSRPVWDNMWKLESPPKIKIFAWRMLHGVIPCKGILADKHIAVQGGCPVCPSGVEDIKHMVFTCKRAKLIWKQLGIWSRIQPILGFDWSGYVLVEEVIRKGGKVSHLNAIGMAELILTGAWYIWWERRQLVHGERIQNPARSAMSIATLTTNYMLSNKKGKTKIQNGWKKPPEGMLMINVDAAFDIDSGSGDTGVVLRDHLGA

SEQ ID NO: 173561 - protein, 1185 aa, Oryza sativa
  Clone ID: PAT_MRT4530_71587C.1.pep
MADTRSSAEDETKRPTEEETGRDGEMGSEPNLEERLKRLNMHGEEETDLDFSEELEGLIKDVRWLALFRVYTTKPFSHSALLNAMRNAWSSAQDISFKVMDSNLFMVQFQCLGDWNRVMEGGPWIFRGAPVVLKEYDGFTNVFDYKLDKIPVWTRIHGVPDGLMKKRELAERVAKKVGEQPFTVIVDEGRINPVKYLRARVFLDLSKPLVRFVPITIKERILYPRRRRKKIKGLIDENGCFQTDEDRMSNIVYGYFQNLFSAEVTQIDGSSLLDVQRKVTGDMNFGLLAPYTAEEVKNALFSIGDLKAPGPDGLHAVFYKRFWDMLESDLVKEVLDAINTMKIPDGWNDTTVVMIPKVDKPDRVTQFRPISLCNVVYKIISKMLANRLKCLLPEIISDQQSAFVPGRLITDNVLVAYECLHTMKKKKGRKVQYRVNFNGVLTEVIKPSRGLRQGDPLSPYLFLLVAEGLSSMLQGAENRGDLVGIRVCREAPMISHLLFADDSLILMQADKNNADHLKAILDIYCQNSGQKISEAKSSIFFSRNTAVEDKAAVCGSLDIMTEALNDKYLGLPAMIGVDKSDCFRHLIDRVNNRINGRKEKMLSTGGKEVLIKSIAQAIPVFAMSVFRIPKKICDCISEAIARFWWGDDENHRRIHWKAWWRMCIPKQRGGLGFRDLYCFNRAMLAKQIWRFLCDPDSLCARVMRCKYYPDGNILRARPKKGSSYAWQSILSGSECFKGYIWRIGDGSQVNIWEDSLIPSSSNGKVLTPRGRNIITKVEELINPVSGGWDEDLIDTLFWPIDANRILQIPISAGREDFVAWHHTRSGIFSVRSAYHCQWNAKFGSKERLPDGASSSSRPVWDNLWKLEIPPKIKIFAWRMLHGVIPCKGILADKHIAVQGGCPVCSSGVEDIKHMVFTCRRAKLIWKQLGIWSRIQPILGFDRSGSVLVEEMIRKGGKVSHLNAIGMTELILTGAWYIWWERRQLVQGERIQNPARSAMSIATLTTNYMLSNKKGSGGIGVVLRDHLGACVAASQAFLPHVLDAPMAEAFALRDGLSLAQHIGAKNVIVQTDCMQVVSTMMDGGFSATAAMSVFDDCKLMWDGFGTISIEHCNRNSNQVAHELARCLIGRKSSLVSFAAFQPWKCDSIPLPDQSCLLTPCAKLDAALSVQSAAVGHFAVPVDSSLR

SEQ ID NO: 173562 - protein, 314 aa, Oryza sativa
  unsure (1)..(314): unsure at all Xaa locations
  Clone ID: PAT_MRT4530_71588C.1.pep
MGEAVSEVDVDEEEKLEGVRCGGRDRGQKYSPGPSRPRVQLDKNLFVGATTIILGDGKTTSFXDSHWLENKRPEDIAPAILAASKQITRTVHEALALNTWIRDIDLLRTIDADHLCXYVCLXTMIQCVGPLTDLKDLVVWKLTXNGIYSSSTAXRLQLLGAAXTIYNQTIWKCXAPPKCKFFFWLIXKTESXTADRLKXWCPPQLIPLHLTAAHLVLQAISNCILSRRIXAEIXRWTGADLRLQESDGCATVEXTVVQNLTHDELLXLWCERNAKIFRHVASTPTTIIAKIKEEAHTWITVGAIKITELIPTGE

SEQ ID NO: 173563 - protein, 124 aa, Oryza sativa
  Clone ID: PAT_MRT4530_71589C.1.pep
MGLHDGTDWAGLTRFPIHSRQRSKVNRRMAARRRKMYTESRDGEHDEQLGFGTWESLAAGGEAPKAAAVDSGRAINGRRQRPNWWRRGLGKDVGMCCTRVEARMAVGEREGGGLVAQGEEQSRQ

SEQ ID NO: 173564 - protein, 46 aa, Oryza sativa
  Clone ID: PAT_MRT4530_7158C.1.pep
IDLEQWIKCSISSHASSCATVETRCHIKLNKSTYPPPASEDAWADA

SEQ ID NO: 173565 - protein, 1336 aa, Oryza sativa
  Clone ID: PAT_MRT4530_71590C.1.pep
MAPDEGDGYRSTPAYVGLQIELATGGAACRQRLLPIYINKYRRATDQIGDRRPHGAVSAPDSGIAPWIRVLGGVMDKGGKKKGVDLEGLFLGLKLVPEELRGMKGSWCLKKKDAEKKKSGSGEVILSTSRGMSKEWCRRWAKFGVHREGLGLRSWEITFSYSLSCNAGGGGGKRRAITEGPWEFGGDLIVVDFDETKRLKDLVFTHFPVWVRVYNLPFGLMNVDTGRVIGNKIGKALEVDTDEDGSAVGGYLLVKVLMDARKALIGGVMMEGVAGEKENWCGVKYEFLPNFCYSCGVLGHVEECDDKVWKEEEQQFGDWLRVLPMKQRDVRGWSSEGGSSGGSFQHRSVVSWRKSGVEKGGSSGVGGKSASRDDPELRDDAESPGKGHPKIRMGGAPKKLTFVGDGSSGSLTEERGHKKLLEITAPSEPQLVPTTGEVASGLDGEDARGKEHSTMQHTLPLAAESGTLDTGHSGTGDKRKATFKRRPRVMDKEVGAKESAIADTRKCSVTEEMVVTEERKKQNAQVAVSDDASKFVAFWISRGRRIPMFCLFRRRKKVEGGAPRSESCMAKFRQALEDCQLHDLGFVGDAFTWRNHHHLASNYIKERLDRAVANGAWRARFPLVRVINGDPRHSDHRSVIVETGATEKQQWGQPLEIMQKFEARWLEEEECQARVEEAWENALEGGQTRLMEIQSRVLKELWAWDRTVLGELKKRVKNLRKELEKCRREPISNRQVNREHLLRYKLERLLDQQHIYWKQRAHSTWLTKGDRNTKFFHAQASEKKKRNTIQKLQDGHGGLVAGNQLKSFISNQYQQLFRSNGCSQMDAVLQCVQARVTPEMREGLAAPYQREEVWVALKDMGDLKAPGADGIPAIFYKKFLSLAGDKVKDEVLAVLNGGDMPQGWNDTVVVLIPKTKQPDTLKDLRPISLCNVAYKLISKVIVNRLKVVLLEIISPSQSAFVPRRLITYNVLLAYELTHYLNQRKKGKNGVAAIKLDMSKAYDRVEWDFLRHMMLRLGFHDQWVNLVMKCVTSVTYRIKINGEHSDQIYPQRGLRQGDPLSPYLFIICAEGLSALLQKAQADGKIEGIKVCRDTPRINHLFFADDSLVLMRAGQNDAQELRRVLNIYEVASGQVINKDKSSVLFSPNTLQSDRMEVRSALCINQEAKNERYLGLPVSIGKSRRKAFEYIKRKVWLRIQGWQEKLLSKAGKEILVKAVAQAIPTYAMSCFDLTKGLCDEINSMISKWWWSQNDKENKIHWLSWEKMTLPKKLGGPGFRDLHLFNMAMLARQAWRLLLNVDSLCGQVFVDEKIEHTGLGDLLSSCASPKIDEMRACQSV

SEQ ID NO: 173566 - protein, 98 aa, Oryza sativa
  Clone ID: PAT_MRT4530_71591C.1.pep
PFRQPWLPHIWLRTTGWAFSAGFPDYCRRESHSKIHLCSSPLVSVMPLVVDIQTIGSLFPGPLYRLVHARVRNPGWIRASGRLSLKTLPALVLSCCHY

SEQ ID NO: 173567 - protein, 74 aa, Oryza sativa
  Clone ID: PAT_MRT4530_71592C.1.pep
LHRGSNVFFKILHFMDSLGKRKGLKKETLSFRPFGKRQLKLPFELFQGIFYYISPYIKVLRKSGKPFLSWIPLS

SEQ ID NO: 173568 - protein, 65 aa, Oryza sativa
  Clone ID: PAT_MRT4530_71593C.1.pep
MEEAVEAEKKARCWAPWRQRCRGAAEVVAGWLRSDPRIKVRLELDVGRLTVTGVYVQGGELLVLG

SEQ ID NO: 173569 - protein, 279 aa, Oryza sativa
  Clone ID: PAT_MRT4530_71594C.1.pep
ARGKQSLLVREGSEPDRFWEALGGRSEYSKEKQVKDWPADPHLYTCHFEQGLFKAKEVFSFSQDDLVTEEILILDCVEELHIWVGHQSGVLSMEQALDIGKMFLQAGIHQDGRRPIDTTMYIVTEGDEPRFFTSFFNWDYSKQTMLGNSFERKLAILKGISQKLETPERSLRKSSSSSLPRRSPGTSSSEPTTPEQRAAARTFASASTGKLLRERSPAALSPSLSTPSPSPRSRSSASSSPASWNSTPSTGGAAALPALAARVGGGGCHRDPSPAVSFS

SEQ ID NO: 173570 - protein, 154 aa, Oryza sativa
  Clone ID: PAT_MRT4530_71595C.1.pep
CQIHRHGVAYLRAREATLLLQRRWPAVVVSGEVAHATAAELVSEERHHVEHGHRACLLVVAGRERLDAAQQLASALEQSTVTPEIVGEGALLHCKEPKIPVLWVVALPVDRCCLARGVARVTPSTNAPLDKYSPRPDKCLTNIDEEPVSHFGLV

SEQ ID NO: 173571 - protein, 64 aa, Oryza sativa
  Clone ID: PAT_MRT4530_71596C.1.pep
MGSVPIPLRSPDGRRPHGRRVDRRWILGGGKLPRPRPPLHQIRWPASRGRLLWATALGSVRVLI

SEQ ID NO: 173572 - protein, 38 aa, Oryza sativa
  Clone ID: PAT_MRT4530_71597C.1.pep
SGLFESWLYAWGSYLVTNNDSTAQGCSIMHYREAPSRI

SEQ ID NO: 173573 - protein, 876 aa, Oryza sativa
  Clone ID: PAT_MRT4530_71598C.1.pep
MNLSDDWRFLFPVSSVFAPPSLATFFAAAASYGPLLFSPLPPNATLLALPSPFQPPHPSRRGLRHLLRHFVRSTSFLPFADLDPLSGALLTAPSPPFPAPSNLLAVLRAPSSSRSLVVFFPSGENAEQVSYVTLDPVADPTTPLSHSVQSDGFMHPRHRIQQLATTASWSSWPSRSRDSSIEGFLLAATLYSVNWFKVESRGSGSPALVPAAKQAFDAAVVHACWSKHLQSECVVLLENGQLCWFDLDTRRGGKMKVGFGSKDDLGDWLSCEYGAQPWTVIVASTAAILLVDMRFGDHGEYKVLARVGMEGLFETDPFVKTQCYLAFCKAPFDDFLISVVTERHLMVFDIRRPLIPVLAWQHGLDNPNHIAMFRLSELRPSKEHEWASNSGFAILVGSLWSTEFNLFFCGPKEQDATENAPLYAWDLPSRISLIGQHCSCSIGLMEEVFKGVVPGHGSASQLIRNYIIGYHVLPNTMLESSFTGFALIRLTSSGKLEMQRFRASGDLHDDAICDESQHKSVGSSSSISLDTHGENFSERYEFLKLHYLSKFLKGNLRSSLENHDSDVNKRSRHIIISEDVSVFAKDNSASCSQSVSDFLCNASAPMNIFEIACQSILSRLSSDILLVAFSKYKDMLASTNKKRIYEYLEVPACFPNSNKLRPYLLAKSSSISWNLTSKAKSGNSLVGPVLPIPVLLAMEDSNKGIDSPSREDSSSVSHRCREVIEAFVPEISIANTDNCNGWSASQEVKDDKPYFVYEPQTDRPTLDEAARKKDKQTQKLDDPSCLHAPTAPPMDENFMTFVCGRAGIPHSGPEQAASNLFDFSPVRMKFESPAIDIQPAEEKVYKCLKKQFLAWQNDFKPYQDFCNSYQIQKPPQ

SEQ ID NO: 173574 - protein, 139 aa, Oryza sativa
  Clone ID: PAT_MRT4530_71599C.1.pep
MAIAGAPPTTSHQPKSGQYMDMDLLAALFSLTATIFEVSQVQDLVQLVDAIAPVDAAFTFAGKLIEMVKRKIIERIDFLVDEWSRILKPTTKMVISMGVMSYHGAKQPFKTRASLVKEAQELWDKKKEDASSVERNQIT

SEQ ID NO: 173575 - protein, 261 aa, Oryza sativa
  unsure (1)..(261): unsure at all Xaa locations
  Clone ID: PAT_MRT4530_7159C.1.pep
MSSVLLFLLLLLLSGVSLSGCIRLGNGGYEEWRMGSATYIKESLGHPLNDGGGACGYGDLDIFRYGRYTAGVSGALFGRGSACGGCYEVRCVNHVLWCLRGSPTVVVTATDFCAPNLGLSDDYGGWCNFPKEHFEMSEAAFLRVAKAKADIVPVQFRRVSCDRAGGMRFTITGGASFLQVLIXERGGGRGGGGGEGERVEDRVDPDGEELGPELAVRRXDLRGQPLSFEVTGGRGRTVVAYSVAPPDWMFAQTFEGKQFVE

SEQ ID NO: 173576 - protein, 49 aa, Oryza sativa
  Clone ID: PAT_MRT4530_715C.1.pep
SVGRHDIGQSFSDKWLCFRAFLDVCDALPVLGFSGPQGMFVRPVLRFFV

SEQ ID NO: 173577 - protein, 143 aa, Oryza sativa
  Clone ID: PAT_MRT4530_71600C.1.pep
IAARCAPRARSATGRTTPGRPAPPPASTAPGAATHHRRARARATSRRHPPPGGHRRTRANVRRRRYYLLAKLLPARRPPSLAPLPPPPPGRPAPTPPTATRRAGTAAVSASSRRPTRRWATAWTAAPAAASRGRASGAGSAGA

SEQ ID NO: 173578 - protein, 93 aa, Oryza sativa
  Clone ID: PAT_MRT4530_71601C.1.pep
RVSFFHRGINTPWILKPWPLGFGAFVFPLGEPPNPPQFGPFLCWVDPPGGGKSFQKGLFFWFFRFWKKKKKKKKKKKKKKKKKKKKKKKKKKQ

SEQ ID NO: 173579 - protein, 145 aa, Oryza sativa
  unsure (1)..(145): unsure at all Xaa locations
  Clone ID: PAT_MRT4530_71602C.1.pep
SFYSPLFAPSSAGACRRSSAPPPPPPSGTHLVPIAHSGVQLGNTSWELYXLEPASQTDGQMPNNSXLYDAMMLINTLLRGXGAAKHVRRAVLGNGEPTGIGDVNTGCYRALLHREQPVIGGEHARDSCSRGLYAVDLVYGALCLD

SEQ ID NO: 173580 - protein, 144 aa, Oryza sativa
  unsure (1)..(144): unsure at all Xaa locations
  Clone ID: PAT_MRT4530_71603C.1.pep
NCNTXHYRXNWVPXPPXXFFFFFFELWXQXXXWFLXXEXKXIXXXXTXXXEXXXRXRXTDXSYXXTLLXFQLTPKXEEXXKXXXXXEXXXSXWXXXXIXNFPSXXQPXHXXXIFFFFHGXTLXSDSRXXCLXGEGXLLEGMXVX

SEQ ID NO: 173581 - protein, 479 aa, Oryza sativa
  Clone ID: PAT_MRT4530_71604C.1.pep
MSSSATVVPLAYQGNTSASVADWLNKGDNAWQLVAATVVGLQSVPGLVVLYGGVVKKKWAVNSAFMALYAFAAVWICWVTWAYNMSFGEKLLPIWGKARPALDQGLLVGRAALPATVHYRADGSVETAAVEPLYPMATVVYFQCVFAAITLILVAGSLLGRMSFLAWMIFVPLWLTFSYTVGAFSLWGGGFLFHWGVIDYCGGYVIHVSAGIAGFTAAYWVGPRAQKDRERFPPNNILFTLTGAGLLWMGWAGFNGGGPYAANSVASMAVLNTNICTAMSLIVWTCLDVIFFKKPSVVGAVQGMITGLVCITPAAGVVQGWAALVMGVLAGSIPWYTMMILHKRSKILQRVDDTLGVFHTHGVAGLLGGLLTGLFAEPTLCNLFLPVADSRGAFYGGAGGAQFGKQIAGGLFVVAWNVAVTSLICLAINLLVPLRMPDDKLEVGDDAVHGEEAYALWGDGEMYDVTKHGSDAAVAPVVV

SEQ ID NO: 173582 - protein, 276 aa, Oryza sativa
  unsure (1)..(276): unsure at all Xaa locations
  Clone ID: PAT_MRT4530_71605C.1.pep
MGALLSSPNSKNQPWEHGEASKADSSKKLRMSAPPLSGGYDHPGLIPGLPDEISLQILARMPRMGYLNAKMVSRSWKAAITGVELYRVRKELGVSEEWLYMLTKSDDGKLVWNAFDPVCGQWQRLPLMPGISHGGECKRGIPGLWLGDLLSAGIRVSDVIRGWLGQRDSLDRLPFCGCAIGTVNGCIYVLGGFSTGSAMKCVWRYDPVSHTGPDARSMSTGRAFCKASLLNNKLYVVGGXQSSKTGWVRCTSFQVNDPTTGILVEEPDIPFSKAQA

SEQ ID NO: 173583 - protein, 86 aa, Oryza sativa
  Clone ID: PAT_MRT4530_71606C.1.pep
SFLTSCVTDMWATQGVGRFRTRALVPALLVVRGGAPPCARAGHRRRHRREQPRRHVRARLQPPQRVGMAGAGDAGDAVGRHLPPQR

SEQ ID NO: 173584 - protein, 809 aa, Oryza sativa
  unsure (1)..(809): unsure at all Xaa locations
  Clone ID: PAT_MRT4530_71607C.1.pep
MSPPAAGGLAGARGEGGGAGVGRVFVGAGCNRVVNNVSWGACGLVAFGAQNAVALFSPLRGEIVTTLPGHKATVNCTLWLPTKKDVLQIRSRERHYLLSVISYVIIMAREIDXVKGEWTRMLXLPVMHKKKITNIAGRMVSDTVSIFASTSSDGTVVIWKMEDEPTSVGSCEVSCLHSISVGPKPMVSLSLAVLPGQGGHLILAMGGLDHKVHIYCGDQSGKFIKACQLKGHSDWIRSLDFSLPVMMGSEEHSLFLVSSSQDRTIRIWKMNSDAVSSAHTTPRKEDIGIASYIEGPLFVSSNTHYQVSLESLLVGHEDWVYSVEWQPPTLLTDDEAHQPMSILSASMDKMMMIWKPEKNTGLWINSVTVGELSHSALGFYGGHWQPDGKSILAHGYGGSFHMWRDVGLGSENWQPQIVPSGHFAPVSDLTWSRSGEYLLSVSHDQGTGNHRFVSGADEKVSRVFEAPLSFLKTLQHATLLKTDNSGDFDDVQVLGANMSALGLSQKPIYTHGPRETQSSISNDGPDSMETIPDAVPTVFTEPPVEDQLAWNTLWPETHKLYGHGNELFSICCDHEGKIIASSCKAQSAPVAEIWLWEVGTWKAVGRLQSHNLTVTQMEFSRDNAFLLSVSRDRHLSVFSIRKTDDGAEHHLVAKLEAHKRIIWACSWNPFSYEFATGSRDKTVKIWSVQDSSSVKLLVTLPQFHDSVTALAWTGRDRASNAGILAIGMDNGMIELWNISGGRASTDSSGSGSSPLSFACMLRFDPLLCHVSTVHRLRWQKSDSSDEKSALQLASCGADHCVRVFEVRDI

SEQ ID NO: 173585 - protein, 632 aa, Oryza sativa
  Clone ID: PAT_MRT4530_71608C.1.pep
MAVSLWRAVMGAAGGGGSSSSSAAGGDAGGGVEFWHGGERTGWLNKQGEYIKTWRRRWFVLKQGRLFWFKDAAVTRGSVPRGVIPVATCLTVKGAEDVINRQFAFELSTPTDTMYFIADSEKEKEEWINSIGRSIVQHSRSVTDAEVVDYDSRPNSKPPPQPKTSEESEPSAGILGGSSLAIHVSITPSSPLKFEFLDLVFFNFVPYHSLWSSMGIKTVFSMENLPQWKTRKLGPLGLKFHYVKAGKHPEKVELTCLANARSTSRLAPAGTVRAAVAAYGRGAGKGKGKRRVVGAFHAPPGRRRTALVAALPEPLQPLSPAQDGAVALASTEADGGEEVHGDVASAEISSPSGVLGKTVRVRFVLKRECTFGQSFHLVGDDPALGLWDPSKAVPLDWSEGHDWTVEKDLPANKLIEYKFVLQDLSGKLHWQNGRNRSVQTGETANILVVYEDWGNANSQTVEEEGKVSIGMEEGKLSVGMEEAVVPDDSESRDDIIVADELQVDDNLAVMQNESSVREDDKKSTVGTVTSVQAELMKLHEANQPELIVDEPQIQEALPETADTEPENGGVATCADDRYAESTDDDGVPVGGTDDDGVPVENRWTGAFEHELLWGWKALQQLLMSLGFKMDTS

SEQ ID NO: 173586 - protein, 648 aa, Oryza sativa
  Clone ID: PAT_MRT4530_71609C.1.pep
MLTVTLLDAHLARCSSARHLLQIHAQFVASGLLADAFAASRLILFTTSTRLLPLPFHHSLRLLHVVHRPNAFSCNMVLKAAREHGLPHLCLPLYASMSAAPDCYTHTILAAACATRRAIEEGRQVHCHAVRHGFGRNLYLANALMSMYSACGCLGDARKVFDAGPVWDAVSWNTILAAYVQAEDVDQAVGVFARMPERGAAAVSSMVSLFGRRGMVDEARKVFDVVERKDVFTWTAMISCFQRNGKFAEALALFSDMRGEGWPVDEAVMVCVVAACARLEVTRNGEMCHGLAFRAGLGSRLNVQNALIHMYSSFLNVVAARRLFDSGQCLDQFSWNSMIAGYLKNGSVKDAKELFTVMPDKDNVSWTTMISGCVQNDQSSEALTIFNNMQAQGIKPDEVTLVSVISACTNMSSLEQGKSMHEYIREHQYTITVILGTSLIDMYMKCGCLESALEVFDTMEERGTPCWNAVIVGLAMNGLVMKSLDMFSEMESSSTATPNEITFTGVLSACRHAGLVEEGQHFFKLMQHKYHIIPNIRHYGCMVDLLGRAGYVKEAENLIESMPMSPDVPAWGALLGSCWKHGDNEVGERVGRKLVNLDPHHDGFHTMLSNIYASEGMWQHVKDLRGSMKQWHVPKIPGSSVVESSLPL

SEQ ID NO: 173587 - protein, 84 aa, Oryza sativa
  Clone ID: PAT_MRT4530_7160C.1.pep
MARNLMDALQNDINIWKVTGRKKELGTSTAPVKNTGSVAAHCTGERRTIQHMCSRAKPCSDTGVASFILALMEGTKPRPRPQLN

SEQ ID NO: 173588 - protein, 66 aa, Oryza sativa
  unsure (1)..(66): unsure at all Xaa locations
  Clone ID: PAT_MRT4530_71610C.1.pep
SQSKXKXYQXTIREXRETXAWXXQNFSKTXFIWXRFILXXXXRLHXTGRXYRTXKAXWXTXTSLAF

SEQ ID NO: 173589 - protein, 164 aa, Oryza sativa
  Clone ID: PAT_MRT4530_71611C.1.pep
MEGLTSVRGRAIFDGGWRRVNGGQDGPDLTKPTAATKRRDGGTSGGQRRRGGEFGRGRDVALFRRRRGEGSGGRRLKKGPTGGPHLSVILRGEEAGASQATATGRPSKEDWRGRRIGPTAQERKKKEDFESPPFVSVRACDVGCGMERRRWATMVGARAPVAGG

SEQ ID NO: 173590 - protein, 154 aa, Oryza sativa
  Clone ID: PAT_MRT4530_71612C.1.pep
MTVGMINANPVVHERPERAAHPHPADAIDALDVFDTVRDIKDPEHPYSLEQLSVLSEESVSVDEKLGRIQITFTPTVQHCSMATVIGLCLRLKLMQNFPPHFKIDIKVAPGSLANEESVNKQLNDKERVAAALENPNLRQLVDECLCSNDSHSH

SEQ ID NO: 173591 - protein, 44 aa, Oryza sativa
  Clone ID: PAT_MRT4530_71613C.1.pep
MDGKARAASISAADENILEWNGRPSPFPVMQCSGQFPGVSSHNE

SEQ ID NO: 173592 - protein, 102 aa, Oryza sativa
  Clone ID: PAT_MRT4530_71614C.1.pep
MTAVASCTGVDPLPLASQGRMDPPFTVLRSSRASVIMTTTSMAAVARVTTMAARGTMTMTISRANDKPPPPTLGGVTSSASLGLVHGVDCCGGYYGYGDTDR

SEQ ID NO: 173593 - protein, 496 aa, Oryza sativa
  Clone ID: PAT_MRT4530_71615C.1.pep
MTAESNGGNSSAAATTASNGGRRRHELVPKLRLPPGYHFVPSDEELVDFYLRGKIEQRRPPMDFINEVDIMSFDPVKLIEKYKGYGENRWYFFTVRKPSKTKKKDEPNRKVVVDGVEEGSWSATGSVAYICGKDHETVIGTKRVLTYKSARSAEEDKWSMHEYVMLDKSQILDTTRDTMSMDQYVLCAIQLKQTYEAEKKAQEEEERGVKRKRTATRKRRKGDIDQTTSQEQEDQQQETPPPGDPHDQSVVDAPYYSTQMALGGEEEVAPVPWCADCMAQPDRIEYPAVWYNQQEQQPSQLVDRSMMTQGYIGDLSYIQNQFDQQQAHDHGSINAFDEALDQCHDTNFAWDNAGIYPGNNLLDGNLDDDTQDQFGNQSTLGALTGELEYGTGYQFHDALQATPGSDDASAQSMGIQPAAGHSMGDDDETCCNDDLSSLLADISRILLDGNGVINNEGNPEGSNQGLHICKDGHQWPLEESTMPTVECVLQHPGESA

SEQ ID NO: 173594 - protein, 149 aa, Oryza sativa
  Clone ID: PAT_MRT4530_71616C.1.pep
MKTKDAEASAFRADKITMEKTLETLSLEMKKIHAEKDAAAAMVLQKSDESENLRAELKNLHKSISELRIRCNDLTDHSSRLQADKNSVMRALSNEKSESTKLRLKLRELESYVSNKDNEIGVLNSEAEDREGMVDGMSRQFEQLRIAPL

SEQ ID NO: 173595 - protein, 246 aa, Oryza sativa
  unsure (1)..(246): unsure at all Xaa locations
  Clone ID: PAT_MRT4530_71617C.1.pep
QFGNRLWRSRRELSLRLAAKTATXEGGRMTPAGGKGEKGGRERGARPFLLWEKGKGSGGVEAEGGGLGLRPLAACARSGGAEAMTTAMTAGRFGAARRHGRXARAGAVEGDGGGDQMVGHSARARGLQWEGAADGEARLEHARWLRGRAAAGAAGQRGRAATTRCGRGPRGRAREQQRAGAGFASGELARERRRKARGGGARRGDSRARARTERRRRSARRRSRARARGARAERSGAEGEGRGSAP

SEQ ID NO: 173596 - protein, 133 aa, Oryza sativa
  unsure (1)..(133): unsure at all Xaa locations
  Clone ID: PAT_MRT4530_71618C.1.pep
WRGRETGKIGRGKGEGRAPGFIGGGNVGLETDFGXSRRELALRLAAKMATGGREXTPAGGKGEKGGGERGXAPLPIWEKGGGERGRRGRGRRALPPSLGGLRAEWRVRGDDDGDVGGAVWSGAATRATGAGRR

SEQ ID NO: 173597 - protein, 40 aa, Oryza sativa
  Clone ID: PAT_MRT4530_71619C.1.pep
ERHQCMQTFFHAMDPAGGNQLAQAVGVFRGLTLHMRLGVS

SEQ ID NO: 173598 - protein, 63 aa, Oryza sativa
  Clone ID: PAT_MRT4530_7161C.1.pep
VRCLTSSSVLRIARVMVRTIRVVWSSELLSLSPTVSSTRGSSLCLQVVTVGYAVSTGYSRAIS

SEQ ID NO: 173599 - protein, 126 aa, Oryza sativa
  Clone ID: PAT_MRT4530_71620C.1.pep
GSGSFGPGREGSCVFVFQACRLGSLAIGVPLVVGSACSGLWPRAQFSLFGLGLAFRVSPSVAPGFFCLCSGFGRVRFFSGSPPFVFARWGFVFVFVSPPKKSKKKKKKKKKKKKKFKNTGVQFPKY

SEQ ID NO: 173600 - protein, 62 aa, Oryza sativa
  Clone ID: PAT_MRT4530_71621C.1.pep
MAVKDRFTGNPGRLTVLTTSGSGCVLMPSESIADDELGVSLGENKLQTIEISCGMKNNAHGW

SEQ ID NO: 173601 - protein, 763 aa, Oryza sativa
  Clone ID: PAT_MRT4530_71622C.1.pep
MPPLSPSSSPPATAAAVLRCGSPSCRPVTHELFRQKLSFMVSFQAQHMRCAPHLIKSVVKGIRANITDGENGATEPARELLERLFAKTQRLDTSASQDSELSMSIDVLKSEFEAALSTLRKKERDLRDAENRVSVDQVRLNRAKKDLDQRERGINRAYARQQEMERSLGKASRDLVLQVRQIDNLKLLVDEQDKKIASSQDLLSQKVTEVEKLKQDMLKKNEEVTLMRSEIKSKEQLLLEANQVAEQQEATIKELRSEIKRKEIDFSRSNELRKANEQKLKIAEQELERQNMGWLAAQKELKEVAQLACKDMDGIKDTVSDFKRVRSLLDAVRSELIASKEAFSSSRKQIEDQAVQMQKQVQELSGQRLLLSSFNQNLEAARLEIQGKAKELNAAQSRCHELESLLLQEKEKVESLEAVLTKERESLEEKTKEVELLQKALVQKENEHSNSLKLVEIKESELLEARNEVQDMKSKVESIQIAVQEKDSELSETQRRLAEVNSEVVELKQLLDSKEDQLVQVRTELQDKEQHIQTLQNKLDSMKFSCSQAESVVQKIAELTGNLASSVEGEEMDIYALLDDEISSTGTALKSNLHKHNQLEADIEMLKESLHQKDMDLRAAHEALDAKDQELKAVMRRWDVKEEVDKLEGFLKDPSDIKRPSDFSVHMGLQNLQTEAAEVEALAATTTLKKLADMAKGFLRSGKTDSGINLVASPSVNSTRIVSKTKPNKEMDMILDAEKEIAGLFSLTEQLITEAGIDVAHQA

SEQ ID NO: 173602 - protein, 74 aa, Oryza sativa
  Clone ID: PAT_MRT4530_71623C.1.pep
SPSSRHRGISLVRSLVWQAHLRHLTGATLSTRQVHFHASCLVAARLNLVFSLVIIEFLRPLLTLLGVWARTGQQ

SEQ ID NO: 173603 - protein, 49 aa, Oryza sativa
  unsure (1)..(49): unsure at all Xaa locations
  Clone ID: PAT_MRT4530_71624C.1.pep
ATCRVLVPLVYNSKAYLPVIXPFGSXSQLRAATSCQALHQCVFDHSDMM

SEQ ID NO: 173604 - protein, 53 aa, Oryza sativa
  Clone ID: PAT_MRT4530_71625C.1.pep
MWLLLRSSLYLLQSTWRATSSGWTRRRRKGTRQPSLDLVWMQHMPTDLTIERP

SEQ ID NO: 173605 - protein, 752 aa, Oryza sativa
  Clone ID: PAT_MRT4530_71626C.1.pep
MAGDGWVMDIIWHTLLLGGDAMGGIWSSWSTEILLGLSFVAQLVLTVTAGFRWRGAGSRMRCVIWFSYVSADYVATTALGNLSISRTAGSRRLAAFWAPFFLLHLGGPDSVTAYELEDNQLSARHVLELILRVAGAVYIVYKSTSGSWALIPASWLMLFVGVAKYAEKTMALRRANLANVRRTVERERRLQRRRSRTTKANLSFAGDDDEGGLLMKAHTLFPICKNSMVDSSVETASNTDDAAIVHAKETLFREENYKNVFRVMEMELSLMYDFLYTKAAVIHTWHGYAIRAVSPVFTAVSLVLVELSNVAGHHRRSDVVITRVLLVATFLLETLSLLRALASSWTGFWLDRELRPVWGCGWIRHEVLCRSRWTWLRRQVASIGRLAGAKDHRRWCGKMGQLSVLQLIITGSASEQEDRSWDKECETYSKEKTIVVPQDVKELFFRRLLGQLIDLRKRMKADTGTETELRTMVANMRSKRGQLTLQNYDLWNQLRWSLGDELQLGILTWHIATDIYLSQSVKAIVAAVEDDAVLARWLMGIRTLSNYMMHLLAVRPDMLPGLVTRKLFELTCDDLARVWSKHQTSTSVGAAGGDDLESSSSSPRNICRLRDLWRVSPKTIEQQNKLAGMLIKQWEWDRKQESGAVELNKYLSRGIELAKKLLHLEVSRKDIDKVLQVILEVWVEMLFYAGYRCSKESHAKQLSQGGELTTIVWLMAEHVGLFLVNKTSKGAEEDYWNTRKRRYSRQPASQNV

SEQ ID NO: 173606 - protein, 333 aa, Oryza sativa
  Clone ID: PAT_MRT4530_71627C.1.pep
CGILWGSSLRSYSFTMVARAQERDCCITYDYVTEDAADLLHQSDLDKVSALAALAASRPAAAVGVSHRDALQSCAQHARLWLRRADEPIHPESSITYAAVRAKLDKIMASDYYTAQPEMPEMGAAVDLSAAVQESMVVSPEAPAVEESQAEGHKDEKEASEATEIYNDNQPNVADAQNVEDEAPVNPSEEFSAAEVEQEKFEADVEEQERNADQQFTSRRPYQNQRGGGGRGGGRRGYQNGGRGGRGGRGMGGGGYQNGRGGGGGGGYQNGRGGGEGGGYYYNEPGYYQQRGYSNRGRGGRSGGGNSYYNNQGGGSQGGGHAHPGRVELGANA

SEQ ID NO: 173607 - protein, 84 aa, Oryza sativa
  unsure (1)..(84): unsure at all Xaa locations
  Clone ID: PAT_MRT4530_71628C.1.pep
MSFVISLTSLTVLNGGVKNLINSWFGMVNSWFGDETVQPGXWLFRMVGPMQQGMLYSVRLILFNXKYFTVLLNSEIFIKGYLCK

SEQ ID NO: 173608 - protein, 437 aa, Oryza sativa
  Clone ID: PAT_MRT4530_71629C.1.pep
MAVELRALHAAVVAAAPAPAAARPPAGRVPRALQDGSGSGGHRWRGLPGVYSGDDAFLAYSHTVTAIFDDAMAMCFLCSSLLVFKGHSLVMNLSHSLLLLNLHALLADEEDGNDDHRQSHLRRPYWGQRGCFRAVVVASYGPTCRCFDFRCVNQKKDLHQMAAPTIFSNPLEKWIFHKTKESVFLVDFVPKKDADGKIEEILNRLETVPEDKRQKLTFEDRCCTGFVVDDKSQELKILCSAHCLDHLFTSENPISAQEIGDLYDINIICDHYECSFRKDKTPDKIRYYSRANIVQIDCDKDLILLNVSKKNVLAYGKNGRACRHSHPALVPSKRHLEPMEKVLMVSWPPFRPRTVASGKVSHCDREYADTSKTNLVGYTMTLVEVNIQSEPGGSGAPLLDADANFTGVLHGGADGCSWFISLPDICQALTSWGILTQ

SEQ ID NO: 173609 - protein, 55 aa, Oryza sativa
  unsure (1)..(55): unsure at all Xaa locations
  Clone ID: PAT_MRT4530_7162C.1.pep
FIIDKYGVIEPSPFVNLAIGRSVDHASNALPDVQXVQHYPHKVCPSECYHAPQLM

SEQ ID NO: 173610 - protein, 87 aa, Oryza sativa
  Clone ID: PAT_MRT4530_71630C.1.pep
THTLFTSTQSTMPPRNPAPHHNISLPTRTQTPPQTKPKQPKTQKPTIEVTKRELPLLNPSIHQTTKKPSHSGTEGKSTTLPPFNSSN

SEQ ID NO: 173611 - protein, 121 aa, Oryza sativa
  Clone ID: PAT_MRT4530_71631C.1.pep
SNEQLIAGGDGSRNNNTATGHQLNKGRGTSSGTAEEHTGGAGGKEWRQRRCRRRTLTRRRASEESRTMASQQAVQKQGRSANRFFFPIMPLLIQWLDFIWYLAVPVPFITDLFPALILCRR

SEQ ID NO: 173612 - protein, 111 aa, Oryza sativa
  unsure (1)..(111): unsure at all Xaa locations
  Clone ID: PAT_MRT4530_71632C.1.pep
MATGDATATAERRRDGDAAMGRRGAARGLARGDGGTAAMGDVMAMGRVGFEAMRPETATARGTTXREGARQWRARQRRRDGARRLEARGARGREDGTGARRGRGAGQEATM

SEQ ID NO: 173613 - protein, 82 aa, Oryza sativa
  Clone ID: PAT_MRT4530_71633C.1.pep
VHQLGACSVQGFRTTIDLGSILVCSRAVLSRSREQKIELRSNLFVVNKKGGMDSSTISCTTHPIKCILAQYIIALLFEHNMP

SEQ ID NO: 173614 - protein, 62 aa, Oryza sativa
  Clone ID: PAT_MRT4530_71634C.1.pep
MEPGRNKQIEVVEEAHEEQQQQQEHDVDTGVLDPLFFLCHVFDVENDGSHVVENYVYVYRPY

SEQ ID NO: 173615 - protein, 33 aa, Oryza sativa
  Clone ID: PAT_MRT4530_71635C.1.pep
PGPSFYMLKVGLNYQQRLRVHSTLSTLYNMFKC

SEQ ID NO: 173616 - protein, 45 aa, Oryza sativa
  Clone ID: PAT_MRT4530_71636C.1.pep
MAEITREGDLTGTTQLVRPSGAGPAGAPPPVAAGRGAQGDTAGLW

SEQ ID NO: 173617 - protein, 135 aa, Oryza sativa
  unsure (1)..(135): unsure at all Xaa locations
  Clone ID: PAT_MRT4530_71637C.1.pep
METVTSKPHFVLVPWIGSISHILPMTDIGCLLASHGAPVTIITTPVNSPLVQSRVDRATPHGAGITVTTIPFPAAEAGLPEGCERLDLIPSPVMVPGFFRASXGFXEAVARHCRPQDARSRRRXSCIIAXMCHTW

SEQ ID NO: 173618 - protein, 528 aa, Oryza sativa
  Clone ID: PAT_MRT4530_71638C.1.pep
MKKPNVAAKVKAAAAGGADGGSSKGSPSTPASLRVTKLVKGKAKVKAKASREKAAAPAAAAGKEAASLGDAGGNADASPAAPALRPAAVADADGASKGSPSTPASVKKTSRLNKVKAKAKAAAAAAASGSPSVGAAGGNADASPAAPAPRSATVADGSAARVISTPAAATAEASTPKRRLKLKPKLAEANANANAVVATKNGVGADNNDGDAIKKRKREIAGERTSNVKERRKEEEGSKKEERLDSKGGGLIFMCNAQTKPECFQSRLFGYPRGKIGIVEKIRPGMRLFLYDFDLKLLYGVYKAVSKGGLDLVRDAFSGKFPAQVKFKIDKDCLPLPESRFKDAIRENYSAKSKFNPELNSRQVHRLIALFESVSVPQPAPQKPLEEMHHYEGKTQPHQYEERRSSLPVMHVPPPKDLYRATRFDPHPVDYRIDHSLSNAHDGPHIHYQQTLVARESQRVPLDIEPRLVPHALEPRHGPSIPEIQHVPHAYYRHLAPSDVPYYRSQVDPLPDRLTLEAVFFPKCKDTV

SEQ ID NO: 173619 - protein, 60 aa, Oryza sativa
  Clone ID: PAT_MRT4530_71639C.1.pep
MASKVVFFAAALMAAMVAISGAQLNESEMKVKDRQCPREGQDSPLDPCPQVLDPQLTGPE

SEQ ID NO: 173620 - protein, 757 aa, Oryza sativa
  Clone ID: PAT_MRT4530_7163C.1.pep
RLRVAEGGGDPWLRTKNGHVGRQVWEFDPAAGDPDELAAVEAARRGFAARRHELKHSSDLLMRMQFAKANPLKLDIPAIKLEEHEAVTGEAVLSSLKRAIARYSTFQAHDGHWPGDYGGPMFLMPGLIITLYVSGALNTALSSEHQKEIRRYLYNHQNEDGGWGLHIEGHSTMFGSALTYVSLRLLGEGPDSGDGAMEKGRKWILDHGGATYITSWGKFWLSVLGVFDWSGNNPVPPEIWLLPYFLPIHPGRMWCHCRMVYLPMCYIYGKRFVGPVTPIILELRKELYEVPYNEVDWDKARNLCAKEDLYYPHPFVQDVLWATLHKFVEPAMLRWPGNKLREKALDTVMQHIHYEDENTRYICIGPVNKVLNMLACWIEDPNSEAFKLHIPRVHDYLWIAEDGMKMQGYNGSQLWDTAFTVQAIVATGLIEEFGPTLKLAHGYIKKTQVIDDCPGDLSQWYRHISKGAWPFSTADHGWPISDCTAEGLKAALLLSKISPDIVGEAVEVNRLYDSVNCLMSYMNDNGGFATYELTRSYAWLELINPAETFGDIVIDYPYVECTSAAIQALTAFKKLYPGHRKSEIDNCISKAASFIEGIQKSDGSWYGSWAVCFTYGTWFGVKGLVAAGRTFKNSPAIRKACDFLLSKELPSGGWGESYLSSQDQVYTNLEGKRPHAVNTGWAMLALIDAGQAERDPIPLHRAAKVLINLQSEDGEFPQQEIIGVFNKNCMISYSEYRNIFPIWALGEYRRRVLAADK

SEQ ID NO: 173621 - protein, 70 aa, Oryza sativa
  unsure (1)..(70): unsure at all Xaa locations
  Clone ID: PAT_MRT4530_71640C.1.pep
MEELCPPLPWRSPVEKTSSGEYKVKDLIVDDGGDAXLLIXEGXVKAEEEFEKXGKVPDPESTXNXEFKIV

SEQ ID NO: 173622 - protein, 209 aa, Oryza sativa
  Clone ID: PAT_MRT4530_71641C.1.pep
MVRTKCLLICVPWLIPGREFYAQISSEITSEFPGVTKVTMLGKLAAKRKPSDIDPAGKDPESTDKETGSAAARESEPTEENRSTGSQSATVNVEAGNKPLTGNQSAEAETDAHQKPPIGDQLEVEPNKDIPETEEQTSIPPFTTPMLVQRNEAKTATLEKLVPHLGTLEAGTRAQLHETRELARKTEHDLRDWIAELQDSNFELSGSSK

SEQ ID NO: 173623 - protein, 520 aa, Oryza sativa
  unsure (1)..(520): unsure at all Xaa locations
  Clone ID: PAT_MRT4530_71642C.1.pep
MAEERESFESQWAPSDVTEENLTEMVVHDVXGWHPAFGEAFPTPDXHEVVVFSHFFYGGFSLPTSKFFRGILEFYGISLHHLNPNSIVHIANFIHACEAFLGIRPHFALFRRFFFLKPQPNKSKPXPEPALPKYSCLXPVYQDTXNSLPMGDEASQPLIMLERMLKLKEQGLQGXQITLHFIKSRLAPIKERSRTAFEFDGKNDPNREDPKSLEFKIMKERMYKIFSNGIVVSYSHLLLVVPYNAFNPPLPEFSLMKSDPPIAQRRSPRRQAGQASGGPKIQSAAQPSISKLTNQSGSRKRKLVLSDDEEAGNKPPTGNQSAEAEIDAHQEPLTGDQPEVEPHKDIPEIEEQTNNPPFNNTNAGPEVSTFDKVQGPARPPLKVITGPIIGDEEEILRIRWDDEMQPQGIVINKQKDDKEVSLLTKTLNQATRLVNRIHIRNEAKTATLEKLVPHLGTLEATRTQLHETRELARKTEHDLRDRIAELQDSNFELSGSSKVQAAKITELEKRIKVLEKIRVN

SEQ ID NO: 173624 - protein, 153 aa, Oryza sativa
  Clone ID: PAT_MRT4530_71643C.1.pep
MESPRLIEDDGEECNSNESGWTMYLASPTHSDDVRAIVSEGSNVEDGSGFSNERRRGKENKGHANDDGDYDSLASDASTGPAEVKMQEGKEEKDHQMNGGNRHQHAKDEQDEIPTKLSTSYSKKVGKIKKGDEKTSRRGQNKRRSSSRTSFFW

SEQ ID NO: 173625 - protein, 68 aa, Oryza sativa
  Clone ID: PAT_MRT4530_71644C.1.pep
MRWPSPTKVGKRGVGTVIGVVAGVANQDRRRWRPKSRSLVMAEWSVWRMACFYARPEKKLARKLKRIS

SEQ ID NO: 173626 - protein, 117 aa, Oryza sativa
  Clone ID: PAT_MRT4530_71645C.1.pep
MAARSLAVPLLLTLCLLAAHLLTVACARHHPPSPPETEGFDVVDTSPTNDGPSPAGGHGNHPSAAVVIPAGGASPGGVSSTESRARGGFISHDMSLCHCRGGGVPVTDAAQHGGRHP

SEQ ID NO: 173627 - protein, 603 aa, Oryza sativa
  Clone ID: PAT_MRT4530_71646C.1.pep
MGVSGVLEWWQEWQLRTLVLSSTAIQLLHYLFANRRKHATSSQFRTIIWLSYLGSDAIAIYALATLFNRHKNQDSTSSSTAQGSRILEVVWAPILLIHLGGQDSITAYNIEDNELWKRNVVTMVSQVTVSIYVFCKSWPGGDKRLLQAAILLFVPGVLKCIEKPWALRSASINSLVSSDDLVPRTGKGNEQGGSISLESYVEELTKKLTETFYRLYTKSKMLDKQQNRYLLTGFLRVVSVYLPFAAIGLFHNSHRQAYNRYDIKVTYTILCCTAFVEAFAAHGWNTPMMDNVLPWFYKVSQCRLIGSYAGGSTKSCDSVVDIIELVLQHLKSGWKDCITDFPSYRAFSDHRGQWALRRNNCDQEDLAWSLRVPFDESVLLWHLATDFCFISKRCTNEVATRSIEISNYMMYLLLDNPEMLMAGTRRNLFITAIHELEGILGNEPREIQGLAQKIIVNVESTNGDPSFIRATLVHFLRCRGYLHAKSLGTGWELLTFVWLLMLYMGMEPLVEKLQRAEFSSVIGSGTTADAPSSSNETLAEREPKTEVPNGGGISAAAPLSSDETLAEWNQKIKAPSGDEGNIGDVPSTSPDIIVIDIKEDNAS

SEQ ID NO: 173628 - protein, 89 aa, Oryza sativa
  Clone ID: PAT_MRT4530_71647C.1.pep
VVPPVNRLGKIMSEMPEKSPNSTSPIQLRQVPTCMLRDSGTFLVVITQLTLTTKLIIYLIKKIQLFSLDWFYVKGTLNMIFWHIFTLNF

SEQ ID NO: 173629 - protein, 207 aa, Oryza sativa
  Clone ID: PAT_MRT4530_71648C.1.pep
MEPHMERALREAVASEAERRELEGVVRAHHTFPAAERAAGPGRRPTCTSLVAQRVDAPLAAVWPIVRGFANPQRYKHFIKSCELAAGDGATVGSVREVAVVSGLPASTSTERLEILDDDRHVLSFRVVGGDHRLRNYRSVTSVTEFSSPSSPPRPYCVVVESYVVDVPEGNTEEDTRMFTDTVVKLNLQKLAAVATSSSPPAAGNHH

SEQ ID NO: 173630 - protein, 74 aa, Oryza sativa
  Clone ID: PAT_MRT4530_71649C.1.pep
MNPRKRLDDGGQLVAFPSLEMGGGVRRGEPTPGNGEMVTSLQHLSLWLLSLLILAAALASHLNLAATCRGDRQS

SEQ ID NO: 173631 - protein, 67 aa, Oryza sativa
  Clone ID: PAT_MRT4530_7164C.1.pep
MAGGYEAAASSDGQWTWDPPMPAKEWGAAGIGFRVSTFGKIGENRILVLAVMDSLFVGTVPDMYYAY

SEQ ID NO: 173632 - protein, 153 aa, Oryza sativa
  Clone ID: PAT_MRT4530_71650C.1.pep
MKRNPRVTSSRRKCRKAHFTAPSSVRRVLMSAALSTELRHKYNVRSIPVRKDDEVQVVRGSYKGREGKVVQVYRRRWVIHVERITREKVNGSTVNVGIHPSKVVVTKLKLDKDRKAILDRKASGRAADKAKGKFTAEDVAAAGAAGASLQEID

SEQ ID NO: 173633 - protein, 326 aa, Oryza sativa
  Clone ID: PAT_MRT4530_71651C.1.pep
MDLSVFIHGGAYHIRPPVPPSGTPVSPVGRLRSVHSAYSLIISHYMSKVKAQSVVCPHVYPQYYSFQNHESQQCLPFFFTRSLIRWSVLIQIIKINTDTAFLSVSTDGRSLLGGTSISRTFVELSAYSIWTTGLRARCSFALGRNVKVISGYMAQVYNEKDNNGSPPPYITMGEEKQHLEKTPDGYRIKVSSLGTTTSFTLLTTDRIWNMWLSGDPLLVSQSGLKELCLSFSLFKSLRRRFAGHPLVEDGSQRALGFVLHGMLGDANDHDRMFQILINELAFANEFYYSCLPYWHFVGGALETLNLVISVGNNTYLAINFIPSIII

SEQ ID NO: 173634 - protein, 124 aa, Oryza sativa
  Clone ID: PAT_MRT4530_71652C.1.pep
MAEQGRVGGGAVAVAHARRKTQPTEAWRWGVGSGRPAENCLGPRVWIWTTLIGVVEIGPLGCLLASIGLMGYWAILFVRFVGLFGRGEEWGAGAPVAGRWRRFFLHTLLVKTTMRKRSARRRGP

SEQ ID NO: 173635 - protein, 124 aa, Oryza sativa
  Clone ID: PAT_MRT4530_71653C.1.pep
MKRNPRVTSSRRKCRKAHFTAPSSVRRVLMSAALSSELRHKYNVRSIPIRKDDEVQVVRGSYKGREGKVVQVYRRRWVIHVERITREKVNGSTVNVGIHPSKVVVTKLKLDKDRKAILDRKARG

SEQ ID NO: 173636 - protein, 175 aa, Oryza sativa
  Clone ID: PAT_MRT4530_71654C.1.pep
MQGRKNVMKMLKEILNERKKIEGRHESIDFLDVLIEEVKEDNPSMTENTALNLLFSLLFGSFDTTSSGITGMLKFLTDNPEALRELTEEHNNIRRRRADLNSEITWEEYKSMKFTSHVIHEALRLASITPMMFREAIEDVHIKGFAIPKESKIMICPSTVHLNPVVYEDPIHSIP

SEQ ID NO: 173637 - protein, 1745 aa, Oryza sativa
  Clone ID: PAT_MRT4530_71655C.1.pep
YADELKENSNVELQGTYGVFFSLVVTFVSDALSTSHEKPSLSSSDSSFRRDFHELVMRSDNNLTIEGFVGVVRLAWAVHLMLTQDRSSARDTLTSSSRDVTDIWACLEIICRQNSFQFLQERIMQTAAYKNDDEDIVYMYTGYMHKLMMCFLSHPTSRDKIKEIKEKTMNALSPYGSIRDHREDPSRTGEQIGQPTNQPFISLLELVREIYQKEPELVHGNEELWTFVISAGEDHTNTLTLVAFLGLLSTLASSEVGAAKVYELLQGKVYRSLGWSTLFDCLSIYEEKFKESLQSSASVMPEFPEADAQALVSYLAVLQKVVENGNTTERRKWFPDIEPLFKLLSYENVPPFLKGALRNSITAFIKVSPLLKDAIWSYLEQYDLPVVTPPLGQHNATQIYDMRFELNEVEAMRESYPSTISFLNLVNALIAEERNISDKGRRFMGIFKFVYEDVFGPFPQRAYADPREKWELAVACLEHFRMVLSMYDIKDDDIYAAVNASGPSTTSHASIDRQLPVLELLKKSCTLSLPHVILSAIPVIKHNPDFMSGKVAFRNIMNIVSVGVDTLINERTTQTYGILLEKTVHLSFEIFILVMERDLVLADVFRPLYQPLDVVLAQNHRHIIALLEFVRYDYLPQIQQCSIKIMGILSSRIVGLVQLLLKADVAKSVIEDYAACLEFRFDDFQAIENTKDDVGVLILQLLIDNICRPAPNITHLLLRFDVNGSIERTVLKPKSHYSCLKTILDNLEKVTKPDINALLHEFGFQLLYELCLDPLTCGPVMDLLSTTKYQFFSKHVGTIGVSPLPRRNNNQSLRISMLHERAWLLKMLALALHVSDISSSLYRESCLAILCHTFGHCAENLRSANLLQSPGSSNLAMNGNKVLDLLEVVQFRCPDTSIKYPQMLSNLRLESKIEEILRNSATSEFGGVYYYSERGDRLIDLDAFHEKLLQMSQLLNPQLSESEKSELKESFHQMLKWAWRYNKNLEEQAAQLHMLTGWSQIVEIAVSRRMSLLEDRSHLLFELLDASLSATTSPDCSVKMAYILTNVALTCMAKLRDERFICPTGADSDAVTCLDIISAKQLSNAACTSLLFKLTMAILRNESSETLRRRQYALLLSYFQYCRSTLDSDVPPPVLRFLLLEEQEGDDDELGLQKVLKEQNELARSNFSIIRKEAQAVIDLVAKDAIHGSEAGKAISFYVLDSLISIDHDKYFLNQIQSRGILRSCLSDVNNYLSKEASFSSESSQRFCTIDAQLSLLLRISHHYGKHGSQILLSMGALHNLSSCNLMGSQKKANSRLNSNVVKERAGEIDKRRSLTAPILRIVTSFTSLVDSADFLEAWYYEILAYGGTTSARTDCPWLGFDLCLIYVMDADSWIGCKGCPGHAMTFINSLVKIDRFLEDENLASGDNFVKRVWTAIFLRLGLAEAAPQPSTDRFLRWWSQATKNQPKEVRKGINSLVKNKIVRELVDFAKQHQPVFNIILRESISGANIFNLERLNMVVSILGKVWAYEENDECSFVQDLFSMMQFLFSLDIGSLNFMQSSNMIENQKSELIVFALCFSLISYLYVLATKKDMRFQISYDDTTEGQQQPTLQLISDLLNSITVAMERVAEEKYMLLNKIRDLNELSRKEVDDIIKLCMKQDCISPNDNIRKRRFIAMIELCCMAGNRGQLITLLLQIAECAVTILLVHFQDESCAKDISSFSDELLPILERLEHFTEDKVGRSLKLFHRSVTTLKEMTIRSMSL

SEQ ID NO: 173638 - protein, 441 aa, Oryza sativa
  Clone ID: PAT_MRT4530_71656C.1.pep
MAVASAWAKPGSWALAAEEQDDLPPPPPPVPAADFPSLATAATTKVPKKKKPQPVPLGEFNSTKFVAPAYRGPTQDDLLSLPTGPRERTAEELANATRGFGARWGGAGAGGPRGDDEPRRGGSGPQDFGPSRADEADDWGAGKKPLERRERMGGFGVDSSMSRADDVDDWVSTKRAAAPAPMERRERSVAFGADSHSRADDSASWISNKGYSAAPPPPSDSRRGGPVWGFNRDGGPDADSWERRREEVSGGGSSGGARPRLNLQKRTLPLANGTDGEGKEDKEEEKGEMQPKSRSSNPFGAARPREVVLATKGDDGRKEEEKEKEEEKLEIQPRTRTSNPFGAARPREEVLAAKGEDWRKIDEKLEAMKMREAPPPERRSFGRRGSPVRGEDNGSRPLPESHVEGAWKKPDAVQAVGESEDGSDKLNTAEAARKFEEGFDN

SEQ ID NO: 173639 - protein, 104 aa, Oryza sativa
  Clone ID: PAT_MRT4530_71657C.1.pep
MTGRQCSVAVASVSSAVAARRYTSSVVAAASKSGSASAGGGVEVGHVDVGGGVGNEVAAVWRKRGRRRRLSPRRCGGGVSDGGGDDDDHKTTARYGGSVGAGMP

SEQ ID NO: 173640 - protein, 174 aa, Oryza sativa
  Clone ID: PAT_MRT4530_71658C.1.pep
MDRRVVTVQAEEDEMVRQRQRQRQLVRERGRRIKAAAELGLARSSSGGRQWGRALGRRALLLRKGPATAALSSSTLLLETSAGQEESKQGKAMEGEAEQEEEEEEVMVDEKVAVLRQLVPGGEAMAVERLLDETADYIAALRAQVGVMRALACLLSGLGSPPEKEISVTPEKPI

SEQ ID NO: 173641 - protein, 335 aa, Oryza sativa
  Clone ID: PAT_MRT4530_71659C.1.pep
MEEGSNKREGLPPQLLDLIPDEKEWKLREALGLGRSRNAGFDGEEDKKLDLKLGLPGFIEDDEAETLRDYRLQQESPSLSLSFFPKHSKTTSSTTTTTGAKRGFIDTVEDKTEGYNDQKQQARAGCGKELAVEEMIAAVSERKKGCCPPPPPPHGAPATPARNRPQTQGRGAAAPVVGWPPIRSFRRNLASSSSSKHSPEPQNDNANAKVTLTCKKNPLVKINMDGIPIGRKIDLAAYNSYDGLSSAVKQLFHGFLQAQKDQTNAQIAQQGADDKIFYQLLDGSGEYTLVYEDSEGDRMLVGDVPWKVFVSTAKRLRVLRSSELSHTLIGATARV

SEQ ID NO: 173642 - protein, 784 aa, Oryza sativa
  Clone ID: PAT_MRT4530_7165C.1.pep
MWRLRVAEGGGDPWLRTKNGHVGRQVWEFDPAAGDPDELAAVEAARRGFAARRHELKHSSDLLMRMQWPVGKSNWVSMFLASYEDCRMQRTQFAKANPLKLDIPAIKLEEHEAVTGEAVLSSLKRAIARYSTFQAHDGHWPGDYGGPMFLMPGLIITLYVSGALNTALSSEHQKEIRRYLYNHQNEDGGWGLHIEGHSTMFGSALTYVSLRLLGEGPDSGDGAMEKGRKWILDHGGATYITSWGKFWLSVLGVFDWSGNNPVPPEIWLLPYFLPIHPGRMWCHCRMVYLPMCYIYGKRFVGPVTPIILELRKELYEVPYNEVDWDKARNLCAKEDLYYPHPFVQDVLWATLHKFVEPAMLRWPGNKLREKALDTVMQHIHYEDENTRYICIGPVNKVLNMLACWIEDPNSEAFKLHIPRVHDYLWIAEDGMKMQGYNGSQLWDTAFTVQAIVATGLIEEFGPTLKLAHGYIKKTQVIDDCPGDLSQWYRHISKGAWPFSTADHGWPISDCTAEGLKAALLLSKISPDIVGEAVEVNRLYDSVNCLMSYMNDNGGFATYELTRSYAWLELINPAETFGDIVIDYPYVECTSAAIQALTAFKKLYPGHRKSEIDNCISKAASFIEGIQKSDGSWYGSWAVCFTYGTWFGVKGLVAAGRTFKNSPAIRKACDFLLSKELPSGGWGESYLSSQDQVYTNLEGKRPHAVNTGWAMLALIDAGQAERDPIPLHRAAKVLINLQSEDGEFPQQEIIGVFNKNCMISYSEYRNIFPIWALGEYRRRVLAADK

SEQ ID NO: 173643 - protein, 59 aa, Oryza sativa
  Clone ID: PAT_MRT4530_71660C.1.pep
PPPHRCSPFRRPHHRAPPPPPWPPSPPPPPSLGRPPPSPTRTSSPPPPWRRRSSSCSGG

SEQ ID NO: 173644 - protein, 107 aa, Oryza sativa
  unsure (1)..(107): unsure at all Xaa locations
  Clone ID: PAT_MRT4530_71661C.1.pep
YGIPAWIPIIPVYVKEIYHVIETESIDGRSPTQTRLGFYHIVMGPISPSSTWRSTDPWYKRDPXGQDLRHRISPPTHPPQPTKPEPTGAKSPGDLVEPTRLRSRRYH

SEQ ID NO: 173645 - protein, 63 aa, Oryza sativa
  unsure (1)..(63): unsure at all Xaa locations
  Clone ID: PAT_MRT4530_71662C.1.pep
ELLLPSRCRYVPTWRVHSMQAYQKGGVAKGTILTVWDICPXSAFGGDGYEPTKWLDEEELSKE

SEQ ID NO: 173646 - protein, 38 aa, Oryza sativa
  unsure (1)..(38): unsure at all Xaa locations
  Clone ID: PAT_MRT4530_71663C.1.pep
APVKDGKLXIFKGQAGDKRWFKGPKKFFKKTTSSFKVG

SEQ ID NO: 173647 - protein, 93 aa, Oryza sativa
  Clone ID: PAT_MRT4530_71664C.1.pep
EHQHGRGRCQPNRYNGMCKNQGCCYSENRATGQNYVAFNLILILHPQCMMAKILLSSSSQCLHFRSGESTSSLSLSALPPIKDTLLLCLLPPK

SEQ ID NO: 173648 - protein, 952 aa, Oryza sativa
  Clone ID: PAT_MRT4530_71665C.1.pep
MNSKENVQKREGLGSSGKNSGGQKDRDECRTSQPFRSQSNAQKNKQQKKPSSSGTSSPVLRQNNQKQNSMVSRGKSAPNKSVSSQQGRKMAGDSSTGKLKNASKISKGGSRKDIVESISCDKEGSSSNNKDFPQKKRLIERNSTNEKGMFVPEKSAARLQKQVQPNVVMDEHIKWNNDSKDSTDVVSFTFTSPLVKPSAGPSRLSGKWDTRSNFNLDAINEKDDSDKKSEGLSSVGLNFVNGDALSLLLEKKLKELTSKIEPSINFTRGDTFVPANFSLEEPVVSSSSNWDMESGVFDCSPSEGKPSQYVDYCQSAQSSTKGQIFRGSSSDGSKGYSSSSEVKNMPKNFLSNPPSVDAEAKTTDSVSSSSIDASDTSASIDASDISDITQCSKKSRNSELEYIGDVLGNVNLTKGGLGKLLFDCVSECLETRRLTYFRAGYAAWSKGMAAMSRGIETEVCNEIGGWRSMGEWVEDELVDKDMSSGLGTWVDFRVEEFETGEELEREILSSLVDEVIGDVFVRRRDGRSAPWTTTFDSICSTPFSSAPSSPGRSPATGGGYFFSAPASPIHHLLLSSSSVASGVVSGAGYGGVGDAEFEFGGPGGPMISADELFHNGQIRPLTLPPLPDLDPGSDDDDGGGGDFRPGPVRGRELTLRSGSVHRRTRSMSPLRGASPRLKLLNALVPAPDLGSEPTPSHSAGSEEATPPVTASSRSSSSSSTSSSSSSSSSARGSRRWVFLKDMLLHRSKSEPGGAHAHDAPAKPEKAWQFSPSWASSRDRIAAKLRAARSPLPPQPQSEASSDAGGGEEAQATRGRARGGKGRRRSSTVAAAHERLYAARNRAQAEEMRRRTFLPYRQGLLGCLGFSSRGYGALHGFTKTLNPVFSRAVRPQQSTTFPFPSHGKRRGRTIHMGGGGLTPGTCRVGVVVVVVPESSSSSARRLALPSSSPAAAA

SEQ ID NO: 173649 - protein, 69 aa, Oryza sativa
  Clone ID: PAT_MRT4530_71666C.1.pep
TPIGRLGSSSRPGYFLFRSPPILVESSTGCRSIAISCRGRRYYCRLRTANTMGAVRQGRHNLPTRTTVG

SEQ ID NO: 173650 - protein, 93 aa, Oryza sativa
  unsure (1)..(93): unsure at all Xaa locations
  Clone ID: PAT_MRT4530_71667C.1.pep
RHPPLXSSLDYVXARNPPIRRFLRLPRALSWMQRXSAPLPXNYTHAARXGAARSLFFSGXVALDFWGKKEXKGVWSVVAWRGXDEVAXVSCGL

SEQ ID NO: 173651 - protein, 446 aa, Oryza sativa
  Clone ID: PAT_MRT4530_71668C.1.pep
MYGEDVRTLAELSIDDYLYPDADFYKVSGLPPLLLPPATWDLSRGRWVFDNTSLPAYREKECTFLTKQVSCLANGRPDDLWQYWRWQPNNCSLPTFDARRFMEKMRGKRMMFVGDSLNRNQWESLVCLVQPILSKGRKKIVKRGSFNIFYAKEYRATLEFYWAPFLVESNSDNPNFHHIDQRIISPERIESHANNWKDVDYLIFNTYIWWMNNEDIKVRRPNSTSWSDHDEVPRIETYGRVFKTWSTWLEQNVDPARTSVFFMTISPLHNSSKIGIGGRWFNTDAVITFCQFNIDEPCISATGSLELWNILKYRHRVRWFPAQWGNPNGIKCVKETLPVLNYTKPLDLNHDMRMYDLVAKVAKNMKNVPVSLIDITRMSDYRKDAHTSLYSIRQGKLLTPEQKAGPQKYADCIHWCLPGVPDVWNQILYTRILSKSFPPSHPLPPQ

SEQ ID NO: 173652 - protein, 92 aa, Oryza sativa
  Clone ID: PAT_MRT4530_71669C.1.pep
LAHPVFLHKILEVSIRGEEERTLDCPCHVVPIYRLDYFSLGFPQIREISKKMCHHYARAGGSGIDFLFMFASRMLLLYEFRVLLEYKKNPLI

SEQ ID NO: 173653 - protein, 161 aa, Oryza sativa
  Clone ID: PAT_MRT4530_7166C.1.pep
FLLPHPPPKKSKKKKKKKNIYLPRNNPVPFPPGKRAIKGSSPPKGAPPLGPTPPPFTKTGHLTGGNKPAGGFFLPRQNINKKINIILGEKTLGGVGGGAPFPPNFSPPEKAKRGGGGERPFLPAKGLLGGSPAEKKNPPFPHGSQKTPPLWGKGGGPKGPP

SEQ ID NO: 173654 - protein, 106 aa, Oryza sativa
  unsure (1)..(106): unsure at all Xaa locations
  Clone ID: PAT_MRT4530_71670C.1.pep
SRPRGEPSRSFXAGXMPSNEAAAXGXPDAAVEGTVXPQQXRPRGAAXPGEAASSXWPSRGXIQAQARXRGRRXXPCRSGEDLVPRAAAGDGXASFGSAAALPRPRP

SEQ ID NO: 173655 - protein, 166 aa, Oryza sativa
  Clone ID: PAT_MRT4530_71671C.1.pep
EKLGTLDLPPSTDLSEPRRHEVDVLLRDDDRATMTPHASAPSHSLMALYAKFLGVSDNSAELAMLAILVSVAFAQILAILSNSFAVGDAAAGYEYDGAADHPVLRMAVSTLTVAVPATFYVGVMELYARVTPVAPPLRRLLAVLAPGMAWITLFLGMPPLVVLLLG

SEQ ID NO: 173656 - protein, 128 aa, Oryza sativa
  Clone ID: PAT_MRT4530_71672C.1.pep
MHVLVPIKSVEEKRHQQHLLHGRKKLNSLFSASPGLTVFCMSPDVDACTSDGEATPQSSEHRHRQCCHVPCKIMKRMDASGEDVTTMIRRVRAPLLIAVAAVELILIACFSCNTRDAHCQPQNGAGSK

SEQ ID NO: 173657 - protein, 58 aa, Oryza sativa
  Clone ID: PAT_MRT4530_71673C.1.pep
STSIAWCSFRIRSIYEPLKLGFTDQRPQVTRPVDPSHTKMGESNFEFGPCHLPYPKNG

SEQ ID NO: 173658 - protein, 239 aa, Oryza sativa
  Clone ID: PAT_MRT4530_71674C.1.pep
MSKKIVVKLDLHDNKDKQKAMKAVSSVVGIDAISMDMASRKMTVIGTVDPVDVVSKLRKASWAAYIESVGPAKEPEKKEEKKEEAKKDAGGGGGDGKKEGGDGKKEEGGDGKKEGEGKKEGDGGGDKKEGEGKKEGDGGGDKKDGNGDGKKEGDAKAAKKEEGGGGGGDGGGKKPAAVAPMPMPMPLHHLPPQYFNMEYMNQYHRPPPPPPAYPYVPPPQYYYVRNMSMEENPNSCAIC

SEQ ID NO: 173659 - protein, 59 aa, Oryza sativa
  Clone ID: PAT_MRT4530_71675C.1.pep
NPLSGELNNVQKIQYFLQRMNARITALCTPIREKNHGHQHLFVYTENDLEERPHGSQVL

SEQ ID NO: 173660 - protein, 123 aa, Oryza sativa
  Clone ID: PAT_MRT4530_71676C.1.pep
GRTEREGKSGKGILLLAPWEEYFLNEIHDLPVQKSQTPNIDEEMKRKVDGSIKIVDMSIKEAAYHAWLGYYNSIGDVGRDKTMLVDLANRFCKSIGLEKPPALYRKTALKMGLKDVPGIRIRK

SEQ ID NO: 173661 - protein, 36 aa, Oryza sativa
  Clone ID: PAT_MRT4530_71677C.1.pep
RRRSAEPPPGYPYAQGQGGTQSTDPKNTNVVELTPV

SEQ ID NO: 173662 - protein, 85 aa, Oryza sativa
  Clone ID: PAT_MRT4530_71678C.1.pep
PLGWGTGSPKKIKEFPSTQIQIGGLPMLAVMGVWFPAKSRGSGPLCNLFAHLADPGHATIFRAFPPKSGVLQVLECYPWLPMEED

SEQ ID NO: 173663 - protein, 74 aa, Oryza sativa
  Clone ID: PAT_MRT4530_71679C.1.pep
YTDIVTPHQRTDRCFDFPGTKDRPKSSEKTNEITTDAHTKSFLTEREKIRSIRSYRDRLRFLFDRMRRILHAMQ

SEQ ID NO: 173664 - protein, 491 aa, Oryza sativa
  Clone ID: PAT_MRT4530_7167C.1.pep
MEMACLPGNAMATDENGADDRAGGESTVDHLRSHMNYGDMDLSGEEHVPKARKPYTITKQREKWTDEEHRLFLEALQLHGRAWRRIQEHIGTKTAVQIRSHAQKFFSKVVRESSGSNTGSGGASAAAAAAAIQIPPPRPKRKPAHPYPRKVDGAAKKHVPALRQLEKPPLWMQSLSEQEEGSPTSVLTAAQIGTEALGGGFSNNSSGSGSLAPSAAGTDEHVDGGGSPASSVDREDGCLSPSIPTAELAMQAPNTKMSIATTDAKEASSEASVFRLFGKSVVVKDSDQLHLLNGSNIATSGSVERATRNILVPSFAAAPEGSSSNPWPSSMQQFLYFLPRSDGFAAQPVMPWLSYNGSLPCALFYPAAAAAANQQCHRDSEGVEFRVSQREGSLTGSNTASSVVLGSSAAVPAAAAAAQNSDVAESRGQGNSREAAASPRLTKCESSASVTLLQRGFMPYKRCAAESELLRSEAAGGEEAVADGELTRLCL

SEQ ID NO: 173665 - protein, 602 aa, Oryza sativa
  Clone ID: PAT_MRT4530_71680C.1.pep
MKYVLVTGGVVSGLGKGVTASSIGVVLKACGLRVTTIKIDPYLNTDAGTMSPFEHGEVFVLDDGGEVDLDLGNYERFLDIKLTRDNNITTGKIYQSVINKERRGDYLGKTIQVVPHITDEIQDWIERVAMNPVDGKEGPPDVCVIELGGTIGDIESMPFIEALGQFSYRVGPGNFCLVHVSLVPVLNVVGEQKTKPTQHSVRGLRGLGLAPDILACRSTEPLEENVKAKLSQFCHVPVSSIINLHDVTNIWHIPLLLRDQRAHEAILKVLDLQFVGKVPREPKLVEWTERASKFDKLKATVKIAMVGKYTGLSDSYLSVLKALLHASVAMGRKLVVEWVPSCDLEDSAAKETPEAHKKAWKLLKGAEGILVPGGFGDRGVQGKILAAKYARENNVPYLGICLGMQIAVIDFACSIMKLPGANSTEFDPDTMSPCVIFMPEGSKTHMGATMRLGSRRTYFHATACKSAKLYGNARFVDERHRHRYEVNPEMVPEFEKAGLSFVGKDESGRRMEIIELPSHKFFIGVQFHPEFKSRPGKPSPLFLGLIAAASGQLETLLQPSSNIVNPNPMPRFPIPKKTIYHAKKPLDSLVNGYFANGNVIHT

SEQ ID NO: 173666 - protein, 64 aa, Oryza sativa
  Clone ID: PAT_MRT4530_71681C.1.pep
ALEPPYMFPLYDPSANPPGQVPLDFALDENFGVDIIPEIMWPEMLPFPPKVVAGVNFFPARTNL

SEQ ID NO: 173667 - protein, 47 aa, Oryza sativa
  Clone ID: PAT_MRT4530_71682C.1.pep
DESGRSHPLKWRSLISCWSGTAPTRPSFKQARYVCVRVRVSVAERVA

SEQ ID NO: 173668 - protein, 194 aa, Oryza sativa
  Clone ID: PAT_MRT4530_71683C.1.pep
MGSSEMTATEVAALLDLKPHPEGGYYTETFRDGSVSVTTAQLPPQYKVDRAISTAIYFLLPSGSVSHLHRIPCAETWHFYKGEPLTVFELHDDGHIDLTVIGPHLEAGQRPQYTVPPNVWFGSFPTLDVESFASDGSVLVKSRKRDPELHYSLVGCTCAPGFQYEDFEMANFDDVKSIAPKAEPFLKYLIPSTK

SEQ ID NO: 173669 - protein, 139 aa, Oryza sativa
  Clone ID: PAT_MRT4530_71684C.1.pep
MVSKKLRPSNASDGGAAQTGCSTRPPGMAAETFFTAAPRPAIPRRKKYTEGPSTCHRNTKTSSNRKTRDAGSLNYTKPVTRNPLVVLHPVLSDVAAKSAWDPQPLLLMIGPSTSVFGHHGGLVFLRADDWLVGPDALWA

SEQ ID NO: 173670 - protein, 215 aa, Oryza sativa
  Clone ID: PAT_MRT4530_71685C.1.pep
MAAGNFWVRYAQQFSNFNLNSLMTVELRAMLSITLCLYGYHTEIDQLRAITIPTSEVAIGHMSLFKQKSAGHSAQRRLPPKPVAIASGHRRLPTPTPGDYSAVHDLSQPPIVRGHIAARSLITISPSRRLTISRSPRRFLQIRAKSCSPSSAPPLGPRSYVANLQPSIAREDRAGAEVGRRGAHAGRPVRHCHWAPTSRFRADCRYSSGLAEPKQ

SEQ ID NO: 173671 - protein, 173 aa, Oryza sativa
  Clone ID: PAT_MRT4530_71686C.1.pep
MAAAATATRRPSGHVLSAAHYRSASPTRVKLAGGGARASVSVSSVSRRSCMCSPTNHPGSFRCSLHKEQKRSVHHKAAAAPSSPPSPTSPPASGGAVRLGGARRMGGSALVRIGAVESGQWARRALAATIRPSPAAQQAQHRRRVAGLRPRPSRLSAVSMAGDRAGDNHHHHR

SEQ ID NO: 173672 - protein, 256 aa, Oryza sativa
  Clone ID: PAT_MRT4530_71687C.1.pep
YSASPRARAADGRAHPPPSLTGGAHPSSPSSSRSRRPSRAKRRRIRRIPSSPFKIKWGEIFLVIPSPAFKWPDLLPQISPAPLMAAGSPAPVSFPAGRPLSLPTLFKPSPLLPRSFPPLADDLRPAHSARRDRLPPRRRLLRLRRAVADPVHHLAELADRRSAVVPIHPSRSTAFLRSGRLLCRRRRPGVSRGPPPLSPYPSPLLAAAPPCLWTLPATIGARAPSPAGRADVAASGRTVWPPRGARPSAARALGCG

SEQ ID NO: 173673 - protein, 103 aa, Oryza sativa
  Clone ID: PAT_MRT4530_71688C.1.pep
RHVVFRRGGRSLPPDPGRGQPPPPDPGRGSPPSSSSPSPPLLPPRRRRRRCPRAGKGGRGMPPPDPGGGGRIRASAASQPPPPRHARPRAGRRAALVRLRYTQ

SEQ ID NO: 173674 - protein, 158 aa, Oryza sativa
  unsure (1)..(158): unsure at all Xaa locations
  Clone ID: PAT_MRT4530_71689C.1.pep
TRYMMRVLESDFKKVVGISWXWWVFVVIFLLLNVNGWHTYFWIAFLPLILLLAVGTKLEHVIAQLAHDVAGKNSAIEGDLVVKPSDDHFWLGRPRIILYLIHFILFQNAFEIAFFFWILTTYXVLXPCIMGQVGFXVPRLVIGVTIQLLCSYSTMPLY

SEQ ID NO: 173675 - protein, 34 aa, Oryza sativa
  Clone ID: PAT_MRT4530_7168C.1.pep
LICVCHHLCFFGSRFNVSRSPHPRAHRINDVSLL

SEQ ID NO: 173676 - protein, 87 aa, Oryza sativa
  Clone ID: PAT_MRT4530_71690C.1.pep
PQELVPQLGVTQVYRDMELASMTRLLISTTLLEGVTMLATNVMISTLLRNGRTRIPTRALRFALMGYSRILWTCVATENSNMGSCHM

SEQ ID NO: 173677 - protein, 203 aa, Oryza sativa
  Clone ID: PAT_MRT4530_71691C.1.pep
MVAACERWLAAVEANALLRASLPDAGQHLNQQGGVTWANSNNQCLLLVGDIDRTNKSYICTLCSMWLAAEDRVESVGDGACARRRATGSGVRAAADNRPLSGSGGGGCPLSGSGGGGCPLPASGGGGEWASSDGEEVVDLATVTAMEWVAIKAKIPWSVTSHKNEEDVDLYLCEVVAELKLELGGGDSGNLYRFCKTPALALC

SEQ ID NO: 173678 - protein, 92 aa, Oryza sativa
  Clone ID: PAT_MRT4530_71692C.1.pep
TTRAGGPKKPWGGGARPRERGDKGRVGPTTNGPGAGKGQSAQKGNPKGKGGPAKRALKGGKRSPEGGKRILKKGKGGASLDRGPPETGKKNP

SEQ ID NO: 173679 - protein, 1155 aa, Oryza sativa
  Clone ID: PAT_MRT4530_71693C.1.pep
MAKNMKKMRVQLEKIAKQNKDFNLMPESSSTVQVLYDDRATSPNVEESVIVGRAQDKQRILFYLSDKILTQDFIILAIYGMGGIGKTTLVQLVFSDTKFREYSLVWVYVSQVFDLNKIESSIISQLPKMDLSMSDSEVAPTNRNILIVLDDLWENNGFKLDKLKLKLKVRTGAKVIVIVTTRDEDIARRFSNVEPYKLEPLTDGICWNIIKQKSAFEDRGDKERLEQTGREIARKCGSVALAAQSLGYLLHSKRLDEWESVKDNDIWNESTLEDASSPHHVLASLKLSYVKMQPSLKLCFGYCAIFPKGQKIVKDDLIHQWISLNFIKPSKTAGDYHDNFILLTMHDLVHDLARSVMFDEIQNDGLQGDTSGRNCRYALRTEFSKPLETLRALRFMGCSIDNRLHNDSFSSAKYLRLLDLSECSIQRLPDSIGQLKQLRYLNATGVQHETIPDGITKLLKLMYLSLRGSSGIQALPEFMGEMEDLMYLDLSDCSRIIRLPVSFGKLTKLVHLDLSHCTRVRGVSESLESLTNVEYLNLSNCKNIGELPGALGFKKLEKLPTSFGNLNSLMHFDLSHCLQVKGIPEALGGLTNLQVLNLSHCYNIFENDVYIRRKVEAIGNLKKLQYLNLSDLLNKKCHDKSTYVSFFECINTLSNLEHLDLSHNEYLRSLPDCFGSLKRLHTLDVSGCSFLDKIPPSIHNIDNLKFLHADTRIYLGKSMFCLLNESSVSLPHFVVQANANGSGSNLVLLQDVNPPKLEISSLENVRSINEVQIIKLLEKQRIEELKLEWAKDAVRFVEDIELLGEIIPPTNLMEFEIHGYNCTKFPAWLMGIAPYLPNLVRLTMMDMPCCISLPPLGQLPNLKELTLEKMKSVTKIDGDFCGGRRPFPRLKKFVMRDMESLQVWNTIYCSGVDGVSEFMFPILPELSIFRCTKLRLTPCPLRAEKWNIWGSDGVISSWEESAADIIASCSSPLVTTLSINCKVSLHEWRLLHHLPDLKGLIINDCNDWTISAEIIRALSSLESLTLERWYNQAQLPNWLGQLVSLKELKINRFEMNESQEDIKHLMSLQKLCLHRCTSMTKLPKWVGDLVSLQKLEILSCPDLKYLPESMGCLTSLKKLNISFCDDIESLPEGIEKLCKLEYISMSGCPKLVPIR

SEQ ID NO: 173680 - protein, 80 aa, Oryza sativa
  Clone ID: PAT_MRT4530_71694C.1.pep
MAKSEAAVKEPGSKSKLKLIIVIVLGVLLAIGLSVGATWYFMHSAQSKPAPAVAEAAPSGKQPAIYEPMAPAFVTNFKDA

SEQ ID NO: 173681 - protein, 113 aa, Oryza sativa
  Clone ID: PAT_MRT4530_71695C.1.pep
MPPAACGCGCRCLRLTGQVDNLGLGLFPMGDQIERSVESVVEFGTVTVATPSQRLDGGGCSPMPRGPPPRGVVPEVPIYPHLWRPERLRHAAFNVACSALNRSVTGQMTDGTG

SEQ ID NO: 173682 - protein, 93 aa, Oryza sativa
  Clone ID: PAT_MRT4530_71696C.1.pep
TQNLGQGRAQPTPRIQPSFVLGFGGHKTLHNLKFILGGGLIYFFWGEKTTPLVLRAPMGGARLGGAGHGTDQGDHTGGGSPLGGGPGHKVNER

SEQ ID NO: 173683 - protein, 181 aa, Oryza sativa
  Clone ID: PAT_MRT4530_71697C.1.pep
MPTTMSTLVSIKKLLSRHRWTIKCHALRSNNHEFNLSVLPRNGTQRQPQIGGGCRASTPTLRDVRRPKEFRPGAIEKYGGSTDPEEFLQVYPTILYTAGADDNALANYLPATLKGSARSWLQFITNFQGTYKRHAIEDDLHALTQNPGESLRDYIRCFNEYRNTIPEITDASVIHAFKSSV

SEQ ID NO: 173684 - protein, 85 aa, Oryza sativa
  Clone ID: PAT_MRT4530_71698C.1.pep
FYLDLYDPKFQQSHMMMYDFHYLTITQLIIIGYTFQSPDTHPTRGKAPGSTHSQLGSDHHHMDGKLKVQQSWGLQLAVCIKVDHH

SEQ ID NO: 173685 - protein, 80 aa, Oryza sativa
  unsure (1)..(80): unsure at all Xaa locations
  Clone ID: PAT_MRT4530_71699C.1.pep
KGPXNPPDILDKXMRKASPKQKSACPKNPPTGKCPPAWAQVEKLSGGANPARAKPKEPPPPLEAYCKANPETHEGRPYAN

SEQ ID NO: 173686 - protein, 428 aa, Oryza sativa
  Clone ID: PAT_MRT4530_7169C.1.pep
MQQQIQGAPQQKPWAYMTSDVMREKFRLWPKDSGNLYLHPYPEYFERVPLPNRYKVLDFSKFSGQDNVTTYELISRFLAQCGEASATDALKAFTWFSALPYNSVHTWADLEKQFHKYFYSGIHEMKLSDLTSIRQKHDESVQDYIQRFRDMRNRCFSLALTYSQLADLAFQGLLAPIREKFASQEFESLTHLAQQIGSEPDAHAYGAWQPGDRCLRGAPREALPSGITGERGSQGMRHEHNPARDNAEVETNAGSGMVADEVSACGVLTGNGPGALASRARQPRGKPLDGTPREVRLLGNTGAHGSPDPTPDFEHGQPPQAGSSAGRTQQRPVYYISEVLRDAKSRWASSRTPMPPGIFFEVIKTSSIQPPELTKPGDVPQERLTEEVPSPEAVIGAMKTVGTWMGEIRTYLLRAHLPEEDVEAERIA

SEQ ID NO: 173687 - protein, 415 aa, Oryza sativa
  Clone ID: PAT_MRT4530_716C.1.pep
MQPRATSQQVLLQQGVKNRRFRFGLAFEQKAQKVSAWEEQNAMQELLRGNKDVMSLAQGVVYWQPPEAAMNKIKEIVWEPSISKYGSDDGLPELREALLEKLRRENKLTKSSIMVTSGANQAFVNVVLTLCDAGDAVVMFAPYYFNSYMSFQMTGVTDILVGASNPETLHPDVDWLEKVLQENNPIPKLVSVVNPGNPSGAFIPKPMLERISELCRNAGAWLVVDNTYEYFMYDGMEHYCLEGNHIVNLFSFSKAYGMMGWRVGYIAHPNEADGLHAQLLKVQDNIPICASIIGQRLALYALEAGPEWIRERVRDLVKNRELLMEAMSPLGKDSVKGGEGAIYLWAKLPEKCSDDFEVVRWLANKHGVAVIPGSASGGPGYIRVSFGGLKESDTRLAAERLRRGLQELVTEGMVQ

SEQ ID NO: 173688 - protein, 197 aa, Oryza sativa
  Clone ID: PAT_MRT4530_71700C.1.pep
MRRLSGAEDEPAMNEQILSTWLGWTLYTRHLERRVVRARGVIKENDARIVGPVPILGIEDYVLVYHHCLAPDLNHCHPELDRRLPDLTDCCRHRHDERYCHCHDGRCGLASLDLRSSVLLDRCSLLVAKENDADVGVNWCSLFVVRENDVDGDQCCSDPDVLSVGRPDAHEDRDFREVVEWDLRLLVAIEHRGNVHQ

SEQ ID NO: 173689 - protein, 786 aa, Oryza sativa
  unsure (1)..(786): unsure at all Xaa locations
  Clone ID: PAT_MRT4530_71701C.1.pep
MSYYVDPHSXLPQYPTHPVYEYHSSTVASQVGGLGAQGYASMTSSHADNNVNTGVNQEASISTSLVWTQVGSIVFLVYTVMPISTGPKLLSXNENGAVTTSRNDILPTIPSTQVENGISTTPTPRKNPQAAEFCAPHRNXEPTRISIKKPRSSCPIHKASKHTLEDYPVILHVKAEFYACREHRIQRTSPTNITYCPIHKSRSHNFTSXIFLRTIKCHALXIQQPRVQPQCVAEERDAATTSDRFVGFVDVDPDESPVLHILEDQESSPSISPRDVNVINTAETSTSAAARTPAQXLQALNSILREPXDPALNPDVXLVGSTTXETMANLNSAFVEAATEPPLRDPPRGNSTGERSPYAQSPRATXDPTPPPRENHDLREHLDDRRRERRDQNNTDRHRHRSPSRRRENNDRGGRSNEDRDXQARNDHHDNGNNVRRDGGDNNQLDQGADGRAQGGNGXDQGRGSDDRRGRNPRFPGSERDRRCEHRSRSRAPDPSNPCSSSSPSSSSGRPPXMTXGREQPFALGGGCRASTPTLRDVRRPKEFRPGAIEKYGGSTDPEEFLQVYPTNPGESLRDYIRCFNEYRNTIPEITDASVIHAFKSSVXDRYITXELATRWIMSARKLFEIIDRCAHADDAFRRKEXKSKTGEKKKPANKDALESSKRRSHKSGKRKSSGEVLATDQTDPPKRPNPQNDDSRKQCCPIHKMNDHSLEDCHVFKKELARHIGIEKGKRVXVVEANTEAATPDFDSTFPDYDLDVSHGVGCLHNSSAETGPPLDYPECRIQFS

SEQ ID NO: 173690 - protein, 242 aa, Oryza sativa
  unsure (1)..(242): unsure at all Xaa locations
  Clone ID: PAT_MRT4530_71702C.1.pep
LIKSVLMLQQVYLLTALRAQQEMLRDTDTRRVVXKHFLWECSKNLVGEKHKVNWIRTCSPTINSGIGMLNLNRFVRALGVRWLLQENKAREKARSGGPLNTPWDNLVRLFIVANHNPINWDGSIIHFCDSAXSXGRRSKDLAPLVYAISKXKKKTLKHAIEESTWIQDLNFSNIDDVTVELIDKLVTIWSVVQEIQLADDQVDEITWKLASRGDSRAHIGIYLQVQFLDSVCTNYEIIIGKT

SEQ ID NO: 173691 - protein, 188 aa, Oryza sativa
  unsure (1)..(188): unsure at all Xaa locations
  Clone ID: PAT_MRT4530_71703C.1.pep
GATASIQHRNSPQRRGGAPXRPRVPTGNEEDDPPPPAPFALPSGRRWRCRSEPAAPKSRSWCHTWPRRGHPGCPATTPSHHRGLDDPPRHGLPPGGQAERVRGGGGGCRGGQAALPXPPLRPGRPRRAAAIRRXPRPPLTSHLXRLHAEPPLSAASVPVPGRPSRSQLXLAAGRHHDRMPSRRPRPPL

SEQ ID NO: 173692 - protein, 126 aa, Oryza sativa
  Clone ID: PAT_MRT4530_71704C.1.pep
KPRLSFSFVLSGSYSRTCQKLYYGDSIANYCNWQIAKHILNFSLCSASFRPNLAQSPSDRAVSSSPALKQLRVQVEKDPLNYYFELGIINACKLECYFELETSIAMPNEMLFLARNVDDIPYEMQF

SEQ ID NO: 173693 - protein, 102 aa, Oryza sativa
  Clone ID: PAT_MRT4530_71705C.1.pep
MARWRLAAPGEGHGVDAAAGRAATGLSVDAAVGRAVAGLADGVLGLMYAQGGGAGEELTGGSDGLANDGEELEDGAGIGGGVRCGDGEELVDGGGSGNSWAR

SEQ ID NO: 173694 - protein, 158 aa, Oryza sativa
  Clone ID: PAT_MRT4530_71706C.1.pep
MADVAGRDRSGLGPGKRKERVRPESTSRVLARVGSSYTRDDERRRRTGQGAAMAMGENGEDWFGEGLGFIGRQCRREKTICVVRKVAEEKEGELQAADELEVVTTGPRLIMARIAREGGEGAQWRWPRRRLARSALTAAVPDRSTPPLGRCRCQRQLS

SEQ ID NO: 173695 - protein, 88 aa, Oryza sativa
  unsure (1)..(88): unsure at all Xaa locations
  Clone ID: PAT_MRT4530_71707C.1.pep
MVGCEHIVLKVMLMTIKDRFASYSCETLTVPTTSQRGQRIYLLYSMVHCGAPDCEAARSPWGSLRSPCLWIXGVIMIQERCAMVDCVV

SEQ ID NO: 173696 - protein, 268 aa, Oryza sativa
  Clone ID: PAT_MRT4530_71708C.1.pep
MSTHCSPYDLYLILIGIFKPTTTGQSLGDEDNEVLARSLLKKKWLCIWTASPKAQYNKKAQAQDTANPSPHSSLNSPLSSAAAATLPLPQPPPLRLSPSRRRRSASPLAAAAAPPLPQPPPLPPPGDRMPAAGGLCLSPASARRLRSPPLPHQRQPPMRDRAPAAAGLRLSPNAHRRREIKRPLPPISTSPPAIQRPCRWRPPLAPDATGELELVSSKCRRSCVEFIPSTVELLPMVGGELELFSSTVKLLPSSPCSPAMSLAPSSRA

SEQ ID NO: 173697 - protein, 164 aa, Oryza sativa
  Clone ID: PAT_MRT4530_71709C.1.pep
MHIKEICLEGFKSYAGRTVVSGFDPLFNAITGLNGSGKSNILDSICFVLGITDLRQVRAASLQELVYKQGQAGVTKATVSIVFDNSDRSRSPLGYEDSPEITVTPQFVVGGRNKYLINGHLAQPSRVQTLFHSVQLNVNNPHFLIMQGRITKVLNMKPPEILSM

SEQ ID NO: 173698 - protein, 61 aa, Oryza sativa
  unsure (1)..(61): unsure at all Xaa locations
  Clone ID: PAT_MRT4530_7170C.1.pep
MAASAAQEGGPPRDFSEGAVRARVVELVKKFDRIDADKLAIGDTFYCHEPNSQCLWXVFLQ

SEQ ID NO: 173699 - protein, 147 aa, Oryza sativa
  Clone ID: PAT_MRT4530_71710C.1.pep
MDFSGGSTNGGGVASRRMQAEQWLDIAGKLLAAWDLVGCKRFIEQTVETSSSPSPMSSSPPSRSSTRATLTHSPSSASPDTNHADHVAVSCAYRRLALLSSSRAATHPGTNVALSLIHDAYAILSDPNHRPRPSSAALVPHPHVTSS

SEQ ID NO: 173700 - protein, 483 aa, Oryza sativa
  unsure (1)..(483): unsure at all Xaa locations
  Clone ID: PAT_MRT4530_71711C.1.pep
GVGEEEAQRVADLFNCKRGELPITYLGMPVSDLKLIAKDLSIPVSKIEKRLATWKCSFLPYGGKSILINXLLSSIPMYMMGFYLLPAQVHHKMDAIRARFFWEGLDGKKKYHMIRWDALCRPKEDGGLGFINTRVMNEALLCKWIYKLESGNTSPCCELLRXKYFSNGGGFFQSSAEGCSQFWKGLHEVKRWTKFGSAYKIGCGESIQFXDIWLGESPLKIQFPYIHSIYSGPDKTVKQMLSEGEWEIXLRRSLGQDELPDWLRLQDLLGTVQLTTERNIMVWKLNQSGKFTTKSLYKEIVFGGVKDIMLQELWKSPTPPPXLKTRVFMWVMLKGRIQVAKXLKKMNWPGSPLCKLCGLEKDTNHLMFRCPPACFLXCCYRDAFRWNTVPTSKNDLLNLFQNQRRSDIRVLWCCFVVGAWAIWSMRNDWVFNNILLRNVVSLPHKALSFMLQXALASTQLRGELEKVHGLLLASIRAVGDSST

SEQ ID NO: 173701 - protein, 50 aa, Oryza sativa
  Clone ID: PAT_MRT4530_71712C.1.pep
DTPTVASAPWEPLIVVRVDTTYGMAVEWSPELGLELSTDQSRHPLNRCTL

SEQ ID NO: 173702 - protein, 181 aa, Oryza sativa
  Clone ID: PAT_MRT4530_71713C.1.pep
MGGATSPAAPCLSVCLLPLLFLFLHGCWSCVAIERERTLAMIKPDGLSGNYTERIKEVILESGFDIVKEAVVQLDAERASLFYAEHSGRSFFDSLVKYMTRYLCRKTCVFCSLLKSSQSQAIVNRFDSEAKISNPNSIRAMCGVDSEKNCVHGSDSPQSAAREISFFFGDVRSDTVEHDEL

SEQ ID NO: 173703 - protein, 108 aa, Oryza sativa
  unsure (1)..(108): unsure at all Xaa locations
  Clone ID: PAT_MRT4530_71714C.1.pep
YSICITRLNHILCILGPCRIWGGDASRTEQQWRRILPHEQQRGEKGRTWCRGSKLVEGCVHTVKHVPEILGGGGGREEELAXGKKGGSAGAGEGSCTXCTGEEGRRHR

SEQ ID NO: 173704 - protein, 65 aa, Oryza sativa
  Clone ID: PAT_MRT4530_71715C.1.pep
PTRPVILLLPPRPSSLLRLALRTYSAGDDDDPHQSRERAAPRRSSYCRFRRIHPGGSMAAKLSFS

SEQ ID NO: 173705 - protein, 152 aa, Oryza sativa
  Clone ID: PAT_MRT4530_71716C.1.pep
DKFTRIKYKLVLADCYKGFTDIRTPAGPIDQNPIDIDCAKQISQAVAVFNLVRANIDLALSAEPEFFVNRILPNFGVNTVLARPSSSWAYAELGRSDPESVNSALGRTCGKARSCLSNEHREGHTRSRRPGPLVNKRPYFIYLIPVRCQDLA

SEQ ID NO: 173706 - protein, 82 aa, Oryza sativa
  Clone ID: PAT_MRT4530_71717C.1.pep
GWPIRALIAHWSGARSSRPTARRASSRSLASNRSMWSNTGLYPARTVWSTSLTLHLRIMHKTWPLLSPHGAEEWKWITAQCA

SEQ ID NO: 173707 - protein, 125 aa, Oryza sativa
  unsure (1)..(125): unsure at all Xaa locations
  Clone ID: PAT_MRT4530_71718C.1.pep
MSPDTDIRDXPRQTQSGAYGGRQEGXSAISDLDEFIFEEEDNSAVDYVLMNXEQHRLRPTXCRAITCQIRGPNMYXNPCLHLFYLNLTYTLVPTISILSKYRSRDLKHRQCKGIPERLYPPTVFV

SEQ ID NO: 173708 - protein, 144 aa, Oryza sativa
  Clone ID: PAT_MRT4530_71719C.1.pep
TSRRPRRRQDVGGQPDHDVELDLGPRRPAATPVRRRPRTRRRSAPARQSPPPAASAPRASPSPRPRRASATRRPSRRARAGARRRRTPRRRRPGRPAARAPSRRAAAWRSWRPWPRRSRGRSWPRWRRARARHRWRSPCPPAAS

SEQ ID NO: 173709 - protein, 1011 aa, Oryza sativa
  unsure (1)..(1011): unsure at all Xaa locations
  Clone ID: PAT_MRT4530_7171C.1.pep
AFKPSLREVHWPTXFHLGPVEKYGSNTNPEEFLHIYLSVLCAAGANNNTLAXNYLPTALKGSARTWRIHLPRSSIGSWANLWRQLVANFQGTYKRHAVKDDLHDVXKNGELLKDFAQRFNECRNTIPKITDSSVIRFKXRSXDYYTIQELMMRKTTSAMKLFEIVDGCAHADKVVXQNDGKGKVLDEKPPTKKEEPETSKKPXQPHKRNKKRKTEGEVLGTKTEPQQPRHFEAQGEASGRQWCPIHKTGSHSLVACSIFQKEMAKXMALLQDQRVHLVEKEYRRPQSDDNGNFPDPDHHVAHIFGKSTSYSSNALDVMGIPRSELKPSNXPFHGIIPXPSSKQLGKITLLVNFALPXNFGTKKITFNVTEFSTAYNAILRRTTLVKFMXASHYAYQLVKMLGLKDVITISRNTNMVVQFDKRSLNMVKQITTTLAADEPPXNELTLINFLXDNIDVFAWQPSDKPGVPRXVIVHKLMVRPKPTLYRAALRSVRPNPRFDVGAEEQFASEDAVVDRKHEAWEICLTPVQVXKLAFGCMSVPVDLILQSTRNKDKEAVVKSINDSRSANCRXISFISELMSYVNRSAIINSLQQSSSSILFRYHLHLXMLILPNLVVNSYARTVLGSRQVHSLNILNPFVKCFVLNTSISNSDXDHVNSYLLSHISQQLRLRLAKCSLLPPAKKLIGCMTALGWFMAKIGEKGLPLKKHGKFEWTKEAEDAFLDLKTYLXKPFLPCRPKLHEELFLYIAATPYSISIVLFIEHDKIKXLIYYVSQVLHDAKTRYPQIQKLFYVVVVTSXKQRQCFQAYKTMIISSYPLEKVFXSNDVARSIAKCVVELNQFDVIVAPKTTNRSQLLEDSVADKTILVNSMVDNMAKEIWIVAFDEVFNSQGVGLGVILTSPTGDKLKYVIQLEFRATKNTTEYEGLLARSXAATTLGIKXLVIKGDTDXELVTDQVHENYKCSYPELTKYLVEVCKLERRFDGFEVRHIYRRGNSEPTTIDISYNHTDARRYW

SEQ ID NO: 173710 - protein, 787 aa, Oryza sativa
  Clone ID: PAT_MRT4530_71720C.1.pep
MPPPRRRPPSAADAAALRRPYLRLVALSSTLRHLDQILAVSLASGHYPLDPAPATSLLLRYASLRAPTGHLLRLFRGFPRPDRFLRNALLRSLPSLRPRLLFPCPDSFSFAFAATSLAALCSRGGGAASSSAARALHALAVAAGYAADTFVASALAKLYFVLSRVDHARKVFDTVPSPDTVLWNTLLAGLSGSEAVESFARMVCDGSVRPDATTLASVLPAAAEVADVTMGRCVHSFAEKCGLAEHEHVLTGLISLYSKCGDVESARCLFDMMEKPDLVAYNALISGYSVNGMVGSSVNLFTELMTLGLWPNSSTLVALIPVHSPFGHDLLAQCLHGFVLKSGFTANSPVSTAITTLHCRLNDMESARKAFDTMPEKTMESWNAMISGYAQNGLTEMAVALFEQMVKLNVRPNPITISSTLSACAQLGALSLGKWLHRIITEEDLEPNVYVMTALIDMYAKCGSISEARRIFNTMDNKNVVSWNAMIAGYGLHGQGAEALKLYKDMLDAHLLPTSATFLSVLYACSHGGLVEEGWKVFRSMTDDYAINPGIEHCTCMVDLLGRAGQLKEAFELISEFPKSAVGPGVWGALLGACMVHKDSDLAKLASQKLFELDPENSGYYVLLSNLHTSKKQYSEAAVVRQEAKSRKLVKTPGYTLIEIGNKPHVFMAGDRAHPQSEAIYSYLEKLTAKMIEAGYRPETEAALYDVEEEEKEHMVKVHSEKLAIAFGLLSTEPGTEIRIIKNLRVCLDCHNATKFISKVTQRLIVVRDASRFHHFRDGVCSCGDYW

SEQ ID NO: 173711 - protein, 71 aa, Oryza sativa
  Clone ID: PAT_MRT4530_71721C.1.pep
MSPCVRAAPGSGAGQCGSPHEAEQGAGVTGVGWRRGASSCCRRSRSPPPLSSTTAALACCPCMLRPPPLGT

SEQ ID NO: 173712 - protein, 188 aa, Oryza sativa
  unsure (1)..(188): unsure at all Xaa locations
  Clone ID: PAT_MRT4530_71722C.1.pep
TNMIPLEYSRVKCYNGISVRLRMNSVTAIYQNLDPNSGLCNKTRLMXRAFXDNAIDAEIVGGQHATKKLFIPLIPLSPSDDISLPFNFKMKQFPIRFSFTTVINKSXDXTIPNVAIYLLDPVFSHGQLSVTLSRGVGRQPLRILAKPKKQVYPTGKSTRNIVYKNVHDHEQRQVHQHPLILLTNILLF

SEQ ID NO: 173713 - protein, 34 aa, Oryza sativa
  Clone ID: PAT_MRT4530_71723C.1.pep
MALLGKDNSKAVVFLAALMVMAIAFSSSHAAQGI

SEQ ID NO: 173714 - protein, 84 aa, Oryza sativa
  unsure (1)..(84): unsure at all Xaa locations
  Clone ID: PAT_MRT4530_71724C.1.pep
SRGGFAPKFRPPFKGLVWAWPGFPPRQPPPPPGLKTXPGPGFFPFGPPPPGFGFLPPLVPPVFLFPPPGLVILKSVPSPNGGFF

SEQ ID NO: 173715 - protein, 35 aa, Oryza sativa
  unsure (1)..(35): unsure at all Xaa locations
  Clone ID: PAT_MRT4530_71725C.1.pep
IKPACYRLIKXLVXWETMGVSTYEFVDVMYQCYSQ

SEQ ID NO: 173716 - protein, 118 aa, Oryza sativa
  Clone ID: PAT_MRT4530_71726C.1.pep
CCFRKEEKEIKGVEREEEKTFPQSHHAFTHPYSSSPTSIRAPDLLSRLPTFPAVGAVADIHDASPGAGGLAPAPASLALTPSILPLRLVPTCLCLCSLHPTPAFILLTSSNLLFFPSN

SEQ ID NO: 173717 - protein, 81 aa, Oryza sativa
  Clone ID: PAT_MRT4530_71727C.1.pep
FFFFSSKSLSFFFSLLSRTVKSNKHIGDYHGMVIISSYITPSTTPRVHQFFVAISVHATSQNFQLLFCMGFSASHHTHTQS

SEQ ID NO: 173718 - protein, 256 aa, Oryza sativa
  Clone ID: PAT_MRT4530_71728C.1.pep
LEPKTEEVCSCTARLEPICNGFLPWPRHTVGGSTLVLHLHDWVSEGRRVRAWREEASASDGGKMILLVGVHLGARDWLGRWWLVVVILACFFCMAMSNACFRFRSLPPQWYAPVDACCQRSSHGGRCRRSSSDGVRGDIADDFACNGVSCCHCFMGGGGGISQPVSSGGGLLPFPLYPPPEGRCPHGRRVVRRRIRWVFGRIWPPLHQIRRPGVRLGGGDAAATCGGCVKGGGWLAVVFFVLVGEEDIKVPVDNWQ

SEQ ID NO: 173719 - protein, 85 aa, Oryza sativa
  Clone ID: PAT_MRT4530_71729C.1.pep
WGSTQTGYRFLLLAVQEGSSSSFVCNPTLIFLFRFSFSYSLVMSHQMRVVKYKCQSQFLTSYCLLYQTMDSFWSLIWRGDVSIRC

SEQ ID NO: 173720 - protein, 54 aa, Oryza sativa
  Clone ID: PAT_MRT4530_7172C.1.pep
CVECARVDADGRPLQSAVCTAILRMGGGVPQDGRHRTGPTRPPTRPPTRPPTRP

SEQ ID NO: 173721 - protein, 53 aa, Oryza sativa
  Clone ID: PAT_MRT4530_71730C.1.pep
PVYTDVGHTDAEKFSVLQAYGLCLVLYHIYIQLISWITNVWQNQNDCIMRTLL

SEQ ID NO: 173722 - protein, 236 aa, Oryza sativa
  Clone ID: PAT_MRT4530_71731C.1.pep
MKSPASSHREQQWLSSVYGSPAAIGGSNRFENKRENVENVLAHPGLDSAKGLVHVLSYGTRVLTKQRNGGSEVQGAVETVVVGQRQQNSGVDVAGSTQGANCNFESTGVLRMSHRGCMREESGGNSPELGVASVVMFHRREERGTHWGCTATMTKSPEPGKMTELWAFWAWGVFSWTWNAMWGVCCCFWCFVLGNKSSKKPGLEILLVEGDVESKCAEVDWVRSLWFRFDGGMNMG

SEQ ID NO: 173723 - protein, 408 aa, Oryza sativa
  Clone ID: PAT_MRT4530_71732C.1.pep
MAVFRLDHSVDQIQEMKSPASSHREQPWLSSVYGSPAAIGGSNRFEHKRENVEDVLAHPVLTKQRNGGSEVQGAAEVVVVGQRRQNSSVDVAGSTQGTNCNFESTVVLEMSHRGCMHEESDGNSPELRVASVFFTTKPHACDPSSLPKYPPSKEYDAKLRDEEIRRKRMIALKGQNNETRRRKQPQSGNGDLQQRRAQANRKGTRMDDGIRGFRIDPPARVGENGIAQRVPLLHAGRSSSTLGRSNETDEKTQRFYTSQMPNLSCAAEPRGGATRSSNHGDGAKRPHLREHPSRSRYRQLTAVDSSGRSEWTHQFQERPSSSHRKEGGAANKEHTVVMRANVEACMAYHQVNGSKKNRIHYSGPLMPHGGNMEEILKEHERQIQQAMRDMKEYMKNCYRRGDRCKVYN

SEQ ID NO: 173724 - protein, 90 aa, Oryza sativa
  Clone ID: PAT_MRT4530_71733C.1.pep
MCGGDAGGEGRRTVVRENEDLSGGPHKRSACENGFSQADNELHPGLHFFVGGYLAPRVIFACENKYPTSASGIEQSAQTIRIVPAQFGLP

SEQ ID NO: 173725 - protein, 289 aa, Oryza sativa
  Clone ID: PAT_MRT4530_71734C.1.pep
MEGKEEDLRLGANRFSERQPIGTAAQGAGDNKDYKEPPPAPLFEPGELKSWSFYRAGIADFVATFLFLYITILTVMGVSKSSSKCATVGIQGIPWSFGSMIFALVYCTAGISGRHINPAVTFGLFLAKNVSLSRAIFYILMQCLGAICRTGFVKGFQQGLFMGHGGGANVIATGYTKGDGLGAEIVGTFILVYTVFSATDAKRNARDSHVPILAPLPIGFAVFLVHLATIPITGTGINPARSLGAAIIYNKDHAWNDHWIFWVGPFVGAALAAIYHQVIIRAIPFKSRS

SEQ ID NO: 173726 - protein, 371 aa, Oryza sativa
  Clone ID: PAT_MRT4530_71735C.1.pep
GYNGSQLWDTAFTVQAILATNLIEDFGPTIKLAHGYIKNSQLLHDCPGDLSYRYRHIYKGAWTFSTADQGWAVSDSTAEGLKASLLLSKISLEIVGEPLKVNRLYDAVNCLLSWMNNNGGFATYELTRSYAWLEILNPSETFGDIMIDYPNRKCELNSTGSYVECTSGVIQGLTAFRKHYPGHRREEIDNCIQKADSFIQSIQRSDGSWYGSWAVCFTSRTWFGAKGLIAAGRTYENCPAIRKACNFLLSKELPCGGWGESHLSCKGKVYTNLEGERPHGVNTSWAMLALIDAGQGERDPAPLHRAARILINLQLEDGEFPQQEIIGAFSKNCAISYSQYRNIFPIWALGEYRCRVLLGRQDASVTGNTAS

SEQ ID NO: 173727 - protein, 291 aa, Oryza sativa
  unsure (1)..(291): unsure at all Xaa locations
  Clone ID: PAT_MRT4530_71736C.1.pep
MEGKEEDVRLGANRYSERQPIGTAAQGAGDDKDYKEPPPAPLFEPGELKSWSFYRAGIAEFVATFLFLYITILTVMGVSKSSSKCATVGIQGIAWSFGGMIFALVYCTAGISGGHINPAVTFGLFLXARKLSLTRAIFYIVMQCLGAICGAGVVKGFQQGLYMGNGGGANVVAXSGYTKGDGLGAEIVGTFILVYTVFSATDAKRNARDSHVPILAPLPIGFAVFLVHLATIPITGTGINPARSLGAAIIYNKDHAWNDHWIFWVGPFVGAALAAIYHQVIIRAIPFKSRS

SEQ ID NO: 173728 - protein, 268 aa, Oryza sativa
  Clone ID: PAT_MRT4530_71737C.1.pep
MGEPTTGGREQGRDQASGRGTRAWASRRWEHACRGEPAAATAVSNQPRSAIGLQRQQHARSSFSNPPRIPTTTLDGDFVSDLYMDEPNPSHFVPKPNTCKFGWTQCRCCRRKRLLPFANKGDVNRAPSPAVSSESTPAISSDARREKGLNATTVGSTSSHDAAANRLLARCMAMGRPPLSMATAGKSLRDGNGNGLLSLDPDKALFSYTRIQSELGMTGIRIDVVSKDFDNIVDVELGGPWPLPPVELMATLAHKFGIIGEVGNCVQC

SEQ ID NO: 173729 - protein, 75 aa, Oryza sativa
  Clone ID: PAT_MRT4530_71738C.1.pep
LLRLLQHPLLVIGVDCRSRGTRPRSRRRARPSSMALLASHGKTWPAVTRTRSRRARYELRKDRSAAHLCCCFSFA

SEQ ID NO: 173730 - protein, 63 aa, Oryza sativa
  Clone ID: PAT_MRT4530_71739C.1.pep
GHTVTTSHQLVSSSNRCARHPGLSIVVSSASGTHISSVDTACMYCMIADGALAYSLEYASLGL

SEQ ID NO: 173731 - protein, 79 aa, Oryza sativa
  Clone ID: PAT_MRT4530_7173C.1.pep
VSVYLKLVHKIFFYFRRMKMYRIGTFEQLVVGKYTVTATNSDRGQELVVDLLHGEVHVDLQDGVVGGGVEGVRPEEAVP

SEQ ID NO: 173732 - protein, 68 aa, Oryza sativa
  unsure (1)..(68): unsure at all Xaa locations
  Clone ID: PAT_MRT4530_71740C.1.pep
XPXGNYGSTTTTLRXCLLYPHRRDTTXSPLIHGGGLLLRPXPPILVRTDXXVXFHGGXRXQFRLFNYS

SEQ ID NO: 173733 - protein, 166 aa, Oryza sativa
  unsure (1)..(166): unsure at all Xaa locations
  Clone ID: PAT_MRT4530_71741C.1.pep
GLXXTGXFTQTVPXPAAXGCXATGMADXXRNAXDXXLRSWXSSLXWTPXSXFRSXXPQSXRKKXAPFVXGDMSXRAAGXRPPRSMXLCLRXANXXARXLXIAXAXGWSSPHXVFAXPXXEXSALCICXVSAXELXXGXVXGLXDVQXCLRXEILXRIDVSSCRILQ

SEQ ID NO: 173734 - protein, 233 aa, Oryza sativa
  Clone ID: PAT_MRT4530_71742C.1.pep
SARIAVDSVIGTGDPWWLLQTWLNLHTIKVSGRSALTMMSFPTLEPTEDDEGNLVKTHRCTSFGEVAFAYLGSDLSVELLFDWFNNFYDGFPKNSRIWFAYEHSQDFELPADFRFEEINHEATFDRWRVEWKKHLFHQSASMYMTTMFPDQIPQATDSLPPHIGQSGEPINYAAGIIPNGGGLAHSIIGYNAPRKSSLLHGLPREPIETDPDVEECLENEEMDEAIDDAAADA

SEQ ID NO: 173735 - protein, 83 aa, Oryza sativa
  unsure (1)..(83): unsure at all Xaa locations
  Clone ID: PAT_MRT4530_71743C.1.pep
MELLINRIGKDTLKAVDHIYMWRAAXDYPHHRKYVGDDKVIHSTRGRGQDVGTGTFIDHLLMSNGSNTNTLCSICNNECATSN

SEQ ID NO: 173736 - protein, 510 aa, Oryza sativa
  unsure (1)..(510): unsure at all Xaa locations
  Clone ID: PAT_MRT4530_71744C.1.pep
MVSNHDDGKPPAKWKKVCVVGAGMAGLAAARELRREGHAVTVLXQAGDMVWXCLYDPCTEDTLCSFLGAVCEYNRMSTPXSLAXPREAMGFNDFLTLPVEDAGNSGRDPRRFPGHREVLLYLKDFCDAFGLMDAVRLSLNTRVLRVAMAPPQCRAPAVAGGERKWVVRSVRVGERDDTGVQEEVFDAVVVATGHYSQPSVPTIKGMEAWRRRQLHSHSYRLPEPFRDEVVVMVGCGDSGKDIALDLISVAKEVHLTDKSTEEATTPAMSKLLAKYANLHLRPRVEHLCEDGTVVFVDGSRVVADTVMYCTGYVYSFPFLDTDGVVTVDDNRVGPLFEHVFPPALAPSLSFVGVPRKVPAPWFFEAQGKWVAQVLSGRRTLPPVEEMLRAVDEHYRARAAAGVPVKYTHELGGIEPQKYIEFGEKYCGFPRYEDWKREMIVSTISRRDDDDMETFRDRVDDDSDHVRLCLKSWHCSSPARHQASLAVSAADGHPPPPRLAQTAKAIAADAL

SEQ ID NO: 173737 - protein, 436 aa, Oryza sativa
  unsure (1)..(436): unsure at all Xaa locations
  Clone ID: PAT_MRT4530_71745C.1.pep
GWRGDYPLPARGRRPPSNPRGSPDGGQPRGVAAAAPSQLPQISPAAPGRTKKGXPHGSLVEELTLRYLARQVGGTFVIFEVXSSAGMVSVASPMWGKAQPSLECRATLGRGXGPPHPHRVRLAARSLXRVFGISDDPQRXAQPHGQVFVTSLRNVRWPPKFRPSFTEMCNGSVNPSESLKIYTTIIEAVGGDDRVKANLFPMALQGQARGTLMDLPPASRPALVPPAGYGARPGSTDRPFKXFQRPALVPSAGYGARPXAQLWKGITGSRVFRLSHSCEGSRPCRRERYWKEATERKEQTECVAWGHRLKISSQPKVRAVESPSSWSEKGAWALVPAKNGEETEPTSXTRRVASTLATGGRFWTGLTPGATVGDMGPGACCASDRTVTGXMTDGTATVYPHPIXCVRRRVACSIPSHHNEEGLHSLLPFYGEVFVT

SEQ ID NO: 173738 - protein, 297 aa, Oryza sativa
  unsure (1)..(297): unsure at all Xaa locations
  Clone ID: PAT_MRT4530_71746C.1.pep
LPPLADASGRRWHVLDQHAGGGSSAVVLFDGAQHFLHRRQRPPPGQHLRDPLPSKNHGAGTFLGTPTNDSDEANAGGNTCSNSGPTTGHYSQPSMPTIKGMEVWRRRQLHSHSYRLPEPFRDEVVVMVGCGENGKDIALVLIGVAKEHQTLQLSCLHRFLPKVLNLILRLQEHFRWVNLVLGKYFTSILIFASYYVTIGTLIDRPAKLSLDDIKRAGLHVFPPALASSLSFVGVPRKVPAPWFFEGXWVAQVLSGRRTLPPVEEMLRAVEEHYRARAAAGVLIKYMPSPARSVGEGR

SEQ ID NO: 173739 - protein, 530 aa, Oryza sativa
  Clone ID: PAT_MRT4530_71747C.1.pep
ILEGGAVVMTLKDQSILADGDINQEADMLENIEIGEQKQRNEAYKAAKKKGTYDDKFNDDPLSKKSILSQYDDPMEDEGVTLDEGGRFSGEAEKKLEELRKRIEGGFVQKKTEDLTSAAKMSSDYYTPDEMLQFKKPKKKKSLRKKEKLDLDALESEAIAAGLGTGDLGSRKDARRQAAREEEQKADAEKRNYAYQAAIAKAEEASKALRPEKNISGKHAESEELVFGEDYEDLQKSLEQARKLALRKQEETAASGPLAVAELATARIGQKDADAAEGDAQQNKTRKPEAEDVFMDEDDDMIMSDTVAKDDMSGLAVVKEETSVEVPVKNEEEEELKPDEIVHEAAVGKGLAGALKFLKERGTLNEGTDWGGRTTDKKKSKLAGIEDGPKDIRIERIDEFGRVMTPKEAFRDLSHKFHGKAPGKMKQERRQKKYRDELKTKRMISSDTPLMSAEKMREAQALSKTPYLVLSGNAKSGQTSDASGFATVEKEHPGSLTPMLGAKKVEHFLGIKRSAQGGGLPPPPPKKPKN

SEQ ID NO: 173740 - protein, 153 aa, Oryza sativa
  Clone ID: PAT_MRT4530_71748C.1.pep
KRNYAYQAAIAKAEEASKALRPEKNISGKHAESEELVFGEDYEDLQKSLEQARKLALRKQEETAASGPLAVAELATARIGQKDADAAEGDAQQNKVVITEMEEFVWGLQLNEETRKPEAEDVFMDEDDDMIMSDTVAKDDMSGLAVVKEETSV

SEQ ID NO: 173741 - protein, 324 aa, Oryza sativa
  Clone ID: PAT_MRT4530_71749C.1.pep
MGVPPVDWEAESYPAYSDFAAIPLFAVFLFAVRYLLDRFVFEVVMVFTVLFPHHAHFRIVTGVWLARRLIFEKDEKLDLATHAGRIKIRKFKESAWKCIYFLSAELLALSVTYKESWFTSTKNFWVGPGDQVWPDQRIKFKLKLVYMYAAGFYTYSIFALQFWEIKRSDFGISMVHHVVSVILIALSYIFRFARVGSIVLAIHDASDVFLELGKISKYSGYQLLADVSFLIFVCSWAVLRLIYYPFWILWSTSYEVVPMLDKKKHKFDGPLHYYVFNCLLFSLLVLNIYWWVLMYRMLVEQILSKGHVGDDVRSDSEGEEEHED

SEQ ID NO: 173742 - protein, 594 aa, Oryza sativa
  Clone ID: PAT_MRT4530_7174C.1.pep
MSVEAVKQIVPAHLVKPAVDPVHAKASKAGKDGRSDLIAKEILEEQKPAHRRQESSESILDKGPSNVGSDSGVLDVPLTPKGDSGELKEIQGLDCNGNQEKKTAQKSSTSESFASAKVSDGTNGLRKTCGSGKVSDTADSTESGKSSMCRPSTSSNVSDESSCSSLSSSTTKPHKGSDSRWEAIRMIRSKDGILGLSHFRLLKKLGCGDIGSVYLSELSGTRSYFAMKVMDKGSLASRKKLLRAQTEREILQSLDHPFLPTLYTHFETDKFSCLVMEFCPGGDLHTLRQRQPGKHFSEQAAKFYVAEVLLALEYLHMLGIIYRDLKPENVLVREDGHIMLSDFDLSLRCAVSPTVVKSANPGPDALQRNNQAYCVQPACIQPSCIQPSCVAPTTCFGPRFFSSKSKSKSKKEKKSKPEVVNQISPLPELIAEPTDARSMSFVGTHEYLAPEIIKGEGHGSAVDWWTFGIFLYELLFGKTPFKGSGNRATLFNVVGQPLRFPESPMVSFSARDLIRGLLVKDPQHRLAYKRGATEIKQHPFFEGVNWALIRCASPPEIPKPVELERPPKPAPATEKVAPAANQKGSDNYLEFEFF

SEQ ID NO: 173743 - protein, 319 aa, Oryza sativa
  Clone ID: PAT_MRT4530_71750C.1.pep
MELNPGILDHEGNHLLPQAHNHLLHQPYRVTYTDRVRCSVLIFDTSQSYVMSPPTNLIYHDNENRTTDLNTQPKPLTRHKLDEHTYNKYRRVDEWEHAAPTQTQGVMKYYRLTREKSFKFGECIPCIYFTLLLATIYAIEQTSCSTRLMALWARGPMALKAQAYRWAFVSHRNRTSRPKPTHPNDSDRSYANGRELEGIESMSCVWLIALQCQAISISRHYLEYKHAEFLQVRAMEHTTTLSAVRIKPHLHMLPIAFIQAVSSSSVDRAEANTIHRFQDGVLCLCLRYTTKTAIAHESLPQLTLTGIINLILFSIPGIN

SEQ ID NO: 173744 - protein, 256 aa, Oryza sativa
  Clone ID: PAT_MRT4530_71751C.1.pep
YTVILRILPYNIEFKRRKNQARKVVCIPAPAAAGGRTSGEVVPSDLWAWRKYGQKPIKGSPYPRGYYRCSSSKGCSARKQVERSRTDPNMLVITYTSEHNHPWPTQRNALAGSTRSHHAKNSSSNSSSSGASSASKNNSSHSGYHHHHHQKPLVKAEPNDQSAAATTAATVPVKEEAAMEHSDLMQQMFSQSYRPMIPEAAAGGHHDDFFADLAELESDPMSLIFSKDGGHAGNERRRATRETFVDFSRRPMLAKV

SEQ ID NO: 173745 - protein, 48 aa, Oryza sativa
  Clone ID: PAT_MRT4530_71752C.1.pep
SLALPRLLRPFFKSIGDGTAWRRANRSTHVSDQSRDDRGVSSSKRSRV

SEQ ID NO: 173746 - protein, 344 aa, Oryza sativa
  unsure (1)..(344): unsure at all Xaa locations
  Clone ID: PAT_MRT4530_71753C.1.pep
LVTESNDLPRIHKHPPPPPPSMPQPPPTLSPPPPPPPPPPPLPPRRCXPPPPPRPPPPPPPPSTDTESEHPPPPPPPPPLGLGFNPSPPPPPPPSXPARGPRLPPPPPPSPPPPGPSPRRRPPRRRPPPCASGRSRRPPPAPAXACVGASIRTPPAPTTPPPSASRAPRPRSTSPTKSPAPAXRRPAATPSSTPPPNVXPPLPPQPPPLRAPDGLRRPLPPRRRPPPRHGGAQVALPPRPPXPATTPAATRRSPPTPAPPASSSPRPPRAEPPPPAAXGPPRGPPPLAFQLRAASPSPPAARGSTASXGPHAAPPPPXPSAPPPPPSATRGPAAAPQQLAMHPQ

SEQ ID NO: 173747 - protein, 75 aa, Oryza sativa
  Clone ID: PAT_MRT4530_71754C.1.pep
SRNKVISYAISTCRLKKIQKVAVLFAHNVLIRSPEINYGVAPKNLLLHKICQSVHVGNPSGSAAPNYAVASLAHA

SEQ ID NO: 173748 - protein, 47 aa, Oryza sativa
  unsure (1)..(47): unsure at all Xaa locations
  Clone ID: PAT_MRT4530_71755C.1.pep
MPSSFMASGAVSTGLSSQFPAPLKRXSSMLSLSTTPTPPPMTSPIRY

SEQ ID NO: 173749 - protein, 170 aa, Oryza sativa
  Clone ID: PAT_MRT4530_71756C.1.pep
MVEDLGPNGNGLQPQFNIFQDRIDYVVQHALINQSGVLVNTLTNMVKSGVDGKIAEHQVTGPVYLPGGVFPNYRPLVTGNQQGSSSAPPTQSMAPAAASAPAAQVAPSLAPGQITNPRLLTREQPQHGGQNINRLTQEKVAAMFYPNQPTADLALPNQHTSAANLAKCIG

SEQ ID NO: 173750 - protein, 229 aa, Oryza sativa
  Clone ID: PAT_MRT4530_71757C.1.pep
MAPRKPNPASVTGPDPGRIDDDTTAYLGASLVDEDELAKLVELPQLSPSALVRIAIFDWACRTAGFEPFFTAPFFTQRTKKTAFGSVNFNVRPEHSDLWPVNAAMFKLARHWMSKWFYHSIPFEAGSESAKALRWRRRAIAPNKKPKVTVDGAMEARYAPIDPYRAPPIQPSRIGTIRQTCMIDRRKKKDLNHDRSIHQFPKMVINHQRWERMRIKNGNIFRADGLTWF

SEQ ID NO: 173751 - protein, 1084 aa, Oryza sativa
  Clone ID: PAT_MRT4530_71758C.1.pep
MAANNLLLVGAAAPREAEAGDGAAESKIAAALGTLGLAAVSTATALAAAFEPAVTGGFAANTYYNLALAVTFLAGVTLIGALVWVSDKPAARRRAAGKKLLYAAIPPLVATRHRRRSIGGGAALDLETRNVIARCNSSGDLYPFYPPATSTHALLAAPTSLWHRRLGHLGREALSKLIRSSVISYDCSHYIWTFPLRLKSDTFSTIANFFAHVKTQFGTTIKSVQCDNGREFDNSPARTFFLSHGVAFRMSCPYTSQQNGRAERSLRTLNNILRSLLFQACLPPVYWVEALHTATLLVNRIPTKTLSSSTPYFHLYSTQPTYDHLRVFGCACYPNMSSTAPHKLAPRSSLCVFLGYSSEHKGYRCLELGSNRIITSRHVVFDESFFPFADMSTSPMASSALDIFLDDNELTAQPPRAKFVHAGTSSAARGAVEPSTPPPAPSSIGPRSPATLAGPEAGPHGGSPAGAATSQPGAISPARTAAPSAATSTTRAVTSAPRAATSGTTPSLSPLAGTAAPPPRAEVAASSTAATGRTLATRPVSIAPVDNAHSMRTRGKAGMAQPVDRLNLHAAPLSPVPRSVREALSDPNWRAAMQAEFDALLANDTWSLVPRPRGVNLVTGKWIFRHKLHSDGSLDRYKARWVLRGFTQRPGVDYDETFSPVVKPATVRVVLSLALSQDWPIHQLDVKNAFLHGTLSETVYCIQPTGFADPSHADLVCRLNKSLYGLKQAPRAWHHRFASHLISLGFIEAQSDSSLFIHRRGNDTVLLLLYVDDIVLTASSASLLQQVIAALQREFAMTDMGPLHHFLGITVTRFASGLFLSQRQYSQDILERAGMGECKPCSTPVDVHSKLSADGPPVADSTQYRSLAGALQYLTFTRPDIAFAVQQVCLYMHDPREPHLAALKRILRYIQGTLSLGLTMRRSPPTDLVVYTDADWAGCPDTRRSTSGYAVFLGDNLVSWSSKRQHTVSRSSAEAEYRAVANGVAEATWLRQLLMELHRPPRTATVVYCDNVSAMYLSSNPVQHQRTKHVEIDLHFVREKVALGHVRVLHVPTTSQYADVFTKGLPTSLFQEFRTSLTISDAPD

SEQ ID NO: 173752 - protein, 49 aa, Oryza sativa
  Clone ID: PAT_MRT4530_71759C.1.pep
FFLGGENVYVAVSRFIEGKCLFLLSILLVIRIFFFELYNLYGLLEGELI

SEQ ID NO: 173753 - protein, 309 aa, Oryza sativa
  Clone ID: PAT_MRT4530_7175C.1.pep
MSYYGSSSSGGWGSRRVEYGRTYIVRPKGRHQATIVWLHGLGDNGASWSQLLDSLSLPNIKWICPTAATRPVTAFGGFPCTAWFDVEDISVDGRDDIEGLDASAAHIANLLSSEPPDVKLGIGGFSMGAAAALHSAACYAHGKFANSMPYPITLSAVISLSGWLPCSRTLRSKTESSHMAARRASSLPILLSHGRGATSTEPTETIEWVTRFEGPWSMKVLPCFEISQRFEGSWSMKALPCFEILQGMIVFTVAFLAESGYCLEVEDGKLLITFTVSTGKLCQINIGKIKQMTWVKNKMGSFPSYSKIN

SEQ ID NO: 173754 - protein, 241 aa, Oryza sativa
  Clone ID: PAT_MRT4530_71760C.1.pep
MFGKGHDLEAGGSSEPLYPGMVESPDLRWALIHKIYVILSVQLAMTAAVAAFVVKVRGVSEFFVSSNAGFALYIFLLFLPLIVLCPLRYYHQKHPVNLLLLGLFTVAISFAVGMTCAYTSGKVIFEAAALTAVVVISLTAYTFWAAKRGHDFNFLGPFLFSAVMVLILFSLIQIFFPLGKISEMIYGGLASLVFSGYIIYDTDNIIKRYTYDEYVWAAVSLYLDVINLFLALLRVLRAADN

SEQ ID NO: 173755 - protein, 75 aa, Oryza sativa
  Clone ID: PAT_MRT4530_71761C.1.pep
THACGKRATRWWWSRQLKLSTQCARPAPALTQSCTVLWMHRWWMPTCCECRCPPTQYQPQTEGPPGTSCMACKLA

SEQ ID NO: 173756 - protein, 61 aa, Oryza sativa
  Clone ID: PAT_MRT4530_71762C.1.pep
MVETNLPSSTRPADLMRGQCAVVDQIIAGEGDVFGMILGEAWGSIDKGQVGEKLLSIILFL

SEQ ID NO: 173757 - protein, 299 aa, Oryza sativa
  unsure (1)..(299): unsure at all Xaa locations
  Clone ID: PAT_MRT4530_71763C.1.pep
MKFGAIYEEYLREQQDKYLTKCSHVEYKRLKKVLKKCRVGRSLQEDCPNGDQQEGNNESPDICKCNSCTLCDQMFFTELTKEASEIAGCFSSRVQRLLNLHVPSGFLRYIWRVRQCFIDDQQIMVQEGRMLLNYVTMNAXIAIRKILKKYDKIHGSVSGRDFKSKMQTDHIELLQSPWLIELGAFHLNCNSSDIDETVGFLKNEFFKNFSCDLTEARPLMTMAISETMKYEYSLTCPICLDTLFNPYALSCGHLFCKGCACGAASVYIFQGVKSAPPEAKCPVCRSDGVFAHAVHMTEL

SEQ ID NO: 173758 - protein, 127 aa, Oryza sativa
  unsure (1)..(127): unsure at all Xaa locations
  Clone ID: PAT_MRT4530_71764C.1.pep
AGTLYSGRPTRSEIYDSMEAADDTTYTINWKECIAATQPINRTNRLIHLMPILTYXDTHGCAIMTXDRLHTALMXVTSXDTILEEMILVEDQNIDGHIQYAGFGTQTQIINFPLDWQTVYCSLHVSV

SEQ ID NO: 173759 - protein, 277 aa, Oryza sativa
  Clone ID: PAT_MRT4530_71765C.1.pep
MAKKSKKEKGSGGRAHRRPHRGDPLPPPGRWRGLISDPDHRKKLTETLAGSLYYRVALLGDMAKGSKKKKGSSATRNPAAELTDDLIVEILFRLPAKSVRRCRRVCRRWRGVISYPHHRKKIPQTLAGFFHLSVNESRFPVEARDFVGFDPDVSSQFHVFQFVTDARLWLVLRSTLRKSENGITVLEDYSKDEWTLKHKVTIELLSGKISCKYQTMFYRGVAVHLDCNLVYYIADYILMSYDMDRKEPRVIQDLGSDCMMEYLPYVPLYAKTLSSGR

SEQ ID NO: 173760 - protein, 454 aa, Oryza sativa
  Clone ID: PAT_MRT4530_71766C.1.pep
MVGDLSSLLAAASSASPVVLAPSKELHGVHLPMPLQGKRPPLQPQDAAVHIEAAAAAAAAAFQGQVMVPGHAHAGAPAAFQAFAVPDMAALIDVQADSHPDSVQLSLGIAEQCSRQEKILKFLRSGSDVKELDVSLLTELTGHQTLPINLGTQPYIPDDKLSALPISMASQPYIPDDKLSIYEFELDEPQQYLPENQLVIPDPLVEFFQSHGSALTIDQNRRILFNGNGDDMRYLLSIVLAFNMSKREISSCKTAYLVPYFERKRRSRASSHASNSKLASTAVDASKSTANGKSKSSSRKKQKSKNIKERDLYPKNYFHASEAFLSMLLDKDNSSSTIHSLKKAGPEISELLTKCSIGIAGTGLAVLLSVVCKMATGMKSPIAATRLVNTGVGLGLFWLSWAVNGLRDTITSIFRSPGDMNLKDEEVAVRIQKSMNDILFRAITILAITAFKFA

SEQ ID NO: 173761 - protein, 97 aa, Oryza sativa
  Clone ID: PAT_MRT4530_71767C.1.pep
RSAHGCRAIHILDSEGEDVHPTLCAVLGDLHGVRRDAQGLGQLLFHPHVELRFLRVLWCWVFKLGTFISFPWLHNYIGFFCVFWSNFWLCQSVTVWY

SEQ ID NO: 173762 - protein, 233 aa, Oryza sativa
  Clone ID: PAT_MRT4530_71769C.1.pep
MECAAKGLVAEPCAGEARRRCGGCGAVAYCSRAHQTVHWGFHKEECARLAEQMSRIDMLKQFPFTFSVESPAPNHTFPSLRCFLLESFKLHQKGLWKSECICDPEVTSVKDLSKTTDWSMGSALCPCTEPEHNVSTPLTSWKDYYRWRSLPLQSPVAVLLHWQLTLYLIVAPNAGIAAYPSWIPTIEIIRKVGIPAIFTDFCEEAAHLASSCITSITGQPLRVPIQNCKFVSP

SEQ ID NO: 173763 - protein, 529 aa, Oryza sativa
  Clone ID: PAT_MRT4530_7176C.1.pep
MAGGKEPIEVKFRLFDGTDIGPSKYDPSTTVSALKEFILARWPQGSSASTIELSTSLVLCVNMIAGPFTNKEITPKTVNDLKLINAGRILENNRTLAESRVPVGEVPGAGYHSKTVVSCPPKMNMYRDSICNLNTVSHKKSPALFPIAGFLRLSVRVPVRICMLQIFSRIATRIPQRVICASNSYSSNYRSTSTSSPMNSNEMLGAQETVSTEGNNSCSSVQSTPDIEKKYVHRVYDAIAPHFSSTRFAKWPKVAGFLNSLRPGSVILDAGCGNGKYLGFNPDCLFIGCDISPPLIDICAGRGHEVLVADAVNLPYRDNFGDAAISIAVLHHLSTDARRRKAIEELIRVVRKGGLVLITVWAVEQEDKSLLNKWTPLCEKYNEEWVDPSSPPVRNQSNTVLESISETDEDTGAVKQRNDDLKISNDGLDDNADVTCSNSNIDEYHKTQQEYFVPWHLPFHRAEIGGASAAALENGFAKRDDKKGTVVYNRYYHVFVEGELQRLVAGINNAVVVDQFYDKSNWCIVLEKL

SEQ ID NO: 173764 - protein, 168 aa, Oryza sativa
  Clone ID: PAT_MRT4530_71770C.1.pep
MSQLDGWRQRQRTPRQRATEGELAREARGEGRDRSGGERLSPPQRACHLPSPAATFSVRTTAAAFSARTTIAAALQERRGGVLGDGGGLVASFMRATTPPPQIPTDGAAMVGQAVPSTQRLEAEPLTLEDRCCLAFSLIEIDVRDTAEGEDVARTLPSAGDVAAAAAT

SEQ ID NO: 173765 - protein, 408 aa, Oryza sativa
  Clone ID: PAT_MRT4530_71771C.1.pep
MASSAMELSLLNPAAMRGLSAAKPRVVSSRRIVRFRVASSAAAPPAAKPGTPKKRGKTEIQETLLTPRFYTTDFDEMERLFNAEINKQLNQEEFDALLQEFKTDYNQTHFVRNPEFKAAADKMEGPLRQIFVEFLERSCTAEFSGFLLYKELGRRLKKTNPVVAEIFSLMSRDEARHAGFLNKGLSDFNLALDLGFLTKARKYTFFKPKFIFYATYLSEKIGYWRYITIFRHLKANPEYQVYPIFKYFENWCQDENRHGDFFSALLKAQPQFLNDWKAKLWSRFFCLSVYVTMYLNDCQRTTFYEGIGLDTKEFDMHVIIETNRTTARIFPAVLDVENPEFKRKLDRMVEINKKIIAIGESDDIPLVKNLKRIPHVAALVSEIIAAYLMPPIESGSVDFAEFEPQLVY

SEQ ID NO: 173766 - protein, 154 aa, Oryza sativa
  Clone ID: PAT_MRT4530_71772C.1.pep
MHCEAARVFLPFTDGKAEAFSGPSPAQPSPSPYKLSSFSLGYISERPVSETRLGSEPTCLHHHSSHELGEGGGSGSWASSAADTAWRVGGQSRVGNGRGGGPTTLPPQAHAFHKDHHQRHRSVFASELHSGRQEAEADTHDDGFAGPPQISKAL

SEQ ID NO: 173767 - protein, 59 aa, Oryza sativa
  Clone ID: PAT_MRT4530_71773C.1.pep
MGTAVAAACAASGDSGDSGPRGDRSRWWIQRRQREQAVAPSLVTAGTTDPSPAMAAGLG

SEQ ID NO: 173768 - protein, 140 aa, Oryza sativa
  Clone ID: PAT_MRT4530_71774C.1.pep
MGSLRGGGGGGGGGRGDCSKQEETERVMRSVDAEEACALLSSGRHQYLDVRMWEDFDKGHVAGARNVPYYLSVTPRAKEKNPHFVQQVAALYHAHDHIIVGCRSGVRSKLATADLVAAGFKNVRILEGGYLSLLRAANQQ

SEQ ID NO: 173769 - protein, 63 aa, Oryza sativa
  Clone ID: PAT_MRT4530_71775C.1.pep
RDIFFSPLAFKAGHCLYGFTALPRWTTSKTSVCGRHRLTCHENSLHTYPDNVPFHLCRFLQPG

SEQ ID NO: 173770 - protein, 52 aa, Oryza sativa
  Clone ID: PAT_MRT4530_71776C.1.pep
LPMRSLSLIWSSQCLSSISSALFAVGGVQKRRFVSWSASLSLLALISRTRTR

SEQ ID NO: 173771 - protein, 64 aa, Oryza sativa
  unsure (1)..(64): unsure at all Xaa locations
  Clone ID: PAT_MRT4530_71777C.1.pep
SXARRRRRRRRRSGVAEIFGVPRHSGKRGTVKVYYTRVIDLVLVPLYCTSTLVLGLISLTRVTM

SEQ ID NO: 173772 - protein, 68 aa, Oryza sativa
  Clone ID: PAT_MRT4530_71778C.1.pep
ERGEKSHQSNALVAFDVDIFTECCGGEDDLIRRRRRTPWWRRSCGGKSWCSPEASWRSSSAARDLELV

SEQ ID NO: 173773 - protein, 146 aa, Oryza sativa
  Clone ID: PAT_MRT4530_71779C.1.pep
RPGFLGVAGRPAGGDRAVAPADGEHDGGFSWLTALGFVFLTFNSGMAIYRSDGDLAAVSFVSFSYIDLVLLFVCLRMFEKAEPNSRERGNLKAAVWILTTLLTVVFSYKVAAIMPLPVQILVWAMAGATVLGGFYAFFVHRESKEG

SEQ ID NO: 173774 - protein, 91 aa, Oryza sativa
  Clone ID: PAT_MRT4530_7177C.1.pep
TKGIWLHIIFISHILQWPILRAHIPSLIQNHTSYIEEVLNKEGQVEFCQIRGPNLCKNSCLHLFYFNLVYTLVLTISIPWKYRSRDLKRRH

SEQ ID NO: 173775 - protein, 93 aa, Oryza sativa
  Clone ID: PAT_MRT4530_71780C.1.pep
KQGQGDPDSQKIILVLIRNSVLSFGMRTCTPTTQHIINLLLRLSCACFAFSFVHNTVHVCGSASNINLKGLKHPVVQISVVLSRADKLSSNLT

SEQ ID NO: 173776 - protein, 152 aa, Oryza sativa
  unsure (1)..(152): unsure at all Xaa locations
  Clone ID: PAT_MRT4530_71781C.1.pep
SQVLSAQAAVSYESARAKVADSVNATNMREIVFTRNATDAINLVTYTRGMLNLKQGDXIVVTIAKHDKTVDAXHFASHKTGATLKHDGLTKKGVADIEQLICLVSYKTKIVVVHHVSNVLGSMLPIEDIGTWSNRIGAKVLVHACQSVSHMP

SEQ ID NO: 173777 - protein, 63 aa, Oryza sativa
  Clone ID: PAT_MRT4530_71782C.1.pep
SKKFPIYWGRSFSNLLQDIGIFTIQCANRKKGGYFCTERVLKSFYWGSTLMQFPHIFKGQGRP

SEQ ID NO: 173778 - protein, 68 aa, Oryza sativa
  Clone ID: PAT_MRT4530_71783C.1.pep
STYDLVCYFYLVILRFLGVFIFILVRLIFSFFNCLFSFFSFFYIFTFIFFIFFCVFFFFFFFFFLFFI

SEQ ID NO: 173779 - protein, 448 aa, Oryza sativa
  Clone ID: PAT_MRT4530_71784C.1.pep
MEKAIDRQRVLLAHLLPSSSSDQSLLSASACAAGDSAAYQRTSAYGDDVVVVAAYRTPICKAKRGGFKDTYPEDLLTVVLKAVLDNTKINPGEIGDIVVGTVLGPGSQRAIECRAAAFYAGVPENVPVRTVNRQCSSGLQAVADVAAAIKAGFYDIGIGAGLESMSVNAMGWEGQVNPKVNEVQKAQDCLLPMGITSENVAHRYGVTRQEQDQAAAESHRRAAAATAAGKFKDEIVPVPTKIVDPKTGEEKKVVISVDDGIRPGTTASGLAKLKPVFRKDGTTTAGNSSQVSDGAGAVLLMRRDVAMKKGLPILGVFRSFAAVGVDPAVMGVGPAVAIPAAVKSAGLQIEDIDLFELNEAFASQFVYCCNKLGLDRSKVNVNGGAIALGHPLGATGARCVATLLNEMKRRGRDCRFGVVTMCIGSGMGAAAVFERGDSVDQFSNVRHH

SEQ ID NO: 173780 - protein, 274 aa, Oryza sativa
  Clone ID: PAT_MRT4530_71785C.1.pep
MAVVHPSLSGSGGEDGKDVAKRHGAASLAGARARHGEGDGEDGGANAAGSGCGSGFMTSDWGDTIQRLNSVTAASSPSLPLLTVVNNTALLARSPTNSSSSTASSSASSSPPISAASSRQLLSEAAAAIANGNHIVAASLLSALKLSVNPQGDAEQRLVAMMVAALSSCVGTSPSQHLADLYIGGGRYGLVRSSGSGPTGGRSGDSDCGELRQWQARLATARIPPPLLPHSLGFFSPNGHWAQGGGSSLVGSNSVGKLGRRQAQMAGEHGICRL

SEQ ID NO: 173781 - protein, 34 aa, Oryza sativa
  Clone ID: PAT_MRT4530_71786C.1.pep
KSQRSSPMSFILSITGLFLRMVTSPNRLQGCTFK

SEQ ID NO: 173782 - protein, 144 aa, Oryza sativa
  Clone ID: PAT_MRT4530_71787C.1.pep
MAAAASERSCRDEAAEIGGELDADDEAVDEEEFVGDRANSAVLFTTVSRGSDGDDAAVTELSLWIVSPQSEVMKPEPQPLPAANYYSNAARCPLANYHVYEVFSPKTEILAVWMPGITVSAAGYMYDVFYSKLNSDSNVSTTRS

SEQ ID NO: 173783 - protein, 151 aa, Oryza sativa
  Clone ID: PAT_MRT4530_71788C.1.pep
MVVASAASPCESSALFATFDHDGDGRISAAELRLCMKTTLGEEVSDEEAGQLVASVDADGDGLLCEAEFVRLVQAAEVEEEDERRGTGLREAFGMYEMEGEGCITPTSLRRMLRRLGSDQDIDDCRAMICRFDLNGDGVLSFDEFKIMMNA

SEQ ID NO: 173784 - protein, 143 aa, Oryza sativa
  Clone ID: PAT_MRT4530_71789C.1.pep
MIVCVAVVGHQNNPLYLQSFTEADDALKLHHVVHCSLDVIDERVNNPKRNAPALNETFLGLLYPTENYKVYGYLTNTKVKFIMVTTDLDVKDADARNFFRKFHAAYVDAVSNPFHVPGKKIASRSFGARVSTIVKSFGSGTTA

SEQ ID NO: 173785 - protein, 165 aa, Oryza sativa
  unsure (1)..(165): unsure at all Xaa locations
  Clone ID: PAT_MRT4530_7178C.1.pep
TKKRRAGKSGKKXMKKKEEIESTADDPKTGEAETRQGHGSGEAATLGGRSGEAFIRDGDGEGXEMEAWSRGGGGVDRRRRKRRRSGQGGGGGVRGSAEAARAVPTVIQAWXRAGPACCCGSLGTARLSGXAGTGTNTDGPGRAWAGPNARALGRAVGLRSIWPSI

SEQ ID NO: 173786 - protein, 75 aa, Oryza sativa
  Clone ID: PAT_MRT4530_71790C.1.pep
MACGLGTGKSPPRRPRRWRWRRRSRGEETSAPERYEGEESDAASVVVERSRYILGRCSFCLLQLMSDVLLLLSLH

SEQ ID NO: 173787 - protein, 437 aa, Oryza sativa
  Clone ID: PAT_MRT4530_71791C.1.pep
MGVVTRGKKRRLDDESSNPQLAPRGGEDLISRLPDDILTGIITLLPTKDGACTQMLSRQWRPLWQSAPLNLEARVNGCTLGKDVATIYSTLLTHSGPEFELFYDSVGVQNPPVPPSVLRLSSTLRVLRILSTCDTLQFPMETACTLDFPHLKELTLSQVNIADSILHGILSRCIVLESLVLDANRGCSRLRISSLTLQSLGVSDTYFSVEGMLEEVIIEDAPLLERLTPPVIWHEGFVIRVIQAPKLKTLGYLSQKISTLQLGNMVFQKLVPVSLSNVMRAMKILALHTAPDLDVVIDFLKFFPCVEKLYIVALNQGNFKNVRRYVSLECLDLHLKMVEFINYHGNLSDLNFIKFFVLNAQVLECIKFVACRDKCDAKWIKTQHQRLQLYSRASRGVTLDFQADYGVDSLVHVKHISDLITDDPFDRSFCRCRDEEI

SEQ ID NO: 173788 - protein, 188 aa, Oryza sativa
  Clone ID: PAT_MRT4530_71792C.1.pep
DDDDDVDTDEEESESEDDSGEEFHAEPSKKAVYNKEGILEKLEDIAWPENVDWRHKLTIEHDQGEKVDVNDDLARELAFYTQALDGTRQAFEKLQSMKVRFLRPADYYAEMVKTDAHMHKIKGRLLSEKKKIEEAEERKKAREAKKRAKEVQAQKEKERAKQKKEQIESVKKWRKQRQQGGFAKGNDD

SEQ ID NO: 173789 - protein, 137 aa, Oryza sativa
  Clone ID: PAT_MRT4530_71793C.1.pep
PTRPPTRPRTRGFLSKLPKKDLELVHTLSVSLNKIGDLRYYDGDLHSARSYYARSLDVRRSAAKEHSAVASQVIDVATSLAKVADVDRNLGNESMAVEGFEEAIKCLENLKLESGEASLEQRRLSVLDFLQKQLDDK

SEQ ID NO: 173790 - protein, 69 aa, Oryza sativa
  unsure (1)..(69): unsure at all Xaa locations
  Clone ID: PAT_MRT4530_71794C.1.pep
HDLVDQTRLRLRSYTLLKRGNNSKAEYNHRTQQATPMMQTCKGNARXFVAICIKAVVKHFVEQNSKTVE

SEQ ID NO: 173791 - protein, 248 aa, Oryza sativa
  unsure (1)..(248): unsure at all Xaa locations
  Clone ID: PAT_MRT4530_71795C.1.pep
PTRPPTRPPTRPRTRGCRPASACCHRPPSRGRASSVSSSPPSSSLSLSLSASPEAAAAQESIKSIPSHPLADTESLLSLSAPRFSPTPAPSFSSPPTYVNNPPTIDTTNPIMSSLCPFAKLASAGATCPVKSSSDNKTTINHTDDDDDDNEKTGNANTDPRVVPPKCPFGYDSNTFKLGPLSCMVCHALLHQSSKCTPCSHKFCKACILRFKDWPLGGADIQRIEPDDEHQGLXDRFIDGHARLRDHM

SEQ ID NO: 173792 - protein, 116 aa, Oryza sativa
  Clone ID: PAT_MRT4530_71796C.1.pep
FPTHPSVAPPPAPPHAHLPYLCRPASACCHRPPSRGRASSVSSSPPSSSLSLSLSASPEAAAAQGRVNGSQRRGCSVAPWRSGCPAAPRLGIRLRARDLHSGEDKVNNNPPKTNRL

SEQ ID NO: 173793 - protein, 369 aa, Oryza sativa
  Clone ID: PAT_MRT4530_71797C.1.pep
DQPIMSSLCPFAKLASAGATCPVKSDNKTTSCPVTANNHTDDDDNEKTGNANTDPRVVPAKCPFGYDSNNTFKLGPLSCVVCHALLHQSSKCTPCSHKFCKACILRFKDCPLCGADIQGIEPDDELQGLVDRFIDGHARIKRSHAAGDGEAASDKTKVIYEHVSMERGAFLVQQAMRAFRAQNIESAKSRLSMCAEDIREELKSKEDNQELCSQLGAVLGMLGDCCRTLGDAPSAITYYEESAEFLSKLPKKDLELVHTLSVSLNKIGDLCYYDGDLHSARSYYARSLDVRRSAVKEHSAVASQVIDVATSLAKVADVDRNLGNESMAVEGFEEAIKCLENLKLESGEASLEQRRLSVLDFLQKQLDDK

SEQ ID NO: 173794 - protein, 49 aa, Oryza sativa
  Clone ID: PAT_MRT4530_71798C.1.pep
ASRQGSSTGFCTYVTHGVTNMAGASAKDVVKMLYVLATYGKAAGHNYSN

SEQ ID NO: 173795 - protein, 115 aa, Oryza sativa
  Clone ID: PAT_MRT4530_71799C.1.pep
RRLRVRPRPPPPSALGFRVEEPNRSLVDTTDMAWRLTHSTYQFLKGYKAGKTAIGFQIRHHRGTAVPHERHGITGMRAWRILLGLDVSSDGAAAYRSIGFVIMPLAVPADHVGTG

SEQ ID NO: 173796 - protein, 85 aa, Oryza sativa
  Clone ID: PAT_MRT4530_7179C.1.pep
CQTLALNARSGYLDGEDKGAHGPVSAADVDGPRARGAGRAGLQIEWPSPPFPSRQSGADELSKTGASVRCQLQSRTDRGIGPGPA

SEQ ID NO: 173797 - protein, 256 aa, Oryza sativa
  Clone ID: PAT_MRT4530_717C.1.pep
MVENHVSKEDSKNYKLRMGFVDGHICAICDDGGNLIRCEGACRRYFHRTISNDADFNCETLNMSQEQVESSKFICKNCVYKQHQCFGCGELGSSDMSSGSAEVYQCSKSRCRRFYHPKCLAEFDSSKNPPVFECPLHECFACKNKGEKYNEETCKNKGQESIKKKQGAENNKKMHLALCRRCPIAYHRKCLPRCDMYLALFASDSALLKGYFVDTVFSFLGIFPLFPKVVFQGNGKLIRAKFSSIACKLFALHPFC

SEQ ID NO: 173798 - protein, 214 aa, Oryza sativa
  Clone ID: PAT_MRT4530_71800C.1.pep
MAMKVYGLPMSTNVARVLVCLEEAGEQYEVVPIDFSIAEHKSPEHTSRNPFGQVPALQDGDLILFESRAISKYVLRKNNSELLKEHNLSDAAKVDVWLEAESHHFDEPMSVVIYQCLILPVYFGGQTDAKVVEENLEKLKKTFQVYEERLCKFRYLAGDFLSLADLSHFPTAYYLLATPHAAMLDEFPLVKAWIDGMLARPSVKKVIEMMKATA

SEQ ID NO: 173799 - protein, 118 aa, Oryza sativa
  Clone ID: PAT_MRT4530_71801C.1.pep
MQYVFFTCPKPLSRRCSRGNTPRAGRDGSDHRTTPTEERPRYTPPGPGSAARHMARGAGGASGPSTNPGTNRHFIILFGDHRSSFSTENELKCSWTEVLSKFKEPQLLKKSEQTSGNL

SEQ ID NO: 173800 - protein, 337 aa, Oryza sativa
  Clone ID: PAT_MRT4530_71802C.1.pep
MPKPNHRARSAAAGGGGGGGGPIDADWKYFLDNVREEGHSYAVRVPADGANPSYYLQYEKPLTNGAASTSSRGGAARKRCRMEEEEEEESSSGEPEPAPDPDIEEDYRVFLQNVRLVGHGGFVLEHEGNVIRYDASGAALSSDESSDESVMGAPEPDPRRRKAKIVEEDQEEEEDVKNEVAVPSRKKDFTMVKEDQEKKGKRVVDLPARGEDGAMVAEEDRKKKLRKEFNFHSFHSKGKDDTTPVKNLKDKKKEVKNPKDKKVIKVEEEDGQLQIVPAVEKLATTTRLTNLSNGHKTAPRIASFECYWSTFVGAHGRSGSETWDGSAGGKNKICLSG

SEQ ID NO: 173801 - protein, 260 aa, Oryza sativa
  unsure (1)..(260): unsure at all Xaa locations
  Clone ID: PAT_MRT4530_71803C.1.pep
WRATAARRRAGWRRGTAGGGYGYGGYEGRDDRKWWPWLVPTVIVACIAVFIVEMYVNNCPKHGSALGXLQKMGALDWNKVVHQHQGWRLISCIWLHAGLIHLVVNMLSLLFIGIRLEQQFGFVRIGAIYLLSGFGGSVLSALFLRNNYISVGASGALFGLLGSMLSELIMNWTIYSNKAAAIITLLFIIAINLAIGILPHADNFAHIGGFVTGFLLGFVLLARPQFGWMERHELPQTNQPPKYKAYQYVLWVVAFVLLLV

SEQ ID NO: 173802 - protein, 408 aa, Oryza sativa
  Clone ID: PAT_MRT4530_71804C.1.pep
MAKAMLSLLVHLHAALLFVPEPAGAGAVYSVVRYGARGDGASDSTRPFLRAWADACRSPRPATVYVPPGRYLLGRATFVGPCSSRAVAFSIAGTVVAPAGYAWDGATAGQWITFESVVGLTVSGGTLDGRGDALWACKKQQPRGHCPTGASSLTISNARNVVVEGVRSVSSELFHVVVLQSRGVTVRRVTVEAPADSPNTDGIHIHKSTNVAVYDAAIRTGDDCVSVGPGNSNLWIERVACGPGHGISIGSLGKQQGMAVEAVQNVTVKTTWFTGTTNGLRIKTWGNSKRGFVRGVTFSDSTMAGVGNPIIIDQHYCPDGGCGGAARGSSSGIKISEVEYADVRGSSATPVAVSFDCSRSNPCSGIRLRDVRLTYQGKSGRLQAAGAVSSCRNAQGTASGLVVPPSCL

SEQ ID NO: 173803 - protein, 323 aa, Oryza sativa
  Clone ID: PAT_MRT4530_71805C.1.pep
MASNGGEEKSRVAAGYGGGGYGYGGYEGRDDRKWWPWLVPTVIVACIAVFIVEMYVNNCPKHGSALGGCVAGFLRRFSFQPLRENPLLGPSSATLQKMGALDWNKVVHQHQGWRLISCIWLHAGLIHLVVNMLSLLFIGIRLEQQFGFVRIGAIYLLSGFGGSVLSALFLRNNYISVGASGALFGLLGSMLSELIMNWTIYSNKAAAIITLLFIIAINLAIGILPHADNFAHIGGFVTGFLLGFVLLARPQFGWMERHELPQTNQPPKYKAYQYVLWVVAFVLLLVGFVVSLVMLFKGKNGNDGCHWCHYLNCVPTSKWKCNT

SEQ ID NO: 173804 - protein, 45 aa, Oryza sativa
  Clone ID: PAT_MRT4530_71806C.1.pep
SQWLLSASPMTTPYLSTFLHALALVSTVAGPPLSDMAMSSISISE

SEQ ID NO: 173805 - protein, 269 aa, Oryza sativa
  Clone ID: PAT_MRT4530_71807C.1.pep
MALSWPSAIRLAVAAVLLAAVGVALFTLPVDKILKDFLVWVKDNLGPWGPLVLALAYVPLTVLAVPASILTLGGGYLFGLPVGFVADSIGATIGATAAFLLGRTIGRPYVLSKCKDYPKFQAVAIAIERSGFKIVLLLRLVPLLPFNMLNYLLSVTPVGIGEYMLASWLGMMPITLALVYVGTTLKDLSDVTHGWSEISTTRWILIISGFILSVVLIVCVTRIAKSSLEKALAENGDAGIPQLPVVASPSDLQQPLVIRIDTSNEDHEK

SEQ ID NO: 173806 - protein, 566 aa, Oryza sativa
  Clone ID: PAT_MRT4530_71808C.1.pep
MHSQASAAAEKAVVAPYGSWESPISAAAVSAAGRTVEGLAVAGDGRLLWVETRPEEGGRAVLVKEAAEPGGDAVDVTPEGFAVRSLAQEYGGGAFAVQGDVVVFSNYSDQRLYKQTIGDNSAQPLTPDYTGSVLRYADGVFDPHFCRYVTIMEGSSNLNSDHRKDSSNPVTTIAAVTISDRDANEPTVLVSGNDFYAFPRIDPIKRRMAWIEWSNPNMSWDKAQLWVGYFSEKGFFHVFPYSSVGLLQNGRSCAGVLDHDSGSFSELDIPFSSVTNIVSGDGFFYVEGASATLPVSIAKVTLDEKRKTATNFSIVWSSSEDVMQYASYFSLPEFMEFPTVVPGQKAYAYFYAPHNHIFQGSSDEKPPLLVRTHGGPTDEARGVLDLGVQYWTSRGWAFVDVNYGGSTGYGRKFRERLLGQWGVVDVNDCCSCATFLIADLASLRAGMHKFEAYYIDNLVGNRKAYFERSPINFVDRFSCPIILFQGLEDTVVSPVQATTIYKAIKDKGLPVALVEYEGEQHGFRKAENIKFTLEQQMVFFARLVGHFKVADGITPIKIDNFDEPSL

SEQ ID NO: 173807 - protein, 92 aa, Oryza sativa
  Clone ID: PAT_MRT4530_71809C.1.pep
SRTEHVSDCYQAERDSVRMQQHVTTPPTPIRCSTTFYYVIPTHRPTSVTQRRILPIDKLEGPVLLPRRRNISHHACCLICVRIAQIMLVVPH

SEQ ID NO: 173808 - protein, 101 aa, Oryza sativa
  Clone ID: PAT_MRT4530_7180C.1.pep
MEAWSRGGGGVDRRRRKRRRSGQGGGGGVRGSAEAARVRVRVVREADWRRREDAAAFIYEARACGGGSRWASSGRAYRYTGLGRAGPACCCGSLGTARLSG

SEQ ID NO: 173809 - protein, 51 aa, Oryza sativa
  Clone ID: PAT_MRT4530_71810C.1.pep
EEILKCYANCHFSFQQPLAWMFIHSTKFTTNCDKMRFYCWGTGGQVLMVIS

SEQ ID NO: 173810 - protein, 116 aa, Oryza sativa
  Clone ID: PAT_MRT4530_71811C.1.pep
MALSDQTQYAMVIFLPDARDGLRGLVEKIASRPGFQHEHQLPAREKFLKLPKGGAPAAVLTGASFPADLSGMVEEGRRRPPPCFGMVAAPAAQEDNRATSDGGGLRRRSSVCIRHI

SEQ ID NO: 173811 - protein, 30 aa, Oryza sativa
  Clone ID: PAT_MRT4530_71812C.1.pep
LRTTNIKELALIRVYTLLLSPGHKEHQCTV

SEQ ID NO: 173812 - protein, 833 aa, Oryza sativa
  Clone ID: PAT_MRT4530_71813C.1.pep
MEAAAPAMLAPSSLGRHRGALLLPRRFACATNTLKRTPSRAPELEHGEEAISSSAPYVAAPKTDGSWRKTFCWKLMEKDILLEASSIFRLSPVPDYRNREPLSLIVGTIKVKHMKCFHEPELPSTMAASEMPSSFDFYHEWYASTVKSLDEEEAELMAEADGVLAVIPETVLQLHTTRSPDFLGIGPEVSNRIWSDSLADHDVVVGVLDTGIWPESPSFSDKGLGPVPAKWKGLCQTGRGFTTANCNRKIVGARIFYNGYEASSGPINETTELKSPRDQDGHGTHTAATAAGSPVQDANLYGYAGGVARGMAPRARVAAYKVCWAGGCFSSDILAAVDRAVSDGVDVLSISLGGGASRYYLDSLSIASFGAMQMGVFVACSAGNAGPDPISLTNLSPWITTVGASTMDRDFPATVTLGNGANITGVSLYKGLRNLSPQEQYPVVYLGGNSSMPDPRSLCLEGTLQPHDVSGKIVICDRGISPRVQKGQVVKEAGGIGMILANTAANGEELVADSHLLPAVAVGEAEGIAAKSYSKSAPKPTATLSFGGTKLGIRPSPVVAAFSSRGPNILTLEILKPDVVAPGVNILAAWSGDASPSSLSSDSRRVGFNILSGTSMSCPHVAGVAALIKASHPDWSPAQIKSALMTTAYVHDNTYRPMKDAATGKASTPFEHGAGHIHPVRALTPGLVYDIGQADYLEFLCTQHMTPMQLRTFTKNSNMTCRHTFSSASDLNYPAISVVFADQPSKALTVRRTVTNVGPPSSTYHVKVTKFKGADVIVEPNTLHFVSTNQKLSYKVTVTTKAAQKAPEFGALSWSDGVHIVRSPVVLTWLPPQ

SEQ ID NO: 173813 - protein, 97 aa, Oryza sativa
  Clone ID: PAT_MRT4530_71814C.1.pep
MEVKKPVGSRCRQLALKVMTPNCGGGDVASREDDSTSWRHTRWPVGEDVDALQPRHNKPAVQAETPVDGGEAPDSLVNGEPVDVVRQRKRKISYKEN

SEQ ID NO: 173814 - protein, 369 aa, Oryza sativa
  unsure (1)..(369): unsure at all Xaa locations
  Clone ID: PAT_MRT4530_71815C.1.pep
SGSPGCRICDRGISPRVQKGQVVKEAGGIGMRVANTAANGEELVADSHLLPAVAVGEAEGIACQELXARAPQNLTATAXFVRERGLVHPGRRRCVAAFSSRGPNILTLEILKPDVVAPGVNILAALSGDASPSSLSSDSRRVGFNILSGTSMSCPHVAGVAALIKASHPDWSPAQIKSALMTTAYVHDNTYRPMKDAATGKASTPFEHGAGHIHPVRALTPGLVYDIGQADYLEFLCTQHMTPMQLRTFTKNSNMTCRHTFSSASDLNYPAISVVFADQPSKALTVRRTVTNVGPPSSTYHVKVTKFKGADVVVEPNTLHFVSTNQKLSYKVTVTTKAAQKAPEFGALSWSDGVHIVRSPVVLTWLPPQ

SEQ ID NO: 173815 - protein, 84 aa, Oryza sativa
  Clone ID: PAT_MRT4530_71816C.1.pep
MEGRTQRRACLDHSPRVACPKVDVSSILGQISSESAESESGPARRASAAGRRAVRRRRAAAQQWASAAVAGGRGEEAAAAGWRL

SEQ ID NO: 173816 - protein, 179 aa, Oryza sativa
  Clone ID: PAT_MRT4530_71817C.1.pep
MDFCKARWKVPALCLVTVLLQASLSACAPTPKTYIVQMAASEMPSSFDFYHEWYASTVKSVSSSQLEDEEDDASTRIIYNYETAFHGFAAQLDEEEAELMAEADGVLAVIPETVLQLHTTRSPDFLGIGPEVSNRIWSDSLADHEVVVGVLDTGIWPESPSFSDKGLGPVPAKWKGLCQ

SEQ ID NO: 173817 - protein, 47 aa, Oryza sativa
  Clone ID: PAT_MRT4530_71818C.1.pep
QAPHSYRSSASWPLSSFRLGTFMWPSLRRCAVAGEQRIYLTTPPLRL

SEQ ID NO: 173818 - protein, 130 aa, Oryza sativa
  unsure (1)..(130): unsure at all Xaa locations
  Clone ID: PAT_MRT4530_71819C.1.pep
TKAQRKKLNKNHKAGRAPPTRTGAPKREGRTTQGRPKNPKNRGNPGETYRGPRGDLGGPPRPLGKNKLKGGKTHXRGGGSPKPALEAPSRAAGPHPGGGTRGTTAAPGATGAPGGTQPPGGNPGVAKKRG

SEQ ID NO: 173819 - protein, 638 aa, Oryza sativa
  unsure (1)..(638): unsure at all Xaa locations
  Clone ID: PAT_MRT4530_7181C.1.pep
MDVWNEWAPQILVVLSFTLQLLLLLLAGIRQHRGASCLLTAVLKGVLWLAYQLADSTAIYAIGHLSLCDPPPEHQLVPFWAPFXHLGGPDNITAYSLEDTKLWLRHLVSLVVQRQXNSLRLAAVLMFTVGVIKYGERTWVLRCGNIDTIRSSLRKEPRTKCYFYLEDEPRQRSFKREADEEEFLVRHAHALFHICKFAVVDDSPTDDKVGDTREANIFNVLDDKEKYALMGIELSLLYDVLYTKLRVIHTCIGYSIRVVSPLATAGSLLIFQFGDKDGQHIADIAITYVLLTGAVFLEVISVHTVLCKGRWHCFRRKIVSLCHHFKVMGVNRYFIPSRRRFGSMGQYNMFHLCTRRGTSYTPILGWLVKLFGQDDLWERYHYSGDVEIPEKVKEMAFKHINRITEKGDVNTMGVIRKNWGQRTMERFRWEPSDTYMGAEFQEGIIIWHIATELFLSRFNRVNDQNDAEPTMQAIKALSNYMMFLLVARPDMLPGLAQNRLYQRSWKFLYEEIWPKVIDDPTYDHPCWIIRTMFKELFSLQRDEPNSDSWRPQGEKLASKLLEVWRNYVNEEEGVILKPEASRVIYAVSLADKLKEDSQLLLEMWIDFLVYAANRCSRESHAKKLNDGDVICNEEGRYR

SEQ ID NO: 173820 - protein, 380 aa, Oryza sativa
  Clone ID: PAT_MRT4530_71820C.1.pep
MSASFPEAGASTRSRPWLLDDAGGRWTTKTVWMDDPRRPPPVEIPINARRLNHHITTTTITLGGELAGAMGWVDLWTGILIYDLLHDDKDQDRPTLRHMPLPLPMHAITGNHGMGDKLALGCPRSLRGIASVTRRGKACLKLAGVHVTGERLPYNDAETQLPAFAVDDWTVTTWSNDKMKGYFEDWQEDFTIRGSEVRISNAMRSDLLRSGLLYRKPSRGDGDEATVEELALHNLWVSHPTPSLDGEEDVIYLLAKPKCFHPKAWVLALDTRSSTLLGVVEFGTETAPSAVMVPPLLKIDKENIYYSLRFTMVYGGARTHFPACLSQQLTADLSDGSARAPHFRPAFPAAQQLASPLPPTAAGSAAARRRKCGGWGLAVA

SEQ ID NO: 173821 - protein, 85 aa, Oryza sativa
  unsure (1)..(85): unsure at all Xaa locations
  Clone ID: PAT_MRT4530_71821C.1.pep
MDAIDSVVDPLREYVKDSVRLFKRFHKFHRKEFXKVALRTGXGFVDMGFVGFFVKXYIFIPINNIIRRVPARAGMLKGKDSCMGG

SEQ ID NO: 173822 - protein, 77 aa, Oryza sativa
  Clone ID: PAT_MRT4530_71822C.1.pep
CSVCSYILRTSVVNLQCPKKIASRCFDNVLYQIMLTHFTSYRKISSFKPLSIMQCGKKVYVVFNYYPAISSQLYCFF

SEQ ID NO: 173823 - protein, 63 aa, Oryza sativa
  unsure (1)..(63): unsure at all Xaa locations
  Clone ID: PAT_MRT4530_71823C.1.pep
HAASASDPSPSRVAPRSFTASAPPLASPPPSHPXRAPPPTIPPPPWPRGAAPSASALPPLRQP

SEQ ID NO: 173824 - protein, 158 aa, Oryza sativa
  Clone ID: PAT_MRT4530_71824C.1.pep
MVRTPGGSGEGVEERSGEVELIDAGSGGSPPKQRRQPRSNSGGREKGASTTQSDFRRAELAAVVAKEDTALRAAIPVRQRITVCVWRLAMGEPLSNRTQCSPRRGNGDKRDGKNEEGIPPAITTVGGSELPAPQPRLTHGPQPRSSADGSDEERDEEW

SEQ ID NO: 173825 - protein, 98 aa, Oryza sativa
  Clone ID: PAT_MRT4530_71825C.1.pep
HLGAGEFNVCILISLTKPTIGHCPIYTFFISMLRYYFFSHITFQTPLTALRFLFCSLSPSFYLISSISIFLPLPLSSHFPFFFFLSLFLPPYPLPTLL

SEQ ID NO: 173826 - protein, 123 aa, Oryza sativa
  Clone ID: PAT_MRT4530_71826C.1.pep
MAADRASPLAHRRDCHIVTGAHFSTMPDYLDGATTVEVGNINAFSVGIGLGGIGELGSRMPTEAWLELSQPTTCESLLSVSTGRTQAPYMVQLAGLARWSAFVPFTAVISMICVAMHGEIVQQ

SEQ ID NO: 173827 - protein, 42 aa, Oryza sativa
  unsure (1)..(42): unsure at all Xaa locations
  Clone ID: PAT_MRT4530_71827C.1.pep
TSKIXYRGRGYQKRXHXIHIYQLNSLKXNINGIYFKKSMGIS

SEQ ID NO: 173828 - protein, 63 aa, Oryza sativa
  unsure (1)..(63): unsure at all Xaa locations
  Clone ID: PAT_MRT4530_71828C.1.pep
DAWGAASATSRPHRRIEFIVGANVLVGGAFDGAXSMNPAWSVGPALSSWSXESQWVYWDXPLI

SEQ ID NO: 173829 - protein, 128 aa, Oryza sativa
  unsure (1)..(128): unsure at all Xaa locations
  Clone ID: PAT_MRT4530_71829C.1.pep
XGXICFFXTHNXXXXXXXWXKRXXXXFXWGXRXXISFLXRGXSXGXEPTXFXLGGGXXDXXPKXXLHTXKHGXXFTNQWXDTXXXRXVPHLXXPTXXXRNXSXXXKQMXGXXXKMCXGXKXEXXXGRX

SEQ ID NO: 173830 - protein, 693 aa, Oryza sativa
  unsure (1)..(693): unsure at all Xaa locations
  Clone ID: PAT_MRT4530_7182C.1.pep
MAQLLHHQDSAFYGKELHGRRWSILQFFGFRRRLRSTKMISDKKQSQGKGSGGSRRRGSYVPLKDEDTSVMDDDKHTETTKKNKSSKKSSGKGSLGSLILKKLYGKEGHKEKMLPVAPKLLRTLSIHYLESNEYVLDGESASNGDGSSQSIMPNSTDTNIQNATFNTQDGCDNDTSSSLLKRGDIHVKQRSHRSISMDGVLHKVPYGHKASEDVIKEGLSRSASATYDRDGLKSYTVTAAKRPVNQGFRRSRSLTESLEKYSHLLDSISSNQSKRTLTSSKSTRDHSLDAPAVMTGLQSLVMTAENLVIPEHALAPYVPERIIVDGDVDAAMDEISGHKDADGSENTVLIEEYIVDKKCGVSVSTEANICTPPLLSEVIDISQGHVATCDDDQXEIDVPEEHGTTCDDDHTNLSTEAXREGTFCVPRPSQEIEAEINLSCEQETDSPMSVLDMTFPDDPASPVKYTILDDSSLKPRVLHLSDTDDSADMDLNTSTSMELSTAGLGHKNVQESDSDELSSLQADPKNEDGLIYVKNIFMKSSFRNEVLFDEWCSQNITVLQEEDCQHYEAAAAAFDFTEMSADQLLLSDLTNEVLLDIYKKYSVSKSLLSRFSSFDRPKPVGNHALKELWSKVSCHLDEQPQSSIEIDTILSNDLSKNDHWVNFQRDADHLGNMLADFVFDRLLTEFTLQLAKF

SEQ ID NO: 173831 - protein, 32 aa, Oryza sativa
  Clone ID: PAT_MRT4530_71831C.1.pep
MFLEHFIACLTKCMRECESEAEFEETWAMMLN

SEQ ID NO: 173832 - protein, 117 aa, Oryza sativa
  Clone ID: PAT_MRT4530_71832C.1.pep
MISSSEEATTSYLASCLTLLGLCFCVLVGVVRRKRGVRGELCVLTSLSVSHLISLSLFLPHVLYCSLISIFFEISMGFGGLTEESEHTRCFLSMQEPCWELCVLTLYLSAVHHAQYD

SEQ ID NO: 173833 - protein, 148 aa, Oryza sativa
  Clone ID: PAT_MRT4530_71833C.1.pep
PPELVGRSNDHAATAGHLHGARGRRLPPGKKTDQQGRRHRNAARRRRHRVQRVRRRRPFRRLLLARRRRPLLRRRRLYRDGHRRRLLGAQRRGGGGGGGGGVAWFLGTLRAPARRRAAAAAGHGGAPAAAGAEAAVASPAVVGTEAGG

SEQ ID NO: 173834 - protein, 75 aa, Oryza sativa
  Clone ID: PAT_MRT4530_71834C.1.pep
RTRGNTLNPTFSLVSIHMHSRDESNQEAYKDHITKLQTNSKRHIYLRTFGANTTVASPIWQQSIIHHYLWKLTVL

SEQ ID NO: 173835 - protein, 218 aa, Oryza sativa
  Clone ID: PAT_MRT4530_71835C.1.pep
LGRHRQFNSQASPLAETQYPKGVVNVGTRKSPLALAQTQIVVDALKQRFPDHDFPIHSMTTTGDRDQNTALYNFGGKGLWTSQLEERLVNRELDIVVHSLKDMPTVLPEGCVLGCVTSREDPRDTLVIKKELQDKHGWKTLADLPAGSIIGTSSVRRIAQLVRRYPTLKFKDHRGNIHTRLRKLEEDPHLTGIILAAAGLQRMDLGHHITHSSSPKTE

SEQ ID NO: 173836 - protein, 155 aa, Oryza sativa
  Clone ID: PAT_MRT4530_71836C.1.pep
MAAAAAACGDSSGAAVDAKEDCESEKEAHKLKRMLEDHRTSLYPGPKQPGNDIDVYLTPLVEDLKLLWKKESVPVWDEDKHEEFNLRALLFVTINDWPILSNVSGQSNKGGKTVFAMVKDLKVVFGKGPGSQPIDSEDGHAAMWKKKLSFRETVQ

SEQ ID NO: 173837 - protein, 169 aa, Oryza sativa
  unsure (1)..(169): unsure at all Xaa locations
  Clone ID: PAT_MRT4530_71837C.1.pep
RPKQPGNDIDVYLTPLVEDLKLLWKKESVXVWDEDKHEEFNLRALLFVTINDWPTPSNLSGQSNKWSKTCTHCIDETESTYLKHCRKVAYMGHRRFLAANHPVRKKGNHFEHKADHRTKPKHRSGKTVFAMVKDLKVVFGKGPGSQPIDSEDGHAAMWKKKLSFRETVQ

SEQ ID NO: 173838 - protein, 508 aa, Oryza sativa
  Clone ID: PAT_MRT4530_71838C.1.pep
MAAVVDFLDLRAAAPFVVAALAFYFLVEQLSYHRKKGPLPGPPLVVPFVGSVAHMIRDPTGFWDAQAARARKSGAGLAADFLIGRFVVFIRDSELSHRVFANVRPDAFHLIGHPFGKKLFGDHNLIYMFGEDHKDLRRRIAPNFTPRALSTYAAIQQRVILSHLRRWLDRSAANGGKAEPIRVPCRDMNLETSQTVFAGPYLTKEAREKFERDYNFFNVGLMALPVDLPGFAFRSARLGVARLVRTLGECARASKARMRAGGEPECLVDFWMQETVREIDEAKAAGKPPPAHTDDEELGGFLFDFLFAAQDASTSSLCWAVSALDSHPDVLAGVRAEVASLWSPESGEPITAEKIAEMKYTQAVAREVVRHRPPATLVPHIAGEEFQLTEWYTIPKGTIVFPSVYESSFQGFPEPDTFDPERFFSEARREDVVYKRNFLAFGAGPHQCVGQRYALNHLVLFMALFVSVVDFRRDRTEGCDEPVYMPTIVPRDSCTVYLKQRCAKFPSF

SEQ ID NO: 173839 - protein, 50 aa, Oryza sativa
  unsure (1)..(50): unsure at all Xaa locations
  Clone ID: PAT_MRT4530_71839C.1.pep
VCDEWEEYXTPLLTLSTQTHTTPTTHLITLNPTTLHSSLHECXALXTXAL

SEQ ID NO: 173840 - protein, 186 aa, Oryza sativa
  Clone ID: PAT_MRT4530_7183C.1.pep
MATIDITAAHTKIKLTKFWNPIQPPATVLNLNGRQICIRAMFSVRIRVTTSCNVTSKASICSIAIVERRDGGWTATRACAELSQGESRQKHNRWASMVKLLRYTHVNFLATQKTDSLSFPVLFFAEFDNEKTEGEPPVFCCKVDMQLPCADNLESMCVKNIGNVEYNTTKHLMTFKFTPNKVVFTS

SEQ ID NO: 173841 - protein, 141 aa, Oryza sativa
  Clone ID: PAT_MRT4530_71840C.1.pep
MALLRCQSGAKLEIASDFLNDAFKKDVTLATSPSPAQEWTRFSSGESKQGKTGKRNKTSPRRERRPQVSPSRISPWSLPIYQCEGIPTVNIASAHRHVSHHNKLRWSSFLHRSRQHPPRVEITTIVNSASEQHTSIFSSQK

SEQ ID NO: 173842 - protein, 116 aa, Oryza sativa
  Clone ID: PAT_MRT4530_71841C.1.pep
MGRGTAWKMTGRGAARKTTGRGTGARPPDGGTLTLGRCREGSVFVPPTSAPGCPIKILRSYGRYWPDRIRPKWRYARGGFPGPGSGCGRVRWGAPAGAQKLLWANRPGRKKSDLGP

SEQ ID NO: 173843 - protein, 69 aa, Oryza sativa
  Clone ID: PAT_MRT4530_71842C.1.pep
ERLQWWQSINSSRGSSPSRRYLQPPMATFRLLSAIHFRCMPWDRSKEICTTCTYSHKETPPVITREWHG

SEQ ID NO: 173844 - protein, 938 aa, Oryza sativa
  Clone ID: PAT_MRT4530_71843C.1.pep
MAYCEAGGPVGRSPPSGSGGGGRRKTLAEVMATRTPRPASIRPEATRAAEAAAREVLLRVAPTEEAERRRQDVVGYLRRLLGTALGCEVIAFGSVPLKSYLPDGDVDITVLGNTALDGACISDVHSILESEEQDSGAELEIKGLHFIDAEVKLIKCVIENIVVDISFNQIGGVSTLCFLELADRKVGKNHLFKRSIMLIKAWCYHESRILGAHHGLLSTYALETLVLYIFNIFHKSLHGPLEALYKFLEYFSKFDWDKYCISLNGPVLLSSLPSPAGSFYRIRGALSFGAQKLGQILMLHSDLIPTEIFGFFANTLKRHGRGERSDVGNNDSIESLLDPEYALGKDAPDFTNSDRNQDENRNPNLQTTSYRYFHGDAKDHPWNKIWLTNFDIQYYNMVSGASLMSHSTSSTENGNHNIKQRCSRSLMEQQIYASNQPHILTPSTHKNTLDVINSCRAELNRSDLHEEKVILSPFSPSNLLDLSGDLDLHLRCLQKIQYHLESMFDGLVQLIQEAFLSGLLDEDSFKIPTRSFSNSTDERPTGLLPVASVDTGTRNLCPVSYFPSTGDVSHKSHTEDQVNAVCQKNVVLSSGTCIISNGFASSPSPPADLESYPVSWFHNTQEIMAHGTGMQTLKNVSLLPGTDVLSNVVGQLPFLAADSENYSFSRSHNTREKRVMRGTGTFLPRMSYYTYKERILSEKGRRERERLPDRPWKIKTNPTGYLHQHTSPEVGCSGASTGGITIDQNSSQQDYSRSSVPAEGGVFQKRALINHVSEQIQTSLPWDVHNNQHGYVYSDMNMVDNQNPGTTSEGLVGHNSESRELPIHHPPEVQFSETMASSPCILLPHCIGNGQGNLLQESNTCQPFPPATDVFHSIKTKQDENLEVESFRPIPFSSPCAKFGEAFPLPTSKGPAETESRPDGLYQLRDEADFPPLQTRSC

SEQ ID NO: 173845 - protein, 407 aa, Oryza sativa
  Clone ID: PAT_MRT4530_71844C.1.pep
METAVLSTLLNMLGPKLYTFLQENHELRRNLEHDIRYIRNELRMIGAVIDEHERGQMNHGGPLQGAWIHGARELAYDMEDCIDRFMHRMTSGHRLATMAVRTKFATVIQKLRKKSEDLSKLRANYTTAGNGNGDCQASTSGTMSSFETTHIPTADTVPVGMDGPRDEILELIMETQSQPNQLKVISLVGFGGLGKTLLAKQIYENTTICTQFEPQAWVSAAGKSARDVLKEILCQLGFQSQAQEDDVSKLITSLKKCLHSKRNEKVTTTRWKVSRVPTNTGKFMFLPKFFIVIDDIQREYWNSTIKDAFPVDTGSSSIVLVTTAIHSIANACSSGNGHVYMMSTLDKKYSRKLFLREASWGDYPPGSETVLSTKCDGLPLALVSTAQFLKSKGQQLPQEYAKLCGNL

SEQ ID NO: 173846 - protein, 319 aa, Oryza sativa
  Clone ID: PAT_MRT4530_71845C.1.pep
MAVDAHHLHRLPPPIQPAESMFSPRQPCFGAAAGEVVVGGAGGAVMAGLCQEEQLVQGYRQVFVGGGGVRQPAAAEVMRQYSQVCAAAADAAESGVTFGGGQEAAAPRKRKRAEVPVVLGAAGDVAVAAQARQQLVDVDRLVLHHAAKMWAELAEQRGRHARQMVATVEAAAARRLRAKDEEIERIGRLNWALEERLKGMYVEAQVWRDLAQSNEATANALRGELEHVLDAHARRGADHGDGDDAESCCYGENDVLARAAGDGEAASAERRCKGCGEAAAVVLLLPCRHLCACAPCAAAAAACPACGCAKNGSVSVNFS

SEQ ID NO: 173847 - protein, 304 aa, Oryza sativa
  Clone ID: PAT_MRT4530_71846C.1.pep
MTFNHWKTGLMCKLEFEGHLPNLCDSMGMGLNPSMDNFKINKLLGKGRYGEVYECTYSNGQYAVKTIDVTNYFDHTEPREVSIMSCLQDANIVTFYQAWCENKKEENKFHGFGVHEPKYIYIHMEACARTLYDFLCGNNEGTIQDRWSLFERIVKGVRCIHATGIIHRDLKPWNIFLGPCGAVRIGDLGHGCWSKSYCDGRRGSPDCGTMLYSAPELRNGLLVTDKVDVYSLGVIYLEIFMPAAVSVNNRVDALIDLMERRYKPEWTAWSIDMEFLKDLTALNPCDRPSVGTILEYIAEHASDC

SEQ ID NO: 173848 - protein, 34 aa, Oryza sativa
  unsure (1)..(34): unsure at all Xaa locations
  Clone ID: PAT_MRT4530_71847C.1.pep
VLEFTMLILIMDAKNYHAWADKHGLIXALGGWET

SEQ ID NO: 173849 - protein, 89 aa, Oryza sativa
  Clone ID: PAT_MRT4530_71848C.1.pep
TPPTFAPPTIAPPTIAPPTFAPPTIAPPTIAPQNATIAPVTNAPRTTVAPPTFAPPTIAPPTFAPLTIAPPTIAPPTFAPPEATLAPVT

SEQ ID NO: 173850 - protein, 463 aa, Oryza sativa
  Clone ID: PAT_MRT4530_71849C.1.pep
MDDKENTLEHARVMPVDLTYKKLEEITNGFSEEHKVGSGGYGVVYKGVLENNTEIAIKKLHQMVGLDDVQFKKEFNNLMRVQHKNIIGLVGYCYEIRHKHIKVDGDYHFSRMEERALCFEYLHRGSLDKYLSDETCGLDWHTRYKIIKGICEGLDYLHNGRPEDQIVHLDLKPANILLDENKMPKIADFGLSRLFGSTQTFTTRTFIGTVGYMPPEYIERRHISMKFDVFSLGVIIIEIMAGQSGRSTSAEMSPQQFIDTVQEKWKKRMQEISSHTSSHEADSLEVKTCIEIAVRCVEPDRKKRPTLREIIDKLNELENVRKALIGQSSAGCKSERLVIDPLEVRFPFEKDRDVSCVLQLTNRSADRVAFAVQVDESKYRAVPDRGVVQPRSRRYIVATSRAQASAPTNLQRDDSFLLRSKRVEGSADDDFAEDFEKLMGKAVDGETMRLPVVYIALPLPPSS

SEQ ID NO: 173851 - protein, 106 aa, Oryza sativa
  Clone ID: PAT_MRT4530_7184C.1.pep
VARKAYLQVKFDEKVCKFVLHKLTRYYGKVNVWVLKQISRYNPLVILCSRSRCVQLCKVLKRVIFKICSVQYIFYTPSMLIFDKKKKKKGAAMLGNIRLNFAAKFS

SEQ ID NO: 173852 - protein, 31 aa, Oryza sativa
  Clone ID: PAT_MRT4530_71850C.1.pep
HNSNSIQHRLKSMHNSRIASTRLNHNAHTHT

SEQ ID NO: 173853 - protein, 94 aa, Oryza sativa
  Clone ID: PAT_MRT4530_71851C.1.pep
LNIEGLCPQQTAVHPMLHGPKHTEHPGHAQALPHDNLCFGDRGASKHAHVQRAGRMTIHWPDDTRARTRCLHPLRRLRWVMLGGSREYWEPGKE

SEQ ID NO: 173854 - protein, 250 aa, Oryza sativa
  Clone ID: PAT_MRT4530_71852C.1.pep
VLVSEIPCCISSVARRVIGSNMLKVKVGGCALLVCAAKEHCQKQIEILSDSSLYIQLIHSLVSMIHMTNLPSENGSGENISDIKISRHSKENNNSDETVCRTAVISGNMIPLWLLAVFARHDSKTRAEILEAGAVEMLMEKISQNAFLYVGEEDSTAWVCALLLALLFQEREINRSNAALHSIPVLSNLLRSDEQAYRYFAAQALASLVCNGSRGTLLAVANSGAATGLISLLGCAEVDIADLLELSEEF

SEQ ID NO: 173855 - protein, 56 aa, Oryza sativa
  unsure (1)..(56): unsure at all Xaa locations
  Clone ID: PAT_MRT4530_71853C.1.pep
GRXRRHFFVXXLALSGDVRXXRSMSTLPIDGHDGGLDDXACXGRCWXGRXVSSNVV

SEQ ID NO: 173856 - protein, 1055 aa, Oryza sativa
  Clone ID: PAT_MRT4530_71854C.1.pep
MCGDCCGRGAGGAAEAGAAGAGGGRKRGCAGTALALVALAAAAAVAVLEGTAGGVSYVGDGWLHECAKWDADGRRLLVSNFFGAGVSELRAEAKGKEKEEERVVLADPDVAGRVALGLTVDAPRGRLLIVYADRLPRFAYSAVAAYDLASWRRLFLTRLDGPGYCHCERPDTALVMGVPQGARGGAKPPLNPTAHLGALTVTAAITPRALLNHPNYARRPRSCSGCVMCGGCCRRRGGAGAGGGGRGTASLAVAALAAAAVVAFLEGTARGVSYVGDGWFHDGVRWDAEGGRFLVTTMTDGRVVEVPGGGGAGAGEGKVEARVVVADPGAAGRSATGLTLDAPRRRLLVVYTDLAPWFGYAAVAAYELGSWRRLFLVRLDRPGDSTLADDVAVDEEGNAYVTDAKGNKIWKVSPDGEPLSVIKNATFFQRPGWINNFVGLNGIVYHPNGYLLVIHTSGGDLFKVCPKTGSVHVVKVKGSLKTGDGLALLSPTRLVAAGLVSRLVESDDDWETAVVTGRSCPDALKSLLSVAPLNDILHEGSAANDAVETMIKILNSPKEETQAKSASALAGLFHCRRDLRETHIAVKTLWSVMKLIDGQTDKILMAASSCLAAIFLSIKQNKDVAAIGRDALAPLVSLANSTVLECRPINQPLSDTINRSGAVLALAGLLEAANGEAAATSEVVDALVLLSKLPKVSSGHTKAPWTVLAENPHTILPLVSCVADAAPSLQDKAIEVLSRLCSDQHDIVGGLVSEIPGCISSVARRVIGSNMLKVKVGGCSLLVCAAKEHCQKQIEILSDSSLYIQLIHSLVSMIHMTNLPSENGSGENISDIKISRHSKENNNSDETVCRTAVISGNMIPLWLLAVFARHDSKTRAEILEAGAVEMLMEKISQNAFLYVIEVSRINIVLVHNHHLCIYTREEDSTAWVCALLLALLFQEREINRSNAALHSIPVLSNLFRSDEQAYRYRYFAAQALASLVCNGSRGTLLAVANSGAATGLISLLGCAEVDIADLLELSEEFMLVPNPDQITLERLFRVDDIRVGATSRKSIPHIQ

SEQ ID NO: 173857 - protein, 228 aa, Oryza sativa
  Clone ID: PAT_MRT4530_71855C.1.pep
MDPSAMNPSEEGKALGMDPSGQGKALVIQPAVNPSGEGEAPVMEEKKKKKTTTTKKKTKTMRFTQEQINNCIAYKDVEIPFNDNMPSLLEALGEETLANFPQDLIDKLKAYEDEREAEKASFIEIQNHIRGERDGILNQYYTKGYAEYEVVVDDDGEEDSKVPPRIVAPPGRRRFRNGVTVKKNQSGGGDSPNANASRINTSNEAVRWRQFSQFSLQTVVVSKNSEKA

SEQ ID NO: 173858 - protein, 120 aa, Oryza sativa
  Clone ID: PAT_MRT4530_71856C.1.pep
KPSNIDPSGKTEILVARSETVGTKESDANSNPNAEEEARKTSGAADNKPPTGNQSAGANTGSNQEPLAENQSGGENHDDQIPSFQEKTSSPPPAQEEKTTDPELSGGPHHFHADIITGYF

SEQ ID NO: 173859 - protein, 37 aa, Oryza sativa
  Clone ID: PAT_MRT4530_71857C.1.pep
FLKLSVPMYVRSSECIYSDLYEPPSHLLVTKKSATPG

SEQ ID NO: 173860 - protein, 194 aa, Oryza sativa
  Clone ID: PAT_MRT4530_71858C.1.pep
ENVVKNSRITTALADIEQYWRDQGRKTDENIRLKAVELAKQNAKKGFEILDQHHQNSELSDWLVEVSKLTANVKYLPTFVEMQLLTTPNKALILAFFPKFIKTLSETLAQPNFDTYQAWADKWQLSTDELREWKIAFISRLFDNQDPNFNIWRDKQLSEIQTDSLIERRIRMALWQQQPLAQWLALLSSKAQEK

SEQ ID NO: 173861 - protein, 904 aa, Oryza sativa
  unsure (1)..(904): unsure at all Xaa locations
  Clone ID: PAT_MRT4530_71859C.1.pep
MATTSSPPTCLRHRRLVSSPIRLVGHTTVHGRPRLHXTGWPSRRRLVFPPARLAYYPAVVGCIRLHRXKASSAADWCFRLHGWLVTPPLLGVYVFTDRLVFAGADWCLRLHGWHIMPPLLGIYNFTXRPASVAADWCTRLYGWLVTPPLMGVHVFTDRXPSPPPTDVSACTAGLLCCRCWASTSSSXLPRPLPTGVSAYTVGWSHHHCWASTSSPTGLSSPAPTGVFAYTAGLLCRRCWAXSTTSPSACLCRRRHVYSPIRLVGHTTAHGRPRLHRPAGLRRRRLMFPPARLAYYAAVVGRLRLHXPAASSAADWCFRLHGWLVTPPLLGVYVFTDRLAFAGADXCLCLHGWPIMLPLLGIYNFTXRPASIAGDWYTRLYGWLVTPPLMGVHVFTDQLAFATADWCLCLHGWPIMPPLLGVYDFTAGLPPSPPTGVSAYTAGLLCRRCWASMTSPTDLPLQPPTGVPASTAGLLCCRCWVSTTSPXGLPPSPPIGVFACMVGWPHHRXMGIYNIITGLPSSPPTGVLAYTVGWSHHHCWASLSSPTGFLVRRRLVSPPARLAYYAAVVGRLRLHRPAASSASDWCFRLYGWXSIMLPLLDVYVFTDRPPCPSPTGVSACTAGLLCRCCWVSTSSPXGLPSPPPTGVSACTAGLLCHLCCWTSTYLPGPRALFDPPMKLSGFTGGTRRRNXXXXFTDRLPRMTPTXCYRLHGWPXSPPPLISCLRLLPTAXVFVTIDGHHHYHQLAFAADDWCLRLDGWPIMISLMDXLFSPSVTMVEQLHLHCLLHXQTELLLLRKFFYFTNHDVYKSLDISACTTRFNAVLFYYNKWCSNLQYFYSDILNAYIHSSDGYSMTRSYSSQLTKESGATQIQDSKFDKLYVKMKQSINKRVNSGSYYIYLCFRAGI

SEQ ID NO: 173862 - protein, 62 aa, Oryza sativa
  Clone ID: PAT_MRT4530_7185C.1.pep
MAWMEKDRQWVAGGGDKERGYGDRPGQERHDRGKASEWKKTSESGYGGGVGVMIRYPGTLHG

SEQ ID NO: 173863 - protein, 440 aa, Oryza sativa
  unsure (1)..(440): unsure at all Xaa locations
  Clone ID: PAT_MRT4530_71860C.1.pep
LGEKGDKVVEQESQELINPIEMLTQEDLEGTQNDWLTMGEKNLLDDEMERCQIPTDSDIERLREEENRDDEXSFQEVSHKKKSRGRKTEPTITSRMSLRNRELADVPVTRRARILTQKKNMEGNDSVELNKIAIAAKIDLGSTSTEIDTNLESLKSKEIAHAKLAELNWKKEMENXKSKEGNVEKSEEVNQKLGKEVVAKKVRXPLEEVAAEKSPELIKRATHAGAYFLCCVLKNKKDDYLYEIISVCGPVDNHLKGGFLDELKWHIQGNDYPFILGGDLXLYRFAWEKSNANVDSRNMLLXSFIADLDLRETFRNGPKYTWXXKQECPAQEVLDRVLMNDSWDIKFPSALLSSLPXVGSDHTPLLLDTDEERERSCSYFKFESAWLAENGFKEMVCHKMLERDSSYILEFWTRKQSEMRKFLTGWVSRPRKLHLRHLKA

SEQ ID NO: 173864 - protein, 187 aa, Oryza sativa
  Clone ID: PAT_MRT4530_71861C.1.pep
MELRARRTAEVARCPAWSGGVRVAWLLSPAVRGSGTDRSRHGARASPSPGTGSVARRPVRRLELPPSLRPPPLPPRPGDLLPRGRVVVGETEVPEIVKAAQDAWAKVEDKYAVTAIGVAALVGLWTAIGAIKEVVADGGGGDYDGDARTRYSRCRRRSRSWSDALPPLLPTRRHATAGAVDGADDLS

SEQ ID NO: 173865 - protein, 43 aa, Oryza sativa
  unsure (1)..(43): unsure at all Xaa locations
  Clone ID: PAT_MRT4530_71862C.1.pep
MXLXDWLYGALAALGLGXKEXKXXXLXLDNXXKTXXXXMGKDE

SEQ ID NO: 173866 - protein, 58 aa, Oryza sativa
  unsure (1)..(58): unsure at all Xaa locations
  Clone ID: PAT_MRT4530_71863C.1.pep
VIVXGDRSKMXKXXGGGWGGEXKEMXYLXXXXVNYLXFXGWGDGXENEFXXIDEIXEK

SEQ ID NO: 173867 - protein, 66 aa, Oryza sativa
  Clone ID: PAT_MRT4530_71864C.1.pep
WQYDPPSSRCDFALARLRQARSSDSKSSFYGITPVTRRTYKSCNRVWYSVARQQQKQEQQLQKQPM

SEQ ID NO: 173868 - protein, 136 aa, Oryza sativa
  unsure (1)..(136): unsure at all Xaa locations
  Clone ID: PAT_MRT4530_71865C.1.pep
MGKDTIVDLLTSIRNTDMNKKGTIRVVSTNITENIVKILLREGFIESVRKHQESNRYFLVSTLRHQKRKTRKGIYRTRTFLKRISRPGLXIYANYQGIPKVLAGMGIAILSTSRGIMTDREARLNKIGGEVLCYIW

SEQ ID NO: 173869 - protein, 62 aa, Oryza sativa
  Clone ID: PAT_MRT4530_71866C.1.pep
MPVAAENDHFNDNINDNLYLLMQSCKCTLVYQTELRTLTNSQALLVTIYKNYPRVDQTESHY

SEQ ID NO: 173870 - protein, 136 aa, Oryza sativa
  unsure (1)..(136): unsure at all Xaa locations
  Clone ID: PAT_MRT4530_71867C.1.pep
MATDREKEREAELESAMYTNCLLLGLDLAVLGSPSSPAAGPRVGLFRHSNPRLGEQLLYFLLSSLRGPAQSAKDFDKVWPIFDSAQSREFRKIVQGIISELEQQGALPRSNXRVSSLATCCGPRFVELLWQLSVHA

SEQ ID NO: 173871 - protein, 88 aa, Oryza sativa
  Clone ID: PAT_MRT4530_71868C.1.pep
GSLCTSLRLVRGPKGTLPCVRPTHHQGHPWWTSDSPACTPPRRMDFSCTSSAWHGRPAERSITTALLRGALLGDYDTLRAGRSLLPPQ

SEQ ID NO: 173872 - protein, 519 aa, Oryza sativa
  Clone ID: PAT_MRT4530_71869C.1.pep
MAFRQRSISLPSRPHSKVEEELCILDACISSPSTTLDTMCEGLRRLANIYSSIEEIMCLPSNQAFSSQRRKLLDGEMECSLELLDLCNVMHEDFTELKAIIQDMQVALRKGDDAAVQSKTQSYYRLLKKAKKHFKTAKKVTYEKEDCRMARLLREARDISTSMLESTLHLLSKQIEMPKQSLVSKAFNKKKVVICEEEQLQNHKELSIGPEHSLVYSGLNRMAAKDSAGNARHCEDTADTVAGVAAGRVVAASPAAGGERRISSLLFFFSERNKSSASIPAMAFHLRSASAPSSPRSAKTDVEEQLQSLEEIVSSPSATIETMCNGFRRLTDVYSCMDEMMCLPSFRLQQRRAVEQELERSLALLDLCNAMQESFSELKASTQEMQLAIKRGDDAAVQSKVQAYTRLTKKAQKQFKKINKKSASEDQEGCRVVKLLADAREIALSVLESTLHLLSKQIAMPSQSKWSLVSKAFQKTRVTCQEEQLQALELDIVDLESGVETLFRRLIQSRVSLLNALSL

SEQ ID NO: 173873 - protein, 762 aa, Oryza sativa
  Clone ID: PAT_MRT4530_7186C.1.pep
MASSLTPRSPYPKKENLGNARRGMGVKPGPRRNVLSAINNGGGTNSDTASVDGGEGGAGPAAPVIEFTGREDVERLLAEKMKGKSKTDYKGRTEQMSEYIKKLRACIRWYIELEDGYLVEQEKLRSTMDAENAQHAELEAQLSSDLEELKAAHLNLTRQCDSLEESFNKEKADRMLAVESYEKERQQRESAEASRDLLSVDLERVSHEAKRFSEQLKMVQDTNKRLQEYNTSLQQYNSNLQADASKSGDIISKLQKEKSAMMETMASLKDLNNSMKNHLDSSRTSQQEAIRMKEQLMKEVDCLRIELHQIREDRDQSVSQVNTLSAELANYKELAGKSTKDCESLSVKVSAFELADVTAIEAMTGYEEQKVIIKDLEERLASAEFQIVEADKLRKKLHNTILELKGNIRVFCRVRPLLQDNDSSGAEEALISYPTSVESAGRGIDLMNQGQRFSFSYDKVFDHGASQEDVFVEMSQLVQSALDGYKVCIFAYGQTGSGKTYTMMGPPGRDQKGIIPRSLEQIFKTSQSLESQGWKYSMQASMLEIYNETIRDLLAPGRSNNFDLSTSKQYTIKHDPQGNTTVTDLTVADVFSSADVTSLLAKASQSRSVGRTQMNEQSSRSHFVFTLKISGSNENTGQQVQGVLNLIDLAGSERLAKSGSTGDRLKETQAINKSLSALSDVIFAIAKGDDHVPFRNSKLTYLLQVSDLCKWMPCLGGDSKTLMFVNISPEASSVGETICSLRFASRHWGYHLAEADEAACFL

SEQ ID NO: 173874 - protein, 285 aa, Oryza sativa
  unsure (1)..(285): unsure at all Xaa locations
  Clone ID: PAT_MRT4530_71870C.1.pep
LLAEFLCVRLLTFFDTTSLVEASDWLYAIKKLDLXSCMDSSKWSDHFRINKADGQPIAWAKFSKGFKKAHRPPXIDILKKCEFCALNQREHTVTKFLTKFNRRARYAXEPAYTDEERQEKFLEGLNNEFSIKLISGETMLLXYADFHMLVDKAIRXEDKQNRMDNXKRRMVAFKEARGSNQRLRVKLLHIDGSSSLSYNIXNTTIHNNNSGGNDVKNVIEGPQPTLIXQDQSQESDNNGEKQLLCFNCFEPGYFARQCPKLKRQXSQVHVNNIIIIGANAAPVMS

SEQ ID NO: 173875 - protein, 250 aa, Oryza sativa
  Clone ID: PAT_MRT4530_71871C.1.pep
MKFNIANPTTGCQKKLEIDDDQKLRAFFDKRISQEVSGDALGEEFKGYVFKIMGGCDKQGFPMKQGVLTAGRVRLLLHRGTPCFRGYGRRDGERRRKSVRGCIVSQDLSVINLVIVKKGENDLPGLTDTEKPRMRGPKRASKIRKLFNLSKDDDVRKYVNTYRRTFTTKNGKKVSKAPKIQRLVTPLTLQRKRARIADKKKRIAKKKSEAAEYQKLLAQRLKEQRERRSESLAKRRSKLSSAAKAAATTA

SEQ ID NO: 173876 - protein, 80 aa, Oryza sativa
  Clone ID: PAT_MRT4530_71872C.1.pep
ESGRPCVRPRVRDIEHSPTQRKRARIADKKKRIAKKKSEAAEYQKLLAQRLKEQRERRSESLAKRRSKLSSAAKAAATTA

SEQ ID NO: 173877 - protein, 102 aa, Oryza sativa
  Clone ID: PAT_MRT4530_71873C.1.pep
MKFNIANPTTGCQKKLEIDDDQKLRLDSLDCRISQEVSGDALGEEFKGYVFKIMGGCDKQGFPMKQGVLTAGRVRLLLHRGKKALFLLLTFGYSCPCSDHIM

SEQ ID NO: 173878 - protein, 60 aa, Oryza sativa
  unsure (1)..(60): unsure at all Xaa locations
  Clone ID: PAT_MRT4530_71874C.1.pep
MAVQSAERGVEAPPLTLSIFEFNSKXDAGRAAEAGAQGEPPRGEHQVSQVGAQCRRGLVR

SEQ ID NO: 173879 - protein, 707 aa, Oryza sativa
  unsure (1)..(707): unsure at all Xaa locations
  Clone ID: PAT_MRT4530_71875C.1.pep
MLNSTQAAKLSEAEEVISIFRSRMLEIHTTRSWDFMGLSLHIQNEQSAGMQLKYGDDIIVGILDTGKFPDSFIYLCVFSGVWPESQSFRDDGHLGDIPSSWRGTCVEGEKFDPATACNRKLIGARYYLAGFESEVGPLNTSGGAEYRSPRDRVGHGTHTASTAVGAVSPDASYVGGLGRGVARGGAPWSRLAVYKVCWFKDLTGRCSDADILAAFDDALRDGVHVISASLGSTPPLMPLFMTSTEIGAFHAMQLGVPAVFSAGNDGPDAAMVQNVSPWVITVAASTIDRRFPTVITLGNNVSLVGXRAAASGRIVLCFSTTTASSGVAALAVYAAGGAGLIFAETISRRSTQDNFLPTVHVDLRQGTRILDYIRGSSRPPTARFSPSTTLVGKSPAPAVAYFSSRGPSSISPHILKPDVTAPGVNILAAWPPMSSPTVIPLDKRSVTWNFDSGTSMSCPHVSGIVAVVRAVHPTWSPAAIKSALMTTAYMYDDTSDVMLAGGTLKAADAFDVGAGHVDPLRALDPGLVYDAGVRDHVLFLCGLGYTRYQIRQMVLPSPSLDTSCGGEGGGAAPPEYDLNYPAIVLPRLNATVTVKRTVTNMGPRRDAVYRAAVVSPHGARAAVWPPALSFSPYRDTASYYVTVAPAKLSRGRYDFGEIVWSDGYHRVRTPLVVRVTTMPDTDTGXVDVDVAAARAMDTATATQLQDS

SEQ ID NO: 173880 - protein, 330 aa, Oryza sativa
  Clone ID: PAT_MRT4530_71876C.1.pep
MRMSCNGCRVLRKGCSEGCTIRPCLQWIKTPEAQANATVFLAKFYGRAGLLNLLAAGPDHLRPAVFRSLLYEACGRIVNPIYGSVGLLWSGQWQACQAAVEAVLKGDPVVQVSSEAAAAAQATPPLRAYDIRHVSKDAEADAAANLLRVARGGRTRFKRASSSSNSKHGAKLAGAAAAKRAASPSSSSPTHETEPEAVVVVGDHDDDHHHPALSHEVHEESAGSHDHDDDDHVDDGDNNDMAIADVTPPRAGSEDTEVETGSHVSQAEQSPVPVEHEEGEEEEVGLELTLGFQPLVVRASRRPSSAEARCDLSGLSAESSRIGLRLELPA

SEQ ID NO: 173881 - protein, 80 aa, Oryza sativa
  unsure (1)..(80): unsure at all Xaa locations
  Clone ID: PAT_MRT4530_71877C.1.pep
EEGMSSSPKMXEDLFXHTTADMVPPXXXPRPPQIRPPLVVLAAPXXTRXRRRPSWWXXXLRPATPYXXDPRRGGPXLGGP

SEQ ID NO: 173882 - protein, 67 aa, Oryza sativa
  Clone ID: PAT_MRT4530_71878C.1.pep
RGCVNFARKDSSFIYLDVSASIIHAPSECIFFTSCQSHVAFATRHKSSWTAESNVHGLYGVAFLVFN

SEQ ID NO: 173883 - protein, 171 aa, Oryza sativa
  Clone ID: PAT_MRT4530_71879C.1.pep
MATATNGNASAAAAAADSAVQEPPHKIAKVAPLLKVKKLSENAVLPSRGSALAAGYDLSSAAEVVVPARGKAMVPTDLSIAIPEGTYARVAPRSGLALKHSIDVGAGVIDADYRGPVGVILFNHSDTDFAVKPGDRIAQMIIEVIVTPEVAEVEDLDATVRGEGGFGSTGV

SEQ ID NO: 173884 - protein, 788 aa, Oryza sativa
  Clone ID: PAT_MRT4530_7187C.1.pep
MASSLTPRSPYPKKENLGNARRGMGVKPGPRRNVLSAINNGGGTNSDTASVDGGEGGAGPAAPVIEFTGREDVERLLAEKMKGKSKTDYKGRTEQMSEYIKKLRACIRWYIELEDGYLVEQEKLRSTMDAENAQHAKLEAQLSSDLEELKAAHLNLTRQCDSLEESFNKEKADRMLAVESYEKERQQRESAEASLDLLSVDLERVSHEAKRFSEQLKMVQDTNKRLQEYNTSLQQYNSNLQADASKSGDIISKLQKEKSAMMETMASLKDLNNSMKNHLDSSRTSQQEAIRMKEQLMKEVDCLRIELHQIREDRDQSVSQVNTLSAELANYKELAGKSTKDCESLSVKVSAFEETCSMQQEQIQTLQKQLAVATNKLKLADVTAIEAMTGYEEQKVIIKDLEERLASAEFQIVEADKLRKKLHNTILELKGNIRVFCRVRPLLQDNDSSGAEEALISYPTSVESAGRGIDLMNQGQRFSFSYDKVFDHGASQEDVFVEMSQLVQSALDGYKVCIFAYGQTGSGKTYTMMGPPGRDQKGIIPRSLEQIFKTSQSLESQGWKYSMQASMLEIYNETIRDLLAPGRSNNFDLSTSKQYTIKHDPQGNTTVTDLTVADVFSSADVTSLLAKASQSRSVGRTQMNEQSSRSHFVFTLKISGSNENTGQQVQGVLNLIDLAGSERLAKSGSTGDRLKETQAINKSLSALSDVIFAIAKGDDHVPFRNSKLTYLLQPCLGGDSKTLMFVNISPEASSVGETICSLRFASRVNACEIGIPRRHTQARSFDSRLSYG

SEQ ID NO: 173885 - protein, 303 aa, Oryza sativa
  Clone ID: PAT_MRT4530_71880C.1.pep
MTHNSSSSSSWDLDMSLGSHHHPLLFDQPPPPPPPPPPPPLPFHLHHHPLDPSPSSSLVPPPPHHHHHAHHLHHPLDLDQRRGHHDYGGGDQGGDEELRLQQEAAAGGGGGGQDGGGGGDQDADEELGAMKEMMYRIAAMQPVDIDPATIKKPRRRNVRISDDPQSVAARHRRERISERIRILQRLVPGGTKMDTASMLDEAIRYIKFLKRQVQELQHQPGPPPPPYPAGAAPAAGPSTSAVGPPGRPFLPLGGGGPMIDWVGLTRPVDIHGPTSSSSSSSMGGALGFGFGCGGGGQSSHGMH

SEQ ID NO: 173886 - protein, 474 aa, Oryza sativa
  Clone ID: PAT_MRT4530_71881C.1.pep
MGGVNPQPRGVKERDGQANAAQKHRQLFEEFPHRTQPMVRALFRGGRPRIPSAAVAVPVAPFFASSGGAGIALPPPPPGLAAKAEREGSLAQRVNRSASVRARIMRERPYKLSELDYSYLLEFTAKVHGISEAESLFLRIPQEYQNELLYNNLVMACLDLGLIKLAYGYKRKMRELSLPISPYVYNRLIILHSSPGRQKTISKILAQMKGDRVTPHTSTYNILLKIKANEHNIDEAIENSMTGTNWSTLEILLILYGYHGKAKELKMTWDLMQGLPHIRPKSFILAIEAFGKVGSIDQAEEIWGKFESTRKPKLTEQFNSILSVYCRHGLVDKASAVFKEMRANGCQPNAITYRHLTLGCLKAGIVKEALKTMDIAKKEVVTKKVKSSTPWLETTHMILESFAENGDLVNAKRVFDELNESKYCRNSFVYNTLLKAHVKAKVYEPDLLRAMILRGAMPDAETYSLLGLIEQFKT

SEQ ID NO: 173887 - protein, 95 aa, Oryza sativa
  Clone ID: PAT_MRT4530_71882C.1.pep
ALPRAARRFLMYRNGIEKHSYLVRRQDRRLVGLRSPGSVAPEETRPARRSSSQADSIPLAGADQRRGGEDPGGGRGDLPVGGEAMFDPDAEGTSC

SEQ ID NO: 173888 - protein, 147 aa, Oryza sativa
  unsure (1)..(147): unsure at all Xaa locations
  Clone ID: PAT_MRT4530_71883C.1.pep
MAAMKKPSSAPNLHVDDECMIGVGNDDKAVLVIGRETICTGDDHQEQPNRFAIGDSHEDKCMPMIDERRGYFWFVDEITSPASMAVMKTPWRCGSETVKAGEHDTVALGIMAGLGYDVRAPSNGAPAFSSGGSTXNVRKIIALARMT

SEQ ID NO: 173889 - protein, 949 aa, Oryza sativa
  Clone ID: PAT_MRT4530_71884C.1.pep
MCSRVAAASTSHASHCADLLTRLLRRGRLREARAVASRLALADAPDPAVSDALVACHSRLGDISSALSHFHRLVQSGAAPSPASTAALLRAMCSASMSTEAMDVLVLSMGNPSPLPVSDFALLIPGLCSEGAVDKARFLFDAMLRSGLTPPVRVYRSLAFAYCKARRSLDASDMCQLMLIKGMYLDRELSTALIRVFCREGRLEPALDVFRRMKGDEHVQLDAYAYTTMIWGLFEHGRVDHGLQMYHEMIDRGIQPDAATYNVMIRWYCKSKWVGAAMDIYKVMIRTGVAPDLRCYTILMASLCKDGKLGEAENLFDKMLESGLFPDHVMFISIARFFPKGWVVLFVRKALKAVAKLDCGAKLLELSSLAGGCSNMSLQKEADHLLDEIVTSNVLPVNIVLNLMIIAMCSEGRLDVSYYLLGKLVAYGCEPSVLTYNIVIKCLCEQNRMDDARALITIMQSRGVRPDMSTNSIMVTAYCKIGEIESALHLFGEMAKDGIEPSIAVYDSIIVCLCRMRRLKEAEATLRQMIREGLAPDEIIYTSLINGYSLTRQTRNVCRIFDEMLKRGLQPGPHAYGSLINGLVKGNKIRKALGYLERMLEEGIAPQTVIYTMLINQFFRKGDVRLGLDLVVLMMKTNVAPDLITYGALVTGICRNIARRGMRPSLAKKLKEARYMLFRMLPQIIDTRNGKQKDNQICTEEMIQVAQGIIQDLEENGMVPDLHIYNGMINGLCRANKMDDAYSLLSVMDQTGILPNHVTYTILMNNQIRLGDINHAIQLFNSLNSDGCVFDKITYNTFIKGLSLAGRMKEALSFLLMMHKRGFVPSKASYDKLMELLLAENAIDIVLQLFEDMLFQGYTPRYANYTSLLLVLAKDGRWSEADRIFTMMLKKRKMFINWWEITKTELRMLQETPTSQYLVSNWSFGSLATGQREYVALHAFCHLIVQLFE

SEQ ID NO: 173890 - protein, 40 aa, Oryza sativa
  unsure (1)..(40): unsure at all Xaa locations
  Clone ID: PAT_MRT4530_71885C.1.pep
NSLTLXKXXISYNLTTYYLKRDLXILGVGLRXXXXAXXDP

SEQ ID NO: 173891 - protein, 60 aa, Oryza sativa
  unsure (1)..(60): unsure at all Xaa locations
  Clone ID: PAT_MRT4530_71886C.1.pep
LAIFVLFCLIAAIVLYXTPLQVLAXLAGFYVMRHPRFRYRLPSTPVNFFRRLPARTDSML

SEQ ID NO: 173892 - protein, 151 aa, Oryza sativa
  Clone ID: PAT_MRT4530_71887C.1.pep
MSDKCGNCDCADKSQKKGTSYGVVIVEAEKSHLKEVAAGEVMGGLSMDQAFVQAPEHRAKPSVAEADGIPVIDLSPLFAADGVDVDALAAEVGRASQDWGFFVVVRHGVPEEVVARAAEAQRAFFALPPARRADVARSEAAQMGYYASDHT

SEQ ID NO: 173893 - protein, 43 aa, Oryza sativa
  Clone ID: PAT_MRT4530_71888C.1.pep
MMVRMIAAQPLPQGGPQAHPHLKLAKWVMLYRAEPGTLLQYPP

SEQ ID NO: 173894 - protein, 352 aa, Oryza sativa
  Clone ID: PAT_MRT4530_71889C.1.pep
MGGLSMDQAFVQAPEHRPKASVAEADGIPVIDLSPLLAAGDGDADGVDALAAEVGRASRDWGFFVVVRHGVPAEAVARAAEAQRTFFALPPERRAAVARSEAAPMGYYASEHTKNVRDWKEVFDLVPRQTPPPPTTAVADGDLVFDNKWPDDLPGFREAMEEYGEAVEELAFKLLELIARSLGLRPDRLHGFFKDDQTTFIRLNHYPPCPSPDLALGVGRHKDAGALTVLYQDDVGGLDVRRRSDGEWVRVRPVPHSFIINVGDIIQVWSNDRYESAEHRVAVNVEKERFSIPFFFNPAGHTMVEPLEEVVSDESPARYNPYNWGEFFSTRKNSNFKKLDVENVQITHFRKN

SEQ ID NO: 173895 - protein, 85 aa, Oryza sativa
  Clone ID: PAT_MRT4530_7188C.1.pep
MCANGKLQTFSGPAVLALRANKLFALARAATSAPPAGPVPIAFAYGTNYTAARTSRMRVPLQGLHLHRTPIETDETRRPGRVFRV

SEQ ID NO: 173896 - protein, 157 aa, Oryza sativa
  unsure (1)..(157): unsure at all Xaa locations
  Clone ID: PAT_MRT4530_71890C.1.pep
DQCDAVSPCGPNGVCDTNNMPVCSCLRGFTPRTPAAWALRDGRDGCVRSTPLDCRNGTDGFVTVRHAKVPDTERSAVDWSLTLDQCRQACLRNCSCTEYASANVSGRRRRWPXAPGAGSGCVMWTTGLTDLRVYPDFGQDLFVRLAAVDLGTYERTP

SEQ ID NO: 173897 - protein, 197 aa, Oryza sativa
  Clone ID: PAT_MRT4530_71891C.1.pep
MGVVRKANLAMATSTTVGSGGGGGGGSAPDCAATAASPWGAAPWQRGCCVWAAENPLTTRPTTRRFQRGARCSCPHDGDGCFAGAGTVTDVASREFWRQGEALTMVGGAACEPPLYPRSWLSSVAVEDDERRPDSRRRGIWGLELDEDIAQHSRVAPLAPAARESGSVPPSTTLPLSWAAGASGATRMCYATAGPTE

SEQ ID NO: 173898 - protein, 530 aa, Oryza sativa
  Clone ID: PAT_MRT4530_71892C.1.pep
MSRRSGVATSRRTRRAAEQEVQPPPLFAANPIFLCEDDGSAGRLIKPGGGVRGYGPGSLHALVRGRGRGRDVAADDDDDDGGNKMLPLPLPPCRAHREGRGGTRVPTAWHVGPTIVVGPHGAVVRIRAPPPPQQHDPFLAAYVACTKGRAGAGNKKKKKKAKAAARGGCGMWNGWASGARYARVMSCRHGGAVTVLQGATPLPAVAGYAESPAHPTLDLSRLPAVLPGRRRGEEVRIQGDEFWHMTRVLRLGINDRVELFDGAGGLVEGSIQKVDKGGSDVKLLEDARLIAPDGIQWHVYAAFGTLKGGRADWLVEKCTELGACSVTPLLTERCHTIAENRVDRLQRLVLAAVKQCQRIHGMLLNPPIQIADLQPVVSQSKLAFVASAESPPLLSTLPKSCNEESGLLIVGPEGDFTEEEVNVLKASGAVPVGLGPCRLRVETATISLLSALMLWSDAHRQETLKCSWAYQGAKSKRIVPLDLSEHLCNSMTIMDWSVICANEEGKKSQHAHSERIRSHNLHFTEILHPS

SEQ ID NO: 173899 - protein, 763 aa, Oryza sativa
  unsure (1)..(763): unsure at all Xaa locations
  Clone ID: PAT_MRT4530_71893C.1.pep
MGKSRGSIAFFGTYRPPVPLDIFSCPANPPPQSAKDELLLTDGESYNQNGQPIPAAALKELLTFLGKKNPKLASECGATPEDAEKGRVTGLVFVSERDRGLETLHVALRFVAGGKQVKVLSLGNIYGADTFGGVRMEDSGCVAGGFKVGRTTVGHSLVYVSTKAPVKARRTPWTVVYRTDLADGKTERLTPLGQYDLSPAVSPSGKMVAVANFQQNRWNGEIENLKTDIVVMNVDKRAQGRSDRKVLIKDGGWPTWGSDNVIFFHRGFDTTPPSNTARWGVFRFDIAAGKEERVTDESIDAMTPAAISETQVAVATVREKSKQVLMKVERVVTQYRHIEIFDTASKTSVPITQKTRPEGDHYNPFVLDGGTRVGYHRCRTDKLLKVQNQKSTXRQASRGGSTRVTGVFPSVSKNGKKLAFVDNSSXAVWLADGRGLRVVYKVRATKSVFSTSWNQNDDLDTLYVCEGPAFSIDKPVQIMRIPNVSREDYENMETFPLTDEEYNCAFPSTNAEGTKLVFRSSRNRVAGGERQHKNLYIIDAEKGEAAGVVPLTDGPWTDTHCSWSPREGCDWIVFSSTGRPEKDIVKGKDEPEKDHGLDPGYFAVYLVNAKDIKKGEVPVPVRVIHSAPTIAGHINHPVFSPDMKSIVFAADLAAVSADPISMPHFTHSVRPYGDIFSVNLRDTTDMAKNRDIQEFHRITHSRYEYSTPTWTGIADDEEDPNAKWKMLESLPNFTPWCPYARGEAGEKEGWHMTGHLTIQKRCC

SEQ ID NO: 173900 - protein, 777 aa, Oryza sativa
  Clone ID: PAT_MRT4530_71894C.1.pep
MGKSRGSIAFFGTYRPPVPLDIFSCPANPPPQSAKDELLLTDGESYNQNGQPIPAAALKELLTFLGKKNPKLASECGATPEDAEKGRVTGLVFVSERDRGLETLHVALRFVAGGKQVKVLSLGNIYGADTFGGVRMEDSGCVAGGFKVGRTTVGHSLVYVSTKAPVKARRTPWTVVYRTDLADGKTERLTPLGQYDLSPAVSPSGKMVAVANFQQNRWNGEIENLKTDIVVMNVDKRAQGRSDRKVLIKDGGWPTWGSDNVIFFHRGFDTTPPSNTARWGVFRFDIAAGKEERVTDESIDAMTPAAISETQVAVATVREKSKQVLMKVERVVTQYRHIEIFDTASKTSVPITQKTRPEGDHYNPFVLDGGTRVGYHRCRTDKLLKVQNQKSTPTTSIQRRFDKVQPPESHADVGLFRVTGVFPSVSKNGKKLAFVDNEFKAVWLADGRGLRVVYKVRATKSVFSTSWNQNDDLDTLYVCEGPAFSIDKPVQIMRIPNVSREDYENMETFPLTDEEYNCAFPSTNAEGTKLVFRSSRNRVAGGERQHKNLYIIDAEKGEAAGVVPLTDGPWTDTHCSWSPREGCDWIVFSSTGRPEKDIVKGKDEPEKDHGLDPGYFAVYLVNAKDIKKGEVPVPVRVIHSAPTIAGHINHPVFSPDMKSIVFAADLAAVSADPISMPHFTHSVRPYGDIFSVNLRDTTDMAKNRDIQEFHRITHSRYEYSTPTWTGIADDEEDPNAKWKMLESLPNFTPWCPYARGEAGEKEGWHMTGHLTIQKRCC

SEQ ID NO: 173901 - protein, 58 aa, Oryza sativa
  Clone ID: PAT_MRT4530_71895C.1.pep
INNQYIIEQAKGAHSDSPKHFRKKKARQTHATLTGYGWGGSRLTGTHIGFMYRQNACQ

SEQ ID NO: 173902 - protein, 214 aa, Oryza sativa
  unsure (1)..(214): unsure at all Xaa locations
  Clone ID: PAT_MRT4530_71896C.1.pep
MAIYRAPYLSFLGRHLXSLSPPSAETFSPRAPTLSVAGSRSSRHALPPRSSPLCAATSLGSAKSSSTPAAGYFAPKSTGAPSSPSTRSSPSRFDLRRGPAAPPVIAKLHRHLCWIRSCEEKPVRHLSSTEDRRKVVAFVDQNLAALRSSSPVISFAVRRRISVGKNRRHLLYLPVPSICVIVPWFAGNRSHAVHRRVTLKPSRRFSPLLGSRVI

SEQ ID NO: 173903 - protein, 59 aa, Oryza sativa
  Clone ID: PAT_MRT4530_71897C.1.pep
QICQIAEHNPDVLFLQVNYEEHKSMCYSLHVHVLPFFRFYRGAQGRLCSFSCTNATVRS

SEQ ID NO: 173904 - protein, 65 aa, Oryza sativa
  Clone ID: PAT_MRT4530_71898C.1.pep
YTIPYCLYFVYGLTAMKCKAASLAKSYDLKISGGKIFGLNYGVDPSGNDINLLSLGIYLYSITYS

SEQ ID NO: 173905 - protein, 88 aa, Oryza sativa
  Clone ID: PAT_MRT4530_71899C.1.pep
GGPATATLATFHVAGRRSGDGEEGVEVPIRLPAPAMERMVVEVARELGGVDAHTEACLAVPGSFPFGFFVFQYGRNRRSVLQRFPTWS

SEQ ID NO: 173906 - protein, 113 aa, Oryza sativa
  unsure (1)..(113): unsure at all Xaa locations
  Clone ID: PAT_MRT4530_7189C.1.pep
MPPLFKMWHSSFSRGDLGELTRRLDTLELQVGEIQHNLKGHIAQTQEWQQNADTXFANINNLMQQQQTNLQAYYRFQGFNPXIKGPEQKASLXGDVSPPLSELCFISLMYWFI

SEQ ID NO: 173907 - protein, 719 aa, Oryza sativa
  Clone ID: PAT_MRT4530_718C.1.pep
MLRTFIILVPLLFSIHSPACSAATDTISAGEALPKDEKLVSRNGRFALGFFHPDTDSKFFPRHTLKHWYLGIWFDKIPVLTPIWIANRENPIVGHHRVTKLTIASDGNLAIFNQATRSTVWSTHASITAKKTMVVLQDNGNLILRDASNSSNVLWQSFDYPTDVMLIGAKFGLDKVTGLNRVIVSKKSLADPAAGLYCLELDPTGANQYVLEFCNSSIVYWSTGEWNGQFFNSIPEMSGRTLFDFKFINNNQEKYFVFNLLEKDLITVCFLDISGQMKQLLWLENKQEWATIYTLPKDLCDIYATCGPFTVCNSNALQVCDCIKGFSVRSPKDWELEDRAGGCIRNTPLDCGTKNQSRTATTDKFYSLPGIGLPTEANIIEAARTADQCALACQNNCSCTAYSYATVIWRYKRKQFTAPTNNVQGGNGIVSFKYSVLQHATKNFSEKLGEGGFGAVFKGFLGGSTPIAVKKLGGDRQGEKQFRAENHTTILNWSTRYQIALGAARGLAYLHESCRDCIIHCDIKPENILLDGSFVPKIADFGMAKFVGRDFSRRNSCKQDTSDDDHAAYFPVQVANELLEGDVRSLLDNKLLDDVNLDEAERISKVACWCVQENESNRPTMGEVVQILEGSIENFTVSNQNSTEAKSEPFRPRSVTFVQTTASPAPTSSMIVPSQSRFGQGFEIGLAFPARCPLKIFPLGGVRSENQCASKTERHLTPG

SEQ ID NO: 173908 - protein, 121 aa, Oryza sativa
  Clone ID: PAT_MRT4530_71900C.1.pep
MEAMQQRRRGSNAKAIGPSRGHLPRVVTCPRAVPGVEEEDGGVGGRYPGVEEENGGGFPRGSEPELKKKKTEVGFLRSRRLELKKMEVHWACAYVIAKPWEAYQGYAFGEPASGACVVLPV

SEQ ID NO: 173909 - protein, 81 aa, Oryza sativa
  unsure (1)..(81): unsure at all Xaa locations
  Clone ID: PAT_MRT4530_71901C.1.pep
MPMPLDQGWSSSSSKXLAVKGSSSDQGYYGEGSSXXGYYGEQQQHPGMSRVRLTRARQYAGQLPSMGRVKPQQCSFFTAGQ

SEQ ID NO: 173910 - protein, 330 aa, Oryza sativa
  Clone ID: PAT_MRT4530_71902C.1.pep
MGGSEYDDDWELPSADITVVLCGKLGCGKSATGNSIVGREAFVSEYSHASVTSTCQLASTALKDGRTLNVIDTPGLFEMTITSEDAGKEIVKCMSMAKDGIHAVLMVFSATSRFTREDSSTIETIKEFFGEKIVDHMILVFTYGDLVGENKLKSMLNNAPEYLQKTVELCKNRVVLFDNMTKDRWLQEKQLENLLDVVDSVNTNNGGKPFSDQMLACIKEAHAREQEVHDAIGYTEEQISELKKEIQRTRDEQLANITNMVEEKLNITVDKLQQQLMEEQNARLEAERLAAEARLRSDEEIRKLKKRLEKAQQENEEFRKMASQHKCSIL

SEQ ID NO: 173911 - protein, 185 aa, Oryza sativa
  unsure (1)..(185): unsure at all Xaa locations
  Clone ID: PAT_MRT4530_71903C.1.pep
FNENKVSRCEMLTSPDVLIRDYPCSSDLKEFISKKRKEISDVXNGIDDRLLVVIGPCSIHNIEEGLEYAQKLSDASKSFESTLIIIMRVYLEKPRXIVGWKGLIYDPYLDGSSDINKGLQVSRQLLLTINQMGLPCATELLQPMLVHYIADLIKWSAIGARTTESQIHREXVSGLECLVGLKWTT

SEQ ID NO: 173912 - protein, 75 aa, Oryza sativa
  Clone ID: PAT_MRT4530_71904C.1.pep
LFPRGKIFPGGILPYQAISIAFCCPHRGFCIRAPLRGSLFVGCPFDQLSSLFLPQLFSPRLVLVVLTLTTVRLQG

SEQ ID NO: 173913 - protein, 85 aa, Oryza sativa
  Clone ID: PAT_MRT4530_71905C.1.pep
MDHRNLFEMHGLSHGGEGTAAWRSVGDSARTAVAAPARTAGSRPAEDGTGRRRGVEVSRRLAASGVGLRVSGELALLGAGWWLRR

SEQ ID NO: 173914 - protein, 571 aa, Oryza sativa
  Clone ID: PAT_MRT4530_71906C.1.pep
MAGFADALRPDKFTGVHFKRWQIRVTLWLTAMKCFWVSTGKPEGVLTAEQQKQFEEATTLFVGCILSVLGDRLVEVYMHMTDAKELWDALNTKFGATDASNDLYIMEQFHDYKMADNRSVVEQAHEIETMAKELELLKCVLPDKFVAGCIIAKLPPSWRSFGTALKHKRQEYSVEGLIASLDVEEKTREKDAASKGDGGQSSANVVHKAQNKSKGKYKAQQTTNFKKQKKNNNNPNQDERTCFVCGQVGHLARKCPQRKGMKAPAGQTSKSANVTIGNTGDGSGYGNLPTVARGSTVLMGNGSHASVHGVGTVDLKFTSGKIVQLKNVQHVPSIDRNLVSGSRLTRDGFKLVFESNKIVVSKHGYFIGKGYECGGLFRFSLSDFCNKSVNHIYGTVDDEANVWHSHYWKEAVRSEMDSIIANGTWEVTERPYGCKPVGCKWVFKKKLRPDDYSIPLAGVHRRSGEQVSGTSAFDVLHREKAAIRLEHEDRASGIVPVRPLEVRFSDSRCVALATSDTGPLTVLRRIISPGSHDSGIVIEMELEAKQSLKIGMLWEPKGAISFANENYNVSN

SEQ ID NO: 173915 - protein, 208 aa, Oryza sativa
  Clone ID: PAT_MRT4530_71907C.1.pep
VARRLLHPARRRAPAIGEQVSGTSAFDGVFIDFNGSTSRVVTSASLVRISADENKIADNLKIKVYLPNKRIAVGELQHCNLSYNIAVVSVKGFCCLRTAELDKQMQIEPHREVVAIGRIFESGKLMATSGILSDEESKLDCRELMISTCKITKAGIGGPLIDFDGNFVGINFYGTKETHYLPRLMIQRLLKDFDTTQPTVQTPRIMRY

SEQ ID NO: 173916 - protein, 929 aa, Oryza sativa
  Clone ID: PAT_MRT4530_71908C.1.pep
MEGTVLCSANHAPLTPISFLERTALVYPDRLAIVASDGSAGVAVSRTWRDTRARCLRLAAALTGLLGVQRHDVVAVFAQNIPAVCELHFGVPMAGAVICTLNSRLDAAMAAVLLRHSEAKVVFVDRALLGVAQKALVLVAEAGARRPVLVLISELLDENERSPPDAKIKVTRVDYEYEHLLSAADVGSSPDFAIRWPADENEPIALNYTFGTTSRPKGVIYSHRGAYLSSLAAVIVNAMAETPVYLWTVPMFHCNGWCQVWGVADHGGTNVCVRRVTGADIFDSVARHGVTHMGGAPTVLSMIVLFRMEEQGFLVIHSYGLTETYGPATVCTWKPEWDALTAEERARIKSRQGLHHVGLEAADVKDPATMRSVPADGRTVGEVMLRGNTVMSGYYKDGGATAEALAGGWLRSGDLPVREKDGYIKILDRSKDIIISGGENISTVEVEAALFGHPAVEEAAVVGRPDEYWGETPCAFVKLRGGGGGGGGGAAVEEELMAFCRARLPRYMAPRTVVVVEEELPKTATGKVQKVALRERAKAMGSLPAAASSSSRRAPTGTAGATKVLRPFFNHMALMLVLAEFQRKHGTGRVCLLLCAAPSLVDYSIPLTGVHRRSGEQVSGTSAFDVPARRRSGEQVSGTSAFDVLHSRSFYHLEVENQLDRKIKRLRSDRGGEFFSNEFDLFCEEHDIIHERTPPYSPESNGIAERENRTLTDLVNAMLDTLGECHPHMVFSFIKWTLKTAFLNGELDEEIYMDQPDGFVDEGFAVNEADKCVYYRHGGGEGVILCLYVDDILIFGTNLESHYVEKISNRFGYIDSKPSPTPYDPSLLLRKNKRIARNQLEYYQIIGSLMYLASATRPDISFAVSKLSRFTSNPGDDHWRALERVMRYLKDYYIPLAGVHRRSGDQVSGTSAFDFLHQEKAAIRFLGSV

SEQ ID NO: 173917 - protein, 46 aa, Oryza sativa
  Clone ID: PAT_MRT4530_71909C.1.pep
MAELALGRARVLNNAATDSWSAAAQGNWAVQLQRRCGSKPTSSRGN

SEQ ID NO: 173918 - protein, 473 aa, Oryza sativa
  Clone ID: PAT_MRT4530_7190C.1.pep
MGNVLVAVPAAAGALVTVALLAPEAESTTVAIGRLRELIRPAHLFLAVFLPAAAATVYLVMRPRAVYLVDYACFRTAPNCRVPFATFLEHARQVPTLTERSVRFMTRLLERSGLGEETCLPPAHHYIPTYKYCTLEAARAEVDLVVFSAVDELFAKTGVSPDDVDILVVNCSLFCPTPSFVDMIVNRYKLRSDIRSMHLSGMGCSASLISIGLARNLLQVAPHGARALVVSTETITPNYYVGNERAMLLPNCLFRMGGAAALLSTSPAKARFRLKHVVRTLTGAEDSAHHCVFQEEDEHGSIGINLSKDLMTIAGNALKANITAIAPLVLPASEQLKFALAFIARKALSGRVKPYIPDFRAAFEHFCIHAGGRAVIDELQRSLCLSDEQVQASRMALHRFGNTSSSSVWYELAYVEAKGRMRRGDRVWMIGFGSGFKCNSAAWECISPARDDDGPWATSIHRYPVDIPDVLKH

SEQ ID NO: 173919 - protein, 377 aa, Oryza sativa
  Clone ID: PAT_MRT4530_71910C.1.pep
VVAGATVGATLLVVLLFTTATIIVRRRRIKKRREAEDEENASTDSDNGEPITEIEVGTGPRRLPYYELVEATKNFAAEEKLGQGGFGSVYRGYLREQGLVVAIKRFAKDSSKQGKEYKSEIKVISRLRHRNLVQLVGWCHGRNELLLVYELVPNRSLDVHLHGNGTFLTWPMRIKIVLGLGSALLYLHQEWEQCVVHRDIKPSNVMLDESFNAKLDDFGLARLIDHTIGIKTMTAMSGTLGYLDPECVITGRASAESDVYSFGIVLLEVLYGKGDVLMAADERLNGDYDSAEMERVITLGLWCAHPDPSVRPSIRDAMTILQSSGGQLPVLPAKMPVPTYAPPMASFHGLFASSTGMSSSSVSLERSVRPFSVPALE

SEQ ID NO: 173920 - protein, 796 aa, Oryza sativa
  Clone ID: PAT_MRT4530_71911C.1.pep
MELSRGRHIQLGVAGPRSPAGPLRARPLNRRSHPHAKARTRDRGRWHQRRRNTSAISSEAAAPAGRLRALPLPSRDAHARRRGAAAESRGDYSIPLAGVHRRSGEQVSGTSTFNVLHREKAAIRVTLWLTAMKCFWVSTGKPEGVLTAEQQKQFEEATTLFVGCILSVLGDRLVEVYMHMTDAKKLWDALNTKFGATDASNDLYIMEQFYDYKMADNRSVVEQAHEIQTMAKELELLKCVLPDKFVAGCIIVKLPPSWRSFGTALKHKRQEYSVEGLIASLDVEEKAREKDAASKGDGGQSSANVVHKAQNKSKGKYKAQQTTNFKKQKKNNNNPNQDERTCFVCGQVGHLVRKCPQRKGMKAPAGQTSKSANVTIGNTGDGSGYGNLPTVARGSTVLMGNGSHASVHGVGTVDLKFTSGKIVQLKNVQHVPSIDRNLVSGSRLTRDGFKLVFESNKVVVSKHGYFIGKGYECGGLFRFSLSDFCNKSVNHICGSVDDEANVWHSHYWKEAVCSEMDSIIANGTWEVTERPYGCKPVGCKWVFKKKLRPDASHGLLVHQMDVKTAFLNGELDEEIYVDQPDGFVVEGFAVNEADKCVYYRHGGGEGVILCLYVDDILIFGTNLEVINESHYVEKILNRFGYINSKPSPTPYDPSLLLRKNKRIARNQLEYSQIIGSLMYLASATRPDISFAVSKLSRFTSNPGDDHCEDVVLQSILERTHLCELDCWSQSMKILDYSIPLAGVHWRSGEQVSGTSTFDVLHREKAAIRFLGSASRDCSLFVRDGSPSSSLACFVPS

SEQ ID NO: 173921 - protein, 331 aa, Oryza sativa
  Clone ID: PAT_MRT4530_71912C.1.pep
MATAVAASPAQSRKTETYTDTKRRDDVRGLNIAAARAVADAVRTSLGPRGMDKMISSGEQEVIITNDGATILSRMSLLQPAARMLAELSRSQDAAAGDGTTTVVVLAGSLLRRAQSLLSAGAHPTAAADALHRLATRAVEVLHAMAIPIELSDRDSLVKSASTALNSKVVSQYSSLLSPLAVDAALSVVDPAHPDLLDLRDIRVVKKLGGTVDDTELIRGLIFDKKASHAAGGPTRVENAKIAVIQFQVSPPKTDIEQSVIVSDYAQMDRILREERNYILGMVKKIKASGCNVLLIQKSILRDAVTDLSLHYLAKAKILVVKDVERDEIEF

SEQ ID NO: 173922 - protein, 244 aa, Oryza sativa
  unsure (1)..(244): unsure at all Xaa locations
  Clone ID: PAT_MRT4530_71913C.1.pep
LLFWQYHKVESSDTIDNVKAKIQDKEGIPPDQQRLIFAGKQLEDGRTLADYNIQKESTLHLVLRLRGGMQIFVKTLTRKTXITLEVESSDTIDNVKAKIQDKEXSPPDQQRLXIFAGKQLEDGRTLADYNIXKESTLHLVLRLRGGMQIFVKTLTGKTITLEVESSDTINNEKAKIXDKEGIPPDQQRLIFAGKQLKDGRTLADLEVESSDTIDNVKAKIQDKEGIPPDQQRLIFAGKQLEDGR

SEQ ID NO: 173923 - protein, 173 aa, Oryza sativa
  Clone ID: PAT_MRT4530_71914C.1.pep
MEVEVENQLDRKIKRLRSNCGGEFFSNKFDLFCEEHGIIHERTPPYSPESNGIAEINEADKCVYYRYGGGEGVILYLYVDDILIVGTNFEVINEVKSFLSKIFDMKDLGVADVILNIKLIRVENEITLLQSHYVEKILNRFGYIDSKPSPTPYDPSLLLRKDKRNARNQLENS

SEQ ID NO: 173924 - protein, 972 aa, Oryza sativa
  Clone ID: PAT_MRT4530_71915C.1.pep
MGERGMRAAGGEPAEWVAKLEPSGGDQALYNGFGAAGMHGAAVMQPPTFGQRAAALALAFPQQQIHHETHVRRSILAASRGLSRATCTTSSSQGRYHHHDMGRNNWDDIDYSIPLAGVHQRSGEQVSGTSAFDVLHREKAAIRVTLWLTAMKCFWVSTGKPEGVLTAEQQKQFEEATTLFVGCILSVLGDRLVEVYMHMTDAKELWDALNTKFGATDASNDLYIMEQFHDYKMADNRSVVEQAHEIQTMAKEYSVEGLIASLDVEEKAREKDAASKGDGGQSSANVVHKAQNKSKGKYKAQQTTNFKKQKKNNNNPNQDERTCFVCGQVGHLARKCPQRKGMKAPAGQTSKSANVTIGNTGDGSGYGNLPTVARGSTVLMGNGSHASVHGVGTVDLKFTSGKIVQLKNVQHVPSIDRNLVSGSRLTRDGFKLVFESNKVVVSKHGYFIGKGYECGGLFRFSLSDFCNNMCLIPKFSIVKGSKCHSCVQSKQPRKPHKAAEERNLAPLELLHSDLCEMNGVLTKEVENQLDRKIKRLRSDRGGEFFSNEFDLFCEEHGIIHERTPPYSPESNGIAERKNRTLTDLVNAMLDTAGLPKACEAPRRSKRQRTAKSFGDDFTVYLVDDTPKSISEAYASPDADYWKEAVRSEMDSIIANGTWEVTERPYGCKPVGCKWVFKKKLRPDASHGLLVHQMDVKTAFLNGELDEEIYMDQPDGFVVEGFAVNEADKCVYYRHGGGEGVILCLYVDDILIFGTNLEVINESHYVEKILNRFGYIDSKPSPTPYDPSLLLRKNKRIARNQLEYSQIIGSLMYLASATRPDISFAVSKLSRFTSNPGDDHWRALERVMRYLKGTVELGLHYTGYPAVLEGYSDSNWISDVDEIKATSGYVFTLGGGAVSWRSCKQTILTRSTMEAELTALDTATVEAEWLRDLLMDLPVVEKPVPTILMNCDNQTSMKILGESSRKLTKDLGV

SEQ ID NO: 173925 - protein, 155 aa, Oryza sativa
  Clone ID: PAT_MRT4530_71916C.1.pep
MFLLLRKNKRIARNQLEYSQIISSLMYLASATRPDISFAVSKLSRFTSNPGDDHWRALERVMRYLKVLEEYSDSNWISDVDEIKATSGYVFTLGGGVVSWRSCKQTILTRSTMEAELTALDTATVEAEWLRNLLMDLPIVEKLVPAILMNCDNQT

SEQ ID NO: 173926 - protein, 80 aa, Oryza sativa
  Clone ID: PAT_MRT4530_71917C.1.pep
SGHWTISLGAEEGVEDACHGLAGGDIGQPSARRVLESSLHSAGSSCYVRTGDCVVVIRGAERYLYIVVTAASHVVAVAAA

SEQ ID NO: 173927 - protein, 339 aa, Oryza sativa
  Clone ID: PAT_MRT4530_71918C.1.pep
MASSPVSYWCYHCSRFVRVSPSTVVCPECDGGFLEQFPQPPPRGGGGSGRRGAMNPVIVLRGGSLSGFELYYDDGSGDGLRPLPGDVSHLLMGSGFHRLLDQFSRLEAAAPRPPASKAAVESMPSVTVAGSGAHCAVCQEAFEPGASAREMPCKHVYHQDCILPWLSLRNSCPVCRRELPAAAAPESEADAGLTIWRLPRGGFAVGRFAGGPREQLPVVYTELDGGFSNGVGPRRVTWPEGDGHVDGGEVDNRVVFLLEFVPDEIKDSAFVSPDSIRRHRRGLAVPISEVDIRRLVLTYVVASVVPCMLTVVGSDKALSALGIPSRSFLRFLGVLISTC

SEQ ID NO: 173928 - protein, 89 aa, Oryza sativa
  Clone ID: PAT_MRT4530_71919C.1.pep
GRGASSRRRFPTNAAGCAAATATATLSPGYLEVGDDGSGDVHFEAFQMSEICVKLFKDGVLETEMGDKDDSRLSKMRKEVVVVRKDTME

SEQ ID NO: 173929 - protein, 45 aa, Oryza sativa
  unsure (1)..(45): unsure at all Xaa locations
  Clone ID: PAT_MRT4530_7191C.1.pep
SFTMIGRAXIEXSKSXXAMHXWLPQASYPCGXLFXTPLXFKXRXV

SEQ ID NO: 173930 - protein, 74 aa, Oryza sativa
  Clone ID: PAT_MRT4530_71920C.1.pep
PQKPPPRGKVLINFSPAPPAHRLIPSLMDRGAYKFWGGRTFIFSEIFPLVFSPRALLLKSKAMPGQPRLKTPRI

SEQ ID NO: 173931 - protein, 94 aa, Oryza sativa
  Clone ID: PAT_MRT4530_71921C.1.pep
MVTSDQIVCPSQMFKCAASEKVYIFASGPLNLAASEYPFSLALPTMLVLMVVNGQYGCPMPPKPSHINYLFVRSMAENNAGELLIRFPRSTTHG

SEQ ID NO: 173932 - protein, 201 aa, Oryza sativa
  unsure (1)..(201): unsure at all Xaa locations
  Clone ID: PAT_MRT4530_71922C.1.pep
ALPSKPPPSAISLLPWVNRANSRRTVGLDIDGGIPSHNSNHSPPSQPFSPSXAPGLAPTSRQPIPTAVKSILGRIVSPNRSSASSFTSSHQAEHSRPRAALFFAAAKFFRPQSVVSTDLAIRPSTHQINSTAAAPRRRRSLAPSPPRSQPLSPSSATFGDRLEVEEEXERERLTGLEDSSDTLDNINQSQDIEQGKLPYTC

SEQ ID NO: 173933 - protein, 203 aa, Oryza sativa
  unsure (1)..(203): unsure at all Xaa locations
  Clone ID: PAT_MRT4530_71923C.1.pep
MAGAAPWTRTTTGPRAAAQIGKKGGWLAGQPDKAVAAAHGRRLRGGGARPPAIDGERRRGKQRKGWEEERGMLTEHPTARRRRKVAGGARAAALRQRTATGVSWGRKGRCGDGWISARRCRRRRQRRRSLAVARVAAVGGXRSPAGGGERERGGSKDFEHGKSRERGENGEGGPSILFIGSGRRDRGRFGPATDGDMGKRERE

SEQ ID NO: 173934 - protein, 128 aa, Oryza sativa
  Clone ID: PAT_MRT4530_71924C.1.pep
SAPRILAKAGAKRTELLMKRIGIQKKKKSHRHTELEPPTQSGGDRIAQISWSQLVKVSREPRRSGRRMDLRPARHELAGANREREREGARAGETCGGRRGEEQRRREQHGAAAARRHGSGAPGSRTRG

SEQ ID NO: 173935 - protein, 200 aa, Oryza sativa
  Clone ID: PAT_MRT4530_71925C.1.pep
MAGAAPWTRTTTGPRAAAQIGKKGGWLAGQPDKAVAAAHGRRLRGGGARPPAIDGERRRGKQRKGWEEERGMLTEHPTARRRRKVAGGARAAALRQRTATGVSWGRKGRCGEMSPATIRGDRGVAELHTRAAVPGKATAQCGVNRGGGATRLETTNEMMARPRSENGAAGGGRGKRSGDRVDLGTAMPTATTTATQLGGG

SEQ ID NO: 173936 - protein, 117 aa, Oryza sativa
  Clone ID: PAT_MRT4530_71926C.1.pep
KKGGENSKKSPFFKGFRSLPLKIFVCFFWDPPPFGRGKTFRIYPPKKKSFFSFPGGPFNLWFPPLFFLGLNPLYLVIFFFPNSSQYFFFLVPNFIGFHINPPGGFFFSFKEPSRPLL

SEQ ID NO: 173937 - protein, 95 aa, Oryza sativa
  Clone ID: PAT_MRT4530_71927C.1.pep
GSPHRRPFSTADFAKDVDEVTPSSRSREEIEAAMDSKETVYFDEEAACARDAAGEALAAFESLLARLPPPDADSLRRSMGLKMEQLKAELKQLDE

SEQ ID NO: 173938 - protein, 54 aa, Oryza sativa
  Clone ID: PAT_MRT4530_71928C.1.pep
MEDLPTLVALELKEAKPTTKFCRQRLVDNHGSGGRWNSSNGQVRAWERTALRLG

SEQ ID NO: 173939 - protein, 117 aa, Oryza sativa
  unsure (1)..(117): unsure at all Xaa locations
  Clone ID: PAT_MRT4530_71929C.1.pep
HEVRRGYWGTNLGTPHSLPVKXXGKCGSVTVRLIPAPRGTALVASPAVKRLLQLAGIEDAYTSSSGSTKTLENTLKATFSAVSNTYGFLTPNLWKETKLIRSPLEEFADTLRDGKRY

SEQ ID NO: 173940 - protein, 95 aa, Oryza sativa
  Clone ID: PAT_MRT4530_7192C.1.pep
MMLTLDRFKFLEAVKLGGSKDGFDDRKATVVAISPDEGESTDMALVGSKRVMDGGHILPHCLAIDLSLKIERHGAPERAAGATVMRGPGCWCHPW

SEQ ID NO: 173941 - protein, 134 aa, Oryza sativa
  Clone ID: PAT_MRT4530_71930C.1.pep
LPGSKPLGFSIARFAFAPLGLTPPPPPPWAPEFFPVLEGPLSVGFVPSPPNTRFLSKVLPKGDVFVFPEGLTPFRFNPNPPKPAVALVALSTQNPGVFPIPHPVFGSTPPFSDDIFMKAFPVDKKIIDLPPAPF

SEQ ID NO: 173942 - protein, 345 aa, Oryza sativa
  Clone ID: PAT_MRT4530_71931C.1.pep
MAVARPNLNGALSLRVEGRPVRGAEVEDVAWRWRIRRRRGQIRPLRGWIWRLHAGVSRSRVATTGGGGGGVWQLAAAGEGGRRTWRTRWRLAAVVVTAEAGARGGRGGSRSRGLHAHEAWPSKACGWPGGAARWAARRARWGKEVGQRGRWRVAPEPERPRFRCRCRPRCDYAFGRGNPTEGIVEIPLLSWQGSLGENLVQFFGRMTTVSFGVATLVRASFLSLRVVVVLLAWWRRPTSSVNRGASSGRRRISCYGGGSSDAASDGRMEGEGPSGGEALTKIRRVDEHHPVMERMKNMDADISVVAGKISRAARTACSDAKWVVDAQVPATLGAAGTSIAMDGRL

SEQ ID NO: 173943 - protein, 104 aa, Oryza sativa
  Clone ID: PAT_MRT4530_71932C.1.pep
LAYGCFEFLGQTAPDRLEHIVPVRVVVSVSYPEPKRPKTERERERVIDTPNPAGECESEIYGRGEDFQTPATSIDEAREEALAPHDEARVHDSGGIRARRDRHA

SEQ ID NO: 173944 - protein, 53 aa, Oryza sativa
  Clone ID: PAT_MRT4530_71933C.1.pep
TINLYKSHANSTKLGTYVRPYLYAHYDTFHIRHSMFFTIKPMPKLKFTHKALT

SEQ ID NO: 173945 - protein, 138 aa, Oryza sativa
  Clone ID: PAT_MRT4530_71934C.1.pep
MASSGGRWRRSGSSMLKLVVALCFFAVAISLCCVCLSSGCGGSGCGGFRRRAVLLRLDFRTRATAYFGANQDHSSSGRRWRRLLAEGPGSYPPRCTAKCGACVPCYPVHVAVPPGVPVTTEYYPEAWRCKCGNRLYMP

SEQ ID NO: 173946 - protein, 53 aa, Oryza sativa
  Clone ID: PAT_MRT4530_71935C.1.pep
PLHFPSRNRINGAMSMEIATFFPGAGIPPPPLIIPSPVSSKPIPPCATSPSGD

SEQ ID NO: 173947 - protein, 153 aa, Oryza sativa
  Clone ID: PAT_MRT4530_71936C.1.pep
MQIFVKTLTGKTITLEVESSDTIDNVKAKIQDKEGIPPDQQRLIFAGKQLEDGRTLADYNIQKESTLHLVLRLRGGTMIKVKTLTGKEIEIDIEPTDTIDRIKERVEEKEGIPPVQQRLIYAGKQLADDKTAKDYNIEGGSVLHLVLALRGGQ

SEQ ID NO: 173948 - protein, 68 aa, Oryza sativa
  Clone ID: PAT_MRT4530_71937C.1.pep
FASSFRKQRYAAFIMRLREPKTTALIFASGKMAWFNFLHRDCKCSVLFICLLTCELVCYLSNGQLLIL

SEQ ID NO: 173949 - protein, 236 aa, Oryza sativa
  Clone ID: PAT_MRT4530_71938C.1.pep
MQIFVKTLTGKTITLEVESSDTIDNVKAKIQVAPPSLCMPVCMLLGSICRDEICHGSADDKEGIPPDQQRLIFAGKQLEDGRTLADYNIQKESTLHLVLRLRGGTMIKVKTLTGKEIEIDIEPTDTIDRIKERVEEKEGIPPVQQRLIYAGKQLADDKTAKDYNIEGGSVLHLVLALRGDTADPILIDKYRFNAPRRKKRIANCASERLWRKKASRLAQSCSMLLKDDGEKESIQA

SEQ ID NO: 173950 - protein, 504 aa, Oryza sativa
  unsure (1)..(504): unsure at all Xaa locations
  Clone ID: PAT_MRT4530_71939C.1.pep
MDEMQMEMEAQAQAHVLLFPWPQQGHINPMLHLASALLDAGXPRHLPPHRPQPPPPLRSTPSPNPSPSAVHPRXLPDDHPRAVGGLIELLDSMRTASSAAYRALLLTESSRSRPDSLDDAPPPVTCVVVDGVMPFAITVAEEIGVPALAFRTESAFAFLAYLSVPRLLELGETPVPSDEQVRGVPGMEGLLRRRDLPRVVPTKQDDVGAEEADPVPVLLTVADTAAHCRNSRALILNTAASMEGPAIARIAPHMRDVFAVGPLHARVATNTIALEKHEDDDEDDDDYGCKAWLDGQDDRSVVYVNLGSLTVLSSEQLAEFLHGLVAAGYAFLFVLQPDMVASSSAVLQEAVEAAGERALVVEWVPRDVHYVLRHRAVGCFLMHGGWNSMLEAAVEGVPVVCWPFFADQPVVSRFVAAVWKTGLDMKDVCDRAVVERMVREAMESPEIRASAQAMARQLRLDVAAGGSSSSELQRLVGFINELSAVHVRSRDADENSSPAVSLLT

SEQ ID NO: 173951 - protein, 46 aa, Oryza sativa
  Clone ID: PAT_MRT4530_7193C.1.pep
ARGGAMLHTRPSLQGGYKGKVLCVKDGGLWYGTVYSMPDRVAQGLS

SEQ ID NO: 173952 - protein, 127 aa, Oryza sativa
  Clone ID: PAT_MRT4530_71940C.1.pep
KTQSPHFEGRKKNGSQEHKKNEHPLDQNKRPELLPWCPKAKSARPPSKNPFGPGKKKKSPPPDGGPPPGGGGDPSKTAQKKEAPRKKKKTFWEAPLHKGGSFKKKAGLWPPWSLQNPWQTRGRGPGP

SEQ ID NO: 173953 - protein, 79 aa, Oryza sativa
  unsure (1)..(79): unsure at all Xaa locations
  Clone ID: PAT_MRT4530_71941C.1.pep
MYNKNLYMQKKKKKTRGGAGTQFAYSESYYNSLAVVLQRRDWENPXVTQLNRLAAHPPFASWXNSVXGPHRSPSQQLRS

SEQ ID NO: 173954 - protein, 78 aa, Oryza sativa
  unsure (1)..(78): unsure at all Xaa locations
  Clone ID: PAT_MRT4530_71942C.1.pep
YFWFTPREYRLSLLLPTIFCNIMGLPVSSSPQKRGVASVAFLAGSLSFXWLLFLRPSPKLYNSRIDQCSCWPGYCRWS

SEQ ID NO: 173955 - protein, 118 aa, Oryza sativa
  unsure (1)..(118): unsure at all Xaa locations
  Clone ID: PAT_MRT4530_71943C.1.pep
FLFGLFFFFLFFFFFFFDPFFYKNPTPGCWVRYKQKTPRTQRPRKKPGQPTGGWGPHEKGEYKPHPAARGQGPPPPPLGPKKSPQXGGPDRGPRGWEPPPGPIAPPPCGGGGGEPPRG

SEQ ID NO: 173956 - protein, 345 aa, Oryza sativa
  Clone ID: PAT_MRT4530_71944C.1.pep
WRQGKAIPTDGGKMGKEIAAAVERERLSHRSIMEWEDDGEEAAGSGGQLGGAPLYAVGDEVEVRMDDPGFHGAFYEATVSARLPCSGRYEVMYSTLVEGGGGRGRRGGGPLRETVAACDVRPRPPPPPPPPLAEDGAAPGRELNVFDMVEAYHREGWWPGVVSAAWPARGRKAAAAMYTVSFPSCREEAKLPASLVRRRRAFVRGRWMDARDVDEENVFEEKLRCLSELEEDGFDVRALKERLENLVSIKNHQTELKKKRARLDQFMLEREVDNASVEQSQKLLDIMIKELELKLLEYREKKASLVEKKAANCSEIAKLQGDMDQIEESFLSAEYDFHTTAAAPW

SEQ ID NO: 173957 - protein, 60 aa, Oryza sativa
  Clone ID: PAT_MRT4530_71945C.1.pep
NPICCPKEQLPQVQAEQEPPADGGKRHWQTLKIFQHLRSPSRANSHRNLGYIAQFLPGTG

SEQ ID NO: 173958 - protein, 409 aa, Oryza sativa
  Clone ID: PAT_MRT4530_71946C.1.pep
MGLSRRAKNLIVDVPFQGAKWLRCVDLAGQLFGNTATPPPPTTIAHGSESAAVQEDYTSQTLVSDSCNPKKKAAGLKMERIRLPRPILKFRPALNEACRIDCFPFVDHKMFWVDHLGRPFLFEAETRLMDMLPCLHKPKSMPFSVFVPNADADNDYEHHRRGSSLFVMERIPKPEVNSSTQWSDQFEAFVYCKHKRTSTNFSKTWQWQLLPPPPYVREPKYWHSCSRPEISSYTSLTVNGDPHICISIDGVGTYCLNTASHTWIKVGNWTLPFHGRVEYVPEFNLWFGFSSDESPHYLAASNLSAMDSQPQLVGRWEELYLPEDLKECKNPQLVNLGSGRFCITRFFHSRSHNSDSRGDVDQNVAVFTGVEVKPCFQDANGGSGKVELQMIPHKSLFHKSNHTTIDAVF

SEQ ID NO: 173959 - protein, 48 aa, Oryza sativa
  Clone ID: PAT_MRT4530_71947C.1.pep
ALAAGEWAAPWIYGVGPLIGGPLAGLVYKGPFMGPPAHKPLPRNAGAF

SEQ ID NO: 173960 - protein, 157 aa, Oryza sativa
  unsure (1)..(157): unsure at all Xaa locations
  Clone ID: PAT_MRT4530_71948C.1.pep
TRRGTASPSSLPRAPRRPSSPRPTSAPSRAPAPCSSSTGGRGRPRGRCRSPSRSRRSSRRRAAAPTPTSSPAACQGASTPSRSRRATSRAPSAPTAAAPPCRASSSATTARSSSPAATTARXPCSCSSPSSTSTPTPTTPASPPTSRSTACRRTPRR

SEQ ID NO: 173961 - protein, 384 aa, Oryza sativa
  Clone ID: PAT_MRT4530_7194C.1.pep
MCVTCMSSSLTNSSAMEFCDDLLVEILSRLPFKSLARFKCVSRSWRALISGGDLRRRLPLLAAGLFVGDGGGGEPRYATACSGDGVEFCDMSFFPLAETAARVVDACEGLLLYRSLAAASAMYVACPATRRWAALPVPRREAQLPLLAFDPADGGGGSPRYHVVCFVAWQERGATVDVFSSETGAWAERDAAFGGVEASSLSPTTHYRGGVLHVLAYPDRVVLMDLAATTTTTTSVAPGRLAPRLPDDVDAGARLGHSRGRLHYAKCDGERLRVWALDVDAASPGSCQWILTNTVCVNEMTINGGLWAASEVKFLAFHPDMADVVYLSSPEGKVASCDMRRKEMVSSWKLGAEHHVVRFWLLGFSSGLMSCLGGEQACQIAGAS

SEQ ID NO: 173962 - protein, 103 aa, Oryza sativa
  unsure (1)..(103): unsure at all Xaa locations
  Clone ID: PAT_MRT4530_71950C.1.pep
SPGGLXVGVCLDNKFLLGWACCCPMHNDHHSSICAATNFVHIISACIITKSVLFCYCLEGQWQTDMLLSSFISKDIVNRGQRPINQRCGYLSKNADIRRGPCV

SEQ ID NO: 173963 - protein, 248 aa, Oryza sativa
  Clone ID: PAT_MRT4530_71951C.1.pep
MLPPAARLAARRLLGLATSSASESAAARRLSRSPHLDSPENNPDMPWEFTEANMKKVNEILSHYPSNYKQSGIIPMLDLAQQQHGGWVPVAAMNAIAKIVEVAPIRVYEVATFYTMFNRTKVGKYHLLVCGTTPCMIRGSREIEEALLEHLGVKRNEVTSDGLFSVGEMECMGCCVNAPMIAVADYSKGSEGYTYNYYEDLTPKRVVEIVEMLKRGETPPRGTQHPERKNCGPAGGNTTLHADMRRQW

SEQ ID NO: 173964 - protein, 274 aa, Oryza sativa
  Clone ID: PAT_MRT4530_71952C.1.pep
MLPPAARLAARRLLGLATSSASESAAARRLSRSPISYAAAGCSSRLFSTALNYHLDSPENNPDMPWEFTEANMKKVNEILSHYPSNYKQSGIIPMLDLAQQQHGGWVPVAAMNAIAKIVEVAPIRVYEVATFYTMFNRTKVGKYHLLVCGTTPCMIRGSREIEEALLEHLGVKRNEVTSDGLFSVGEMECMGCCVNAPMIAVADYSKGSEGYTYNYYEDLTPKRVVEIVEMLKRGETPPRGTQHPERKNCGPAGGNTTLHGEPKPPPCRDLDAC

SEQ ID NO: 173965 - protein, 90 aa, Oryza sativa
  unsure (1)..(90): unsure at all Xaa locations
  Clone ID: PAT_MRT4530_71953C.1.pep
RVSSSPQRPRSSPAAARADRRLCGGXDGGGGEVGGGGAAVAAXGSRARAXPCELGTAGGGRKGGGERQDVGEGGPRGRRCSAVPQWWRWP

SEQ ID NO: 173966 - protein, 96 aa, Oryza sativa
  Clone ID: PAT_MRT4530_71954C.1.pep
GSPKETMCFGVPYSEHNSFRKLAMFFITLRIEKVVPTVNVGSEQSRKRMKGWIDRWLSERRRAGLVIPLIEGEDNGQVAEKELWDGKPGTAGKAFW

SEQ ID NO: 173967 - protein, 241 aa, Oryza sativa
  Clone ID: PAT_MRT4530_71955C.1.pep
MATSISAGFGGEPGAVLAPSASVLPAPRRRNPATSSKILLGLTLAQFSSFPRGRSCNIMLTPKHLGIEHQSCSKSSIQTFALSRNDFSPIAQEVEGFLHNIVNMGFLDRLKLAWKIIFPAPSIKENSNANIAKQRLKMILFSDRCEVSDEAKKKIVENIVEALSEFVEIESRDNVQVDISTDAGLGTVYSVTVPVRRVKPEYQESEEQYRGKIVGVDFKDTGETSGSVDVTFDFFVPNKNY

SEQ ID NO: 173968 - protein, 408 aa, Oryza sativa
  Clone ID: PAT_MRT4530_71956C.1.pep
MEARRERLREDVKRRKSASSFKPRGAKELILLIIERLAGDDHNCREICDTQGLLSKITAPITSRAFLDAVCEDDDVWFDILSTSLRVLARLISSPGEASTRLLQETSTSQDMEPALQILAQVALGPYTGLMTKEEFVSLLRDIFFGNKDNIEEKSRRYGTVVDQLTEMLVKDKQCQISAAAILEHLCSRFLKSCQLSKQDAINLLTTVLGLILSSNTERNAVAGSDSSNYAGAATEARGSDYSAIARDEESQPPKDAVQDKSPTEQDDILSQEKKLLAALLSFTMVICEKLIDADDFSNVAHVDRELLKKLIEIIDVNNDATADCLRIMKLSCQVAILAIQHKPSCAKDFNEHDRNHVLTKASENLLELDKCMFFAGNDHEAIKPARSLSSLVKEAQERFKEAQARAR

SEQ ID NO: 173969 - protein, 472 aa, Oryza sativa
  unsure (1)..(472): unsure at all Xaa locations
  Clone ID: PAT_MRT4530_71957C.1.pep
MAAVVRELVERRRVHSQAHGYTIIAFHPRVFQGYLSTFDVAIPMDRQWMCADRRSKEFIDGVHNFLRVAEANKQNNGFIRSPCTKCKNQREYFAVRTTHILLFEMGFMPSYNVWASHGEQGNTTGEVERAVEDNDAANDRGQMLQDVKEDCESEKEAQKLERCEQGHKKLGTTLEFLQWKAENGVCHKAFGNVLKLVKNILPEENKLPETTYEGKKIVCPLGLEVQKIHACPNDCILYRGEKYENLEAYPVCNALRYKIRRDNPGEVDRQPSKRRVAAKVMWYFLIIPWLRCLFRNKEHERMMRWHAEERQQDGMLRHPADGSQWRNIDRKFKDFGKDARNVRFGLSTDDMNPFGEMSSGHTTWTVTMCIYNLPPWLCMKRKYIMMPIIFQVPKQPGNNIDVYLRPLVKDLKLLWKKEGVPMWDEDKQEEFNLRALLFVTINDWFALSNLSEQSNNGYKAXHCLEETESTYL

SEQ ID NO: 173970 - protein, 166 aa, Oryza sativa
  unsure (1)..(166): unsure at all Xaa locations
  Clone ID: PAT_MRT4530_71958C.1.pep
NSSATQQSSPILHHQWSSSICRRRLVHIDAHVVSSDRLICKTLHRXHRSCPLRRQRPRQRQQHXSCHVRRQRLYQLSITIVMTASRCRRTNQSGCKMLTIAVPSSQRNGXKKISPSAVCGYTYNHGYYMIGXINEHLQQKSLMGIEKSQGTTQKGMQAPGGELDSI

SEQ ID NO: 173971 - protein, 567 aa, Oryza sativa
  Clone ID: PAT_MRT4530_71959C.1.pep
MDGVVAEDQAGGSGSGHRRLIGSRIEEHRKYMSEESCCPRCGHKIDRKLDWVGLPAGVKFDPTDQELIEHLEAKVRPGGEAAAHPLIDEFIPTIEGEDGICYTHPEKLPGVSKDGLSRHFFHRPSKAYTTGTRKRRKIQPPAAAASSGGGGGNASSSSSASAAAAVARHGHQQQQQQQRSETRWHKTGKTRAVVGGGRQRGCKKILVLYTNFGKHRKPEKTNWVMHQYHLGEAEEERDGELVVSKIFYQTQPRQCAAADAAATASASAVDRRTTSLRDRAAAAAAAAAAAAPMASANVSVAAFHGGAAGIDEFSFAQFRSSFEEAGMGASSSDHQSAMVDQRRRQQQHDDDEHDHRRGGGGHHYVGQQQSVAATFHVVSSPADPIARLMSPPPAHQGTVMLRQPEPPYIYHHQEDERPHQPRKFDGRSTSGSGLEEVIMGCTSRRSKGGETSGGKDGTEWQYPSFWPSDSQDHHGDKDDIEAKQKGETEKEKGEEKQSFSRYTFAKKYSMNKETLKISSILHSGILSESKLPENFPVCVVEGEYDEHGNAWMNLILPFSDSSKLRLM

SEQ ID NO: 173972 - protein, 92 aa, Oryza sativa
  unsure (1)..(92): unsure at all Xaa locations
  Clone ID: PAT_MRT4530_7195C.1.pep
MPTARTAINCNTTVAWEAAKPLMIDKVDVAPLHTMEALVIILFTSLYHTHVYFSXANGHTPVHPMIFIHQAISIVHSLEEDITNLTPIHHIL

SEQ ID NO: 173973 - protein, 117 aa, Oryza sativa
  Clone ID: PAT_MRT4530_71960C.1.pep
QICLAAALLNSSLMLPRGGGRRSPGELGALPGWTPAGEPEASRRRRRRRRASRLAQTPCRARAGGHIGRAAGGAAARSRERQGYLGDLVVLTSFIKNTILYQFRKVHPECKDSCGVS

SEQ ID NO: 173974 - protein, 292 aa, Oryza sativa
  unsure (1)..(292): unsure at all Xaa locations
  Clone ID: PAT_MRT4530_71961C.1.pep
QPPPLGLSPPGSSPPPPPPLSLXPPRPLIPRPPLPSEMAEGRVQPPPPPPLSPDPEEGRAGRPPGGPLPPHPLDLAEGRVRAPPWPPIPSNLAKGMAWPLPRQPPPVGQSLLGSCTSAAAILPLPIAPRHAAPSARTDTDEHVSTLGQPHRCIRQPAWLDLGARESPDLEAAAPSSITTRNQMNTAQKKIICRPATHPAASSLAGSEGGEGEAAAPRLAIAGRPPIPPPRARLPSIDLDPAGPRPAIAGQPPSRHPTPGCCRPASHPVAPHRAAADRPPSRRLASSRRRPPH

SEQ ID NO: 173975 - protein, 339 aa, Oryza sativa
  Clone ID: PAT_MRT4530_71962C.1.pep
MASSGAVALMMFHTMERELFWRLVGEHGQQPGPMRWVIALWLWLESVGHHDFVRRVAVLPAPVVLRFVDEALACLARLPRRRGVAGGAERRLAALAAAGDADPALRFLPCTNALLAEPVEGLAYFDAHRDEVMEGVSDVYRNVCRVIFDDGVAAAVAAADDDDDAEAAAFLPRDVLDALDGTPPPPPPPPMYHQYHHHAVHMAPMLPPPPPVAELNPMASPWFPVQQQEQPPPPPPQPHQQHGYIPLPEDYRSLFITFSRGYPIRQDDIINFFNSLYGPCVESVMVEKAAAGQLPVYGRVVLRCPSMIPVVLDGQQTAKYMIKGRHLWARIYVPSSKPN

SEQ ID NO: 173976 - protein, 793 aa, Oryza sativa
  Clone ID: PAT_MRT4530_71963C.1.pep
MSGANPKCRRSIHNVPCTRIHIQNSSQGERKTYGAAYHLVLAMCATAKRGKTGAKHTSEPNQQQPRAELTNRMHVHQDFCGINQRIISQLLSMVLGERAPSARNTHIGKHLCDGGPWCTTLVGEPRIDVSHTERQCIVLSKSGRCTKRKACQAGKKLPSTGAPWTKVTTRYMSFNRALGILRIRVHQVSDSICLQNCNLGNCSLCLSSCSPCDVPNELDAAGLSAPTVAAPVVSTGAPSPSSILLPSLFALPRCPPCREEEKETGAARFTRHGPPASAPYYYRRPDEALVGVGRCRLSGRDGARRSSSTTAQPDRGSKAKLGVDHLLMRKNTLAWEICLAPVKVGKYTIQTRAIQEVECTNAALNNADVNDTIAWAGGILDLPLSRRLNTNAATRQLLSSSSTPFSERRPTTIAAPHRPSPPSRLRSCMEPIPLGQAQRRQGQRYGLIEKIGSLGWPRAHAHTGGGRDPVAAVARTSAASRGRRQRVSGKHDPFVSHFSKVDSPFAPKSRSSVQCPRFVLYLVTMKRSTTLKIILPSPVQSSESTPTTETDESTPTLETAGTSASNNRQNNVALAPNVVVADTGLRTPIEHLDVNIRDAARREYCPIAETKAQNQVTLDLFGTSCAFRLARTRGAAIAQKQKRVTRERGGAQTPSRHRPRPVADDVLSLGRPSPLAHRARRAPTALGKLPRRVVLIRFNRLPETVDTEIPKLIPKEELGFLTAGVFSVGGALSFWVLCRLHYGPRITVPRSLRWASCGAISVSSASALLVRLFSPECEPQNIAAYDKLGHKTG

SEQ ID NO: 173977 - protein, 170 aa, Oryza sativa
  unsure (1)..(170): unsure at all Xaa locations
  Clone ID: PAT_MRT4530_71964C.1.pep
SSVPADSQKCAPCCPPPCAQVCPARAITSDADEVVPTGVWAEKWYGCGRCLPICPQGIITTYSHQTTATSLVPWLELGQIAALEIHTQVGHEERFQHTLXRSLAPVLTQLQAIAISCPYHAEAVEYLQTISGWLGPXAMPTIXQTDGRPMSGDIGRGTTHLCLHCTDPLE

SEQ ID NO: 173978 - protein, 112 aa, Oryza sativa
  unsure (1)..(112): unsure at all Xaa locations
  Clone ID: PAT_MRT4530_71965C.1.pep
VEHLFLRCSGVAAIWHSYGFDEQQVTXLAQLEDLWGLPPPAMXLTPQVWCIILLAAVWNIWKRCNNKIFNSIDETNTLVLRRCASYIELWSNRCNDAVGKQQLYSWALNPNF

SEQ ID NO: 173979 - protein, 66 aa, Oryza sativa
  Clone ID: PAT_MRT4530_71966C.1.pep
LTTGGAKHYRCGGNASGVHYSIAHSAGTFRYVKDRKKSNSFITTLLALHKHRKTFDPFHTCHYAEG

SEQ ID NO: 173980 - protein, 186 aa, Oryza sativa
  unsure (1)..(186): unsure at all Xaa locations
  Clone ID: PAT_MRT4530_71967C.1.pep
WRPPTPRRRAIPAAPTKGGGDGERKTREEGEGAPSPTIAAPRTARPHEPPSPARCRLPXPRTSAPASPPPXPPPRSPAAPPGKLRLSLSCLPPAARGAPPLPQPPASRRPGXPPPPPPACSAFASAARCPPALLPPLPPTARGAPSPPPXPPAPTQPPAARGAPPPGPPAHPRAPPPTILHRKRGL

SEQ ID NO: 173981 - protein, 105 aa, Oryza sativa
  unsure (1)..(105): unsure at all Xaa locations
  Clone ID: PAT_MRT4530_71968C.1.pep
NLTGPEPPGVEHRNFRSAQTIRNFRCSCTGTSRQXKNLGKTNRDXAKIHEMNHRISSTRKTSRTSAQGSLLTYLIFLRRMAQDWVEEAKKLMGEASNSYGVEKQN

SEQ ID NO: 173982 - protein, 419 aa, Oryza sativa
  unsure (1)..(419): unsure at all Xaa locations
  Clone ID: PAT_MRT4530_71969C.1.pep
MGQWRREDEIHKYVYVVGYSLGLGVVIGIRTRWYQSVRQIHGRGTREVLHAATTTRGVQRRTWTQGGARRRSTEFDRWNQTLLAAAGTVDGCFNREMTRRGAQVDGGGSDWRINRWVGHFGRVARTFHGVGRKCRREGAEAVRYVKAWKSMSRWTQQQELIHGIADFAIEQITKQKSDWDLLAAVIWDDERRVAGARLGVVVGASTGEGAAATLLCRGGRYRGRQHPHRREAYGGSIGSVVIGGVLSLMFFVLSDSFYFFLIYPAELLPLIFQKKTPLRGSIFWTGGGVGNRSSVFGGGAEETVRQEVAAGAAGARQALGGGALRLRGASRRARGSVVSIWSLDATGQLLRLLLTESSWLWAHVDFLDAQSNVFAWLVCTWRPXHVARQGGVFSQDVTQTKAASGPKLEGPEQPRMKIV

SEQ ID NO: 173983 - protein, 56 aa, Oryza sativa
  Clone ID: PAT_MRT4530_7196C.1.pep
AFFFSGRKIDGHQWKNPHPMPNNSHTLLHMSLHNYTSHSFTTKYQYVVLVLSTHLL

SEQ ID NO: 173984 - protein, 35 aa, Oryza sativa
  unsure (1)..(35): unsure at all Xaa locations
  Clone ID: PAT_MRT4530_71970C.1.pep
PAAFMRVEDFSXDWCELVKTTAFFPEHWFXQNQMY

SEQ ID NO: 173985 - protein, 334 aa, Oryza sativa
  Clone ID: PAT_MRT4530_71971C.1.pep
MHARCGRPAMHARRSPMVGCSAVETDLLQNDSTHKLIKAWRKGEAVYEERGLQWWRWAGGRGCWSSRASRQRWDEDTFSFTKKFSKHEPNYGQGEEKERRRRKKGWIEDDMWTQHVMPRQCHVGRRPSQHRHVSETTLQDRKRVKLRRFNSLGESSYPIYFKGNIYKDRKVAFQVTNILMHCLFGSLISEGLQLCSCACRADDEGMRTKTGYYLLSRRDGDLTITIGSMSSDVLMQHTPQKMQQPNNTCGQFSHITITSQSQLYDKRKLPFHPVHGKEITRSVKDSSCLLPLSALTSGVHTSRLAVIRMPQQRREEIRNGLSSIFFQQPFSSTF

SEQ ID NO: 173986 - protein, 167 aa, Oryza sativa
  Clone ID: PAT_MRT4530_71972C.1.pep
PAGVSAAAPPPRRPRSSSPHPAAMADAGKPDPASPPEAPSAKKGVFMRRIFPFLLAANIFIGVYVFAKTYKRDQEKKNAQTAAAAAAVVALSSPAAPAAETVDPTPPTPPPKRVLPPIPEDEQRQVYKWMLEEKRKIKPRNAAEKNKINEEKALLKEFIRAESLPRL

SEQ ID NO: 173987 - protein, 289 aa, Oryza sativa
  Clone ID: PAT_MRT4530_71973C.1.pep
MDGGMGMGGERWTRRDPSWFPETRYAAEHLGFPTRWRSIGMGRGRVELKRIENKINRQVTFAKRRNGLLKKAYELSVLCDAEVALIIFSNRGKLYEFCSTQSMTKTLEKYQKCSYAGPETAVQNRESEQLKASRNEYLKLKARVENLQRTQRNLLGEDLDSLGIKELESLEKQLDSSLKHVRTTRTKHLVDQLTELQRKEQMVSEANRCLRRKLEESNHVRGQQVWEQGCNLIGYERQPEVQQPLHGGNGFFHPLDAAGEPTLQIGYPAEHHEAMNSACMNTYMPPWLP

SEQ ID NO: 173988 - protein, 119 aa, Oryza sativa
  Clone ID: PAT_MRT4530_71974C.1.pep
MLGVPRARKSGGRLSLTRKIMPEDAAVRVGESQPRPRYPERSVHLLSFAMARELEEHARVLEERTQALEKRACMLDQRETTLAAHERTAAEAESSLRLHEEAAADRNRTTLTAVNDQLW

SEQ ID NO: 173989 - protein, 208 aa, Oryza sativa
  unsure (1)..(208): unsure at all Xaa locations
  Clone ID: PAT_MRT4530_71975C.1.pep
MRSGLRRRFLTEERWTRRPARRRTQRHRRHGSARRLTAASGGRSGGGGGGEEGNGTRAVEGTGVDGCKTKKREGETGALYIDPRGSIMAGMAAISPAEWGEVGRRERRDSNFESRPSRARARAXKEREWARGSRGKAATWPTWPGRCGSERAGGCGXLKLGDGPDRKEEGGRLXWALAFSRPSGEGKRMGQRPIRKGKGGKIKRKRRK

SEQ ID NO: 173990 - protein, 336 aa, Oryza sativa
  Clone ID: PAT_MRT4530_71976C.1.pep
MAASSSSSSSLAVVVVAAAVALVAGGGAAVAQLCEEYYDCTCPDAYDIVRRVLIDAHRSDARIFASLIRLHFHDCFVQGCDASLLLDSVPGMPSEKTSPPNNNSARGFPVVDDVKAALEDACPGVVSCADILALAAEISVELSGGPGWGVLLGRLDGKTSDFNGSLNLPAPTDNLTVLRQKFAALNLNDVDLVALSGGHTFGRVQCQFVTDRLYNFSNTGRPDPTMDAAYRSFLSQRCPPNGPPAALNDLDPTTPDTFDNHYYTNIEVNRGFLQSDQELKSAPEATGTTAPIVDRFATSQAAFFRSFAQSMINMGNLSPVTDPSLGEVRTNCRRVN

SEQ ID NO: 173991 - protein, 46 aa, Oryza sativa
  Clone ID: PAT_MRT4530_71977C.1.pep
PLSQLVKARPRREGGALSLSGKEGEVNETMRGSFSRAYRSTNVMRG

SEQ ID NO: 173992 - protein, 33 aa, Oryza sativa
  Clone ID: PAT_MRT4530_71978C.1.pep
PKSRARRLPHSGSQGAYSVLVPMQRTKVCTLPE

SEQ ID NO: 173993 - protein, 39 aa, Oryza sativa
  Clone ID: PAT_MRT4530_71979C.1.pep
GQGAQQPGTLPLPEGCSPPFAKNFYPTLRSENGNSLYPF

SEQ ID NO: 173994 - protein, 54 aa, Oryza sativa
  Clone ID: PAT_MRT4530_7197C.1.pep
LTASYAGQTVPTIAGQTVPTIVGQTVLYPGQIAPPVAGVTGSWRYGKNYTSGED

SEQ ID NO: 173995 - protein, 74 aa, Oryza sativa
  Clone ID: PAT_MRT4530_71980C.1.pep
AWTPLTGPPFFFGGFLLIGVSPPRAPSLESCYTPKGKNSTSFSFETSICRHPTRGGLGTLQMGAPHYLNLFGPP

SEQ ID NO: 173996 - protein, 181 aa, Oryza sativa
  Clone ID: PAT_MRT4530_71981C.1.pep
MSDGYFALGIWSQIPRADDACDVAAGTEAGTLMVRTLLVMSCVARLDDEDIGAGGIVEKAWRRAGGQCPVPMQTAGKLLLGVGGAPSASGDGRRRLSASRLLSLAMGPWEGSTVAGGSALPSGGRGGGGQGRCPSLRRIQREEGGEPTAAHRRPSGGGTLPSAGSNGKGAGCGSVAPSPSI

SEQ ID NO: 173997 - protein, 44 aa, Oryza sativa
  Clone ID: PAT_MRT4530_71982C.1.pep
HFKTSFIPYCIQAYYKSSVFGRMTIHYKVFNTLEQTKTMETLTS

SEQ ID NO: 173998 - protein, 46 aa, Oryza sativa
  unsure (1)..(46): unsure at all Xaa locations
  Clone ID: PAT_MRT4530_71983C.1.pep
MPKLTCDADTDFGTTMHKTTTISXTXLHSTNXLLAAPHETPPFTVS

SEQ ID NO: 173999 - protein, 68 aa, Oryza sativa
  unsure (1)..(68): unsure at all Xaa locations
  Clone ID: PAT_MRT4530_71984C.1.pep
NGEKIGHGWEGPAHRGTTGPPRCFKKPPPFQLCLRKNLRLGPTPXRVGFPQYFLVGQNSEPRRSLVTW

SEQ ID NO: 174000 - protein, 52 aa, Oryza sativa
  unsure (1)..(52): unsure at all Xaa locations
  Clone ID: PAT_MRT4530_71985C.1.pep
LPPKRSKNLFGRKGQPEKKGGTQNEEAKDAXACQGGPYQNASKETGVETKPG

SEQ ID NO: 174001 - protein, 90 aa, Oryza sativa
  unsure (1)..(90): unsure at all Xaa locations
  Clone ID: PAT_MRT4530_71986C.1.pep
GSFDINVIGQGKGDFRQRWKPFCKFLLFRAFPLYRLSHFCRXTALFYFLLACXLFFLQLILCTIASIPIFVLLFYLFSNLYFYYNLSFLK

SEQ ID NO: 174002 - protein, 116 aa, Oryza sativa
  Clone ID: PAT_MRT4530_71987C.1.pep
MRTGGGFGGAALSIKLPLLWSEVEWNNDENKVSCQIYCALCHHRFLVELARSGLGFVGSGERHRFGGNKDAQGGSFINDRQALHGVWGCRTGPYPLPTRHSHRALPHTYQILTKNA

SEQ ID NO: 174003 - protein, 67 aa, Oryza sativa
  Clone ID: PAT_MRT4530_71988C.1.pep
VGPSVVPRLTRGTALHSAGSRCDVGARLSVQSDVTGVRPVTDRSFLTITRQMGTPHVCPSGTPRPLA

SEQ ID NO: 174004 - protein, 143 aa, Oryza sativa
  unsure (1)..(143): unsure at all Xaa locations
  Clone ID: PAT_MRT4530_71989C.1.pep
MHNCATLGVFDSYSVMNNWHLRLLVLIFGDNWRXVVLEMIGFEGDIQVLLXCVVRSDRTLVAGQTDVYRAREVIKLSSTLRVLRFVFALIRQSNQRDTGGQTDGNASVILAGQRRSDQRXAQARSDRQINSGQTDLHGIEGNF

SEQ ID NO: 174005 - protein, 95 aa, Oryza sativa
  Clone ID: PAT_MRT4530_7198C.1.pep
MALASSSLPDLRIYEPCCVDRGLLPKGVPADQPPPRRRRLCLGLLGLVSNIVINTLTPSSSAMPDPQATTQELAARPLDGMKAFLVRLFPDLREW

SEQ ID NO: 174006 - protein, 162 aa, Oryza sativa
  unsure (1)..(162): unsure at all Xaa locations
  Clone ID: PAT_MRT4530_71990C.1.pep
MDGRDRSGPRRFTAEGLDDASDDVTDGGGGSAERTARAAHARRRTAARERKRRAPGRSRRHDELTDDQKSDGEATDGAGDEEETAGLFGSTTATMLRWSSAAAKGRTRTATRRRPRXRPSRTTATARTTAAHGWSGGSGGEARAHGARVLPTTRGEGEGVGG

SEQ ID NO: 174007 - protein, 78 aa, Oryza sativa
  Clone ID: PAT_MRT4530_71991C.1.pep
GSHKCFLLYMNDRMTSSLQEGVYMRGPWIKTEKYDLIFRLLALHIIDTTSAYLCYLLVAIFPRRDPLPWRVCPYKHCL

SEQ ID NO: 174008 - protein, 68 aa, Oryza sativa
  Clone ID: PAT_MRT4530_71992C.1.pep
MGGNRAHQNLHHQRWYRSSVNEQDSEVEREKEMSLLLCHCHVQAGQGAEDLSGIAHARRLQAGSIDVM

SEQ ID NO: 174009 - protein, 170 aa, Oryza sativa
  Clone ID: PAT_MRT4530_71993C.1.pep
MDGRDRSGPRRFTADDPDGVSDDVTDGGGGSAERTARAAHARRRTAARERKRKAPGRSGRHGELTDDQKSDGEATDGAGDEEETAGLFGSTTATMLRWSSAAAKGRTRTAMRRRPRRRPSRAMATAGTTAAHGWSGGGDGKARAHGARSLPATRGEGEGGGEKRRARGSF

SEQ ID NO: 174010 - protein, 209 aa, Oryza sativa
  unsure (1)..(209): unsure at all Xaa locations
  Clone ID: PAT_MRT4530_71994C.1.pep
MRGPHVSPPSSSLSPFSLFLFPSSLWPPLPTTGELQPLPRAQTVGEPLPRGQMVGEPLPRARTAGEPLPRGRTAGEPLPTRGRPASTSPARRRPASSSPVRYRRRRRHDASAHGRLPRESLYWAASSSPSSSTPHSLRTYCLLVHLLSRTAGCRRRSLSLSPHATGRRXEEGERKREKGEREEEEGLTCGPHMCHVGATWNEDSVNIAT

SEQ ID NO: 174011 - protein, 147 aa, Oryza sativa
  Clone ID: PAT_MRT4530_71995C.1.pep
KEKGIYCVSGLGFGGPGARAAVHANGRPRSNRSKMDGRDRSGPQRLTADDPDDVSNDVTDSGGGSAERTAHARRRTAARERKRKAPGRSGRHGELTDDQNDGGEATDGAGDEEETAEFFGLTTAMMLRRSPTMAKRRTRTATTWRPR

SEQ ID NO: 174012 - protein, 67 aa, Oryza sativa
  Clone ID: PAT_MRT4530_71996C.1.pep
MGLAHLLAVREKERTSDLEDERRKHAGRRSSGAPCNKHQDDDVDQGAASKEKGGALVPLQTSSRMAG

SEQ ID NO: 174013 - protein, 98 aa, Oryza sativa
  Clone ID: PAT_MRT4530_71997C.1.pep
RHRRTPISHSLTYTPHHLPRPPPPSPWPPHRLRPLHPAASVARCGGCSRRSRRLSGVIRAQSAPASAAAAALTHDDLKRLAAVPAVEQVESGMVLGLG

SEQ ID NO: 174014 - protein, 81 aa, Oryza sativa
  Clone ID: PAT_MRT4530_71998C.1.pep
SIQNVRVKRESAETDAADQDGNRVAAENTKGTEPAADGVGSSKQTVPTDASAMAIDEPGSLKVEPDNSNKLQDQPSVHQKS

SEQ ID NO: 174015 - protein, 528 aa, Oryza sativa
  Clone ID: PAT_MRT4530_71999C.1.pep
MDASAGGGGNSLPTAGADGAKRRVCYFYDAEVGNYYYGQGHPMKPHRIRMTHALLAHYGLLDQMQVLKPHPARDRDLCRFHADDYVAFLRSVTPETQQDQIRALKRFNVGEDCPVFDGLYSFCQTYAGGSVGGAVKLNHGHDIAINWAGGLHHAKKCEASGFCYVNDIVLAILELLKYHQRVLYVDIDIHHGDGVEEAFYTTDRVMTVSFHKFGDYFPGTGDIRDIGHSKGKYYSLNVPLDDGIDDESYQSLFKPIMGKVMEVFRPGAVVLQCGADSLSGDRLGCFNLSIRGHAECVRFMRSFNVPLLLLGGGGYTIRNVARCWCYETGVALGHELTDKMPPNEYFEYFGPDYTLHVAPSNMENKNTRQQLDDIRSRLLDNLSKLRHAPSVQFQERPPEAELPEQDEDQEDPDERHHADSDVEMDDVKPLDDSGRRSSIQNVRVKRESAETDAADQLLWSTCAARWDGNRVAAENTKGTEPAADGVGSSKQTVPTDASAMAIDEPGSLKVEPDNSNKLQDQPSVHQKT

SEQ ID NO: 174016 - protein, 168 aa, Oryza sativa
  Clone ID: PAT_MRT4530_7199C.1.pep
MSRRRLQLLLLAAVVLVHAAADGCRVFQIEEATVDDIQLGFNNGSLTSRQLVFFYLDRIARLNPLLHAVIEDSIATRDRLNTTAGSLALLGSVVRRDAGVVRRLRRAGAVVLGKANLDEWANFRTIQGTGGWSARGGQSRVRLSYLLSLANFAIGFSITKVNAEYRSL

SEQ ID NO: 174017 - protein, 230 aa, Oryza sativa
  unsure (1)..(230): unsure at all Xaa locations
  Clone ID: PAT_MRT4530_719C.1.pep
WPRTPTPPSPPRPPPPAAAPPPPSAADSAGLVLRVRWLWLQRSGHPYWDGLKLXVEQTVSDMFAASTFFVRENGESMLFWSDQWIDSCSVASLAPDLLFVVSQHLRGSRTVASGLTNNSWVSDICGALTVPAFFHGQHSFACGDLLWHAKGPAKCRFFLWFAFQQRCEMADLLQKRGIDSXWLHVLSPPGWAALSPXRGSWFQDWWSSSRACLPEHLRAGFDSLVFLVSW

SEQ ID NO: 174018 - protein, 687 aa, Oryza sativa
  Clone ID: PAT_MRT4530_71C.1.pep
MARLGSVAVADSAKTDQTTTATATATAPTPASEFPRPTTSNNNGLDCTGNFAVSGLPLPLTNRLVLAYAVFGDTEAACQVFNEMSDKSGITWAIMVSAYSDGTMRRHRPYLDGVAAAAATFLLAVLLHAPLAAGEDEPPPWVLCGPYPPSGNYSKNGTYQVNLDLLSTTLPKNTSSSPAMYATGTVGDVPDKVYGLALCRGDANASACERCVAAALRDAPRRCPLVKDVLVFYDLCQLRYSNRDFFLDDDYFVTTYTLQRSRRVGAAAAAAFDAAVAVLVNATADYAAADSSRRYGTGEEEGVDGDSDRPKIYALAQCTPDKTPEVCRTCLSTVIGQLPKEFSGRTGGGMFGVWCNFRYEVFPFFSGRPLLQLPAFVETPPPPPSPSATSGDDIQSIDSLILDLPTIRVATDDFADTKMIGQGGFGMVYKGVLPDGQEIAVKRLCQSSRQGIGELKSELILVAKLYHKNLVRLIGVCLEQQEKILVYEYMPNGSLDIVLFDTDKNRELDWGKRFKIINGIARGLQYLHEDSQLKIVHRDLKASNILLDFDYSPKISDFGLAKIFGGDQSEDVTNRIAGTYGYMAPEYAMRGNYSIKSDVFSFGVLVLEIITGRRNTGSYDSGQDVDLLNLVWEHWTRGNVVELIDPSMGDHPPIEQMLKCIHIGLLPAFCIQEVCEHGPCGGRRRQE

SEQ ID NO: 174019 - protein, 495 aa, Oryza sativa
  Clone ID: PAT_MRT4530_72000C.1.pep
MRSFNVPLLLLGGGGYTIRNVARCWCYETGVALGEELQEKLPYNEYYEYFGPEYSLYVAASNMENRNTNKPHPARDRDLCRFHADDYVAFLRSVTPETQQDQIRALKRFNVGEDCPVFDGLYSFCQTYAGGSVGGAVKLNHGHDIAINWAGGLHHAKKCEASGFCYVNDIVLAILELLKYHQRVLYVDIDIHHGDGVEEAFYTTDRVMTVSFHKFGDYFPGTGDIRDIGHSKGKYYSLNVPLDDGIDDDSYQSIFKPIISKVMEMYRPGAVVLQCGADSLSGDRLGCFNLSGKGHAECVKFMRSFNVPLLLLGGGGYAIRNVARCWCYETGVALGHELTDKMPPNEYFEYFGPEYSLFVAASNMENRNTNKQLEEIKCNILDNLSKLQHAPSVQFEERIPETKLPEPDEDQEDPDERHDPDSDMVLDDHKPMGHSARSLIRNIEVKREITESEAKDQHGKRLTTEHKGPEPMADDPGSSKQAPVSRRLLYPSANP

SEQ ID NO: 174020 - protein, 66 aa, Oryza sativa
  Clone ID: PAT_MRT4530_72001C.1.pep
HRKKKNKRRFRKIIFFQLCAHWSIHAQPTKKKRYCNKRRFKQVHVPCVLKGDYPPLSWPLAPALEL

SEQ ID NO: 174021 - protein, 130 aa, Oryza sativa
  Clone ID: PAT_MRT4530_72002C.1.pep
RVREPQILAVLLPPLSVSILRAHPVFVLCAHLVLYDEHPLLLYEAQTFRYTQPVIADDAYHFLSVVLSLSPSLLLPLSPSYDVNSVVVNCLYPMGVNIVIHAHRLIELLPTQPESLPLAETLYCTFDNTL

SEQ ID NO: 174022 - protein, 225 aa, Oryza sativa
  Clone ID: PAT_MRT4530_72003C.1.pep
QASHGGDGRSAKPPATTSTHHLELWEQLPPPLLPTPLNGGIEELRVPQPSPSPIPPPPLTTKPESLPAEMDFEPELKALPPPPLLALSQPQVDGAVRPWNLRQLTWRRPAISLSWAAAVPMPSSFRRRKHAPFLVALTAEEIEEDIYAPLPPSLLSAPLSSLPSRACLRHGSSVARRVDQRLMEKEMEARLWSSRCSGCRREKKGRREKKKGEEGREKEGRREKK

SEQ ID NO: 174023 - protein, 81 aa, Oryza sativa
  unsure (1)..(81): unsure at all Xaa locations
  Clone ID: PAT_MRT4530_72004C.1.pep
QDQEIDDELEFLILASNGLWHVVPNXNPVPLVKFGEDPKAPARKLTSPAFSQGSGANIPCTVVKFQHANMNGNSSPPSDKS

SEQ ID NO: 174024 - protein, 146 aa, Oryza sativa
  unsure (1)..(146): unsure at all Xaa locations
  Clone ID: PAT_MRT4530_72005C.1.pep
RARTKRNPPLPPSTTPTGGSPPNCGGGRTPPGSPSPEPPPPRSLQIRARGTEEPPGVSLPDRETLPPREERRPSLPLPXPAPQPPPRGGCGLQHRSPARRIEERETVARLCGARVWSSRWGIWGDSIPSSLRRDSRGGGGVGKGLV

SEQ ID NO: 174025 - protein, 67 aa, Oryza sativa
  unsure (1)..(67): unsure at all Xaa locations
  Clone ID: PAT_MRT4530_72006C.1.pep
HVHHKVNKKYLCSIHGDESIALFRHHPKAFLHMIFSQLINTXTLFEHGSKDEPHSLRCAKHNCIGGS

SEQ ID NO: 174026 - protein, 195 aa, Oryza sativa
  unsure (1)..(195): unsure at all Xaa locations
  Clone ID: PAT_MRT4530_72007C.1.pep
FFFFFFNQIKSIVXYIIKITYIYNKSNLQHSMVTASSFITQHFTLPTKTTNQVVNRHSLKPGHXHXISHTAPHILIXHRHAHTSPWSSIWGWSHQSAPHQGLTASAHHRSTASSLLQVPAPIPALRSPVWSLSSHLCSPCPKITKPVPNKQTKGPMCTAWHHXVLWGGLALAYYVGIPPSVGTXESFFSKIPNST

SEQ ID NO: 174027 - protein, 114 aa, Oryza sativa
  Clone ID: PAT_MRT4530_72008C.1.pep
DGKVGTDLVLLGSDMKLCISDSGQRRIKKVIMMWMMMTTLVFGQGGEREMASERVKGMVMWFDVIGGFRPSNGGDHSYGWGDCGYGGGGWYDGKEAAVRATSVARRTTWPRTPP

SEQ ID NO: 174028 - protein, 383 aa, Oryza sativa
  Clone ID: PAT_MRT4530_72009C.1.pep
MGLVTASFRCAGAISLYEWVVMTFGLNSARATFWRAMNYIFHDPIGLLVGVYIDDVVVKSKEVEDHIADLRKVFERTRKYGLKMNPTKCAFGVSAGQFLGFLVHERGIEVNQRSINVIKKIQPLEDKKQLQKLIGEWRHYLLSNECTLVCKADVVKYMLSAPVLKGRIGKWIYALTEFDLQYESPLHRVYAIADFIVEHRDDSIGSVDIVPWTLFFDGSRMGYRYNRSNQSTFILVATDYFTKWVEAIPLKKVDSGDAIQFVKEHIIYRFGIPQTITIDQGSIFVSDEFVQFADSMGIQLLNFSPYCAQANGQAKASNKSLIKLIKRKIFDFPRQWHTRLAEALWSYQMACHGSILVPPYKLVYGHEAVLPWEIKISSRRIDL

SEQ ID NO: 174029 - protein, 1023 aa, Oryza sativa
  Clone ID: PAT_MRT4530_7200C.1.pep
MAGTDMEALLEFGRGIRQDSSGHRATPWNPTSALDSDGCPLDWHGVQCSNGQILSIAFDGAGLVGNVSLSALASMPMLQNLSLSNNKLVGVLPRDLGSMTSLQLLDLSNNMFSGQIPAELTKLANLGHLNLSSNGFGGALPLGLRNLRKLKYLDLRGNGFTGKLDDIFAELQSPVHVDLSCNRFSGSLISISDNSSVVSTLQYLNVSHNMLSGALFESDPMPLFDSLEVFDASYNMLEGNIPPFNFVISLKVLRLQNNNFSGSIPEALFRQTSMVLTELDLSCNQLTGPIRRVTSMNLKYLNLSSNSLQGTLPITFGSCSVVDLSRNMLSGNLSVIRTWGNYIETVDLTSNRLTGTWPNETTQFLRLTSLRISDNLLAGELPTVIGTYPELISIDLSLNQLHGPLPGNLFTAVKLTYLNLSGNSFAGTLPLPNSEAKSSTFIDLLVLPVQTSNLSFVDLSNNSLNGSLPSGIGALSGLALLNLCQNNFSGQIPREITKLKHLIYIDLSKNNFNGTIPEDLPDDLVEFNVSYNNLSGSVPSNLLKFPDSSFHPGNELLVLPHSASQNGPDSSGGGRRGMKRGILYALIVCVVVFVTGIIVLLLVHWKISSWKSSEKGTSQSKQPATVGECSQRQGEAPTPEMQEVSLESSSSTEYVGNPLPGKERQHEAQDVSVHADQIGSSSTLKDNMASLMPPLTSSPPDVRAQHQHSVLRVHSPDKMVGDLHLFDNLVVFTAEELSRAPAEIIGRSCHGTSYKATLDNGYALTVKWLKEGFAKSKKEFSREIKKLGTVKHPNLVSMRGYYWGPKEHERIIISDYVDSTSLSSFLSEFEERNIPPLSVDQRLNIAIDIAHCLDYLHNERVIPHGNLKSSNVLIQNASPSALVTDYSLHRLMTPIGMAEQVLNAGALGYSPPEFASSSKPCPSLKSDVYAFGVILLELLTGKIAGEIVCVNDGVVDLTDWVRMLAREERVSECYDRRIVEAHGSGGAPKALEDMLRIAIRCIRSASERPEIRTVFEDLSSLSS

SEQ ID NO: 174030 - protein, 93 aa, Oryza sativa
  unsure (1)..(93): unsure at all Xaa locations
  Clone ID: PAT_MRT4530_72010C.1.pep
RLDSERLLPGEEMAKIYRVKLWVTYEVRAXSKVWYSLWKLMKEEKSNVQVLAIYEMLERNESTIMNYGMWLCYQSRPGYHNMFKVCRDTTLNG

SEQ ID NO: 174031 - protein, 89 aa, Oryza sativa
  unsure (1)..(89): unsure at all Xaa locations
  Clone ID: PAT_MRT4530_72011C.1.pep
GGRVGWREEEDEGXAEMDGGQRRASAGRREARREEGIPPERQADRGGVSLRDGLEGEGPTTTNRDGGHRRGEPATSGGLRERTAMAARP

SEQ ID NO: 174032 - protein, 82 aa, Oryza sativa
  Clone ID: PAT_MRT4530_72012C.1.pep
SVQLYTHRGRSYIHVWYHSFFYQKASNPKKVCPVYVSLTIVSIKPIHGWVISLHANIQANPPVIVEEVDLHITTSFQCQHFS

SEQ ID NO: 174033 - protein, 174 aa, Oryza sativa
  unsure (1)..(174): unsure at all Xaa locations
  Clone ID: PAT_MRT4530_72013C.1.pep
MSNDQHRSCRCVKSNCVKLYCPCFSAYGYCSQNCRCTNCKNREYYEDFVEERVDMIKMKNPRAFDPKIVRVQDASEIEPQSSNAVPENEHGXYANGCRCQKSKCLVHSCECLKHEVRCTSKCQCIDCGNGPRTKYDSNIGKDQSDVSGLTYEEPTMDTMQSEHTLNPNKRPKYY

SEQ ID NO: 174034 - protein, 171 aa, Oryza sativa
  unsure (1)..(171): unsure at all Xaa locations
  Clone ID: PAT_MRT4530_72014C.1.pep
HQQIHYSEANRFSQHASRRHPPSRGTSTRSGGHKVILPVQSPSSRREAEGGGRPEXQRGESRAPSLPSPLLPPRTVITEPRHVPSTTAKLCHRRSPCRCRXAPSPALPLTVKRVGRELXIGPAQSLRPAAAEAFPGPQFSARPGASXQGLPVPSPPAKIRPTXEPSRKPSP

SEQ ID NO: 174035 - protein, 141 aa, Oryza sativa
  Clone ID: PAT_MRT4530_72015C.1.pep
FFFFFFQQTCTILQQVSFTSLKRSTTHTSSFPISAPNQIQVTQSACTRPPLQAQPFSTHQQATGINTQHKHSSQHRAIFQFCFHGSSHSACTTFPASHTFAWPCKVITTIMAHPPTHTLVILSPLTYPAILRSIIAVHSPS

SEQ ID NO: 174036 - protein, 112 aa, Oryza sativa
  Clone ID: PAT_MRT4530_72016C.1.pep
MSSGGGSSPTSSPSVCSRSWSISEDSLKRYVSYASESCIQELLAASDSGGGGGGGDDGWKVLAYCNGVEISKRRAGAAHVFRSRWLLHAVSPGKFMAVANAVDAAKIPPGNC

SEQ ID NO: 174037 - protein, 65 aa, Oryza sativa
  Clone ID: PAT_MRT4530_72017C.1.pep
PLYLLRRLTSSSACRAWASPISGRTTGASRTFNGVVCRAAAATAWASPATGAPEPHQHGKRGAWG

SEQ ID NO: 174038 - protein, 116 aa, Oryza sativa
  unsure (1)..(116): unsure at all Xaa locations
  Clone ID: PAT_MRT4530_72018C.1.pep
LQKSENDISILLKFSGNHAAXQLGLWHLFKPCCPCRMNKTREKKKTREPGGIGESARRAQGNLATCLCSITLSDKTIANWGSWSSFCFFSLXCSVELMRSYFLIRMDLLFSRNTTS

SEQ ID NO: 174039 - protein, 139 aa, Oryza sativa
  unsure (1)..(139): unsure at all Xaa locations
  Clone ID: PAT_MRT4530_72019C.1.pep
GEGEARRGGFLGFSLRARVRREGIVAGGSWKALLRHIRLLPRRPCQRPPPQRRRSPALPPPQPQPPAAREAPPPPPAAALPGKLRLCRPPPVPPPPXRPPTPPQPPANRPLCLRLRRPPAPPQPPGELRLRCRSPAAWP

SEQ ID NO: 174040 - protein, 670 aa, Oryza sativa
  Clone ID: PAT_MRT4530_7201C.1.pep
MVVVVILAAAMAAVVEGVGWPEPELEALRDERGGLVALRDALRSGRDLHSNWTGPPCHGGRSRWYGVACDGDGRVVGVQLDGAQLTGALPAGALAGVARLETLSLRDNAIHGALPRLDALARLRVVDLSSNRFSGPIPRGYAAALGELTRLELQDNLINGTLPAFEQDGLAVFNVSYNFLQGEVPDTRALRRFPATAFAHNLRLCGEVVRTECRREGSPFDAAPAGGGGSGSDGGDRVFGARDAAAPPARWRKPIRFRIARWSVVVIALIAALVPFAAVLIFLHHSKKSRVVRLGGGRAAAAATAGDIKDKAAEQAGKKVSSGSGNGSRSTTESGKGAADQLQFFRPEKATFSLDELFRSTAEMLGKGRLGITYRVALHAGGGGGGGGGPVVVVVKRLRNMGHVPRKDFAHTMQLLGKLRHENVVEVVACYFSKDEKLVVYDHVPGRSLFHLLHENRGEGRTPLPWPARLAIAKGVARGLAYLHQTLPLFHRPPHGDLKSSNVLVVFPGPGGRGGGGGDAVPVAKLTDHGFHPLLPHHAHRLAAAKCPELARGRRRLSSRADVFCLGLVLLEVVTGKVPVDEDGDLAEWARLALSHEWSTDILDVEIVADRGRHGDMLRLTEVALLCAAVDPERRPKAHDVVRMIDDIAAGSAAAAGDGEATAGRELALR

SEQ ID NO: 174041 - protein, 254 aa, Oryza sativa
  Clone ID: PAT_MRT4530_72020C.1.pep
MASRAFAAVFAAVALVVCSSVLPRALASDPSQLQDFCVADKLSAVFVNGFVCKNPKQVTANDFFLPKALGVPGNTVNAQGSAVTPVTVNELPGLNTLGISFARIDFAPNGQNPPHTHPRATEILTVLQGTLLVGFVTSNQPGGGNLQFTKLLGPGDVFVFPQGLIHFQLNNGAVPAVAIAALSSQNPGVITIANAVFGSTPPILDDVLAKAFMIDKDQVDWIQAKFAAPPAASGGGGGFIGGGGGGGFPGGGAP

SEQ ID NO: 174042 - protein, 532 aa, Oryza sativa
  Clone ID: PAT_MRT4530_72021C.1.pep
KTLAFVLPILESLVNGTHKASRRTDYGRPPTVLVLLPTRELAKQVHTDFAFYGATFGLSACCVYGGSDYRSQEMAIRKGVDIVVGTPGRVKDFVEKGTLNFRSLKFRVLDEADEMLNMGFVDDVELILGKVEDVTKVQTLLFSATIPEWVKKLSLRFLKSGKKTVDLVGDEKLKASASVRHLALPCNRAARAQVIPDIIRCYSRGGRTIIFTETKESASDLSGLIAGSRALHGDVAQAQREVILAGFRSGKFLVLVATNVAARGLDINDVQLIIQCEPPRDVEAYIHRSGRTGRAGNTGVAVMLFEPRYKFNVNRIERESGVKFEHISAPQPTDVAQSAGTEAAEAISSVSDSVIPVFREQAEQLLNSSGMSAVDLLAKALAKAVGYTDIKKRSLLSSMDNHTTLLLQTGRSVYAAGFVLSTLKRFMPEERLADVKGITITADGTGAVFDVPSAEVEDYIQGAQNAAMVTVEEVKQLPPLQEREQSGGSRGGGRFGNRRFSGGGGGRGGGGRGFGGGRGRGGGGGNRFNKRY

SEQ ID NO: 174043 - protein, 56 aa, Oryza sativa
  Clone ID: PAT_MRT4530_72022C.1.pep
LVLEHMSNIELVSKQNAVLYSLNSRNAVLKSIQNVINIEDIQKLMNYTSVANDYQA

SEQ ID NO: 174044 - protein, 181 aa, Oryza sativa
  Clone ID: PAT_MRT4530_72023C.1.pep
MATVPVGLHLSSSSDRRPKWGTARSSAGRIWWCGPLRRAVAVVVLGYAERPPSPPSSFSSLGLRQHLVELDRSDLGFARSGERHHFRGDTLARGLQPLNAPLHLRASPRAYKSSAAREWRKAQRDLGRREQGTTGARQGRFGGVALFAELLLYVVVLGYAQWRQQRGLVIISTAAIFPSPP

SEQ ID NO: 174045 - protein, 77 aa, Oryza sativa
  Clone ID: PAT_MRT4530_72024C.1.pep
AVRPAPPRTVGHGSTTAVDPVQLQSEPVAWPVPPVRRVSLLRTARGWMDVEEEAEKGRRAGSRLIGAMRSHDRRERS

SEQ ID NO: 174046 - protein, 772 aa, Oryza sativa
  Clone ID: PAT_MRT4530_72025C.1.pep
MANRTELATLLCIPLFSLLLLDVVAGNFTGPHQIRLRCGGTSTAIDSDGRTWEGDANSKLALDGLAANASYLDPLLPSPVPYMTARIFSSNFTYWFGLNPGRVFLRLYFYPTEYADRAAADALFSVTAGILVLLNDFNPSQVAHAMGRTYLILEYSVNVPSGDLDVTFSLSPHHTGSYAFVNGIEVVSTPDIFTKPAPTFLNVGISDPFPISVNIGLQTMYRLNVGGETISPKDDSEFCRTWGKDSPYISGDSGLNFFKDDTVTISYPRTMPSYIAPVGLYETARSMGLKGYINLRYNLTWILPIDAGFHYLLRLHFCEIQHPITKANQRTFFVYINNQTAQKMDVIVLSGGIGVPIYTNYIVGPIGYGQTDLRVALHPDVETNPEFVDAILNGLEVFKLQDVNKSNLAGMNPIPWSHRDGDPRLATIGGAIFVLVVLLIASLSMYIINIRKKRVDHGNTNKELLLATLLSKKSNLCHQFTFLQIQEATSNFDEAFLLGKGGFGNVYKGELDHGMKVAIKRGDPLSQQEHLYGSQKPPLPWKQRLEICIGAALGLHYLHTGAKQTIIHRDVKSTNILLDGKWVAKVSDFGLSKVSTDKDKTYVSTVVKGSFGYLDPEYFRRQKLTKKSDVFSFGVLLFEVLCARPVINPELPEEQVSLRDWALSCRKKGILSEIIDPHLQGEITPQCFRKFTETAEQCVADYSMNRPSMGDVLWNLEVALQLQESAEENCEETALNVLSSPLTTRLQPSSRSTMSISGQKAVFSEMMHPDGR

SEQ ID NO: 174047 - protein, 46 aa, Oryza sativa
  Clone ID: PAT_MRT4530_72026C.1.pep
GNSLYTCYPFCVCYKCNFGLRGHNLTGSVKYLLIPFKIFKGHSFAC

SEQ ID NO: 174048 - protein, 189 aa, Oryza sativa
  Clone ID: PAT_MRT4530_72027C.1.pep
MQKMRTVLIEHALANSEAERNVNTSVFAKVAMFEEKLRAALPREVEATRAAVENGTAAKANRITECKSYSLYRFVCKELRTEYLTGKKIDAVARSQCSRRSSARRCPGKWRLPRAAVENGTATKANRITECRSYSLYRFVRKELGIEYLTGEKIDAVTWRGCEQGVRRHEPGSGGRSEKPVFSGASMGR

SEQ ID NO: 174049 - protein, 67 aa, Oryza sativa
  unsure (1)..(67): unsure at all Xaa locations
  Clone ID: PAT_MRT4530_72028C.1.pep
NFTPRGARHKDHVPGNFIGTGNWKLDGALXQLLYNVGGDVLDAIREVVASWPVNSTGLFALGGLRFA

SEQ ID NO: 174050 - protein, 88 aa, Oryza sativa
  unsure (1)..(88): unsure at all Xaa locations
  Clone ID: PAT_MRT4530_72029C.1.pep
AFSGATAIXXXPGKITRVAGHSIGSQNALXAMYSMNVDRQVEDILSKSISSSNSRLVLDRERPAFFFXRHRLWESGSSSSSSSSAPAE

SEQ ID NO: 174051 - protein, 515 aa, Oryza sativa
  unsure (1)..(515): unsure at all Xaa locations
  Clone ID: PAT_MRT4530_7202C.1.pep
PTQNKHESAETLLTAYFTHVSPPAAAAASWLSPPSCSAAAGCRAFEFQEATVDAIQLGFRNGSLTSTPLVLFYLDRIARLNPLLHAVIEVNPDRAGHERATAPLXTLHGFHNIATRDRLNTTAGSLALLGSVARRDAGVVRRLRRAGAVVLGKANLDEWANFRTIQGTGGWSARGGQGRNPYVLSAAQCGSSTGSAIAAAANMAAATLGTETDGSILCPSSLNSVVGIKPTVGLTSRAGVVPISPRQDTIGPICRTVADAVQVLDAIVSYDSRDAKATRAASKYIPPGGYVQFLKPDGLKGKRIGIPNGFFNFPSGTVQQIVYQQLLDTVRKQGAVVIENLDIANLTVIQDVLNNGQQIVLPAEFKSSLNTYLSDLSYSPVRSLAEIIAFNDAHPIEERLKDFGQLIFLVAENTTGIGALERAIIHQLNKLSADGLEKLMKDEQLDAIITPNDSVSTVLAIGGMPAITVPAGYGKRGVPFGTCFGGLKGYEPRLIEMAYAYEQATKVRMMPGFKM

SEQ ID NO: 174052 - protein, 110 aa, Oryza sativa
  unsure (1)..(110): unsure at all Xaa locations
  Clone ID: PAT_MRT4530_72030C.1.pep
MAATIVCVKARQILDSRGNPTAEGYVGCSHRTFARSAVTREASTGVYEAMDXRDGGAEHLGQGVCKATNNANSSIAPNLTGKDPTXQAELDILMDEQLDSTKNERRSEQA

SEQ ID NO: 174053 - protein, 263 aa, Oryza sativa
  Clone ID: PAT_MRT4530_72031C.1.pep
RRVALPLPAPRRSRRRPPHRPRLRVRPRRLLPLPLRGRDANHLPGRDRRWHCGGRRHCRRRRRRRRPDGTARLVSQHGVPVGPREQEGASQAEGGREEGVGCQEEECDSFRWQCRISRRIRHAERPGRAAQAEGLPHGVWYSRHGHPPGAVLEQINRLIKEWTAWDIARRAAFALFGIFSEKEENPEFIQSVDEKLGKDAKIIVACSTGGTLKPTQNFPDGKQSRSLIAAYLLVLNGYKNVFHLDGGLYTWFKEGLPAVEGEE

SEQ ID NO: 174054 - protein, 70 aa, Oryza sativa
  unsure (1)..(70): unsure at all Xaa locations
  Clone ID: PAT_MRT4530_72032C.1.pep
SQRVVSQQEQWLMELEGMMAHCNXDTSYQMMQSMQQVICAGLGQQQMMMNMAMQMPYMRKMGPVKFQLSS

SEQ ID NO: 174055 - protein, 604 aa, Oryza sativa
  unsure (1)..(604): unsure at all Xaa locations
  Clone ID: PAT_MRT4530_72033C.1.pep
MAASASATASLSHLLLARKPDPAPLPSRRAPALLPLPRRRGQRPISAAAADSDLLSGAPSLKSRLAXGETLYGLFLLSFSPTLAELAALAGYDYXVVVDMEHGPGGVPEALACLRALDAARTPAVIRLPEAGPIWAKKALDLGPAGLMVPAVESPAAAAAAVSHCRYPPRGVRGAAHPIVRASAYGLDDSYLSRCEDETLIICQVETAAGIAEVDAIAAVDGVDVVQMGPLDLSASMGYLWDPGNRKVRARLREAEKKVLDARKKNVTASDGNVAYLGGFAMPNDPAEQLKLRGYHMVSGAVDIGMFRKAALEDVKRFKEAVMEIGEEEGEEDDEKKDKEDDGLRGLSGSIFQGPLVYSCLVVRSILRTSCLGILGFPFVGASSVVNSNLPCSSRISSCSDFTSGYSWRPIEAAKLCRTRAVRSLQITCTATKPAKSPAEEEWKIKRQVLVEKRVRSVDVKEALRLQKENNFAILDVRPVADFKEAHPPGAVNVQIYRLIKEWTAWDIARRAAFAFFGIFSGTEENPEFIQSVDEKLGKDAKIIVACSTGGTLKPTQNFPDGKQSRSLIAAYLLVLNGYKNVFHLDGGLYTWFKEGLPAVEGEE

SEQ ID NO: 174056 - protein, 179 aa, Oryza sativa
  Clone ID: PAT_MRT4530_72034C.1.pep
MAKTMEQGRRRKENRVGTSRSQRPLGRRIPRASAVWRAAVEGGARWCRPRASPCPVGGISLTAAAEGGAARGGGGRERPLAWICRLYLPLSSPATPPYSFNADPAAAPSPAAATTSGGGTTAIPSSPPLPPPHQTTTSDGGGGGSAASGGAAPRGSGAKGGRSGACDDGGRRGRPIRSP

SEQ ID NO: 174057 - protein, 136 aa, Oryza sativa
  unsure (1)..(136): unsure at all Xaa locations
  Clone ID: PAT_MRT4530_72035C.1.pep
RAYLPWPLPAYEPALDPAYEPEPAPEPPCGPAPEPAYEPASEPAYDPAPPPLEPAYEPALEPAYEPAPEPPSPPFEPAYEPALEPAYDPAPPGPAFEPAPDSXLEPADEPPPPDLELEPELEPDHEPDPDPEPEPE

SEQ ID NO: 174058 - protein, 78 aa, Oryza sativa
  Clone ID: PAT_MRT4530_72036C.1.pep
AMNLHALVGLGVVGHDAYSVSESDHCSDGWQIVYIPQPRSIHRRGDFVSIFLGIKWWVIPAAQYMLERAVITPGLVGE

SEQ ID NO: 174059 - protein, 47 aa, Oryza sativa
  unsure (1)..(47): unsure at all Xaa locations
  Clone ID: PAT_MRT4530_72037C.1.pep
AVVPQKLLRCQALLHXAPVAGAPSLALASTPTAAAHHLRPASSRHRR

SEQ ID NO: 174060 - protein, 159 aa, Oryza sativa
  Clone ID: PAT_MRT4530_72038C.1.pep
MVAGAAAVERGGRDAAGLHSERLHVQELREQASTAIAEAEAAQDSSRAAVSREDFARQQAERDLRVARAELAHECDATKRLAEEVGALKATLGSHEEEVRDARSRYDQVRLALDELNIRAISTIQALTHAFGSIGVQGPAPPPNDSAVAEKLRWVEKAG

SEQ ID NO: 174061 - protein, 138 aa, Oryza sativa
  Clone ID: PAT_MRT4530_72039C.1.pep
ISAAWRWSRTASRRRRPCGTAPRSRRRAPSRRGCRGPGWRTRARRAPSTGWRRGRSTAPRTPRRRARRAATGAPPRRRGCRRAPTTPTGCGRARRTRGRAAARCRLRGPSPRRPPAGSTPRSAAARRRPRTASAGGRT

SEQ ID NO: 174062 - protein, 491 aa, Oryza sativa
  Clone ID: PAT_MRT4530_7203C.1.pep
MAQRRLLLAIMALAAVAAATGFEFHEATVDAIQLGFSNGSLTSTALVRFYLDQITRLNPLLHAVIEVNPDALAQAARADDERATGRRCGPLHGVPVLLKDNIATRDRLNTTAGSFALLGSVVPRDAGVAARLRAAGAVILGKASLTEWSAYRPAPNGWSARGGQTLVTPTTAPTISASFSSLFDRISSQGVCEIVHEESVRALVHPVRIEQRPICRTVSDAVHVLDAIVGYDALDAEATGAASKYIPNGGYGQFLRMDGFKGKRIGIPNGFFTQEIFEKKQLRAYQKHIQLMRKHGAMVIENIDIAKNLTEVQNVLFSNEHIAMIAEFKLSLNAYLSDLLYSPVRSLADVIAFNKAHPVEVRKNLVLYDALLQERLKDFGQPYFIEAEKTNGIGPVEKASIQHLNKLSADGLEKLMRMHQLDAIVTPNDNGRVFFAVSGMPAITVPAGYDSQGVPFGTCFGGLKGYEPRLIEMAYAYEQATKVRMMPGFKM

SEQ ID NO: 174063 - protein, 52 aa, Oryza sativa
  Clone ID: PAT_MRT4530_72040C.1.pep
TMNSLAYCKMAKLVLLAYSLDGEDQVFVSTPIKLPYKLQILVITPSKHIDIL

SEQ ID NO: 174064 - protein, 174 aa, Oryza sativa
  unsure (1)..(174): unsure at all Xaa locations
  Clone ID: PAT_MRT4530_72041C.1.pep
MCICNIFIRVWIRSFMMQCDEPQLEASVSKIKEPFPSKTAAHTPRCRRLPSTLPAVAALTPPLPGSVRPLLPYKNTPRPSFSHFPQLPSFPAPEIALTTQXPSSAAHRRAPAAPCGQSWPPHAAPLHPLRSPHRVEPRPPLLFPPSTPKHRSHRAPEPPPPXTASSRSLPSPQP

SEQ ID NO: 174065 - protein, 42 aa, Oryza sativa
  Clone ID: PAT_MRT4530_72042C.1.pep
YSLNGKVENRLSMVYICEAPVMLVGCGKSYYDFKKLNVKSIV

SEQ ID NO: 174066 - protein, 166 aa, Oryza sativa
  unsure (1)..(166): unsure at all Xaa locations
  Clone ID: PAT_MRT4530_72043C.1.pep
MPARQEGRRPAARAVGGVVAGGPCGGGAVAGDAHAVGGVVAXVTAXDDGACGGRAVAGDAPCGVTAAGRRHARGRRGGGRLPVRQGRGGRRLVRREGGGRRRPRGGRAAGRRRPARRDGGWTTARAARGVVAGAPRGGRAAAGASARAVVGHRLVPDGADLRSAPV

SEQ ID NO: 174067 - protein, 242 aa, Oryza sativa
  Clone ID: PAT_MRT4530_72044C.1.pep
MDDGTRAAGGAAPDCPSGRGVVAGGSSGGRAVAGDARAAGGRLDDGAPRGVTAAGRRRARPEGRFPLQKVYFDSLNYCPSMIISSNHKTEYIDSSNYQNRCKQCPSVVLENDRPGPAPVPSSAIDSFPTVQTSGAHLSDGSQCPVCKEDFEGGALGAVSYPVHGGDRVDLCGGGDLYRLAAACRRRLGFGLEVIDVVLLAAGGGMGRNMNFSLPSLWLRPTTSSLMRVDKLCCVLVSLSYFC

SEQ ID NO: 174068 - protein, 88 aa, Oryza sativa
  Clone ID: PAT_MRT4530_72045C.1.pep
PGRSWLSSCATNKIRFQTQRRDIIGAVSWGLLCCFLIISSYMTLYFRHFWLSAVIISLGILLPAGLYILRQRKLAKKRERRLLLPLSM

SEQ ID NO: 174069 - protein, 50 aa, Oryza sativa
  Clone ID: PAT_MRT4530_72046C.1.pep
CDIMRTCDASVWQVCMQLWLASKLLDSLLLKRMRVAGQTFPRGAVGGSQE

SEQ ID NO: 174070 - protein, 57 aa, Oryza sativa
  Clone ID: PAT_MRT4530_72047C.1.pep
MPATRRRRGIPLLPPFAPTAARSRRRIQAGGGPPPLLPSTTSVVVEVAHASPPTAPS

SEQ ID NO: 174071 - protein, 87 aa, Oryza sativa
  Clone ID: PAT_MRT4530_72048C.1.pep
NFENWNVVYLPYITGLKGFFLRGSQTSRTDLETYVNHQNDTKLTSDFLNVCDFSYCIPSYFYYFFLPDPTTSFMQYEVLDQRIVVQI

SEQ ID NO: 174072 - protein, 99 aa, Oryza sativa
  Clone ID: PAT_MRT4530_72049C.1.pep
MKWGIAAAVASAAAVAAASGAELLACDCADQPPQQQEAAAAAVGRCDAFLVRHNQGSSLSRDAERAAAAAAGEQRVEGKKFAPRFDGLRFIETLVTAHR

SEQ ID NO: 174073 - protein, 86 aa, Oryza sativa
  Clone ID: PAT_MRT4530_7204C.1.pep
MALGFPGGGEETEREEEEDDGRPGAWAPRGQARAQRACDARARGREGRLGQGRGVLAPMPFCSLWRQEARARQSAQATGLLTQSST

SEQ ID NO: 174074 - protein, 351 aa, Oryza sativa
  Clone ID: PAT_MRT4530_72050C.1.pep
MAAPPCPPRRPISAPCFLLCFLLGFVAGLFPFAHRHLHLDLHLPLPPPATAILVREDPPSVVVDVDTPLPAAAEERKLLLVVTPTRARPLQAYYLRRLAHTLRLAPSPLLWLVVESGAATRDTAALLRGCGVMYRHLSSPVPDAPQDRPRRRGRRQDRPAVDSRARQRNTALDHIEHHRLHGIVYFADEDNVYSLDLFYHLRDIRSFGTWPVATLAPGKSKTILQGPVCEGSRVVGWHTTDRSKNQRRFHVDMSGFAFNSSKLWDAKNRGHQAWNYIRQLDTAKEGFQETAFIEQLVEDETHMEGVPPGCSKIMNFHLHLEDKNAIYLNGWQTTQNLDVIIPLKKEARPLL

SEQ ID NO: 174075 - protein, 43 aa, Oryza sativa
  Clone ID: PAT_MRT4530_72051C.1.pep
FRVGLCNARSCKYCLFSIIEGCHMVMLGTDNSSILPGPGSIPK

SEQ ID NO: 174076 - protein, 166 aa, Oryza sativa
  unsure (1)..(166): unsure at all Xaa locations
  Clone ID: PAT_MRT4530_72052C.1.pep
PPXQGXDXXNGXXGDIWETISXXDLXLLLISXAAQADNYXEIFSHIKPNSXXGLSHGXFLXGPLQSVGXDXXKXXNXVAXXPXGXXPSXQXLYXXGXXVNSXGVXXTSXVLQXVDXXQQMXLXXWSVGLGSPVPXATTLQHEYXXDIFXXRGIXXXXVXXIVEALY

SEQ ID NO: 174077 - protein, 136 aa, Oryza sativa
  unsure (1)..(136): unsure at all Xaa locations
  Clone ID: PAT_MRT4530_72053C.1.pep
TSGVAPEHPMASTSAVGRPGASSSAQKQPVDPYLLSRQQPQHAGRNIHRLTQNYPGGNLNFQYQPHSLQVQYQPGGSPQPQLLPXYNQFDQIQHQLPGAPQQKPYNSVQSWADLDKQFHSYFYSGNHEMKISSGRR

SEQ ID NO: 174078 - protein, 448 aa, Oryza sativa
  Clone ID: PAT_MRT4530_72054C.1.pep
MGCISSKLLPPGPGDARGGSGARATVRGRVDHVVSLTSTTYGVLDLHPKHGAAAAAAAAAAAAAAVACQEKVQETQAQPPQEDKPISREWKRARPPPLVVPSAKKPAPAGKLDSGLEVINAWEIMAGLEDADAADASPAKKPAKQPSRWSPARVIAMALPSPKKSATKRRNTPGKENSPLQRCSGNNNSSNINKTGDVNVDRVLRPYNSIDNSKLSRMSKRFSPVSARIVRKPGPPETGGGMSSSRRSLSPLFDPELLASIERELSEEGAHIKRMVGSEKPKHPKAAPPAMVAEGKCPPGGADAVVLYTTTLRGIRRTFEECNAVRAAIEAHDVKLIERDVSMDSGYREELRLLLGGREVRVPAVFVRGRHVGGAAEVTKLEEEGKLKALLQGLPRARVWCAGCAGVRFVMCRDCNGSRKVRVDGERKETVQCGECNENGLVRCPICS

SEQ ID NO: 174079 - protein, 247 aa, Oryza sativa
  Clone ID: PAT_MRT4530_72055C.1.pep
VLCYFSSLTKITSQSLKRLRIIKCFTGSRPHVHATNLISLHLDTITRTPVLERLPSLVKADIKLNSQCRDFSSFDDFSGGCNHEFCGGCRGVQAENCVLLRGLSEAKNLALVAETKMFVFRRDLKWCPIFRNLKTLLLNECWCVLSDLSALACILQHSPVLEKLTLPHLSMGPKHKVAMGGSRHGRGVPAAGKGGLGRGEVQMRRGWRERPRGQEEPKGTNHMKENGRGAGEEDRTRRHSGKHPTNT

SEQ ID NO: 174080 - protein, 200 aa, Oryza sativa
  Clone ID: PAT_MRT4530_72056C.1.pep
SRARHRCRELAEVRRRGRRCQGRSYHHQCGPPEEASTASGRRASASRRRLAMLSSPPVRRPLALLPDGRRPGYSPHGGLRGSPRVFSVGLITIPLRGVGHQKRVFLRVTHGHLHYLSPSPQLGAESLCGNASIVVMLSKEPVHYHFTISVESFFYVSDGRAAAALLTVGFAVVPVSCLLLCALNPSTRNSSLCFFHRVTH

SEQ ID NO: 174081 - protein, 864 aa, Oryza sativa
  unsure (1)..(864): unsure at all Xaa locations
  Clone ID: PAT_MRT4530_72057C.1.pep
YRIKSTSTPLNPRARFRTYTGVKQISXGQCVFFASTRFWYTQWDRVXRFFIMIDIKQTAKPLSDVGPENIIPIRLDKLTPEXMLEYEQMMNNLKNQYLHSFKQTRSGIVIQRYKLKVVPNDDSDSCTSKDGKTKGDKAKDDEPKDDKSEGEDSQEIKNLQDQFDYAVYNALINXSGVLVNTLINMIKSAVDGTIAEHQAKGPAFLPEGVFPPYRNLLTGKQQPTSGVAPEHPMASTSAVGRPGASSSAQKQPVDPYLLSRQQPQHAGRNIHRLTQEQIAAMFKPTQPVVELIQQIPIGQQTPIIQQHQPIGTSELSWWXPELSISTSFTSSSVSTRGITSTSDVMREQFGLKPKDTSNLYRHPYLEYFESVPLPNRYKVPDFXKFSGQDNVPTYKHVSRFLDQCGEALAIDALRVRLFPLSLSGLAFTWFSSLPYNSVQSWADLDKQFHSYFYSGNHEMKISDLTAVKQRHDEIVQDYILRFRDMRNRCYSLALADSQFADLAFXGLISPIKERFLAQDFESLAHHAQKVTLHEQRFAEAKKNSKKVNHVYPYASESEEDDDSKVAAAEWARNKKVVTCXWVKISGKDERYDFDITKADKIFDLLLREKQIQLPAGHIIPSVEELRKRKYCKWHNTGSQTTNDCKDFMQQIQSAIEQGKIKFNDSRRSMKVDGHPFLVNMVHTSGRAADGGNHXSSQLNSVKIINXYQRRHDKQEERYFEDDGGFDLHWDCKFFRFCWNEGMRLPLIEDRLGQKRLPIHQRLGSVHQDHLQDEDEDMNSQWCPSGIFSKNQKRRLKKAKKEWRVKSKVMTADEVEADKAKRLIKGKAVTSLSVNMVFLLPTESGYKQKYTDGDGRSRGSMDISR

SEQ ID NO: 174082 - protein, 68 aa, Oryza sativa
  unsure (1)..(68): unsure at all Xaa locations
  Clone ID: PAT_MRT4530_72058C.1.pep
MAARGGLENPXXGGGPVSSQGSRRRXPWTALDIDVALLAVACVVLLXLSSGGAXKGGDRSRVVSXGGG

SEQ ID NO: 174083 - protein, 228 aa, Oryza sativa
  Clone ID: PAT_MRT4530_72059C.1.pep
MAASEQSSESSSTASTSSCGKKQQVAGKRKREDVGGGGEQAAAVAYRGVRMRAWGKWVSEIREPRKKSRIWLGTFPCPEMAARAHDVAALSIKGARAVLNFPDLAPALPRPASLAPRDVQAAAALAAVMHHHKHPSSSTSTSSPPAAPPPDEHHPRHEPQQPESSREDDQQQQPAAAAAAQMAVAELVFDELAPLWVEDVVEFGTSDHCWTAYDALDPIGFQPLLWEY

SEQ ID NO: 174084 - protein, 76 aa, Oryza sativa
  unsure (1)..(76): unsure at all Xaa locations
  Clone ID: PAT_MRT4530_7205C.1.pep
QHLTTRTYXXQAIGQXLHLQQVGGLFXXRXLAXAXXLLAFXLPFFFXXXPWXCGGGGGXXPLGGVXWVGGCCGFGV

SEQ ID NO: 174085 - protein, 67 aa, Oryza sativa
  unsure (1)..(67): unsure at all Xaa locations
  Clone ID: PAT_MRT4530_72060C.1.pep
HSIVYITQARPQVQVVNQHMESPXVHTGELRRGQLXLIVPPHHLCSCKEGHQREGCALPLAIPSHNP

SEQ ID NO: 174086 - protein, 78 aa, Oryza sativa
  Clone ID: PAT_MRT4530_72061C.1.pep
MEVMDEPPAARGDEVMLPEDVLAEILRRLTLAASPRREALAQTGILPIDSRRLLRAELLPLSLAAPDKKRSLLEFVTP

SEQ ID NO: 174087 - protein, 80 aa, Oryza sativa
  Clone ID: PAT_MRT4530_72062C.1.pep
GPNSGAQRTASHLSCLVHKFVVTPLSCSCHYEACIHGTCSIFTLLWRCSVTHDCINILLQGLVFIFHNTLTDCTLLVINS

SEQ ID NO: 174088 - protein, 144 aa, Oryza sativa
  unsure (1)..(144): unsure at all Xaa locations
  Clone ID: PAT_MRT4530_72063C.1.pep
AGPPYGSFISRPFNPPRKGTPPAFAPFRPQKGALPGTNFSLFSPPPVTSDRGPKNSTPQVFFPGANPNPRNRPISAPPRGSPKHPNPRFFLSHRNGSPKGTFSHPPKTPVQSPISLPPNSXTPFLPNPGRTPGRTPGPPPGRPP

SEQ ID NO: 174089 - protein, 112 aa, Oryza sativa
  Clone ID: PAT_MRT4530_72064C.1.pep
KKKHQGQKKKTPFPRGLGFFNIKRAKKFSLFKKGIIGPTKKIKLCPPISPPGFHFLISGLYFFLYFEREKNFPKKKQIPLLTPTLKLTPKKKKGNPQSTGPEIPGVPQAPLY

SEQ ID NO: 174090 - protein, 258 aa, Oryza sativa
  Clone ID: PAT_MRT4530_72065C.1.pep
MATHRSKIETPGTGSGRGMGGRVSVSEVEALYELFKKISSAVIDDGLINKEEFQLALFKTSKKESLFADRKNSCMIDVSADFAFISVLPHVLNILPALTGFDEFARALSVFHPSAPLDEKIDFSFQLYDLKQQGYIERQEVKQMVVATLAESGMNLSDEIIESIIDKTFEEADTKHDGRIDKEEWRNLVLRHPSLLKNMTLQYLKSMTPEFLDLFELKPSEECSCRFIKNFDIGLLDWAETPELCRMLHVRFEKFSNL

SEQ ID NO: 174091 - protein, 591 aa, Oryza sativa
  Clone ID: PAT_MRT4530_72066C.1.pep
MSTPPPAAAASPATDQGKTKSKKKSKKHQEDTSSSLAVAAASVDEAAEAKADGYLIKPQSVAPPLDTSAWPLLLKNYDRLNVRTGHYTPLPAGHSPLKRPIAEYLRYGVINLDKPSNPSSHEVVAWIKRLLRVEKTGHSGTLDPKVTGNLIVCVDRATRLVKSQQGAGKEYVCVARFHAAVPDTARVARALEALTGAVFQRPPLISAVKRQLRVRTIYESKLLEHDADRHLAVFWISCEAGTYVRTLCVHLGLLLGVGAHMQELRRVRSGILGETDNMVTMHDVMDARWAMDNFNDESYLRRIVMPLEVLLTSYKRLVVKDSAVNAICYGAKLMIPGLLRFENEIEVGEEVVLMTTKGEAIAIGIAEMTTAVMATCDHGAVAKIKRVVMDRDTYPRKWGLGPVALKKKKMVAEGLLDKHGKPNEKTPSEWLRNAVLPAGGDAMIAGIAAAPEPEKPKVKEEADVAEETKEKKKKKHKDWAGDNADEGRKRKVGDDDLSASVSAKKIKVEEEADAVEGEKSEKKKKKKKDKAESAYADGEVKAELSDGEKGGSEKKKKKKKSKEGEAGDDEAEKSEKKKEKKKKNRDAEVTQ

SEQ ID NO: 174092 - protein, 61 aa, Oryza sativa
  unsure (1)..(61): unsure at all Xaa locations
  Clone ID: PAT_MRT4530_72067C.1.pep
SIIDKTFEEADXKHDERIDKEEWRNLVLRHPSLLKNMTLQYLKDITTTFPSFVFHSQVDDT

SEQ ID NO: 174093 - protein, 95 aa, Oryza sativa
  Clone ID: PAT_MRT4530_72068C.1.pep
TWLELFIEEVKRLCKSASSESHRNMILWRGPVVNFTERFAREGPRRKLFAATLRETSHQKHDRRQSLPHPDIGSLSCHAQTMYSHVTISAAHPLG

SEQ ID NO: 174094 - protein, 167 aa, Oryza sativa
  unsure (1)..(167): unsure at all Xaa locations
  Clone ID: PAT_MRT4530_72069C.1.pep
MVQCLDGVRQLLAVVFKCCDLELKQPRGLEDPQVLARETVFSVSEVEALYELFKKISSAVIDDGLINKEEFQLALFKTSKKESLFADRVFDLFDTKHNGILGFDEFARALSVFHPSAPLDEKIDFSFQLYDLKQQGYIERQEVKXQMVVATLAESGMNLXDENIESI

SEQ ID NO: 174095 - protein, 237 aa, Oryza sativa
  unsure (1)..(237): unsure at all Xaa locations
  Clone ID: PAT_MRT4530_7206C.1.pep
RQPPRLPFWTAGEIDGDGRGVLGGGGEEXGSPAVRSHSEAERKRRQRINAHLATLRTLVPSASRMDKAALLGEVVRHVRELRCRADDATEGADVVVPGEGDEVGVEDEDDDEGERDEGCYVVGGGDRRWRRRVRAWVCCADRPGLMSDLGRAVRSVSARPVRAEVATVGGRTRSVLELDVVVASDAADNDRAVALSALRAALRTVLLNREELLAAAAAAATDGYKRPRFSPRCSSLT

SEQ ID NO: 174096 - protein, 883 aa, Oryza sativa
  unsure (1)..(883): unsure at all Xaa locations
  Clone ID: PAT_MRT4530_72070C.1.pep
IASFRHLGFALSNLLIQHLRGQIVIPVLHDPTHYFLGPMGDSNPTYFINVETNRIPFRETKPELAHWPTVFGSRPSKLDEWKEWYRRISASKQSLWKKMGIAKCLSLSLADMPKNESMLSVATYFWSDTLNSFIFGQGPMTPTVLYIKMLTGLDITSSANPIRLKIKSEYKIKTKVGGGWLGYATNNMGTGPVTDQEHIAFLNLWLERFVFCGTTCGPTAILQHLAQAIHEKKPIPLGKYLLGAVYXTLSQTSTRLLMGLSVKHGGPWWFIQLRLNIYAVNAINQXYLQNSILPSLDEDEDDHARIRNIXQCFGFAIYQLRAKFALAVFRLLFHRFXILTVTPEKSHTVFFRFHRRSQLXFSLSGDFSDAQGDPQETSFLAKSLPTAMSSSDSPSAALSAEYAEVSSTRHWILSAKNKPIGSWPIPSCLAELIGCSRLISSTLMMDRLLNLQGPPLGSIENIELAMFRSKNFNRWWGEWKLHLFYQSASMYMTYLFPDVIPQTTEFSPPHQSNSGRNIEYAPGLIPNGGGPSPHVIGYRAPRTSTLLQGFIREPADTGKKRKTRSSTADLSAQAPKKKVKSKKTKPTDDLPALDPSIEQALDEEEIGEDVDQAADEKEKTAVKKKSAITILKPAPXPPPPPPSPIQQSSSDQTPSAIESHHIEEEEQPTAPAILVLADLFSFDIRDYLDETEEDTRSKALALLSDDVKKILEDISQRLEASSLDSLVVDCGSIRTQLHEVQALIPDELADVRTPAVYLEQHQFKLEKAKLRLAKRRERKDIEATIQANXXLVHEEKAKLDQLSEGPIKSNIDRLEARKIELLAQLEECNAELDMEHKKLADLPKSVEEQKTRLKLAIKNVADLTKSLKVIPRIDAQDAQAIEE

SEQ ID NO: 174097 - protein, 117 aa, Oryza sativa
  unsure (1)..(117): unsure at all Xaa locations
  Clone ID: PAT_MRT4530_72071C.1.pep
YTDXYMCMPLCLCTHPSTRRDIFVSCESCDAWIGHRIQQYIMQPRGDKFSNGQKCVVDRIGHTFXPLXPMKDPISAWITKYHCXLPLHQPLXHFILSYHKEDSLXCVPPFFCLALYG

SEQ ID NO: 174098 - protein, 289 aa, Oryza sativa
  Clone ID: PAT_MRT4530_72072C.1.pep
MASSSSPAISGSSPKMPNTTGINPSRRAGGRSAAVGAAEPRPGGAAPLALATRLRRLQRRMARAAATATSSGNKALDIEAAAAGDHQVARDDDDADADAKRVSKSVQTVSLFAASASLLLFANLTAAGKAPTTTPPPPRLPAGGALYSVNLALICLGLLTSLALSIFSILAPAARKLAVTKVQKRGMVMAVAFVLVSFLLRISMMLPAASLEWVFLLIFLVFACAEAAYLSLVYMRHVVDEPKAHSNFGALDLCVKICAIDRSGTRPIKLTLRCVLLTEADTDRVNPIG

SEQ ID NO: 174099 - protein, 710 aa, Oryza sativa
  Clone ID: PAT_MRT4530_72073C.1.pep
MSRSLPLLLLHSALVSKPAPSRLLSSSSSSAAAAAIAAASSGARVGGGHGIVSAVLEIVGPIELLFPSSEARLYVRLLRRCARDALAAGAGAVHGHVLKRGFASVSLVSNVLMDTYAKGGLMAACRHLFDEMPNKDIVSWCTVIAAHASRGHCFEAIGLFKELLSSEVKPNRFVISSVLNACARSGVIEQGLMVHGMVVKSGLGADRFVEVGFVDMYAKCGNVGYSFRMFNGIPVKSSVAWNAMISGFVENNCFMDAVELCQDMHRVGMAMDVVTLRVVASVAAILGAFELSRNIHVYALKAGLGRDCFVVSELIKSAGKAGETQYIKKLVPAVRRHDASLYSLAISGYHSNGCQGEAVKLAEVLLYSGLNLREGDLVTVINICQTKEEVQQMHAYTFRTGDLSYTNVCNSLISIYSEIGSLIHAESIFKTMQSRDVISWTAVMAGCVKNLQYERAFGYFLELRNSGEPLDQHCVANLINACTGLEDMYKGKQIHSLALKLGLLVDFISASLVNMYAKCHHIEWASQLFSSTLFPRNLVIINAMISGYCWNSLPQKALLLFCREYRSGLRPDHFTFSTVLGACADIGAKEAGEQIHGHLVKIGSEYLDVVVGNSIINFYVKCGCIANACRFFHSMRSRNINSYAMLMLGYIQNRCSDEALQFFSMMQQSGLRANRVTFARILRGCADLCAIHLGRQLLASIIKMCFISNV

SEQ ID NO: 174100 - protein, 108 aa, Oryza sativa
  unsure (1)..(108): unsure at all Xaa locations
  Clone ID: PAT_MRT4530_72074C.1.pep
SGPRKALAAXTAQWSGPNRAAPAIRDSAAPPDSAYSRCAPGPGITYVRTPRHRRGAMGIWFGARGGRRTTTSWIGVERVVQLPAGCSYPQLDQELRRLARSVSDSYKV

SEQ ID NO: 174101 - protein, 130 aa, Oryza sativa
  unsure (1)..(130): unsure at all Xaa locations
  Clone ID: PAT_MRT4530_72075C.1.pep
WCPCSRRCCSRRPAGGRHGRRASRSSXRRLHRHQQEAEAGRRRRRRRGRERGGRDRALLRXPRLCPSSGNAASTSSRGRSTTTTRGRTRGRPGTRGRRRRRRRRRSRTTAAPRPPRRRRRRRPRIIARRR

SEQ ID NO: 174102 - protein, 71 aa, Oryza sativa
  Clone ID: PAT_MRT4530_72076C.1.pep
HDHCHNFNLKKNIFFCMSDQLLQAAIYNYKKTAVRIHQTYRDFDFVFKSHTHKDIAEVNITEHANLTELTC

SEQ ID NO: 174103 - protein, 73 aa, Oryza sativa
  Clone ID: PAT_MRT4530_72077C.1.pep
SCAIKKEKFPLGLPEPYPTLPFQGIYMDKVNVYLCPSFKAKCAAWYQPSSPESSKCQNACNCPIFSVPTSQKN

SEQ ID NO: 174104 - protein, 214 aa, Oryza sativa
  Clone ID: PAT_MRT4530_72078C.1.pep
MEESVGSRGGGGGGLDAQIEQLMECRPLSEPEVKTLCEKAKEILMEESNVQPVKSPVTICGDIHGQFHDLVELFRIGGKCPDTNYLFMGDYVDRGYYSVETVTLLVALKVRYPQRITILRGNHESRQITQVYGFYDECLRKYGSANVWKIFTDLFDYFPLTALVESEIFCLHGGLSPSIDNLDSVRSLDRVQEVPHEGPMCDLLWSDPDDRCRW

SEQ ID NO: 174105 - protein, 367 aa, Oryza sativa
  Clone ID: PAT_MRT4530_72079C.1.pep
MEESVGSRGGGGGGLDAQIEQLMECRPLSEPEVKTLCEKAKEILMEESNVQVIRFSSIAHIHIDVNESRYICVPRFINIYMNVGNARKSYNMKRRKYLSGIGMKPVKSPVTICGDIHGQFHDLVELFRIGGKCPDTNYLFMGDYVDRGYYSVETVTLLVALKVRYPQRITILRGNHESRQITQVYGFYDECLRKYGSANVWKIFTDLFDYFPLTALVESEIFCLHGGLSPSIDNLDSVRSLDRVQEVPHEGPMCDLLWSDPDDRCGWGISPRGAGYTFGQDISEQFNHTNNLKLVARAHQLVMEGYNWAHEQKVVTIFSAPNYCYRCGNMASILEVDDCRNHTFIQFEPAPRRGEPDVTRRTPDYFL

SEQ ID NO: 174106 - protein, 56 aa, Oryza sativa
  Clone ID: PAT_MRT4530_7207C.1.pep
FWSSKNIFSFFFFLRISRLYLYGSYVFKSHFCPVSIHQMLHLICIALFHFDQNWPL

SEQ ID NO: 174107 - protein, 58 aa, Oryza sativa
  Clone ID: PAT_MRT4530_72080C.1.pep
FLHHQVDQMETVAQGRVWSGQDAASRGLVDSLGGFSQALAIAKQKANIPHDRKVRGLL

SEQ ID NO: 174108 - protein, 269 aa, Oryza sativa
  Clone ID: PAT_MRT4530_72081C.1.pep
MGAEDGERGVESIAHKVFDRWVMGWEEWMSSSTVITMDELELWIWLGRLNTFPEFDILLGFPKVKCYSENDSFGRSEAVPEVKIIYEDPLHEELEPNSTAESSFRLLEPEEEEIHPPEIPFQFKDDLYEDYGNTLNYSSKTKAHPKHEPFEEVEIKNEGHAMPKNMVATSLYTLVILGIGTHSIGESDITHLVLMSCDTKVHAFAAPLQLPLAHLPKKRCILRLYTILSTDHAFKGTRFLYPRDFDIHIMLADYMVDTTKIHKYRYDFE

SEQ ID NO: 174109 - protein, 350 aa, Oryza sativa
  Clone ID: PAT_MRT4530_72082C.1.pep
MVTDRSARSDNKPTATTTSTRSIFRKKEHGQEQSPNFLEVAALQVTRLDGPGGSTRRSLSWTNGPSHDQSPQGYPARRPVNRDASNAGAGLDLCCSPAARTGGLAISEAAISITYVCRFGAAAFAKNHCVRFGAMLCTAITVYRRRTYPPTQHTDSSDTSYNNIQRRDNHPSLASFPTLTSHKNIVHVGCVSMAARCPVGVASVLLLIVLVTVASAASGARSGGGGGGGIRELRGGGAGRRVGGRTEVRDVEGDREVQELGRFSVEEHNRRRRSRDCGDVRLEFGRVVAAQRQVVSGLKYYLRVAAAEEGAAGQNGGEPRVFDAVVVVKPWLESRTLLTFAPAADSPNES

SEQ ID NO: 174110 - protein, 936 aa, Oryza sativa
  Clone ID: PAT_MRT4530_72083C.1.pep
MSARLRVEELRAELQRRGLDASGNKPVLVRRLDAAIRKEEEEEAAVSAAAKEEADAGGVVDGEGNGEDKRKRKRRGDGEDVDNSESDAAKLEGMSYRELQALAKSRGLAANGSKKEVIERLLCAPSDTDGGVQDKKKIAKGFADGDDRVEECRKEKIVTATRKGAAVLDQHIPDHIKMTYHVLQVWFLLKGDEIYDATMNQTNVGDNNNKFYIIQALESDAGGSFMVYNRWGRVGARGQDKLHGPFSSREQAIYEFEGKFHGKTNNHWSDRKSFECYARKYTWLEMDYGEADRETNKKVSPSTDQIKETKLETRIASFISLICNISMMKQQMVEIGYNSDKLPLGKLSKSTIFKGYDVLKRISNVISRADRRQLEQLTGEFYTVIPHDFGFKKMREFIIDTPQKLKAKLEMVEALGEIEIATKLLEDDSTDQDDPLYARYKQLSCDFTPLEVGSEEYSMIKTYLANTHGKTHTSYTVDVVQIFKVSRHGEMERFQKFATAGNRMLLWHGSRLTNWAGILSQGLRIAPPEAPVTGYMFGKGVYFADMFSKSANYCYASEACRSGVLLLCEVALGEMNELLNADYDANNLPKGKLSTKGVGQTEPNTAESKITDDGVVVPLGKPKAEPSKRGSLLYNEFIVYNVDQIRMRLSKELVLTGASKSNVAMLLVPSVKSVKRKSCFTDASKYCQFAVSRLAIAIALRFKMILSLHTNTFFQQLQDEGELGESMGMPRPVGTDWVSHVVNRRNRKKPVGTDWVSHVVNRRNRKKHRGSTESAVKSEEQKLLNPNGDEATSGNSLVGGVTVGGRSHLSGAAAGEGDPVSGAAVGGDDHTGCGTTVDGDPIGGAAARGGEDLAGGDGSAMVDANAGGDGPSANAATQATQTQAATAPTATDAVAGADPGSDSLAASTTAGGDNPDCDDHATYNHGFFKALPHLET

SEQ ID NO: 174111 - protein, 66 aa, Oryza sativa
  Clone ID: PAT_MRT4530_72084C.1.pep
EMALSICHIPIFNCKHHFQLYIYYSPLCLPSASLPRKKKRKCRRVLVRVATIMQGDMESCSSVFFS

SEQ ID NO: 174112 - protein, 112 aa, Oryza sativa
  Clone ID: PAT_MRT4530_72085C.1.pep
FRVLNAHDMHNYSQQQILQVYTCTYKYSFWSFWQKKFGYWMIIEMLNSYPRELLDNFQVMDSSAAGVTYSLLCFFMTDSVIRCNGYCSHCYCQMESQRISGIYGDGKQGEGL

SEQ ID NO: 174113 - protein, 465 aa, Oryza sativa
  unsure (1)..(465): unsure at all Xaa locations
  Clone ID: PAT_MRT4530_72086C.1.pep
PPPCSCSSSPDSSSSSTSSAASPTWAPYSARVSASSSPPCSPSSSSSCPTSYPRPRTRPRSSTRSPPSSASAAHRRRTSRSWQGSSSPGCSSSSSSARRWTRSPXKATRAPSTVPAVSSGSAASSSSTSAAPAGRPCSASSGFSAPPRWCNGSPSPRSANAPTPASTTTPSSPSSWPPHSSSSPTTSSSPSSSCASASXPSSSAAAATCCTRSGASRRTTSPSPRAYSTPPCASSXPRITRPPPSSPPSTSPSPSSSTSSTSTRRCGSCSSSSSPTGSRSRCSPPTSPRPASATTPPSVLSPAASSPSGHGWASISIPKIXSTNSPRSTSVGRRSPSPCPSLSSPCSSPPSPSPSPSQSSTPSSSAPSPXASASASTKSASVVIRGGVSSAPSSAPSPPPPSSSPPPSSSARRRSPSPTRRWTSCSGTAPPTTSRPTPASSSSASPPPTRRRCSCSRRATRRPWR

SEQ ID NO: 174114 - protein, 378 aa, Oryza sativa
  Clone ID: PAT_MRT4530_72087C.1.pep
MAMLEMHRALQSLLLLLGLLGTFGTIEVLYFSASLVKFHEGAWVPITLSFIFMIVMCVWHYGTIKKYEFDFQNKVSVNWLLNLGPSLGIVRVRGIGLIHTELVSGIPAIFSHFVTNLPAFHQVLVFLCVKSVPVPHVQPEERFLVGRIGPKEYRLYRVIVRYGYRDVQKDDIEFEKDLVSSIAEFIRSGDSHHNGVLEDTDKSCEKLSSISNGIPLWMEDGEVDASASPHKETDTQIISPNRKKARFVLPKNAQVDSEVRRELEQVPQARGAGRSSSLGHYCKKARSGCGFGKRVVSSRTSGSDAGQAGVPAALVFFLSSTAWRCVTSRRPCPRPSTATSPSCALIPMARRAAGAHGCKGGWNVLHLRTLLHEGEERV

SEQ ID NO: 174115 - protein, 59 aa, Oryza sativa
  Clone ID: PAT_MRT4530_72088C.1.pep
RAHDPLDRHLGALSPSCPTQRRRTRWPQIHATTIDRLEATVPHFTWPRLSWWRTPRRWC

SEQ ID NO: 174116 - protein, 200 aa, Oryza sativa
  Clone ID: PAT_MRT4530_72089C.1.pep
SAMAINGRRRSGGGGALVVGDDEVDVAAGHPDVVRPGVHDAGDLPPFIIAEFMFRQPGSPPFAGDDLLHKPVVQRPRRHLHGRRVARRLQEQRRLVGGGEADEEEAGVGLDVVGGAVPEHDVQRLVLHGGAPARVAGYQGQVEERRLVLVSGAAPRVGDGEGERRRAEDERGGDDEGGGGDGSDESTEETPPRMTMDLGH

SEQ ID NO: 174117 - protein, 35 aa, Oryza sativa
  unsure (1)..(35): unsure at all Xaa locations
  Clone ID: PAT_MRT4530_7208C.1.pep
FSASDCYVRIRNCSGHSQSGNPLLLXPYCKRHAAV

SEQ ID NO: 174118 - protein, 518 aa, Oryza sativa
  Clone ID: PAT_MRT4530_72090C.1.pep
MSTLSAGVLLKLLDGMKAGAAKPVGEHRTALLQVTDIVPADLDDKDLLPRHGKFYVKVSDSSHSIYATLPLPQADLVLSNKLQLGQFVHLDRLDPGSPVPVIVGARPLPGRHPLVVGTPDPATRAKPAAPRRGSWGPENHAGILASPRVIKPTTLNFEDRTPVKERPPAPSPARSTASSLRKSSSVLPRITRSKSFVADRAPDHPKIPKSPFPAEKISMSCYTASRAMSRRAPPKEEEPSSPSSDDELCSSATSSKKRPSTSTRVPEAMEQREQAQKAALEALRNASATDNVVRIYKMFAELSKTARPDAPATCFESFLSFHQEAVQAVTDIESIQAATSMAGAVAADEPPVLQEIAQNRSSLSKRRGALGVSKSVSFAPGTLDDGGGKNRSSNASRKCLVLDKIGEDGDEKRSSSGSTTTGALGSSLRLAKQMQCEASSWFMDFVEAALETGLKKKSKASATADGRKQSSCCCPQSLILRVINWVEMEQSGDGSSRKPSHPRAAAIARKLRIKAKNP

SEQ ID NO: 174119 - protein, 818 aa, Oryza sativa
  Clone ID: PAT_MRT4530_72091C.1.pep
MSNYYCNSSSIGTSSVAGNFTYADASSEGSMVTASVLMFVLAGFFFILNLFGGLSNVGAILSPRVRLLFTSLLSLFLLVMSYLLSEAKNTAKELDQVTTVIGIGRASSTDLPFMAGVILTWMLLVELIRKKVDEIAMKGYSGTIHRAGRVVWLGSLVFVNIRSAGRKAVFGVLWVLCATKVVQRIAFTEVGKRSYACGKNPWIITSYMMSTSPSLPAQGDAMLKGCRYIVTGEEDARVEATADGYKLKEDSKSSLVTVGKIWVEQGLPGTGNNGGDEKAELKRLCLSFALSKLLRRRLEQLPVPEPEMSSAETSECRDVIFNGLYKSGDAVAVFEVMNSEINFLSEYYHSVVPVVLASPFFFVANYFLLPVVVLCVCVMTIILCGGGDVLYAFRSIKTDNFTISSGIFDTTMCLLLTAHHSAAAFFATINFAVTFLLYIIYIYEEVWELFVFLLSNWFAVSLLSAYVAKTRFCDNSAFRAFARCILSVRTWLGFHLHPQDMINQFSALDLRWPPLTLAMPIPLITLLVSTKPVPVPVPVKHSILLSSLASASASASTKSALASFDELKTACENGSIAEVILICHIATGLLERLNPPPDPEVMITESDSKRMSCCGCPNKKKKNTSSDNFTVATTLSRYCAYLVAFQPELLPDYHEKAEDLFKAMKMELKDRLGCYHYYFSCGRERADAIINNINSKNNNKEGTVDKGAELANKLLEKYTNDHDSMWTLLAEVWTEIIVYVAPSNEERTIMAHKNVLWQGGEFITVLWALMTHTGITRHRRLREIALKISQDDASTSSSQQKSAPDRIDKQHEIDIHRH

SEQ ID NO: 174120 - protein, 106 aa, Oryza sativa
  Clone ID: PAT_MRT4530_72092C.1.pep
RRMDSIQRQDSFDDLINLADDVVVEAPTLSSEEMDRARREALEILRNNSPEEAFRIFTQGLIGQVVQSPVVGNATTPPTTNQAVTVSVPPKAGDGEPKTAPRPPNN

SEQ ID NO: 174121 - protein, 153 aa, Oryza sativa
  unsure (1)..(153): unsure at all Xaa locations
  Clone ID: PAT_MRT4530_72093C.1.pep
TVRRTSSPRAAEPHPSPSPHDVESRNCWAVDPGSGRPESGVAVRHTPSPRAXSSRRRHDPAAPRPARLVPLVAVRCTSSPRAAEPLPSAARGPAPDVAVAVRRTRPRPRRRRRRPPHAGPAPVVVAGAGRKGWRLGGDWEVWEKLGLGLYIPP

SEQ ID NO: 174122 - protein, 301 aa, Oryza sativa
  Clone ID: PAT_MRT4530_72094C.1.pep
MPEHGSKPDISFAGRFTASAIAACFAEVCTIPLDTAKVRLQLQKNVAADAAPKYRGLLGTAATIAREEGAAALWKGIVPGLHRQCIYGGLRIGLYEPVKSFYVGKDHVGDVPLTKKIAAGFTTGAIAISIANPTDLVKVRLQAEGKLAPGAPRRYAGAMDAYAKIVRQEGFAALWTGIGPNVARNAIINAAELASYDQVKQTILKLPGFKDDVVTHLLSGLGAGFFAVCVGSPVDVVKSRMMGDSAYTSTIDCFVKTLKNDGPLAFYKGFLPNFARLGSWNVIMFLTLEQVQKLFVRKPGS

SEQ ID NO: 174123 - protein, 173 aa, Oryza sativa
  Clone ID: PAT_MRT4530_72095C.1.pep
MAPEEQSPTAFFVVVAWGDEEAGEGKTLTAAWAKLELKLDRMSSSPSVATRGFAVYSVRSKMVSGVADVECSGVPCARTLDPMEQEAVKLSPSGRIRNRTPSSPDLLIPGADSDAKNMRWGPVDANKCTVIFDAGSSGSRIHVFRFDSNLDLLALRRKGKAYDGAGQGDGGGL

SEQ ID NO: 174124 - protein, 34 aa, Oryza sativa
  Clone ID: PAT_MRT4530_72096C.1.pep
MMLNPEGGRKIRQSEEKHVSIQESVVNFIKISVN

SEQ ID NO: 174125 - protein, 76 aa, Oryza sativa
  Clone ID: PAT_MRT4530_72097C.1.pep
STPIGLCELSCTCNVELQVEIDVDLVGQSYRESLEKICSLLLDQYWYRSTLLHIDQNCCRRMAIVSQLIQFFFLLI

SEQ ID NO: 174126 - protein, 71 aa, Oryza sativa
  Clone ID: PAT_MRT4530_72098C.1.pep
SEKCWDPISFPISPCKLGVCLVREKKIFKCPIGCRKGFSYMNEKTNFITRLEPPRLIYKASLTCHYIWGVA

SEQ ID NO: 174127 - protein, 210 aa, Oryza sativa
  Clone ID: PAT_MRT4530_72099C.1.pep
MECEIWEGAGEEEEADLAGKEERLQPCLSPRGYDELKKSEMVETVGKSVRLIEKWSSGFLETWTEYFSQDKEMLAEGLPEAALQTFPYDHSWALAEQQARKACKGHDILFDGVLLDYDIHAVATWGPGISGRRAPGVATCTGQGRGGSGHISFAWRGWRQDRGDDGVNRDDQSSSAQKRGRGGDGGGGAKMTGSHFLHMIPARWSGGSCR

SEQ ID NO: 174128 - protein, 50 aa, Oryza sativa
  Clone ID: PAT_MRT4530_7209C.1.pep
RLGYMDSTATHSEHIRHEASAVIESLFICKDYLYRRKAHNHVAGDSHPLC

SEQ ID NO: 174129 - protein, 77 aa, Oryza sativa
  Clone ID: PAT_MRT4530_720C.1.pep
CSCFALALGSPNHNYYPLNLTCPQIHRLIRLRRRRNSDAIIWDDLFDQISQKKVVEPRAGRRSGRGRRALRRAARLM

SEQ ID NO: 174130 - protein, 496 aa, Oryza sativa
  Clone ID: PAT_MRT4530_72100C.1.pep
MDRARLAVLSAHLASPAAACGEADAAGPLERSAASAGARGGALAVVDGRTGKRYEVKVSDEGTVRATDFKKVWRFLIVILVDFDEVAAYPLPLGKDDKGLKIYDPGYLNTAPVRSSICYIDGDEGILRYRGYPIEELAESSSFVEVAYLLMYGSLPTQSQLAGWEFAISQHSAVPQGLLDIIQAMPHDAHPMGALASAMSTLSVFHPDANPALRGQDLYKSKQVRDKQIVRVLGKAPTIAAAAYLRLAGRPPILPTNSLSYSENFLYMLDSLGDKEYKPNPRLARVLDILFILHAEHEMNCSTAAARHLASSGVDVFTALSGAVGALYGPLHGGANEAVLKMLNEIGSVENIPDFIEGVKNRKRKMSGFGHRVYKNYDPVAVALEKAALSDDYFVKRKLYPNVDFYSGLIYRAMGFPTEFFPVLFAIPRMAGWLAHWKESLDDPDTKIMRPQQVYTGVWLRHYTPVRERVPASQGEQLGQIATSNATRRRRAGSAL

SEQ ID NO: 174131 - protein, 82 aa, Oryza sativa
  Clone ID: PAT_MRT4530_72101C.1.pep
MQGFLDVPAAQAPDSTTQDNLPPRHAWPLTPVPPASHCSTPLWRMHPRRRMRPSLTTGEHEPPPRHGGLRWMLRRGADAATE

SEQ ID NO: 174132 - protein, 500 aa, Oryza sativa
  unsure (1)..(500): unsure at all Xaa locations
  Clone ID: PAT_MRT4530_72102C.1.pep
MDRARLAVLSAHLASPAAACGEADAAGPLERSAASAGARGGALAVVDGRTGKRYEVKVSDEGTVRATDFKKITTGKDDKGLKIYDPGYLNTAPVRSSICYIDGDEGILRYRGYPIEELAESSSFVEVAYLLMYGSLPTQSQLAGWEFAISQHSAVPQGLLDIIQAMPHDAHPMGALASAMSTLSVXHPDANPALRGQDLYKSKQVRDKQIVRVLGKAPTIAAAAYLRLAGRPPILPTNSLSYSENFLYMLDSLGDKEYKPNPRLARVLDILFILHAEHEMNCSTAAARHLASSGVDVFTALSGAVGALYGPLHGGANEAVLKMLNEIGSVENIPDFIEGVKNRKRKMSGFGHRVYKNYDPRAKVIRKLAEEVFSIVGRDPLIEVAVALEKAALSDDYFVKRKLYPNVDFYSGLIYRAMGFPTEFFPVLFAIPRMAGWLAHWKESLDDPDTKIMRPQQVYTGVWLRHYTPVRERVPASQGEQLGQIATSNATRRRRAGSAL

SEQ ID NO: 174133 - protein, 52 aa, Oryza sativa
  Clone ID: PAT_MRT4530_72103C.1.pep
PRVRFFFLQVYTGVWLRHYTPVRERVPASQGEQLGQIATSNATRRRRAGSAL

SEQ ID NO: 174134 - protein, 82 aa, Oryza sativa
  Clone ID: PAT_MRT4530_72104C.1.pep
YSTKAGPHHGLSERNRQPPFRSLASTPVLSEMLTFFSLCRSAFLHDSYLTSPNQDATEPRGETVGGVTDSRFVLMATRRRRL

SEQ ID NO: 174135 - protein, 381 aa, Oryza sativa
  Clone ID: PAT_MRT4530_72105C.1.pep
MAATSLLSRLLILPPPAPAAAASLRQRKPAAAHSLSSRGRRPRLAVQAVAPAAAEEEKGGLPAAEAERLAEFLREDLPHLFDDVGVDRSAYDDRVRFRDPITRHDTIDGYLLNIRLLKLLFRPDFYLHHVEQTGPYEITTRWTMVMKFVLLPWKPELVFTGLSIMGVNPQNLKFCSHVDIWDSIQNNEYFSFEGLGDVFKQLRIYKTPDIETPKYLILKRTANYEIRSYPPFLIVEAKGDKLTGSSGFNNVTGYIFGKNASSETIAMTTPVFTQASDDKLSDVSIQIVLPMNKDLDSLPAPNTEAVNLRKVEGGIAAVKKFSGRPKEEIVIQKEKELRSQLLKDVLKPQHGCLLARYNDPRTQSFIMRNEVLIWLNDFTLE

SEQ ID NO: 174136 - protein, 491 aa, Oryza sativa
  Clone ID: PAT_MRT4530_72106C.1.pep
YDLVWEDDQRLSGKSFYLPGSLDVSDKQIDQWNKSPPPLYLWSRPDWTQKHKRIAEQHGHTKANVFSHNEEDLVYLFEDRATQNHDVNNKNYTSGNGNFTAEKPVQADAFPPEKLVEVAYEEMKVASNRSSMYQSDQISVHDERDAHSDLPMSRHNSMKAKEVSNSSRDRRKSDKTGHEADSDMSILPSDSRNFLHKSGNLEPPISSRSGYTLERLRYHDNHFDHLVGEHSSSSLQMPIFEDSYFRSVNEYGVASVENNIALSTDNVGAGSRMYSPDPELNGYAVDPTVNAYGSVSGGTGGSFYRRQNLEDYTMDSSESAQMNPVPGRDVQEYARTYYGHNRDEVPQTAINTPSMDIRTHIRMYGRHIRDDHTQTTMNPPANDIRAQIRMYGQHATSDHQHASRYSSGSPDARFEQQPSFTSYGMPSLGSTGRSMMDRYSPSIDETSYRTGQRGPYNASDFRRDRHPDDMNFALHNQYPYPHPGSSGGWHD

SEQ ID NO: 174137 - protein, 58 aa, Oryza sativa
  Clone ID: PAT_MRT4530_72107C.1.pep
CFVKEKRPSVRNAWMIKEVDWGANQDLLQVHSYLTTSILVHKRQEIKFYTFWIRIRAT

SEQ ID NO: 174138 - protein, 165 aa, Oryza sativa
  Clone ID: PAT_MRT4530_72108C.1.pep
PTRPPTRPAPRTVKNASPWAMSVASATIDRAFPTVITLSDSTSSFVGQSLFYDTDDKIDNWYEVYQSSCLFGTPETSNVTLAVGKIVLCNSPNSVSLISPTIQPVWNILLAVNALKEAGAKGIIFAAYAFDILDVVESCGSMPCVLVDFEVAQQIKQSADENTAL

SEQ ID NO: 174139 - protein, 337 aa, Oryza sativa
  Clone ID: PAT_MRT4530_72109C.1.pep
RTSCSLWCCQLWLGRASYASVCSFCAGVLQYKVALLQLPVSPRKEENIARSRARLDAAAAAGATLVVLPEIWNCPYSMETLPSHGEDIDGGASPSVSMLSEVAARRRITIVGGSIPERSSGRLFNTCCVIGPDGQIKAKHRKLHLFEIDIPGDITFRESDTFTAGQEPTIVDTDVGRIGIGICHDIRFPELAMLYRSRGAHLICYPSAFNMSTGQLLWDLMQKSRAVDNQLFVVTCSPARDPNAESDYMIWGHSSLIGPFGEVIATAGHEEATVVGEIDHSMIQTIRDNLPLEMQRREDLYSTHWLMSGENLQATRHAPLDQMHNCNEVKMALQPWK

SEQ ID NO: 174140 - protein, 90 aa, Oryza sativa
  Clone ID: PAT_MRT4530_7210C.1.pep
MAAGRGLAAARRGMEDGRRRPGAGRRDGGRSPAASPSPPPDPAGGEAAGWVAGRRRDGRPAVRHIIILPQKMCPQSRDGFVACQILPHYN

SEQ ID NO: 174141 - protein, 377 aa, Oryza sativa
  Clone ID: PAT_MRT4530_72110C.1.pep
MASRRSAAASPAMAAAAAVVAVSVYLLVCSAPAAATAAAVAKKPSYPPVAKGLSFDHYKKSCPQAEAIVFSFLRDAIGKDVGLAAALIRLHFHDCFVQGCDASILLTKTPGGPDGEQQAIPNESLRPAAFKAVNDIRALLDRACGRVVSCSDIVTLAARDSVKLAGGPSYKVPLGRRDGLTSATPSQVLGALPPPTSHVPELIAALAKLNLDAADLIALSGAHTVGIAHCTSFTGRLYPKQDGTMDKWFAGQLKLTCPKNDTANTTVNDIRTPNAFDNKYYVDLQNRQGLFTSDQDLFVNATTRPLVAEFAVDQSAFFHQFVFSVVKMGQIQVLTGSQGQIRANCSVRNPGAASADEELPWSAAVETVVEAAESIVL

SEQ ID NO: 174142 - protein, 40 aa, Oryza sativa
  Clone ID: PAT_MRT4530_72111C.1.pep
MVDAAAVGIDDKSERPQQIPLLEMKRGWLAYRYRERGVLE

SEQ ID NO: 174143 - protein, 56 aa, Oryza sativa
  Clone ID: PAT_MRT4530_72112C.1.pep
FTIWLQFNTCYAVHHLAILNLSNPIEQFTLQLVFGTYNLNLKEIHTQQFYSLLVDR

SEQ ID NO: 174144 - protein, 54 aa, Oryza sativa
  Clone ID: PAT_MRT4530_72113C.1.pep
LAYVILPPSIFDRHISKYKKFIFDRHISIQQPILLITFSDLMQDSPFFLRPGIH

SEQ ID NO: 174145 - protein, 75 aa, Oryza sativa
  unsure (1)..(75): unsure at all Xaa locations
  Clone ID: PAT_MRT4530_72114C.1.pep
HGPSTPRWVPFYCCTDAATRSWLGPRXRRRELPCSRVVVVVAVAATAATSPAARPPLPRRPGSLPPRVRARRDQR

SEQ ID NO: 174146 - protein, 99 aa, Oryza sativa
  Clone ID: PAT_MRT4530_72115C.1.pep
ASICRLNYLKKQQGNLIEQMRSLKMSEQSYQIAFIRRCHDLQTAEAEVDLLGDEVELLLGLLRKTYKALDRYSPVLEHYLGVREMLKLLGKELALRHQV

SEQ ID NO: 174147 - protein, 319 aa, Oryza sativa
  Clone ID: PAT_MRT4530_72116C.1.pep
MDLSPTRWHAIFMEFEDEDVDPTAEEYLQEQAKGKSIAAHVFFSSSSRSRKLDGKVAVITGAASGIGEATAKEFVRNGAKVIIADIKDDLGRAVAGELGADAASYTHCDVTVEKDVASAVDLAVARHGRLDVVYSNAAIAGGAPPATLAALDLDEYDRVMAVNARSMLACVKHAARVMAPRRAGCILCTASTAAVLGGMAAPAYSMSKAAVVGMVRTVARQLARDGVRVNAISPHAVPTPMAIGLFSETFPAATAEEVRRMVTREMQELEGASLEVEDVARAAVFLASDEAKFITGHNLVVDGGFTAGKVLVRDPPGSA

SEQ ID NO: 174148 - protein, 81 aa, Oryza sativa
  Clone ID: PAT_MRT4530_72117C.1.pep
IVMVDVSFCLDTLDHPVVQGELLLLVELITPITFVLITFAIMIVPIIYKCGPKSFSGACGKPGLRISCKLHLVNSVISIKL

SEQ ID NO: 174149 - protein, 47 aa, Oryza sativa
  Clone ID: PAT_MRT4530_72118C.1.pep
TSLPLSREPRGGREWRRCSGGWETTTPAAEYVPECGATREGGSRSRE

SEQ ID NO: 174150 - protein, 50 aa, Oryza sativa
  Clone ID: PAT_MRT4530_72119C.1.pep
LLILSHPSISLSSPQFINILYIHTTQKNNTLINKTTSYISQSFDSPPLTH

SEQ ID NO: 174151 - protein, 554 aa, Oryza sativa
  unsure (1)..(554): unsure at all Xaa locations
  Clone ID: PAT_MRT4530_7211C.1.pep
STSSLFXXXXXXXXXXXXXXXXXPPPSPPPPPPPPPTPRXPSPPAGPPSPPPPPPPPRTPPRPPPPPPPPPLRPPTPPPPPPPTPXPHRRPPRTPPARPHPPPPPGPRARPPADSPPPPTPPQRPPKSPPRRTPPPTSPPPHPPHPAPRKAPPPHTPVTLNSIPPPXPPSPRGPPRLRRRRPLRLPPVSPSTTQPPXPPRPCLPPVSLSTTPPPPAMTARGHPPSPPRPPPLPPPPPPPPPPPPGPHPLSPPPTASPAPPVASPXAPPSQPSPPPAASPRCSDVXPSPPPAASPAPLRRPSRPRHPRSFARAALPSQPSPPPAAXPRVASLSRPSPHPTALPAPXPSSRPSPPPATSPAPPPLHXGPPPPPGPPPPPSPNQXSPPPPIAAATMASPPEPEPPPSSPPSSSSRAPPPRSSSPARAPAPRPPSCAAPFARRAFLPPSASGPAPAPPXAAPGSPRPSPPPSSTPPLPPRPRPSPSPEPRRAPPPRRRHRGEPHHRTVAAPSPSPRPRRSRDLAVPPPSSPRPRRGEMEPMRMALPPPSQLCVTWIYS

SEQ ID NO: 174152 - protein, 136 aa, Oryza sativa
  Clone ID: PAT_MRT4530_72120C.1.pep
MVDIELARLGSYWQSIMPLSSTSVSEQKAPHERERAEGSQNQRSENRGSSPCASRRRPEPRQREWRKRAMDTRRKGVEAEGQLGRGVLPILMGCSKLPVLEMARYGHELFVLLAITNYASSPSQDTQTRERIGWRT

SEQ ID NO: 174153 - protein, 155 aa, Oryza sativa
  unsure (1)..(155): unsure at all Xaa locations
  Clone ID: PAT_MRT4530_72121C.1.pep
SLGGGGAVSGVLDERLSSRNQWIDDRSMASLVPDLFFAVPXHLRGLSTVASGLVNNLWVSDIHGDLTVLVISXFLLIWDAVLHVQHSPGVEDCLVWRWMSDQXVSALGVXAFFYGQHYFACANHFWYAKGLAKCRFFLWFTFQQCRWTADLLQKH

SEQ ID NO: 174154 - protein, 57 aa, Oryza sativa
  Clone ID: PAT_MRT4530_72122C.1.pep
HALPPYSPAGARRARWFFWLRGVRRPAETWSVPRRWTTSCWWVGAADGAHVPRAHDA

SEQ ID NO: 174155 - protein, 80 aa, Oryza sativa
  Clone ID: PAT_MRT4530_72123C.1.pep
VGFFQKKKAFALGIQTRGMLETVLRAGVLGKDNTGKESPNCYLSVWYFPKNLKIPSRKPSIVCENCLYSREGNGRVRAFP

SEQ ID NO: 174156 - protein, 482 aa, Oryza sativa
  unsure (1)..(482): unsure at all Xaa locations
  Clone ID: PAT_MRT4530_72124C.1.pep
TPPPLHHLPVHVSRATSSAPRSPLLSSPLPLPPPXALGNVSGAVYHADPAAAVYASLVPGMAVVPGRAPPSAVQIEAARRWKELEKMALRSVNLMVTCAGAIQAGDYAAAAGSLSDAREIFAKMPTTRTGIGRVLTHFADALAERLFPAFPQSAPPPPPPRGEQRELFRGFYEAGPYLKFAHLAANQAILEAFEGCNSVHVIDFALTDGIQWPSLIQALAVRPGGPPFLRITGIGPHAAGNRDELRDVGLRLAEFARSCSVPFAFRGIAADQLDGLRPWMFQVAPGEAVAINSVLQLHRLLVDQDAAAAASFPAPIDGVLDWVASMNPRVFTAISRHGGGDGAGNPLAEAYLQGEIADIVSREGSSRVERHEQMPRWVERLRRGGMTQLPLGATGLWQAAMQLREFSGAGFGVQENGGFLTLTWHSQRLYSASAWRATAGKKMTMMASGAADAMEESQNSNTNGGGGGSSGGGHGALNQIMQ

SEQ ID NO: 174157 - protein, 81 aa, Oryza sativa
  Clone ID: PAT_MRT4530_72125C.1.pep
YITYPIKTIKLRFLVKPIQLKNTHRCCSERPHSLRHTLARVGGRDNELQHAYTTRYTVNGEAAASISCRIHSSPICVVHIR

SEQ ID NO: 174158 - protein, 384 aa, Oryza sativa
  unsure (1)..(384): unsure at all Xaa locations
  Clone ID: PAT_MRT4530_72126C.1.pep
NSSVGKSKPREQPLSVDEWRSFLDPEGRVMDSKALRKKVFYGGIDHVLXRKEVWKFLXLGYHEYDSTYAEREYLAVMKRTEYEAIKSQWKSISSTQAKRFTKFRERKGLIDKDVVRTDRSVPYYEGDDNQNVLVLRDILLTYSFYNFDLGYCQGMSDFLAPILYVMEDESESFWCFAILMGRLGANFNRDQNGMHAQLLALSKLVELLDPQLHNYFRKNDCLNYFFCFRWVLIQFKRWVLIQFKREFSFDQIMLLWEVLWTHYWSEHFHLNLCVAILKRYRSRIIGEQMDFDTLLKFINELSGIINLDRASDDAEAYCDQAGPNRAARLPPGTATDGGPLRDKKTRSCEIPAIQWSPHTTTAIESIALVSIIPLGAWYVGIYKL

SEQ ID NO: 174159 - protein, 171 aa, Oryza sativa
  unsure (1)..(171): unsure at all Xaa locations
  Clone ID: PAT_MRT4530_72127C.1.pep
SRSCRGIRGRRRRRRAPRRRKARGAPAPSSRRRGXRAPATRGRRRRAAAARSTTSRAGTAPTRAPTSAPWRRRWPPPSAAPSRSTTTRLPPTSTRPPPRRRRRRPRPXLRRRERQPAPGVVAAPGGGEDPDPAAPRQEPRPGERARRRRHGHATRRWPESSQTGGARRGRV

SEQ ID NO: 174160 - protein, 44 aa, Oryza sativa
  Clone ID: PAT_MRT4530_72128C.1.pep
KPLLGLSLHSYSIMYSSCSICNDALDLCPVLPSVGLPLSYRRFI

SEQ ID NO: 174161 - protein, 116 aa, Oryza sativa
  Clone ID: PAT_MRT4530_72129C.1.pep
MGDRACGGGSLRARRITGCATTSGCGRPPSFGFAPYSPLISNSSRRASAHRSTNLLTVAAGAGEEAAIACPSCAKPFPSELAVSDHLVSYLVATGGARLGWRKSLPAPAPSLNPVQ

SEQ ID NO: 174162 - protein, 164 aa, Oryza sativa
  unsure (1)..(164): unsure at all Xaa locations
  Clone ID: PAT_MRT4530_7212C.1.pep
SSGALWSSCLHSPQLLVVCLLQCFRSRSSSSSRSCLQQPGPPPPPSPXSVSPPPPIAAATMASPPEPEXTPAASPTTSAAVRRTSGATASSSTPSAARPPSSPPSSSSRAPPPRSSSPARAPAPRPPSCAAPFARRAFLPPSASGPAPAPPRRSTRXPRPSPPP

SEQ ID NO: 174163 - protein, 138 aa, Oryza sativa
  unsure (1)..(138): unsure at all Xaa locations
  Clone ID: PAT_MRT4530_72130C.1.pep
ITVVDLWDSTTTKARVIGSVTPPPPSASMAPPPLPRRLPRLCRLRLPPPPCRLCLSASTVSPMPPPXAAPPPPPRLRLLPPQRRLRSPPVRLXAPPPPGASPSSTSIASTPPPPVRPPXPASASTPPPRRLRLQPDHP

SEQ ID NO: 174164 - protein, 114 aa, Oryza sativa
  unsure (1)..(114): unsure at all Xaa locations
  Clone ID: PAT_MRT4530_72131C.1.pep
TRVRAALSSDPDAFARNRSLHVIHXRRAMLGTLGCITPEVLXEXVRVHLNEPAWVKASSQILSYGRLKYFCNRNLVHAQSMLSVLGFQVILMGLVEGYRINCLAGVSYSHYLYP

SEQ ID NO: 174165 - protein, 54 aa, Oryza sativa
  Clone ID: PAT_MRT4530_72132C.1.pep
MAQKYFWYIMVTEFIRKRMDIPLPPTFSSTINPMEANDWLHAIEKKMNLLRWND

SEQ ID NO: 174166 - protein, 461 aa, Oryza sativa
  Clone ID: PAT_MRT4530_72133C.1.pep
MVNGEAEAECTRASLLGRYEIGRTLGEGNFGKVKYARHLATGAHFAIKILDRNKILSLRFDDQIRREIGTLKLLKHPNVVRLHEVAASKTKIYMVLEYVNGGELFDKIAVKGKLSEHEGRRLFQQLIDAVSYCHDKGVYHRDLKPENVLVDRRGNIKISDFGLSALPQHLGNDGLLHTTCGSPNYIAPEVLQNRGYDGSLSDIWSCGVILYVMLVGYLPFDDRNLVVLYQKIFKGDTQIPKWLSPSARDLLRRILEPNPMKRINIAGIKEHEWFQKDYTPVVPYDDDDDNYLDSVLPIKEQIDEAKQEKPTHINAFQLIGMASALDLSGFFEEEDASQRKIRFTSTHSPKDLFDKIENVVTEMGFQVQRGNSKLKVMKNGRGSKNLRNPSSFLVCTEVVELGPSLYVVELKKSHGDPILYRQLCERLSDELGVCKTEQIQRTESLEDDLESFDSGSSLPGF

SEQ ID NO: 174167 - protein, 687 aa, Oryza sativa
  Clone ID: PAT_MRT4530_72134C.1.pep
MGEWCGEVGDEAGSARERRAAVEEAAPSAARDECKEATELMFLRGLYKEIQDMLDCQRYTSLSYLIQLACNAESQIEEDMKKQYAMFLPSITNHLQEVHNDRKEDKGMDEPPIPLFTLKVEAPPPSEEGIKGKLNGAKINQVEQPLVEPTAEIPLSQTDLFAVPCDKEVLCDNASLISMPQLVNEHAISHTSSLCDDFKHVIHIANEVEERELTSSLNTLGYIQCDDFYEHHMEKSRTVFYEEGEDDVIMATMDTTIAYIMDEQQDIKFKPSKNKVDLHWQDQQPTERCIDRESAVVQLWPSTSALTSLQEEVGGTLTLLEEVVLLANSSKVPAEEVVQLGESWRVQAEEVAEEHAKTVQAETEEAEEMEESEEPEEMQEVEEPEAMVQEEGIENRETRCSACTIVSPTRDPPRWLPLARFRPWSTQVESACNAQKHYTSEKGEIIARLSTTTILSKPHQRCRRARGTQGRENFGRPFKWDLPNQMADHPLNHRGEGMDDFVAELARMTLVVDYPNAPEYSTVPPLSGEFPLGRGLPLPAALSPDDLRPAFSARWDCLPPRRRLLRLRRSAVDPVHPLAELADRWSAVVPIHPSCAAAFLRSGRLFCRRRRPRVSRGPPPLFLLLFPSLGRRSAVPMAAAGDHRGAGAASRRLRRRGRLRARRVAAAWGPAVSRPRPRVRRVRLEVH

SEQ ID NO: 174168 - protein, 133 aa, Oryza sativa
  Clone ID: PAT_MRT4530_72135C.1.pep
GRENPGRPLPLLRRFAAGVRRRRAHRPSPPPRRGAAVESPHRGSHSTSLEMHPPLTLHRHPMCAEIIEAFQKCHVDHPVKKFFGECTDLKIKLDQCFRQEKALKRKANFEESKKFKEQLLAYKKEMAEQDKES

SEQ ID NO: 174169 - protein, 47 aa, Oryza sativa
  Clone ID: PAT_MRT4530_72136C.1.pep
ASAYRFGLTLCVFFQILVASILYDGPRKLTMTRVDEWKILSCSKKKK

SEQ ID NO: 174170 - protein, 79 aa, Oryza sativa
  Clone ID: PAT_MRT4530_72137C.1.pep
FDLHSNEFRRVAKSIARIIALALNLEEDFFDKPEMLGEPIATLRLLHYEGGQKTGHAFLPFSILLHKKHNEFLSLMFLF

SEQ ID NO: 174171 - protein, 129 aa, Oryza sativa
  unsure (1)..(129): unsure at all Xaa locations
  Clone ID: PAT_MRT4530_72138C.1.pep
FAYQYEGATGEDGRSPSGWDTFTHAGKMPDKSTADMGCXGYHIYKEDVKLMSDTSLEAYRLSIYWSTLIPRGRGPVNPKGLEYYNSLIDELVERGIEIHVTVYHLDCPQILEDEYHGWLNQXVIDDFTV

SEQ ID NO: 174172 - protein, 397 aa, Oryza sativa
  Clone ID: PAT_MRT4530_72139C.1.pep
MAVSSSTSTCSSFSLLLLLLLLAAAPWRSGEAAAAAARALNFTRQDFPGEFVFGAGTSAYQYEGATDEDGRSPSIWDTFTHAGKMPDKSTGDMGAGGYHKYKEDVKLMIKLMSDTGLEAYRFSISWSRLIPRGRGPINPKGLEYYNDLIDKLVKREICDCSMGIEIHVTLYHLDFPQALQDEYNGWLSPRIIEDFTAYADVCFREFGDLVRHWTTVGEPNVLSIAGYDSGVIPPCRCSPPFGTSCAAGDSTVEPYFAAHNSILAHASAVRLYWDKYQAKQKGVVGTNIYSFWPYPLSRSCADIDAVQRVLDFTIGWILDPLVYGDYPEIMKKQAGSRIPSFTKEQSELIRGSADFIGINHYKSLYVSDGSNREKAGLRDYNADMAAHFRGTAISVPN

SEQ ID NO: 174173 - protein, 70 aa, Oryza sativa
  Clone ID: PAT_MRT4530_7213C.1.pep
SLYFVCRAWPSGPTVPGQPSMPVGRPRHGPAVRPGRHGPDPSRAMPCLGRAKMPCRGPVLRASGFMSIYT

SEQ ID NO: 174174 - protein, 155 aa, Oryza sativa
  Clone ID: PAT_MRT4530_72140C.1.pep
MGAEVPDLPAAIELGEVIAAGQLFSTNRRPSTNQQPPPVSFARRRTGEMGKREENVELFLGRREYRLGTIFVPALKNEGHVLSGFVVQGNLFKFDVKVAAMAVRLKGLIWCTLTPKISMGTWLNMKVMPISVREFLLKSSAIHYMRIVYSLSLEH

SEQ ID NO: 174175 - protein, 55 aa, Oryza sativa
  Clone ID: PAT_MRT4530_72141C.1.pep
AKERFSAYIVIPMWPEGNPTGAPTQRILYWQVRSTCLLCVLFNVYIDYTQLVHLT

SEQ ID NO: 174176 - protein, 65 aa, Oryza sativa
  Clone ID: PAT_MRT4530_72142C.1.pep
MAGERAVDSREGQMASLRRDTHARAANAAHQRYRVGRFRPVRCGEVSVRVTGGWATSALLPVWTS

SEQ ID NO: 174177 - protein, 119 aa, Oryza sativa
  Clone ID: PAT_MRT4530_72143C.1.pep
RGAPAAGCTRPRAAAPARAAAASPSPAPPSPPPPSSPAARSRPRRKLSALPLIVPPPSSSPPLSPPPASLSRRRRRWKSRVGYRRQRRGGAVVVVGRRLHVQWRACWSWRQTRRLQERA

SEQ ID NO: 174178 - protein, 55 aa, Oryza sativa
  unsure (1)..(55): unsure at all Xaa locations
  Clone ID: PAT_MRT4530_72144C.1.pep
VRTKTINYDGLDMKVHRIKPYHASENMTLILXIITHRQHECIRISVLCTQPLLTH

SEQ ID NO: 174179 - protein, 34 aa, Oryza sativa
  Clone ID: PAT_MRT4530_72145C.1.pep
MADALVVIIGDWEQSMVGISFASSEGNNINIPYL

SEQ ID NO: 174180 - protein, 212 aa, Oryza sativa
  Clone ID: PAT_MRT4530_72146C.1.pep
RSLLRLRCRCPRRSTRRPPRGASTTDRRLVSSGTPSRACRKPTRASTSTWRTGLGWINPSTNGRSTTTTRAPARKWSVAKLASQRSLLLAKCRKFRRSVHMIKPAVLFWNYAEEHFAATSFWVECVAKQMCGEVRFVRSWGRKGGCLFFNCMESLGRFTGCAGRELRLLGVLFTPARISIVILCYDKIAYSQCLIVFFFLPPRKKKKKCIFF

SEQ ID NO: 174181 - protein, 100 aa, Oryza sativa
  Clone ID: PAT_MRT4530_72147C.1.pep
MAMTPRAARRDPPLAFSWATRPGRRMERPRRHLTVRRVRWDGRTDGARVAVTRGRVPIGIGAESRDPRHHGVAAHVVDVPWGRVWLVRAAGVELRPLAHQ

SEQ ID NO: 174182 - protein, 175 aa, Oryza sativa
  unsure (1)..(175): unsure at all Xaa locations
  Clone ID: PAT_MRT4530_72148C.1.pep
HVTSPGISSLERAPHAAATGHCAPLLSRWLLPVAPLPPAATRVSSPAPARSTARGVAAADQLLPLLPLLSPPKMTTTTMATGSRRRMTRTSPLWPPPPFPPSSDLDGVVTMSSGGRAPISPPASPPXAVAEDHEDGDGFEEEEDAHLCYGDRCRRRIAAAPPVVARRRPADWFNS

SEQ ID NO: 174183 - protein, 149 aa, Oryza sativa
  Clone ID: PAT_MRT4530_72149C.1.pep
DYLEETKRENQGEEPRLIWTPMATRKMASRAKKRMVWTRMETTLVWNLPNSINLHLPGIWNRSPGDSRMNSTQDISTGPQSCIFFSLLSSSSSSCLLLPVALLLLLLLLLPTDDDARGFPPCERTNQPRIGYDDDIGEERMLPTGAVLH

SEQ ID NO: 174184 - protein, 213 aa, Oryza sativa
  unsure (1)..(213): unsure at all Xaa locations
  Clone ID: PAT_MRT4530_7214C.1.pep
MKLVYRNLARNGPGSVKLVPEEEDDLWHAYNLIVPGDTLQSVTVRKVLREMASGGRDAERVRLKLEIVVESVDYDKEGSVLRVCGKNXENDHVKIGQFHTVELELKRQFTLTKELWDWLALDTIQQACDPTASADLAVILMQEGLAHLFLIGRSITVTRARIETSIPRKHGPAIAGYESALKKFFEHVLQAFLEHIDFXVVQCAVIASPGFTK

SEQ ID NO: 174185 - protein, 62 aa, Oryza sativa
  Clone ID: PAT_MRT4530_72150C.1.pep
LIYLEEYVVVVVGIFLLFSIYLLLSSKGLSNQCKIPPWLCRLEYEITAHHPSYWDFKKKKKK

SEQ ID NO: 174186 - protein, 126 aa, Oryza sativa
  Clone ID: PAT_MRT4530_72151C.1.pep
DEAPLSYSNLGGGAVLALRTTVEAGDGDCSEGDAAEADSGGEWRVSGGGGSPTHHRRRASLPRFLIAASLLIHHRPAAGDAAAHQRGRRLATRRRGWRPAKWLRTGGDCGMAAHGRGAAGDTAARA

SEQ ID NO: 174187 - protein, 44 aa, Oryza sativa
  Clone ID: PAT_MRT4530_72152C.1.pep
MAADRNMLGTRYKQGKKVDESCAVTSSGRHMEQRRQERGCTRPD

SEQ ID NO: 174188 - protein, 532 aa, Oryza sativa
  Clone ID: PAT_MRT4530_72153C.1.pep
MVAVFNKDVLSWYLITVKLKETVDANLNKSAPPPGALPLWQALNRNLPLLTNGEAAGAGGDALPPRQEREREVKVQVQSPAHSPKPQDPEWVVAIRGKLAQARAEEAACPWARLSVYRVPKSLRDGDERAYMPQVVSIGPLHRGRRRLREMERHKWRALHHVLKRTGHDVTAYLDALRPMEERARACYDGRVAGMQGNELVECLVLDGTFVLELFRGAHDGGKGSRRRPGIPLFVLDLLLGLQLGNPEQTGAVAGLAVRFFDPLMPTDEPLLRKDRSKLESSIGASPAAAAFEFDPLSGPMLHCLDVFRRSLLRAGLQPTPPPPARLWLKKWSGLRRVADKRRQQFVHCVSELREAGIRCRRRNTDRFWDIRFHDGVLQIPRILIHDGTKSLFLNLIAFEQCHMDIATPGGNNITSYAIFMDNLINSADDVKYLHDRGIIEHWLGSDAEVADLFNRLCQEVVFDINDSYLSGLSDQVNRYYDHKWSTWIASLKHNYFSNPWAIVSVVAGVLLLLLTMTQTFYGTYSYYRPMH

SEQ ID NO: 174189 - protein, 559 aa, Oryza sativa
  Clone ID: PAT_MRT4530_72154C.1.pep
MVAVFNKDVLSWYLITVKLKETVDANLNKSAPPPGALPLWQALNRNLPLLTNGEAAGAGGDALPPRQEREREVKVQVQSPAHSPKPQDPEWVVAIRGKLAQARAEEAACPWARLSVYRVPKSLRDGDERAYMPQVVSIGPLHRGRRRLREMERHKWRALHHVLKRTGHDVTAYLDALRPMEERARACYDGRVAGMQGNELVECLVLDGTFVLELFRGAQDGGKGFGDDLGYSRHDPIFAMRGAMHAIRNDMILLENQIPLFVLDLLLGLQLGNPEQTGAVAGLAVRFFDPLMPTDEPLLRKDRSKLESSIGASPAAAAFEFDPLSGPMLHCLDVFRRSLLRAGLQPTPPPPARLWLKKWSGLRRVADKRRQQFVHCVSELREAGIRCRRRNTDRFWDIRFHDGVLQIPRILIHDGTKSLFLNLIAFEQCHMDIATPGGNNITSYAIFMDNLINSADDVKYLHDRGIIEHWLGSDAEVADLFNRLCQEVVFDINDSYLSGLSDQVNRYYDHKWSTWIASLKHNYFSNPWAIVSVVAGVLLLLLTMTQTFYGTYSYYRPMH

SEQ ID NO: 174190 - protein, 96 aa, Oryza sativa
  Clone ID: PAT_MRT4530_72155C.1.pep
PAVPAEPGRVVVVVVVVPREGPGSVCTRSKDVDRVEGVLVAGAPPAPAREVRVHLRLVGSHRLAPGHAPTLVGGGVGGAGGVTLAPRRGGEERRVT

SEQ ID NO: 174191 - protein, 41 aa, Oryza sativa
  Clone ID: PAT_MRT4530_72156C.1.pep
FVFLPSCGFNIRVEKRLHIWSLKKGGPPPKDVGVVHYARDI

SEQ ID NO: 174192 - protein, 51 aa, Oryza sativa
  Clone ID: PAT_MRT4530_72157C.1.pep
SCGPDQLDLAYRSLNLLDDLDAESGHDLKTLMSLNDKAPLSPPVEASSLRT

SEQ ID NO: 174193 - protein, 91 aa, Oryza sativa
  Clone ID: PAT_MRT4530_72158C.1.pep
LYSTQTNQIGGVYLTYSGTQPTPAQTSAHQSQKLHNATRTSVTNIAPEIEPPNSLLLPQYFKTLTILSTLEMKHFIHLPDFTMLLLTLQKL

SEQ ID NO: 174194 - protein, 272 aa, Oryza sativa
  Clone ID: PAT_MRT4530_72159C.1.pep
MSTAAAAAAAQSWCFATVTPRSRATVVASLASPSPSSSSSSSNSSNLPAPFRPRLIRNTPVFAAPVAPAAMDAAVDRLKDGFAKFKTEFYDKKPELFEPLKAGQAPKYMVFSCADSRVCPSVTMGLEPGEAFTVRNIANMVPAYCKIKHAGVGSAIEYAVCALKVELIVVIGHSRCGGIKALLSLKDGAPDSFHFVEDWVRTGFPAKKKVQTEHASLPFDDQCAILEKEAVNQSLENLKTYPFVKEGIANGTLKLVGGHYDFVSGNLDLWEP

SEQ ID NO: 174195 - protein, 989 aa, Oryza sativa
  Clone ID: PAT_MRT4530_7215C.1.pep
MAQDGKLDLLLKTIEENEKRRVEAEERSRADLMELKKNLEVRIPLVEKKVDELGGTFQDLNKKVDLLESSITKKYEEIPSGIPLQGSPSQDTSWLVVCSRFTRDRQEGLIRQWFHVQQTGTVEEYVEKFDSLMHQLIAYDGTLKPVYFVTSFVEGLKDEIRGVVLVQRPSDMDSACAIALLQEEALVGTKPSGIRRVEVNPGYKHVTRINNPVSAPNTPRTGTSYSPEDRRNSDANKAKEERISALKAYRKSKGLCFVCGERWGRDHKCATSVQIHFVQELLEAIHDDSELKFSPMHIDWVHKWMEFQSNDQSIKLQGMAKEGALMYMVQLFMNEEEQIVPTSELILPLLQKFKDVFEEPKGLPPQRYCDHSIPLIPGSKPVNLRPYRFNPALKDEIEAQIQEMLQTGVIQPSQSAFSSPALLVRKKDAGAKWFTKLNLRAGYHQIRMKAGEEYKTAFQTHTGHYEYKVMSFGLTGALATFQGAMNDTLKLVLRKFALVFFDDILIYSPDLETHLSHIDQVLSLLREHNWKVKLSKCYFAQQQLTYLGHVISAAGVSTDPDKIYYRKGTSNAAADALSRKYQEDGELALISSCTPLWIQDVIKGYEGDEYSTKLITALAINPESSPQYSLHDGLIKYKGRIWIGHNPELQLKLLQEMHSSPMGGHSGFPVTYRKLKRLFAWLGMKKMAKDFVHQCQICLQAKPDRNRYPGLLQPLPVPEGAWQIISMDFIEGLPRSFRYDCILVIVDKFSKYAHFLPLSHPYTAIDVAKLFMVNVYKLHGLPQTIISDRDRVFTSQLWEQLFKGAGTQLHMSTAYHPQSDGQTERVNQCLEIYLKSFVHATPTKWFSWLHLAEFWYKTSYHSSLSSSPFDVLYGHPPRHFGISSADCAIPDLALKGAKDFQPPVLSDLPGPNQDLQFPARLLDSCTYMKANCQGKGIVSEPEGMTKPSIVDDGEQFTEEEGDADTRVGRIYPRRARKKNPLYTGPDWAM

SEQ ID NO: 174196 - protein, 41 aa, Oryza sativa
  unsure (1)..(41): unsure at all Xaa locations
  Clone ID: PAT_MRT4530_72160C.1.pep
AAHLLFCXGIHYPVHAHIQLAKMSPRLQHLADVQLESDSLV

SEQ ID NO: 174197 - protein, 242 aa, Oryza sativa
  Clone ID: PAT_MRT4530_72161C.1.pep
MARKCSSCGNNGHNSRTCTGQRSLQESGGGYGGGGAGGVRLFGVQLHVGGAPLKKCFSMECLSSPSPSPSPAYYAAVAAAASNSSPTVSSSSSLVSVEEAGEKMANGYLSDGLMARAQERKKGVPWTEEEHRKFLVGLEKLGKGDWRGISRHFVTTRTPTQVASHAQKYFLRQSSLTQKKRRSSLFDQHGTARSHAAASSILNPDAKLFITSSEQQQQRTTKNNPSFSDGGKASGATATPAT

SEQ ID NO: 174198 - protein, 245 aa, Oryza sativa
  unsure (1)..(245): unsure at all Xaa locations
  Clone ID: PAT_MRT4530_72162C.1.pep
FSSSVGGRLVLINSVLLSLAMFMISFFEILKGVFQTIDYYRSRFFWQGDDHEKKYRLSRCDFICQPKDQGGLGVYNLEIQNKYLLSKXLYKLINGNGVWQDLLKRNYLYNKYITQIDKKQGDSHFXLGLMKVKNXFLKYGFLNCEXMGNRQDFRKINSXETWPLEIXYPSLYAIVRRRSSSITSVIGSVLFNVSFRRALVGQNLTYWYELYASIVHIQLNNSSDYFRXSYHQNGQFSVRLMNFHI

SEQ ID NO: 174199 - protein, 249 aa, Oryza sativa
  Clone ID: PAT_MRT4530_72163C.1.pep
MGGATNLPPGFHFFPSDEELVVHFLRRKVSLLPCHPDIIPTLLPHRYNPWELNGKALQAGNQWYFFCHLTQSRTSSNGHWSPIGVDETVRSGGRNVGLKKTLLFSIGEPSEGIRTNWIMHEYHLLDGDCVAGGSSNLTSSSSNRRSHRKRGHSSMESNNWVLCRVFESSCGSQVSFHGEGTELSCLDEVFLSLDDYDELLATSNYLRICMDIVFYHHKEKRKVGGAYAIIWPSMLSMEIMHACVEIALR

SEQ ID NO: 174200 - protein, 771 aa, Oryza sativa
  Clone ID: PAT_MRT4530_72164C.1.pep
MAGAGDPVAAAAVAAASSSAGAAAASFRLGMVRVVSFLVGGLNVAVLLLGLYLIDGVLPPGCGGGLALAAAPALAGIRVLAMIGTARAQHATADAIARRHLDEAAASVAADAVARHEIRVRYKRWLWWTRFGMAVGAMQLVGAIYLMLVIVRDISNERRATSCFFGQDEADHVSKRALIALFLILSWVVVVVQCFTGSDILRWRSFYATHDMAWKAHYREVFDHGIREALCCLGRAKTVLEEDEVYSVARLLGDLVAYRASGTGHLELLAGLALLQKNENLPHLQTDLTEAPLNLMQEAAILHPFAEACYTGPLLDVGRNPILFPCAWVYRQGVLTPWSRRRRPALDGDNWWRGHAAAFLRFVHIPAAALLRGRVCQSKREAAYFVVVLHDKKTVVIGVRGTETPEDLITDGLCRECAFTMEDLDGLVKCEQLPATTRERVISTFPHYGHGGILESARELFMQLNDCTGDNSSSLTVGFLPALVGEGSECHGYKIRVVGHSLGGSVATVLGMMLFGRYPNVHVYAYGPLPCVDFVIAEACSQFVTTIVCNDEFSSRLSINSILRLRSAAIRALSDNSPADTAMIQKLARRILNVNKYHDNGPDGRAVSTERRFPHQDAPCTSEPDLPILQNGINGYNGSNSSIDVMSSQGLHTDCDAQTISLHGLDSGSEQRHTSYRDIPVEPPEMFLPGLVVHIERQRRSLFPLWKCWSLQGSEPPYKAFFAKRENFTDLAVTPSMFTDHLPWRCHYAMQRVLEAQTAASCPDSPVERLV

SEQ ID NO: 174201 - protein, 354 aa, Oryza sativa
  Clone ID: PAT_MRT4530_72165C.1.pep
MVSALLRTILVTGGAGYIGSHTVLQLLQLGFRVVVLDNLDNASELAILRVRELAGHNANNLDFRKVDLRDKQALDQIFSSQRFEAVIHFAGLKAVGESVQKPLLYYDNNLIGTITLLQVMAAHGCTKLVFSSSATVYGWPKEVPCTEESPLCAMNPYGRTKLVIEDMCRDLHASDPNWKIILLRYFNPVGAHPSGYIGEDPCGIPNNLMPFVQQVAVGRRPALTVYGTDYNTKDGTGVRDYIHVVDLADGHIAALRKLYEDSDRIGCEVYNLGTGKGTSVLEMVAAFEKASGKKIPLVFAGRRPGDAEIVYAQTAKAEKELKWKAKYGVEEMCRDLWNWASKNPYGYGSPDSSN

SEQ ID NO: 174202 - protein, 341 aa, Oryza sativa
  unsure (1)..(341): unsure at all Xaa locations
  Clone ID: PAT_MRT4530_72166C.1.pep
TRPNGGILESARELFMQLNDCTGDNSSSLTVGFLPALVGEGSECHGYKIRVVGHSLGGSVATVLGMMLFGRYANVHVYAYGPLPCVDFVIAEACSQFVTTIVCNDEFSSRLSINSILRLRSAAIRALSDNSPADTAMIQKLARRILNVNKYHDNGPDGGIMEDYSARHHTFEGRAVSTERRFPHQDAPCTSEPDLPILQNGINGYNGSNSSIDVMSSQGLHTDCDAQTISLHGLDSGSEQRHTSYRDIPVEPPEMFLPGLVVHIERQRRSLFPLWKCWSLQGSEPPYKAFFAKRENFTDLAVTPSMFTDHLPWXRCHYAMQRVLEAQTAASCPDSPVERLV

SEQ ID NO: 174203 - protein, 140 aa, Oryza sativa
  unsure (1)..(140): unsure at all Xaa locations
  Clone ID: PAT_MRT4530_72167C.1.pep
MNIKNGRGSEMREAMAGAGAGTAPLARQGLIXSLMFDKFXSTLGGMGDRLRKDFGSMNMDELLWSIWTVEESQAMASVLGMGRRMGGRATRMTNGARREEDDSLRKTMLLAVEVCSSTPLTVPCGPFLSVGMGWGTEWLS

SEQ ID NO: 174204 - protein, 133 aa, Oryza sativa
  Clone ID: PAT_MRT4530_72168C.1.pep
MDGQEAILSGNTLPHRQNRCNHNSHGCAASTPSVTIHQCVVTIARDLSLLGQAPRPPIMDQPPATARGTAPPLPSDSGRRNAPAEEHVSSSSDEPPNDENDDEDAEEQMEEARGGRRQVLAMGVSCRCRRRPR

SEQ ID NO: 174205 - protein, 83 aa, Oryza sativa
  Clone ID: PAT_MRT4530_72169C.1.pep
DDFDWRDHGAVGPVKNQGACGSCWSVSASGALEGANYLATGKMDALFEQQIAYLYHERDILESDSCDVGCNCGLMTNSFCFSS

SEQ ID NO: 174206 - protein, 440 aa, Oryza sativa
  Clone ID: PAT_MRT4530_7216C.1.pep
MKLVYRNLARNGPGSVKLVPEEEDDLWHAYNLIVPGDTLQSVTVRKVLREMASGGRDAERVRLKLEIVVESVDYDKEGSVLRVRGKNITENDHVKIGQFHTVELELKRQFTLTKAHRGVGVMATIGTCQLCGDVAVALENSSLVGDIAIGDIGGGHGLCEGLCRLPEERLLFLLLQELWDWLALDTIQQACDPTASADLAVILMQEGLAHLFLIGRSITVTRARIETSIPRKHGPAIAGYESALKKFFEHVLQAFLKHIDFEVVQCAVIASPGFTKDQFRDYMHLEAARRDLRLIIENKQRIVLAHAPSGYKHSLKEVLDSPSVMTLIKDTKAAQEVQALKDFFNMLTNDSARACYGPKHVEIANERLAIQTLLITDNLFRNSDIATRQNYVRLVESVKKFGGTVHIFSSMHVSGEQLAQLTGIAAILRFPLPDLEDIEM

SEQ ID NO: 174207 - protein, 323 aa, Oryza sativa
  unsure (1)..(323): unsure at all Xaa locations
  Clone ID: PAT_MRT4530_72170C.1.pep
PTRPGRFVPNITIGPLVVDALRPVTDLPLDVHLMIVEPEQRVPDFIKAGADIVSVHCEQSSTIHLHRTVNQIKSLGAKAGVVLNPATPLTAIDYVLDVVDLVLIMSVNPXFGGQSFIESQVKKIAELRRLCAEKGVNPWIEVDGGVGPKNAYKVIEAGERHCCSVFRLCRSYQGIRNLYIIYRSERGCLLRVRTKSKALAAPREGVGGERKREREMASPSSSSSLCSTFASPRAASLGRRLAFSSPRKAFRVRASSRVDKFSKNDIIVSPSILSANFSKLGEQVKAVEVAGCDWIHVDVMDGRFVPNITIGPLGGGALRAVTD

SEQ ID NO: 174208 - protein, 108 aa, Oryza sativa
  unsure (1)..(108): unsure at all Xaa locations
  Clone ID: PAT_MRT4530_72171C.1.pep
VXKSHRPLPPPQXRXXGRRCSSPXRXTPXNPMDTRHIQHLFXXXFGEREKIGXQKYFXLKPXLXGCCVXXXKNXXPRKXKXXVXLKRGXIXLHXXXXPTXXYPXKRKN

SEQ ID NO: 174209 - protein, 45 aa, Oryza sativa
  Clone ID: PAT_MRT4530_72172C.1.pep
STTCSYQGLPSLTSSSHACRYLRACRSTGPWSCTSPCLRGQRLWS

SEQ ID NO: 174210 - protein, 54 aa, Oryza sativa
  Clone ID: PAT_MRT4530_72173C.1.pep
LFPLLERDESQRGALYGDPRLAYRRELACLGRFSGRSDITGIHWGGEPTGWHSH

SEQ ID NO: 174211 - protein, 39 aa, Oryza sativa
  Clone ID: PAT_MRT4530_72174C.1.pep
MAAVVIITFNLLSGRLTQQGVGDVYYSVMIEAQIHHWQA

SEQ ID NO: 174212 - protein, 101 aa, Oryza sativa
  Clone ID: PAT_MRT4530_72175C.1.pep
AHENYTPNMSLDQAQPITMVQPQIVLGFGGAETIPNLKFIFGRGLIYFSLGQNTTPLCLQAFMRGARLIGAGHGRGQGEHTGAGSPWGGVPSRNLKKRVAQ

SEQ ID NO: 174213 - protein, 346 aa, Oryza sativa
  Clone ID: PAT_MRT4530_72176C.1.pep
MAVFLLKSKAIPTSVIAFAGDVPLLAGGVVQDNGISPRTPMSIFRTSPGEKMLEMAGLIAGGLENGMVAMWNPDLKLRKLPSYLPDEEILKPHPDGVQTWIRKDFEVIEDYLDQVQVDGNSRALHLQVSPTYQEMSGNLMVEYQDDIMCRTSSSGVVALFAKHTGKVRGLSFNPNAPNLLASGAADGRIMLYDLAHPLAETIPVQLCDSPDEEISCLCWNSYKVHVIASTTTCGRICFHDTRAKTIIGCTTLDCKTKSGSTVIFCPDPDSEKLLVAREDSPSVKILNMGNTDHNPAGEIPFSNSEGIVAMSWCPHNPNLLLACTKNNKILVWNKKTNKLDGADVAE

SEQ ID NO: 174214 - protein, 1003 aa, Oryza sativa
  Clone ID: PAT_MRT4530_72177C.1.pep
MCNSLYENGTDRLSLLEFKKAISMDPQQALMSWNDSNYFCSWEGVLCRVKTPHRVISLNLTNRGLVGQISPALGNMTFLKFLSLSTNSFTGEIHLSLGHLHRLETLDLSNNTLQGDIPDFTNCSNLKSLWLSRNHLVGQFNSNFSPRLQDLILASNNITGTIPSSLANITSLQRLSIMDNNINGNIPHEFAGFPILQILYADGNKLAGRFPRAILNIFTIVGLAFSSNYLNGEIPSNLFDSLPEMQWFEVDYNNFFQGGIPSSLANASKLKVFDISRNNFTGVIPCSIGKLTKVYWLNLEKNQLHARNKQDWEFMSCLANCTGLTDFSVSDNCLEGHVPSSLGNLSVQLQQFLLGGNQLSGVFPSGFQYLRNLISISIDSNNFSGVLPEWLGSLQNLQLIGLYNNYFTGIIPSSLSNLSQLGYLYLQSNQFYGHLPPSLGNHKMLQELTIGYKNIQGMIPKEIFKIPSLLQIDLSFNNLDGSIPKEVGDAKQLMYLRLSSNKLSGDIPNSLGNSESMEIIMLDRNIFSGSIPTSLDNILSLKVLNLSQNNLSGSIPPSLGNLQFLEKLDLSFNHLKGEVPVKGIFKNASAIRIDGNEALCGGVPELHLHARSIIPFDSTKHKQSIVLKIVIPLASMLSLAMIISILLLLNRKQKRKSVDLPSFGRKFVRVSYNDLAKATEGFSTSHLIGRGRYSSVYQGKFTDEKVVAVKVFNLETMGAQKSFIIECNALRKLRHRNIVPILTACASTSSNGNDFKALLYEFMPQGDLNKLLHSTGAEEFNRENHGNRITLAQRLSIIVDVADAIEYLHHNKQETIVHCDLKPSNILPDDDMIAHVGDFGLARFKIDFMGSNDSNSIYSTAIKGTIWICCPSIVSFRVNRSHPWRSIEYAAGAEVSTYGDVFSFGVVLLEIFLRKKPTDDMFKDGLDIVKFVEVNFPDRLPQIVDPELLQETHVGTKERVLCCLNSVLNIGLFCTKTSPYERMDMREVAARLSKIKEVFLSGN

SEQ ID NO: 174215 - protein, 162 aa, Oryza sativa
  Clone ID: PAT_MRT4530_72178C.1.pep
MPSPPLEAYCGRAAPSSAPAACCGHVASVAALPCHGNRRVGRRLVGEAGVRRPATATTREQEGLPPRRRYRHWWRNKVSHLEWARWRKSVAVWQNTSSCSTHRDSGSPRRHTQGDLRIDDGDDASLSSSLFPGSAPAATLPLLSPRHRPPDLLSCVAGSRPI

SEQ ID NO: 174216 - protein, 79 aa, Oryza sativa
  unsure (1)..(79): unsure at all Xaa locations
  Clone ID: PAT_MRT4530_72179C.1.pep
XKYRPRQXLXNXMPVARRVFXRRARSPLXWXSLYISCWWIXRPGCTEMXXIDHPRXXXSSDGFRPXVAEVVVLAKLSTV

SEQ ID NO: 174217 - protein, 558 aa, Oryza sativa
  Clone ID: PAT_MRT4530_7217C.1.pep
MRGKAATAFAVEQAKTQGFLTLEPPPTAPSYNSLHVLLRKKKPTSAQLCRGRVGGSRRSPEIMDSFSSPSSAGSTASTEHLMEQIKAQLAQAYAQEFLEVRLLEPSSDRRYYQFVGDQDHQSTQGNAGVVGRIYHKVPPLFYRVAIAPFDHLETVGNKCFAKCVTKPGTSLSGSESSCISRSYLLREIFATQTQFTKVEREDLGKHKDGRVTRVLGDMEIICSRLELEKCLFEGYLNLAAAPDVVPHDLHQLLGDAEHAEPVLGAQHVHHGELEHLPHLLVRRRQLLPGEERRVDDLMKPPFPQLGRNRVERMLVPQPRQQLQRTAGEVLVHRVAGVGAEADGAGDVPLDLGAPRLVRAAQRPELDGGARWAVGRRGPTQGGDAACPGRRTVDPTPCGRIWPPHARRDGRGSEAARMSRHGACAGGALRPSARRPSAVGRRPRVSVAWPGQTAAVAFPEGVARTWPMVGVMRHGRSDGNGEVVRPEAAVWPFGAAVVALGCTWQFVCPEAGCKGSDGSANGASGGGSSSSLPVCTLTLLGVPPLLFGEFLCWIEAAVG

SEQ ID NO: 174218 - protein, 422 aa, Oryza sativa
  unsure (1)..(422): unsure at all Xaa locations
  Clone ID: PAT_MRT4530_72180C.1.pep
PQEAFDWLTQYPEVFSXLMYAMADHPDKAGILSEIVQKADQNSVTLALGGDVTKLAQRPTISFAKQLIIALLYLLQHKLKINTPKGPADGWYTIDGLWLMSKSTADQIRAYLLEQGISAPSDNPKLFSEMQSLNVIESTPDDMAIWXAEKADSGWCPPKPFTLLKIKPETIWENVSDRPDFFAGKVSIETMTTEADLTNKPEQAVPSSDLETTNSEVILDETENQVEAKKNENMTDFVLELFTPSEQTTNLSSNDTIEIVKPIQMISENIENGTVIDLPEEEMVNPNIMSGQAFIEWLRQGIATKRLSINVKNAKLHIVKNHLFLVTPGIFTDYFNSKGVSYTKKDIESLQYAFQDLKLHKRYHLPNKDSQNFWKCSVIGPRKSSKVGGYLIKDTEYFFGKQVLIDNLHLTLIEEKQNDKAS

SEQ ID NO: 174219 - protein, 64 aa, Oryza sativa
  Clone ID: PAT_MRT4530_72181C.1.pep
MARPAIVVASALLLVLLLIFSTACGAKLFADGHAHYVILCAAMGLLGRLGHVVQRIVVEVGPAG

SEQ ID NO: 174220 - protein, 70 aa, Oryza sativa
  Clone ID: PAT_MRT4530_72182C.1.pep
QTQTTDVGYMLPLNRDAIRNLACICTSAITRIPLQCCSCGICTNDFKIWGSHLARTEFYKLLVAQLNLLN

SEQ ID NO: 174221 - protein, 88 aa, Oryza sativa
  Clone ID: PAT_MRT4530_72183C.1.pep
GDDTRADSSSSSSADGDSAGAPSSRMKRQQLTTVPMGHLGDGVPWHWRRVLGREAVAGIWAMVDQGTGHGYRDYQMKSVPFVSLIKSP

SEQ ID NO: 174222 - protein, 74 aa, Oryza sativa
  Clone ID: PAT_MRT4530_72184C.1.pep
IVSHVKCLNELCISIDEIAHLGSTYMTWVLRSIQLCSADPFIDISPLHMHFSLTPNHITLRGPKIYITTYTKSV

SEQ ID NO: 174223 - protein, 404 aa, Oryza sativa
  Clone ID: PAT_MRT4530_72185C.1.pep
MATTSSLALPLFAGGGGSDRLSQEIFSILESNFLFGAPPPEGPAGYYSSVGRVRVLSIDGGADGGALAAAALVRLERRLKELSGNPDARVADYFDLAAGSGAGGFLAAALFACRMPAEAARDVVARNRKVFSGRRGRGGGLFWRPESVFKKVFGDLTVRDAAKPLLIPCYDMATAAPFVFSRADAVEADAFDFPLWQVCAAACGVGPAEVASLDGRTRLRAAAATGGGGAVSNPAAVAVTHVLHNKREFPFAAGAGDLVVLSLGGNNAAAGPRASSSSLLRIAGACQADMVDQAVSMAFGECRATNYIRIQGNGIVAGAAAATAEAAMTERSVESVLFRGKKVMAQTNGERLDGVAEQLVREHHRRMESKAPVVLIKPSATPRTSSSSASTLITVSTNASSESP

SEQ ID NO: 174224 - protein, 39 aa, Oryza sativa
  Clone ID: PAT_MRT4530_72186C.1.pep
VTNIRASLRCSGGDIYSIIKKHQICNTTTDVARTSTRTH

SEQ ID NO: 174225 - protein, 415 aa, Oryza sativa
  Clone ID: PAT_MRT4530_72187C.1.pep
MEAQATHRRAGDRGGGGDGGSSSASIAKHLANQSQVLKWLQDFSDKVEERAKGAAAEVNVLLDEAGALELDMKTAMISFNNLTRQRFIEHASSGSKSKISDEDSMHLKTTESMHGSLQSQVPAQDYERDILPRYKEALHIGLSSCKDHFRSKGRSTTSVFRAMSAYGPLPHIIGSEEYIHDNSCGLADDMQPLSDDFSWLREFQSESSDSRTADISESQIFGAQRGYEKGETDSVVSAAREFKAMLEAALVNPYKFYDDATITAQDASVEKKISTSEDQVMLTGTSEAPSGRSAQEDNSEQTGLFASLQSADANPHDIYSALVREGLFDTGDEILSMDRGESADTPISGLASGLANLGTADPAERGYSINETTNEEGYLIEGDDPSPSNKDEQDDQTDAHGVSSPEPEDGVSRPS

SEQ ID NO: 174226 - protein, 130 aa, Oryza sativa
  unsure (1)..(130): unsure at all Xaa locations
  Clone ID: PAT_MRT4530_72188C.1.pep
MSSVFSGDETAPFFGXLGAASALIFSCMGAAYGTAKSGVGVASMGVMRPELVMKSIVPVVMAGVLGIYGLIIXVIIRGINPKAKPYYLFDGYAHLSSGLACGLAGLAAGMAIGIVGDAGVRYKALCYHTR

SEQ ID NO: 174227 - protein, 212 aa, Oryza sativa
  unsure (1)..(212): unsure at all Xaa locations
  Clone ID: PAT_MRT4530_72189C.1.pep
MARMRSAGGGDLHGAAHWTAAARERRRLQPISPVGRCPPLEDAATVAAACALSLGSRAAHPGSHQLDRKNSQEPQLTATGPSVRPDFREDECKRLLTRAAEGDGSGVEPGGDARRRLDVEHDERAVRAEAEVVGRRPLSSSPLVLTPACICVGGGGGAATATWTXEEPVGPRMRNSAPTTRIRTTTTGPRRRRHGAPAGRRPGAGRACAAAA

SEQ ID NO: 174228 - protein, 61 aa, Oryza sativa
  Clone ID: PAT_MRT4530_7218C.1.pep
KDLKTNNKASHSILILLLGSTMRGLLICMSVALFAGGDLLNLTLGWYTTAVPRYLRFYGRM

SEQ ID NO: 174229 - protein, 101 aa, Oryza sativa
  Clone ID: PAT_MRT4530_72190C.1.pep
RRAGDRGGGGDGGSSSASIAKHLANQSQVLKWLQDFSDKVEERAKGAAAEVNVLLDEAGALELDMKTAMISFNNLTRQRFIEHASSGSKSVYCTCLWMPLV

SEQ ID NO: 174230 - protein, 471 aa, Oryza sativa
  Clone ID: PAT_MRT4530_72191C.1.pep
MPFLSIKAAAAAQREQASDKLRQEGEKNSSTRPAGGGEEVAEARRSDSRPVMWRRRRRGGGDTGEGEGVGKCNKKLVFQIKFQKKKWRYQVSYSNTRQSSRENDAKDQVTLTGTSEAPSGRSAQEDNSEQTGLFASLQSADANPHDIYSSLVREGLFDTGDEILSMDTGESADTPISGLASGLANLGTADPAERGYSINETTNEEGYLIEGDDPSPSNKDEQDDQTDAHGESTPEAQSHKMAAPSPPAAAHLRHRAPPPRFSPSSPSADSILAAFVTCCRRRRRHAQQWDGGEEASQGAILPRSGRRPAGAPRRRRLGPVVVVLILVVGALFLNLGPTGSSSFTMPWIRMEFNEPVHVAVAAPPPPLTQMQAGVNTSGEDLRPTTSASALTARSSCSTSSRRRASPPGSTPDPSPSAARVIFMSSYWLHLWSTMLPQEEQDTMRNGATLLESVAKGLLFHYGWRSFIRIAS

SEQ ID NO: 174231 - protein, 279 aa, Oryza sativa
  Clone ID: PAT_MRT4530_72192C.1.pep
MAKLMAHADWGGEIVAGRGGFEAATAGDMGDIVGEVGARFGAKNLGKVRDLVEEGGEEPILLGLGAKARAGGRRICGEHGRQPPAMQASAWEAEGKRRALTGGVAGPTCPGKEKGEKTQGDWGGEIVAGRGGFEAATAGDMGDIVGEVGARFGAKNLGKVRDLVEEVVRNRFYLVWARRREREGAGFGGTWPATAGHAGFGLGSRRVFWRNAQDVSILPGEFQRIAGDVGTFSDLVARRMLLLYKHWQPVVPRCRSTTYPDRENLSVLEGCHHLYTYLK

SEQ ID NO: 174232 - protein, 72 aa, Oryza sativa
  unsure (1)..(72): unsure at all Xaa locations
  Clone ID: PAT_MRT4530_72193C.1.pep
MAAKLYLLLTVTCFMLLVLHAEHAEARPKPAAIGDSDNGIYTLLVFGDQNGDTGHLRKHRLREQXAEWYYTY

SEQ ID NO: 174233 - protein, 72 aa, Oryza sativa
  Clone ID: PAT_MRT4530_72194C.1.pep
EKYDISNGINLQFPYFSNSSFEICIQKHHPRIHISLLGTQHLQSLHFRLHFLLHFNLVRLRRVLELAQTPLP

SEQ ID NO: 174234 - protein, 311 aa, Oryza sativa
  unsure (1)..(311): unsure at all Xaa locations
  Clone ID: PAT_MRT4530_72195C.1.pep
MAGGGSRRGRPAAAEEARIGTSNVLAALDTLKRRKKPSSSSKKHAEKEKEVLWAPAPLTTRSWADVEDDDDDXYFATTAPPRPVWGTHHHAADAHDDDHDEQAALEQELESEDEEVDDDAEDEHEHETEDATPAEPAMNKAAAPPAPPKDTERQLSKKELKKKELEELDAILAELELSSKSNNDAQNETNGKKGAEQAADGENKEGAPAPAESKSSKKKKAKKDKSAKEAKETQELNGGVEEAAGAEPDEEVASMDVKDRIKKVASMKKKKSSKEMDTAAKIAASEAAARSAKLAAAKKKEKSHYNQQPVR

SEQ ID NO: 174235 - protein, 376 aa, Oryza sativa
  Clone ID: PAT_MRT4530_72196C.1.pep
MGRRPEAAAGVRARRRDRRRRPAFPSRIGAVHNCTLQLLACGARTGVLPDAELQKKRPLNQRTNDYESTSGVVEYASSSSYPTWQSYRRCFSWYYTCSQHANNRPTSPANPYCAAQLHATAADAKHTRTASGAGQGMGMAPNTATPMARVAYGLRKARRHLRLTAFVARIGTDGRARPITATATGAASASVRMCRISVLERRRLSSESALADCRRVPRATCVYENLPGMYPVSGHLVPCTLERNNVPLALSLSLLPRFPSIHIIRVLLTSELPAGAQPSVSEAAGRPRRHAGVPRRRSPTTRRPLDARATVATQQDRYICGGAPGRDGGGRPEDAWVPDHETGVFVPADEAAVSGTENHDHYGAAAAAGGSSSMLD

SEQ ID NO: 174236 - protein, 135 aa, Oryza sativa
  unsure (1)..(135): unsure at all Xaa locations
  Clone ID: PAT_MRT4530_72197C.1.pep
FSLRVGACVGQSTVAVEEAWGRYDALLGPGCHFVPWCVXRRVAGYLSLRVQQLDVRCETKTRDNVFVTVVASVQYRALADRAYDAFYCLTNAHAQIQSYVFDVIRASVPNMNLDEVFGQKKDVARAVDEELARAM

SEQ ID NO: 174237 - protein, 578 aa, Oryza sativa
  Clone ID: PAT_MRT4530_72198C.1.pep
MDILFSALASEIASRTISFIVAKYQKQTTMDKTIRLHQLLLRARTIIEEADGRHISNQAMLLQLRQLRNAMYEGHYVLDTFKGQTEVNKPFNNLSKIQVSIESLESKIGDLKEFVVFLMDCPRFLREPYNTYLFMERCMFGRHVEKDHIIDFLMQPSSLSLEILPVIGPREIGKRTLVEHVLNKEMVQKHFSHIIRLSSDDLNNIENDSTSKGHNLISFTERSLLVVELEHEADLVAWGRFRSSLSKINIMIKVLLISCVQKVSTSGTTGALKLKRMRSDEFWNFFRTLCFGSENPYEHQLLLSMALKMAKLAKGDFVCANIVSRLLRANFSTEFWSHMLDRMIKGQRLHFHLFGEHANDRVGKNRSHIVFDIADGTIILANKIYTSTTSLEDTGVPKITVENLLNKTAIIPTEGNFEVLRWQSPIAPYYSYLGNCVNRKASQVVPKERYLKRKRKTSDNITVRLVMVTSDDSEIVLLDRSYNAGQIRGLQAVRPAHLLRWDGSKYVCYCTPTRQRPPLPEKMAADRVYHKRNTTIETLIGAGLEPPLGVGFPNRYHGGRTDDFWSSVPVLEPTPLMS

SEQ ID NO: 174238 - protein, 313 aa, Oryza sativa
  Clone ID: PAT_MRT4530_72199C.1.pep
MMSFNKSQEGFGQVAAVATLASNGGGSLPWLLYGEPLGQGKPAMSPEGVVPRAQTPLDPPQVPAMDRGVPEILNFSMVPAKSKGEKCSEHSTTIALQSPFAEYNGCFELGLGQSVVPSNYPYADQHYGLLSPYGVRPTPSGRILIPPNMPADAPIYVNAKQCSAIIRRRHARAKAERENRLVKARKPYLHESRHLHAMRRARGSGGRFLNTKKETNGKTTGGGRKVMDIIIPPLCPAASPSSEQCNPSSVSSLSGSEVSSIYEHEDMDHFHSFDHLRTHFFTPLPSLMDVEHGAGNPFKWTAASDGCCDLLKA

SEQ ID NO: 174239 - protein, 53 aa, Oryza sativa
  Clone ID: PAT_MRT4530_7219C.1.pep
MQNYGLKGNASGIGPDQAQSYRKSFLSVDGKKRRIVLRRQKGTRVLHSQWLFA

SEQ ID NO: 174240 - protein, 183 aa, Oryza sativa
  unsure (1)..(183): unsure at all Xaa locations
  Clone ID: PAT_MRT4530_721C.1.pep
ARSYKNLDSFRRALLNNKAKDIAYYTDELRWIKSKSEIGLMRESASIVSQSLLQTMLLSRTHREESQLAAKIEYECKMRGAQRMAFHPVVGGGANGSVIHYSRNDGRVKAGELLLMDVGCEYHGYLSDLTXTWPPCGRFSPAXEELYSLILETNKECIKLCKPGRSINEIHNHSVKMLIKGFQ

SEQ ID NO: 174241 - protein, 79 aa, Oryza sativa
  unsure (1)..(79): unsure at all Xaa locations
  Clone ID: PAT_MRT4530_72200C.1.pep
KPRPTRLRGPRPLIGPGPPQLQKSIGTGPGLSHSPPPISGPPGXPPEKPNRGAPFQDPPPVSKKRPPKNPPWFTPRPNP

SEQ ID NO: 174242 - protein, 78 aa, Oryza sativa
  Clone ID: PAT_MRT4530_72201C.1.pep
MKSVSLGAMPAILHDIDGAPAGRVASLPAAVVPWIPVVEAAPSLVVEVHFALDVGEHGSDEEDVSSRLQDHHVLGDSA

SEQ ID NO: 174243 - protein, 80 aa, Oryza sativa
  unsure (1)..(80): unsure at all Xaa locations
  Clone ID: PAT_MRT4530_72202C.1.pep
ERIILDVGNGAESVREWNKFIGCYIEISHMLIISDYPESGLSDNPTXISDNPHSPDFRDTISASASTLYYPHPHSYLPDF

SEQ ID NO: 174244 - protein, 141 aa, Oryza sativa
  Clone ID: PAT_MRT4530_72203C.1.pep
MVDWRREAGGCRKGDTGIRQAESPRTWWSWSLEETSSSVLHSNVLQLARYEPLKVATTSSSLTVGSMLPYVERKMYFHHQRGSSFHHRYPWNHCSRQRGHAARGGTVDVMEDGRHGTKADALHRSSCSWKFHGTLLGSDIQ

SEQ ID NO: 174245 - protein, 60 aa, Oryza sativa
  Clone ID: PAT_MRT4530_72204C.1.pep
MGNNLRCVAPELFASPPHGSEDDDVSALAGPLGVGQYPENYKQSIDGYIHLEAPHFLRKY

SEQ ID NO: 174246 - protein, 227 aa, Oryza sativa
  unsure (1)..(227): unsure at all Xaa locations
  Clone ID: PAT_MRT4530_72205C.1.pep
MADDRVAGGTTPPPPPPPPPLDASAFTHTPYYXNVHLLCKELIRSGISDPAGTNLYAVFISNEEKKVPLWYQKASHSGDGFVLWDYHVICIQAKKWRSTXLVWDLDSSLPFPCSFIQYVSDAIRPLSFGNSTYRRLFRVIHAPVFLRSFASDRSHMKDHAGNWIQLPPKYESIVAEDGTTNNLNEYITMSMDDVKDLESMADDVYSSKHGVVINETILPEFFSRLPG

SEQ ID NO: 174247 - protein, 59 aa, Oryza sativa
  Clone ID: PAT_MRT4530_72206C.1.pep
MAMAMVMESEAMYEERKLVRGLARDGHGAVAGTKTSNYFSCVVDVNGSTCNTDEVAIGE

SEQ ID NO: 174248 - protein, 104 aa, Oryza sativa
  unsure (1)..(104): unsure at all Xaa locations
  Clone ID: PAT_MRT4530_72207C.1.pep
HYRVSRCPGGNHTTKTPKTHPSGILLQHLEMPQGKQQNGKQLDNHQLAKPEPRAAHRGEPAKHRNPTDLRTPXCATEEKNKPRKSQKHPKETRSGKKQARAAPL

SEQ ID NO: 174249 - protein, 150 aa, Oryza sativa
  Clone ID: PAT_MRT4530_72208C.1.pep
GKKIKRKKRKKMCISFSSMSSSRRRTNRCCTGRRPPPAALVIAAALLRTGRCRPPPAMLAATVLHSLRWSSPQPSSSAPVVVVLHPLRRSLVVAVLHPLCWLPPSSTRCAGHRCSPLSFPTARYRLPSRIWWPAAEEGAGRRRLKTVARD

SEQ ID NO: 174250 - protein, 97 aa, Oryza sativa
  Clone ID: PAT_MRT4530_72209C.1.pep
MPREVEAQVGDDRGDGTARMETRLGLKRSDSNQEESKPENHRVGNQLGMRSDGPKLHVTASESQAGQFANFNNMMQQQHDNLQAYFRFQGFNPYQVP

SEQ ID NO: 174251 - protein, 77 aa, Oryza sativa
  Clone ID: PAT_MRT4530_7220C.1.pep
SNWKKNMPTRGTRWVVAIHCCMDRRTNVRGHQRANTLIQAGALWWQTAQWGEEYVNTGEPKKMPPIWGGVLHTCIGQ

SEQ ID NO: 174252 - protein, 56 aa, Oryza sativa
  Clone ID: PAT_MRT4530_72210C.1.pep
MAMPWETVACILRNVWALLDGWIAVCCLAADELAGLLRSALGSSVALSFLLWLIIA

SEQ ID NO: 174253 - protein, 67 aa, Oryza sativa
  unsure (1)..(67): unsure at all Xaa locations
  Clone ID: PAT_MRT4530_72211C.1.pep
RAVQKKKRLLSARTILRTNKKREREKRFGLSVPNLCKSFTEFQPEAFQQNDVIAHFDVKIILKKKKX

SEQ ID NO: 174254 - protein, 79 aa, Oryza sativa
  Clone ID: PAT_MRT4530_72212C.1.pep
RVRDAFSEISRSLSNVMAEDSVQCFLNMFLESPSTFAYRFTITSETLTFMIRYNALRCMKAVLEGKAPGLGSMHANPNC

SEQ ID NO: 174255 - protein, 279 aa, Oryza sativa
  Clone ID: PAT_MRT4530_72213C.1.pep
MEGERRAVRTVRVRNISDLAGEREVREFFSFSGEIEHVDIRCDGVATGRTAYVTFKDPKALEIALLLSGATIVDRVVNITPAEDYIYIPVTDQQLVVSEVVGEVTSTAPNADLDQPTEANASPTTGRVYVSKAHDVMTTVIARGSAMRQDAVNKAKAFDEKHQLRANASAKINSFDKRVGISEKINSGITVVNEKVKSVDQRLHVSDKTMAALLAAERKLNDTGSAVKTNRYVSAGTSWLNGAFSKVAKAGHVAGSRTREKFQIAVSNLTAKATADKYF

SEQ ID NO: 174256 - protein, 89 aa, Oryza sativa
  unsure (1)..(89): unsure at all Xaa locations
  Clone ID: PAT_MRT4530_72214C.1.pep
ILKLDQLSEGPIKSNIDRLEARKIELLAQLQECNAELDLEHKKLSDLPQAVEEQKARLESAIKNVADLTKSLKVXPRTDAQDAQAIEEV

SEQ ID NO: 174257 - protein, 412 aa, Oryza sativa
  Clone ID: PAT_MRT4530_72215C.1.pep
MSESIPDKQIVVRFPNHVLPASLRENMGKEGATVDNMDPSCPFLVLEKYDRKKSYEWLNLRAAWVAKSMPNDIIIPDPTPERVRDAFSEISRSLSNVMAEDSVQCFLNMFLESPSTFAYRFTITSETLTFMIRYNALRCMKAVLEGKAPGLGSMHANPNCMSPYGCFPLHEAAERCSPRMIRLLFRHGASANYREDCVYRLVHLLCLPDMIVSLEVIRLLAQKTDNVVDELWNYMKNGKLAQATVLFLAAQKHFRKGKPNGFSIIAQRIFGDYDSLTSDKGNGEAHKQLEERKALLNCQCLLYNIISQAGEALYDYVQTHSEVSHVEVLAHVSSILKEFGFCPKEEYIDTMNLSPYNLDNFYSVVFQEGQTKPVEQTSSPNAAEKKGFAAPFLLLEMSIILQSFVQITTAKD

SEQ ID NO: 174258 - protein, 106 aa, Oryza sativa
  unsure (1)..(106): unsure at all Xaa locations
  Clone ID: PAT_MRT4530_72216C.1.pep
MAGLQPADHSSSEEDDAIIGLLDRSVYDQRILNEAVQHYPHDFPQIPYGRYLFVDFGFPSRMGFLAPYHMYGXHRDRLGRRGAAPLEGXEEHFNHCHSSLRGRLLL

SEQ ID NO: 174259 - protein, 96 aa, Oryza sativa
  Clone ID: PAT_MRT4530_72217C.1.pep
PRVRIDVDFFNTIGTTDMFANLDGITMRNTPCLSNDMHFIEFVLSRARLLTKFWVFRDDSSSFSKPSEEAVIELVKYRRVSPKAKVFFRSMDDYCI

SEQ ID NO: 174260 - protein, 350 aa, Oryza sativa
  Clone ID: PAT_MRT4530_72218C.1.pep
MDGPFTEDEIWNVVKGSPTERAPGPDDFTGAFFKGCWDIIKHDISQMFDSFFRLAGGNFGCINKAILALIPKKDSPQLVHDFRPISLIHSVAKLISKVLAMRLDDLVLHAQSAFIKRRCIQAIFLNPSRADVDSLITLLENFGRATGLQVNLSKSSVVPIRCENIDLQDVLNNFNGNRTGFPITYLGLPLTIGRIKRAHLQPVMDKLHSRLAGTPPPCDEMDKRLFASATKVTIGEGRKASFWESNWIGEQPLKELAPALYNHAKRKGRTVYEGLANDQWILDIRHNLTVELVKEFFEVFYHVWNSGVALTEGVEDTITWRWTANGKYSAKSAYIAQFNGRISLAAAKLI

SEQ ID NO: 174261 - protein, 135 aa, Oryza sativa
  Clone ID: PAT_MRT4530_72219C.1.pep
SRRGCRKLLGRGIDPVTHRPVNAAAATISFHPQPPPTTKEEQLILSKPPKCPDLNLDLCISPPSCQEEDDDYEAKPAMIVRAPELQRRRGGLCFGCSLGLQKECKCSGGGAGAGAGNNFLGLRAGMLDFRSLPMK

SEQ ID NO: 174262 - protein, 177 aa, Oryza sativa
  unsure (1)..(177): unsure at all Xaa locations
  Clone ID: PAT_MRT4530_7221C.1.pep
SNRDRKNCKKKCKKKTPPPEEKRGGEGSAAAGTAPDADGERERKXRGRDGCLRRTPPLLRRAGETGRRAAAAAAALHRRXRTGKKGGRREGKRRRWWERRPAGGXGRGGRWGEGAAPPEGGKGKRRRWXRGGGGEAVSGVGWGTRPSGXGGRGGGVGRVRVRVRVLIRPWADRKGWK

SEQ ID NO: 174263 - protein, 135 aa, Oryza sativa
  Clone ID: PAT_MRT4530_72220C.1.pep
MTNYVRTCRKRVERWRRELAAAAAGDVWGVISTAAGERRAPARMLAGDDVCPDDGGGRRAVVLALISMQRSAMITYNYNIMIKLMMINYTTQKQQRDQSNSIINQGERAEELIVGKPVVPAALMNRPTRGERRFA

SEQ ID NO: 174264 - protein, 67 aa, Oryza sativa
  Clone ID: PAT_MRT4530_72221C.1.pep
ACGLPDIKWYIVRHCSRPMSCCGSRASRHHLSELDDSAGDLLHTPYRISPSMTTGLQSSSTHTLCEF

SEQ ID NO: 174265 - protein, 115 aa, Oryza sativa
  Clone ID: PAT_MRT4530_72222C.1.pep
STPGSRYNLSLSTQAINKVSQARCSGSPPQPHSTSCTLMGAPEWSGDGCSRTLATREARLPAAAAAAVPFDFDPPSFPSRDSGSHQPEPKGKGNHFSPTDGFFPPFWPDREPPGH

SEQ ID NO: 174266 - protein, 163 aa, Oryza sativa
  Clone ID: PAT_MRT4530_72223C.1.pep
MAAAAAVVNYPLVAALVAFALAQSSKFFTTWFKEKRWDARQLIASGGMPSSHSATVTALAVAIGIQEGYRSATFATSVIIACVVMHDAFGVRLHAGKQAEVLNQIVYELPEEHPLSETKPLREILGHTVPQVSLVCMILSNFSYFCGLVNTDIQSRKNRRKIL

SEQ ID NO: 174267 - protein, 570 aa, Oryza sativa
  Clone ID: PAT_MRT4530_72224C.1.pep
MTGQYTLKSDVYSFGVVMLELLTGRKPFDSARLRTEQSLVRWATPQLHDMAVVHRILRRGLSAASPLPSFRGLLLVSPQELGRRPASSSSSAAAAAGDVEAELRAAREDVRQLLKSNPCHPILVRLGWHDAGTYDKNITEWPKCGGANGLLKALFLVIPIKSKYAGVTYADIFQLASATAIEEAGGPKIPMIYGRADVADGEECPPEGRLPAADPPSPAEHLREVFYRMGLSDKEIVALSGAHTLGRARPERSGWGKPETKYTENGPGAPGGQSWTSEWLKFDNSYFKEIKERRDEDLLVLPTDAVLFEDSSFKIHAEKYAEDQDAFFEDYAEAHAKLSNLGAKFDPPKELGRRPASSSAAAAGDAAAELRGAREDVKQLLKSTSCHPILVRLGWHDAGTYDKNITEWPKCGGANGLVNALKLIQPIKDKHAGVTYADLFQLASATAIEEAGGPKIPMIYGRVDVAAPEQCPPEGRLPAAGPPSPAEHLREVFYRMGLSDKEIVALSGAHTLGRSRPERSGWGKPETKYTDIKERRDEDLLVLPTDAVLFEERLKPHRGTSRAGQSTSSY

SEQ ID NO: 174268 - protein, 169 aa, Oryza sativa
  Clone ID: PAT_MRT4530_72225C.1.pep
MTSNRVDGLTWRSSCSVQREHRRAWEAGGREHGCRRRAVGGGRSGGGQRGSGLRAERQWAKQRVQRPAAESRERRRRRCDGGRRLQWGSTAAAKDGPEEATDGWRGDKYGRGARGEAGEEVRRRGGGDDAGEGEGGDDGSTGESEEDGGARRLERGDGVAGRGPPVVEV

SEQ ID NO: 174269 - protein, 322 aa, Oryza sativa
  unsure (1)..(322): unsure at all Xaa locations
  Clone ID: PAT_MRT4530_72226C.1.pep
NPPSSLWAIFGPNSSPSFLSRGPRASSLSRAGSLLPRALYRALHADPLRRRSPAISSRPPPPLPSLPRCAAATYSITAPHRTPASTPSPSSTAGTTFPSRGRATTATHRLQPAAAATLVVAAPRRLRRRQRRAKLYPGPYSISPLRLRKIAASRTTSLALPPSRLPPSAASCRHPHLPHAAPPPPPHSLHPTVPRPWLRRGRASSERRSRRLPCRPPPSFPPPVASPWSSRRRRXSVSTPLPSLFLPLAGRLPCLRAPCAAAGGRPARVPPSLRSRPPPPPALCXAGRAAPPGCPQAVRSALADLGRPRGGRAPEVAVDAVH

SEQ ID NO: 174270 - protein, 155 aa, Oryza sativa
  unsure (1)..(155): unsure at all Xaa locations
  Clone ID: PAT_MRT4530_72227C.1.pep
APVVPPMGKATEKSDVYSYGVVLRRDXAQGRRALESAAPDSMNMVNVVDWVWNLHSKGKVLDAVDPTLNGEYDAGQMMRFLLVGLSCVNPFSEERPVMRTVLDMLEGNSGLLSVPRKKPLLVFVPNAPIDLEGIVSECNQSTVSSGLYELQIDLN

SEQ ID NO: 174271 - protein, 78 aa, Oryza sativa
  Clone ID: PAT_MRT4530_72228C.1.pep
MGGVLRGLDGLHAYQRTTMGGRERAADSEAKVEAADADVDDGGDLDLEADDEGVVHEVEKGHDSRMKRLRMGKTRLDK

SEQ ID NO: 174272 - protein, 107 aa, Oryza sativa
  unsure (1)..(107): unsure at all Xaa locations
  Clone ID: PAT_MRT4530_72229C.1.pep
MTRHFQSRHRLTICRREGSQTNNRNRSLSAGVGXNRTPDFKFEGDRRYSHRVHEYRGAIGWLQGDMVACLARDLELDPRNPRTAGLRAPKLHAKRDNSTNGENKALL

SEQ ID NO: 174273 - protein, 49 aa, Oryza sativa
  Clone ID: PAT_MRT4530_7222C.1.pep
LCCSPMFPVPPTTKPILRTTPKTTPWLKPMPFGCQKFLSLNWYKSGRVG

SEQ ID NO: 174274 - protein, 201 aa, Oryza sativa
  unsure (1)..(201): unsure at all Xaa locations
  Clone ID: PAT_MRT4530_72230C.1.pep
RPPLPPPLCVYDPLPPAPFRRPPPAPPPVHRAAPPSSPXNPPPPAAVFRAARLRGSLPRPVSVLPHCPVVSCLLVLVFSSLPPPPPAPPPPPPPRPPPPSSPPPPPRPRPSPPPPPAPPPPPPPPPPPPPPPPPPSPPLFLPSPSFRPXPLRPRPPAALPPVSFLPSPPSLRCLSPCYPDPPARRTAVSPPPSLAIFLLSP

SEQ ID NO: 174275 - protein, 171 aa, Oryza sativa
  unsure (1)..(171): unsure at all Xaa locations
  Clone ID: PAT_MRT4530_72231C.1.pep
QGISKADTGLPYADERGPRPTTGXVPDHTVPGSPGVLPDTTPANPLVSQHQGSPDXLITQPGVSHSTHVVALXICSDEIPRKRSLSARAGNRTPDFKFEGDRXYPCRVHDCXGATRWVQGNMVACLARDLELDPRNPRTVGLRAPKLHAKRDNSANGENKALLLTSKRAIR

SEQ ID NO: 174276 - protein, 85 aa, Oryza sativa
  Clone ID: PAT_MRT4530_72232C.1.pep
MATRGDATVTVTARQRRGARRGGGDGDAAAVRWDGARHGSTRGARARRRQQSTVAATARQRARGDGMAMARRDVDGDGSSGLKAG

SEQ ID NO: 174277 - protein, 178 aa, Oryza sativa
  unsure (1)..(178): unsure at all Xaa locations
  Clone ID: PAT_MRT4530_72233C.1.pep
EIIFPLGATTERALHLPYADERGPRPTTGXVPDHTVPGSPGVLPDTTLANPLVSWHQGSPDXLITQPGVSHSTHVVVLVICTDEIPXRNRSLSARAGNRAPGTSPGLRFLEIHLVRKNRXGVGFFQGSKVTCLARVLELDPRNPRTPGLRAPKLHAXRDDSTNGEIKVLLLTSKRAIR

SEQ ID NO: 174278 - protein, 214 aa, Oryza sativa
  Clone ID: PAT_MRT4530_72234C.1.pep
MKQLLPVQEAFPGPTVRRRGGDAVRPSPSMPFAWLVGFGELTALSASGPRPEDMHGSWMLQVVLAGQVMARYDLHAYVTCCMDTCVYAYANASHVLDDAFLSRSLAPASSRSECVCVWCVTSGWASMATITYAGLFIYICADYLRIELKDRRSHRTAVRHRLTHAARESGSAVQGGPACDWHGCRTTALCDCYGPAPQRRTAGSVPRNGAARPP

SEQ ID NO: 174279 - protein, 98 aa, Oryza sativa
  Clone ID: PAT_MRT4530_72235C.1.pep
MTGVGDGDTQGRHLGAAPLPSLPDPAEGGTGETGDWQRGADGGRERPCGGSGRIYVMGRAGGGDLHVAAAAVWRQEVGGSSGPTHELVVAQLVIARGG

SEQ ID NO: 174280 - protein, 91 aa, Oryza sativa
  Clone ID: PAT_MRT4530_72236C.1.pep
IEIQYELNSDRDPNRSPTGLGGPSDGSYIFVRGVTGGGIASPWEYSEENARGGEGRVGAIDYFLYIDARYFARVPSTSQRLLPLHNASSGN

SEQ ID NO: 174281 - protein, 37 aa, Oryza sativa
  Clone ID: PAT_MRT4530_72237C.1.pep
KHYKLMRKAGVEVSYNVFEYTYFGFTFFHREESLSNY

SEQ ID NO: 174282 - protein, 111 aa, Oryza sativa
  unsure (1)..(111): unsure at all Xaa locations
  Clone ID: PAT_MRT4530_72238C.1.pep
QPRERKREEREALXAYDXSDPSXPIYXSXXGKVYDXTSGRGFYXPXXAYXXFAGRDSLRAXGKMSKDDXDVSXDLSSLSDKELGVLXXWETKFQAKXPVVGRLTEVKKKKK

SEQ ID NO: 174283 - protein, 49 aa, Oryza sativa
  Clone ID: PAT_MRT4530_72239C.1.pep
RVVTGSLSGAFFFFFVRTTGIFYGLKREGRIEVIYWGLYCHTNPNGSIW

SEQ ID NO: 174284 - protein, 68 aa, Oryza sativa
  Clone ID: PAT_MRT4530_7223C.1.pep
PWHLGTIAVGSAVCHRHRPCPLLSLAPSSQPAITVAVATAVIVSVVWCDGGGEAEGSGGRWSCKVEER

SEQ ID NO: 174285 - protein, 108 aa, Oryza sativa
  unsure (1)..(108): unsure at all Xaa locations
  Clone ID: PAT_MRT4530_72240C.1.pep
DVNDDVSTGGGSGGXARRRTTARRRKRRAPGRRARRGEFTDDQNNGGRATDGAGDEEETAAEIGSTAATALRRSSAVAKRWTGTAATWRSRRWRRRPTTAAATAARRG

SEQ ID NO: 174286 - protein, 34 aa, Oryza sativa [sequence omitted]

SEQ ID NO: 174287 - protein, 62 aa, Oryza sativa
  Clone ID: PAT_MRT4530_72242C.1.pep
SNPRRGNVSEAHVSLLCILVFAAGVELFHPPFWPPLPLPLPTTTLPGCTSLGNTIHHRRRRL

SEQ ID NO: 174288 - protein, 77 aa, Oryza sativa
  Clone ID: PAT_MRT4530_72243C.1.pep
MGKSRLAAQSQEKPPVAKPVSTRSAGKAVDPRGEGGGREVEDNGASSATTEWRASDIPVREADGNEGRWPWQCGRRG

SEQ ID NO: 174289 - protein, 127 aa, Oryza sativa
  unsure (1)..(127): unsure at all Xaa locations
  Clone ID: PAT_MRT4530_72244C.1.pep
RIMFVWPGLKRDVTAYVQSCAICQQXYGEHCKSPGLLQPLPVPLXAWTVISLDFIEGLPKSGGFDTIMVVVDKFTKFATFIPLSHPFTALKVAQLFIQHIYDVFVMPQAIISDRDRIFTSALWQELF

SEQ ID NO: 174290 - protein, 42 aa, Oryza sativa
  Clone ID: PAT_MRT4530_72245C.1.pep
MDAGIVPLNRLLDKSLQMARIRPRISSESDQGILLRTYKIVR

SEQ ID NO: 174291 - protein, 151 aa, Oryza sativa
  unsure (1)..(151): unsure at all Xaa locations
  Clone ID: PAT_MRT4530_72246C.1.pep
LNELVGGSPETEQARQLTDPPYSLGRTILGYDARRSAWLAAHPEFPARVAPAGRPRVLVVTGSAPARCPDPDGDHLLLRAFKNKVDYCRIHGLDVFYNTAFLDAEMXGFWAKLPLLRMLMVAHPEAELIWWVDSDAVFTDMLFEIPWERYA

SEQ ID NO: 174292 - protein, 50 aa, Oryza sativa
  Clone ID: PAT_MRT4530_72247C.1.pep
SHSAGPILHKLFISSCLSCFDDLQFNYRVLHTTALHDATSSTRLLMLQYT

SEQ ID NO: 174293 - protein, 83 aa, Oryza sativa
  Clone ID: PAT_MRT4530_72248C.1.pep
MDEDVEVVAPAAEAVTPPHFRSCVPAAARIGGGGDFGEEEALSPHTETKAAAAGLQLHSTGKTQLGSEPWSSNFVFSPEALRF

SEQ ID NO: 174294 - protein, 983 aa, Oryza sativa
  unsure (1)..(983): unsure at all Xaa locations
  Clone ID: PAT_MRT4530_72249C.1.pep
GDKNPGESLRDYXRRFNECRNTIPEITDASVIRAFKTGVRDHYTTQELATRRITTTRRLFEIVDRCAHMDDALRRKNDKPKTGGEKKPAKDAPESSKKKSNKSGKRKAQVEVLASEYECPPKHPNRQRHEENMSLEKQLALEKSKRVRVVEKAAEATTQDSDSAYPDSGLHVSHIFGGSMAYSSKREYKKVEREVCSTWQGAAPKIKWSEQKIEFSDEDHPKAAVILGRYPIVVEPTIRNIKVARVLIDGGSSINLLFASTLDAMGIPRTYNAIIGRTALAKFMAASHYAYQVLKMPGPKRTITIQGNAKLAVQYDKRSLDMVEHTPSPPTATEPPKKPSDMSGVPREVIEHKLMVRPDAEPIKQKLRRFAPDRKQAIREEELDKLLKAGFIREVLHPEWLANPVMVRKANGKWRMCVDFTDLNKACPKDHFPLPQIDQLVDSTAACELLSFVDVYSGYHQISMAKEIEEKTSFITPFALGNNVEAYVDDIVVKTKTSDSLIDDLRETFDNLRRYRLMLNPEKCTFGVPLGKLLGFLVSGRGIEANPENIKAIENMKSPTRLKEVQKLTGCMAALSRFVARMGERGQPFFVLLKKQDKFVWTQEVEEAFIALKCYLSNPPVLVALQPNEELFLYIAATPYSVRTVIVVEREKVQRPVYYVSEALHDVKTRYPQTQKLLYAVIMTSRKLRHYFQAHGVTVVSSFPLGEVVRNKDVVGRIAKWVVELSQFDVYFVPRTAIKSQVLADCVANWTMPENRLDSQTDNETWIMAFDGALNSQGAGAGFILTSPSGEQFKHAIHLNFRATNNTAEYEGLLAGIRAATALGVKQLIVKGDSELVANQVHKDYKCSSPELSKYLAEVRKLEKRFDGIEVRHVYRKDNIEPDDLARRASTQEPLEPGTFLDVLTKPSVKETNDENSTVTPDICSGATEAECVVADIETSDDWRIPLIKFISSDELPEDDAKAEKRRCEPSRRTSRTSCRQSS

SEQ ID NO: 174295 - protein, 340 aa, Oryza sativa
  unsure (1)..(340): unsure at all Xaa locations
  Clone ID: PAT_MRT4530_7224C.1.pep
GRWISKLTRTTRTCLWVSRKCSLASAPGRSLEPSSSTSSIRRRRQYGPPARFCLLSISFLPHLSLSLSRQRPTRNPTCRRRPRTRGAPAAASXSLLAAETEYDARVDGRRPVKLTSWASAPDLCKKMAKVGEQQPALDLREKMASAATGGGGARGGRWRRATGCGGALPSAGSGGRGGERRPPLPRIRLAVVTTCRRCPPPPPATLQRYRPLSPPAATVHCYRLVGAPSPSPASSPPQPSSTAAAPSSARPTASQRQRRWARCQEVPLSSSLPSSSRSPFFCPFSPQQPARGCTVSRAWRSGDPAPQTARGLIPWLPKGDAEGARRHAHQPRRVQPRDHP

SEQ ID NO: 174296 - protein, 68 aa, Oryza sativa
  Clone ID: PAT_MRT4530_72250C.1.pep
CLTTTVQHEWNRELAQFSKAEIISHCAFACLTTWIRYLTPPEQRPAHKLVSLLGGQYLSHHSHSRHRV

SEQ ID NO: 174297 - protein, 691 aa, Oryza sativa
  unsure (1)..(691): unsure at all Xaa locations
  Clone ID: PAT_MRT4530_72251C.1.pep
HPRRTYDRRQPTAPSVGCRAFNRSLRDVRWPERFXPGAIEKYDGSTDPEEFLQVYSTVLYAAGADDNALANYLPTALKGSARSWLMHLPPHSISSWADLWQQFVANFQGTYKRHAIEDDLHALTQNPGESLRDYXRRFNECRNTIPEITDASVIRAFKTGVRDHYTTQELATRRITTTRRLFEIVDRCAHMDDALRRKNDKPKTGGEKKPAKDAPESSKKKSNKSGKRKAQVEVLASEYECPPKHPXGSDTKRIWYPIHKSDRHSLEDCLVFKKSLEKQLALEKSKRVRVVEKAAEATTQDSDSAYPDSGLHVSHIFXVPWRRYPIVVEPTIRNIKVARVLIDGGSSINLLFASTLDAMGIPRSELTPTDQPFHGITPXSSSKPLGKITLPMTFSQASNFRTEQITFDVAEFDTAYNAIIGRTALAKFMAASHYAYQVLKMPGPKRTITIQGNAKLAVQYDKRSLDMVEHTPSPPTATEPPKKVSKTTKTPKPEGVIKIVPLSSANPDKTELALITFLRDNVDVFAWQPSDMSGVPREVIEHKLMVRPDAEPIKQKLRRFAPDRKQAIREEELDKLLKAXFIREVLHPEWLANPVMVRKANGKWRMCVDFTDLNKACPKDHFPLPQIDQLVDSTAACELLSFVDVYSGYHQISMAKEIEEKTSFITPFAVFCYVXKMPFGLITAGNTGCRN

SEQ ID NO: 174298 - protein, 889 aa, Oryza sativa
  Clone ID: PAT_MRT4530_72252C.1.pep
MTGSENVVATTLDDSMSKDPPAVAGNRTSTSSEPEKDPSAAKLCPSDKNHEPTRTTSEVTRNTIPEITDASMIHAFKTGVRDRYTTQELATRRITTTRRLFEIVDRCAHADDALRRKGDKLKTWGEKKPAKDAPESSKKKSRKSGKRKAQAKVLAAEYANPSKRLNPQGGDEKKIWCPIHMSDMHSLEDCLIFKKSMAKQLALEKGKRVRVFEKADEAAAQDSDSAYPDSDLHVSHIFGGSTAYSSKREYKKVEREVCSTWQWAAPKMKWSEQKIEYSDEDHPKAVVIPGRYPIVVEPTIRNIKVARVLIDGGSSINLLFTSTLDAMGIPRSELTPTDQSFHGITPQSSSKPLGKIMLPMTFGQANNFWTEQITFDVAEFDTAYNAIIGRTALAKFMAASHYAYQVLKMPGPKGTMTIQGNAKLAVQCDKRSLDMVEHTPSPPATAEPPKKPSDMPGVPREVIKHKLMARPDAKPVKQKLQRFAPDRKQAIREELDKLLKAGFIREVLHPEWLANPVMVRKANRKWRMCVDFTDLNKACPKDHFPLPRIDQLVDSTAGCELLIFLDAYSGYHQISMAKEDEEKTAFIMPFSVFCYVKMPFGLITAGNTFQHTVQGALSNQLGNNVEAYVDDIVVKTRTSDSLIDDLRETFNNLRRYRLMLNPEKCTFGVPSGKLLGFLVSGRGIEENPEKIKAIKTMRSPTRLKDLQKLTGCMAALSRFVTRMGERGQPFFALLKKQDKFVWTQEAEEAFITLKRYLPNPPVLVAPQTNEELFLYIAATPYSIQKLLYAVITTSRKLRHYFQAHRVTVVSSFPLGEVVRNKDVVGRIAKWVVELSQFDIYFVPRTAIKSQVLADFVADWTMPENRSESQTDNETWKMAFDGALNSQGAG

SEQ ID NO: 174299 - protein, 81 aa, Oryza sativa
  unsure (1)..(81): unsure at all Xaa locations
  Clone ID: PAT_MRT4530_72253C.1.pep
GRGAIRCSKHPIKSYRWYNVVXDFPREYRVALDSNAFVFGXGHGGVGXMVRITARLPREFQEYQKQVSTTGLTHSKSFPRP

SEQ ID NO: 174300 - protein, 864 aa, Oryza sativa
  unsure (1)..(864): unsure at all Xaa locations
  Clone ID: PAT_MRT4530_72254C.1.pep
MSHYIDPRTSVPQYPLYPVYGYPPSTVARQVGELGAQDSTTMTSSFVNNRANTGPIQRIPTSTMLVWTQVGEIVFPVYTTVPISAGPLITGNENAMATNPDGPMSKDPPAVAENGTSTSYDPEKIPSATKPCPSDKDCEPTRTTSEVTKSCNTFEEAATRAQPERPTVGGADGEPPEQRTSPARATPPPRGTGDLRDHLNSRREARRAXDNKNRSRHHVSSRRRENEERGGRSNEDQHHRDCHNRRDRDNREQRTPEDNGRGHRHEEDDNGDRRQDNNGGRXXNSREPERRPRNRMPEPSEPSSSSSSSSSSTSSDRRPRRTHDRRQPAAPSAGCRAFNRSLRDVRWPERFRPGAIEKYDGSTDPEEFLQVYSTVVYAVGADDNALANYLPTALKGSARSWLMHLPPYSISSWADLWQQFVANFQGTYKRHAIEDDLHALTQNQGESLRDYVRRFNECRNTIPELATRRITTTRRLFEVVDRCAHADDALRRKNDKPKAGGEKKPAKDAPESSKKKSGKSGKRKAQAEVLASEYERPPKHPDPQGSDTKRIWCPIHKSDRHSLEECLIFKKSLERQLALEKSKRVRVVEKATETTTQDSDSVYSDSDLHVSHIFGGSTAYSSKREYKKVEREVCSTWQGAAPKMKWSEQKIEFSDEDHPKAAVIPGRYPIVVEPTIRNIKVARVLVDGGSSINLLFASTLDAMGIPRSELTPTDQPFHGITPQSSSKPLGKITLPVTFRQASNLRTQQITFDVAEFDTAYNAIIGRTALAKFMAASHYAYQVLKMPGPKGTITIQGNAKLAVQCDKRSLDMVEHTPSPPATAEPPKKVIRTTKTSKSDGTIKIVPLSSANPDKTVKIGASLNEK

SEQ ID NO: 174301 - protein, 113 aa, Oryza sativa
  Clone ID: PAT_MRT4530_72255C.1.pep
KGHPPSFWGRSKKKKGGRFFPLIYFKRGGLFKIGETKTGGGETIGPIPWRELNRGKPPPVWISRALDFFHQGGTTPNQGFEGPPPLEFLPGVFTLPWIPGARKRGETPQDGGA

SEQ ID NO: 174302 - protein, 139 aa, Oryza sativa
  Clone ID: PAT_MRT4530_72256C.1.pep
SHHTPVQRAYSSPQHQTSAHRPPRALPPARPLTRSNPAHGFHRADARHPTPPRRGPATSVPNSCPPVPAPRQAPPPPPRARVSSPGPDPLSPPPPADLPPPSSGQIWEGGGGEPPPPPLAPSSPLPPCAAGRRAPPRAV

SEQ ID NO: 174303 - protein, 107 aa, Oryza sativa
  Clone ID: PAT_MRT4530_72257C.1.pep
NMHGVPYDFRYAAPIPGQASQVYSRHFKEFMELVEAASRKHRKKAIILGHSLGGMVVLEFVRSTPLAWRNRYIEHLFLVAPTLAPGFMGPVKNLAGNDILCVPDATD

SEQ ID NO: 174304 - protein, 110 aa, Oryza sativa
  Clone ID: PAT_MRT4530_72258C.1.pep
LCMSNDEDCEHLFVSCPYTSNVWRKIKGWIGAGFQLPAELGLDLGDWWLEWWQVFQTSQRSAFDTLVLLVCWMIWKERNAQSRTAGFLFGAIKDEAAIWKEAGVFNVLGE

SEQ ID NO: 174305 - protein, 56 aa, Oryza sativa
  unsure (1)..(56): unsure at all Xaa locations
  Clone ID: PAT_MRT4530_72259C.1.pep
FYNQGGASDYDVSIXNDDTXTAEAFELVYGEMKKTLERLDPGETSLHAFVLGTKVQ

SEQ ID NO: 174306 - protein, 76 aa, Oryza sativa
  Clone ID: PAT_MRT4530_7225C.1.pep
TLTTSHNRLTLHGLKSILNMPSTRRFVNCTYDNESNRRWIMCMQVNTIDVMKMPKTIIYMPPLIPDDLTKQTDDLL

SEQ ID NO: 174307 - protein, 512 aa, Oryza sativa
  Clone ID: PAT_MRT4530_72260C.1.pep
MGCFLSKPAGAGPLPPNDAAALPADNPADPEAAAANGGADSAAADGGGDDKDAAKRAVPVFREFGLAELRAATKGFSADLIVSESGEKAPNVVYRGRLDGGRLIAVKRFSRLSWPDPQQFLAEAAGVGKVRHKRLVNLIGCCAEGDERLLVAEYMPNDTLSKHLFHWDKQPLPWEMRLRVAYYIAQALDHCNAENRKIYHDLNAYRVLFDEEGDPRLSSFGLMKNSRDGKSYSTNLAYTPPEFLRTGRVIAESVIYSYGTVLLDLLSGKHIPPSHALDLIRGKNILLLMDSSLEGQYANEDASKLVDLASKCLQFEARDRPNIKYLLSSVGPLQKQKEVASHVLMGITKATAVLPTILSPLGKACSGMDLTAVHDILLKTGYKDEEGAENELSFQEWTQQVQEMLNTKKFGDIAFRDKDFKTAIDYYSKLVGMMSVPSATVFARRSFSYLMNGQSELALRDAMQAQVCMPEWPTAFYLQALALSKLGMETDAQDMLNDGATFEAKKQNSWRG

SEQ ID NO: 174308 - protein, 159 aa, Oryza sativa
  unsure (1)..(159): unsure at all Xaa locations
  Clone ID: PAT_MRT4530_72261C.1.pep
GRIPGRPPVREVQDSPLDACRQVLDRQLTDRERFQAMFRRPVALGLQMHCCQEHATTRACECXCAVIRRMVRSYKESMPMPLEQGWSSSSSEYYSGXGSSSEQGYYGEGLSEEGYYGEQHQQPEMTRVRLTMARQYAEQLPSMCRVEPQQCSIFYDGQY

SEQ ID NO: 174309 - protein, 89 aa, Oryza sativa
  Clone ID: PAT_MRT4530_72262C.1.pep
VGEQVFLKGKAHCTSHLSGTNKTSLGGTPMSPPLCIMLRRLFSISKAKKCSTKKKETMASGLVLFGNSMHFKFSLIVHDANNSKIAKTR

SEQ ID NO: 174310 - protein, 286 aa, Oryza sativa
  Clone ID: PAT_MRT4530_72263C.1.pep
MEGDSARRLALLGLCLGLLLLAPSHLASAAAVEDGLLSNGDFETAPAGGFVKSASVAEGASSIPGWTINGTVELISAGQHQGGMILIVPQGDHAVRLGNDASIGQVVQVEKGSEYAITFSAARTCAQLESLNVSVLGGASQTVDLQTLYNIEGWDAYALAFQATDEQASLEFRNPGMEDDPTCGPILDNVAIKKLFTPDKPKDTVVSNGDFEEGPWMFPNTSFGVLLPTPLDAHTSARRCPVLDPSTPPRWPMHSRGKGISSIGAAGTTRTPPELAQDRHLRMCPR

SEQ ID NO: 174311 - protein, 807 aa, Oryza sativa
  Clone ID: PAT_MRT4530_72264C.1.pep
MAEALVFVVLQKIGAILGGQVLNEIRSQFGKKSLIFEVENSVMELASEFRVMQAFINHVGMCSHQNAAYEAWLDEVKSVGFDAEDIIEEYAYLIAQTSNEGGLIKSVLHRSINAWCHIATQLKQIEARLQKLTAMKDRYGILISEQKLGSNPSHDDLKLMSDSLYFYSQDDIVGNEEELAWITQRLIQGRKSRTVISICGMGGGRVIITTRNEDVAILADEDHCIMLKTLQWKEAWNLFSRKAFPSRKENQCPESVVQWAEKIVDKCKGLPLAIVAIGSLLSHKKKEENEWKLFYNQLNWQLINNPELNFVIAVLNLSFEYLPSNLKYCFLYCGLFPEDYLIKRKQIIRFWIAEGFVEETGANITMEELAEEYLKELAQRSLLHVAERNVYGRAKSFQMHNLVRDMVVSKCKTYKFSDLVVDHCVTKHKYKTRRISVLEADHASEAPTYGEKVRSFILFDKKVPYSWLETASRDFRLLRVLSLRRASIHKVPDVVSNLFNLRYLDLAYTRVKVIPRSLCRLNKLQMLDLWFTGVVELPREIKLLTEIRYMVATVMSEDNHRIFNCFLPVRFPCEVCHLKDLQVLGYIEASKDMISNLRNLNQLRNLFMMKVEHNYLTELWASIKRMPNLVRLDIISCDSDEVFNMEHLDPLPELETFHLRAKLQDGVLPKMFHGLVKIRDLEMGWSGLQVDPVCTFSHMSNLTELRLYRVYEGVLLSFQAGLFPKLKKLSLADMENLTWIEMEDGTMQSLNFIALIGLRNLKVVPEGFQYLMSLQEMFLQDMPQEFIKRAQREDRVYIQHIPKIRKF

SEQ ID NO: 174312 - protein, 81 aa, Oryza sativa
  Clone ID: PAT_MRT4530_72265C.1.pep
MEASRKVFSAMLLMVLLLAATGEMGGPVMVAEARTCESQSHRFKGPCARKANCASVCNTEGFPDGYCHGVRRRCMCTKPCP

SEQ ID NO: 174313 - protein, 129 aa, Oryza sativa
  Clone ID: PAT_MRT4530_72266C.1.pep
VPTNAAPAWSASTSSTLCREELFLFRPSPSGRTHPPRPLGPGKESSFSARRRREGLLLVGPSSPGRNRPSPPVGAGNDDFNSAVPAHTPSVPRLSAPLLIFSPDPTHPGFNAKTVKVGLYTSKNDEYRH

SEQ ID NO: 174314 - protein, 69 aa, Oryza sativa
  Clone ID: PAT_MRT4530_72267C.1.pep
HPPLDCLSCCPPAVKGRILQIQAPRRVALRVRAAVAAVAVEAAEVDYSSNISVFLMEVFDLFGGQAGTV

SEQ ID NO: 174315 - protein, 106 aa, Oryza sativa
  Clone ID: PAT_MRT4530_72268C.1.pep
MERGCGLHKHLDNLLLQDDGRLFHVDFSYMLGEQPHRFAPPSPPMKLCKEMVEAMGGTESEYYARFKSYCCEAYNILRKSSNLILNLFYLMTGSNIESITDKGTSK

SEQ ID NO: 174316 - protein, 1072 aa, Oryza sativa
  Clone ID: PAT_MRT4530_72269C.1.pep
MPSAPDEAQAGVTTGTADHSSCSGGKEFRFILSQDISLPLSFRVNRFVPDRTLLIERSAPVLFVECTLYIDGVQFVFSTNSRLKSLGSPYCWNELVTLSAKYRDLTPFSHLAFTVRDMSFGEDNIYIVGGTTISLFNSKNQLKTGRLRLRVWPNKMADGSLSTSTPGKVPKTKREEIERLERVANKYIRGQIPHIGWLDNLIANAADKLEKETLNTELSFRLHYLTIQFFFVPNFMEEYGAKLHTSVPSSLVDISKNKLVIACDPEIGRINPSEHKHSVLAWSLARGVNDREMKPSSVDQKLIQNILKYPPTRTLNVDEKQLLWKFRFYLTSEKKALVKFLLSVEWSDIQFMVIEIYRCANTNFSTIVTATEAKQAVALIPRWESIDVADALGLLSPVFQNEEVRAYAVGVFERASDEELQCYLLQLVQGLRFERSDRSRLAHFLVNRALSNYELASFLRWYLVVELHDPSHARRYLCTYEMLEDAIMRSVHKEENGFQVWQSLIEQAELTAQLRSIMKELSNVKHDAQTKGRILEQLFSGIFSELKNFSEPIPSPLTPTVLLDGIVPEESLVFKSANYPLCIAFSTVNGGTSKMIFKKGDNLRKDQLVIQIISLMDRLLKSDNLDLHLTPYQVLATGLEEGLVEFIPSISVAKIIQKTGSIESYLQKCNPDEDGPFGITAQCLETFIKSCAGYSVITYILGIGDRWLWLKGKTPLGTEVAGSGLMVRSAVLLECILVRIWPFWFEESYECHGQDNDKLVGNAGTDGARRSIWGLNAAGSEVAVPESHLQGHLDNLLLQDDGRLFHVDFSYMLGEQPHRFAPPSPPMKLCKEMVEAMGGTERYLFFACDFHFSEYYARFKSYCCEAYNILRKSSNLILNLFYLMTGSNIESITDKGTSKFPMSTHPRQSMASKPPEWDLQAQARGVTGEVELYLAGASRRHSHVLRVARRQSLSLTTLAHGGGAWGAWRELERELELAAVGETTGVQGGGGKGGLEFTDAWRRRHSGMWREAKARPRRRMEWGRLRDMYVAGSRRSSSPMHGEGGTWGDGVQPHRSGGGGGRCLVGRGDGAH

SEQ ID NO: 174317 - protein, 136 aa, Oryza sativa
  Clone ID: PAT_MRT4530_7226C.1.pep
MAGDEVDAPKALLPPRPAILVASAGQHLPRSKGKWYAPPSYGRSRRARPVRCPDAARRPSSRTPPEPEPPVGLVDLSPFACLRFTSSTPHPTSIPTTTPPAVHTPRSPIPSSSEERVNPAAPLLASAALLLPGDLI

SEQ ID NO: 174318 - protein, 157 aa, Oryza sativa
  Clone ID: PAT_MRT4530_72270C.1.pep
VWDMSSGEDNIYIVGGTTISLFNSKNQLKTGRLRLRVWPNKMADGSLSTSTPGKVPKTKREEIERLERVANKYIRGQIPHIGWLDNLIANAADKLEKESERTENLHSSLIVELCSFEHRVVFQVALFDYSVLFCSKFHGGIWSKVAYISPFILSGYI

SEQ ID NO: 174319 - protein, 122 aa, Oryza sativa
  Clone ID: PAT_MRT4530_72271C.1.pep
MSVCPVPTHVPCWSTPARDGNGEFTVGGHTRVPVTTVIKFHRPRPRQSRRGYIFTNPDHRAVNFSPWLPRSRPRNYISHAHIDACRRRAAQSRRLPVARQRREQESGGARERRRHERLQRAA

SEQ ID NO: 174320 - protein, 34 aa, Oryza sativa
  Clone ID: PAT_MRT4530_72272C.1.pep
PLSQSHARTPAGGTQRLASRPRLERRVHANADEA

SEQ ID NO: 174321 - protein, 117 aa, Oryza sativa
  Clone ID: PAT_MRT4530_72273C.1.pep
PVFDMMETCLIKQYKFKPSTKLRFTTRTLYVGITMFIGMTFPFFGGLLGFFGGFALAPTTYYLPCIMWLIIKKPKRFSFSWWINWSFIVVGVLLMILAPIGGLRSIILSASNYKFYQ

SEQ ID NO: 174322 - protein, 75 aa, Oryza sativa
  Clone ID: PAT_MRT4530_72274C.1.pep
IPFYVPGGAIPTSPHITILTIGFKLNFPCALLSDGVRNSIRYLELGFCIFRPATELGPFRRLTKLHLVCCSGSAA

SEQ ID NO: 174323 - protein, 49 aa, Oryza sativa
  Clone ID: PAT_MRT4530_72275C.1.pep
FFFFFFQIYTVKCKAAQEKGQGLICKELFKQFTEKTILQSYHFQWFMSE

SEQ ID NO: 174324 - protein, 40 aa, Oryza sativa
  Clone ID: PAT_MRT4530_72276C.1.pep
SRYEQNLPGVDIFVCTADPQSEPPSLVISTIFLCFMGGLH

SEQ ID NO: 174325 - protein, 73 aa, Oryza sativa
  Clone ID: PAT_MRT4530_72277C.1.pep
MVLKPCVTVRVGVEGEEQRRFTVLLGHPKHPLLGELIDEAEHEYGFAKQGTICHRHLWPRRHGEGGCGDASLR

SEQ ID NO: 174326 - protein, 796 aa, Oryza sativa
  Clone ID: PAT_MRT4530_72278C.1.pep
MDGLIRPNWLDTPIQYLRGLFFGALGIEIHASEYRYWTAAVTDDPLSVLSSWSESDPDPCRWPGVTCSNVTAAGGEPRRRVVGVALAGKNLSGYIPSELGSLLFLRRLNLHDNRLAGGVPAALSNASSLHSLFLYGNRLTGALPAALCDIPRLQNLDVSRNALSGGLPGDLRNCRSLQRLILAGNSFSGEVPAGIWAEMASLQQLDISSNGFNGSIPADLGELPRLAGTLNLSHNRFSGVVPPELGRLPATVTLDLRFNNLSGAIPQTGSLASQGPTSFLNNPGLCGFPLQVPCRAVPPPTQSPPAPTTTTTTTTPSSASAAAAAASEHHQPIRTSLIALISIADAAGVALVGVILVYVYWKVKDRKKQGRSSTVAAGDENESRHGLCRCIWGHRGVDSDTDTDDSSASENGGGGGKYGEGELVAIDRGFRVELDELLRSSAYVLGKGGKGIVYKVVVGNGATPVAVRRLGGGGGGGERCKEFAAEARAVGRARHPNVVRLRAYYWSADEKLVVTDFVGNGNLAAAMRELAGEAGVLAGRPGQTPLSWSTRLKIARGAARGLAYLHECSPRRFVHGEVKPSNILLDADFTPRVADFGLARLLAVAGCADDVVDAPPAAPSSGGLLGGAIPYAAKPASSVAADHRGGGYRAPEARTAGARPAQKWDVFSFGVVLMELLTGRGPGDHASPSTSASFSAPSSSSAATTDRSGSGEHGHGAGVGGAVVPEVVRWVRRGFEEEARPVSEMVDPALLRDAPPLPKKEVVAAFHLALACTELDADLRPRMKAVADTLDKIASS

SEQ ID NO: 174327 - protein, 348 aa, Oryza sativa
  Clone ID: PAT_MRT4530_72279C.1.pep
MGDEKAAPKAGATADPVVLRMELHCAGCAQKVKKSIKHLAGVESVAADVATNTVVVAGTAEAAALKARIEAKTKKPVEVVSAGGGGAAAKKPAAEPKAVKDDGGEKKDAQAKEEKGKKQPPEEKKPKEETVLLRIRLHCDGCADRIRRRIYKIKGVKEVVMDGNAKDEVKVSGTMDVPAMLTYLTEKLNRAVEAVAPGSKKDEKKKDKGGDADGGEKKKDAAGGDKKDKGKSIEVAGPSTAAAAASMAPAPAEASTYHVSPYGHGYFAYPQQQGPPPSYYQYYGGGNGDGVGYANPNAGGAGGYYHPHPNDVPTYQPPPSYPPYPYQLDMSPAPQLFSDENPNACSVM

SEQ ID NO: 174328 - protein, 111 aa, Oryza sativa
  Clone ID: PAT_MRT4530_7227C.1.pep
MARVQQQQQQQHYATFNNNQINRRTPYAPALSIGTGCRWPADGRYPRYLPSTAGEGGRRAPPPDPGSGEVAGTAAVRLRSGHLLLVGGGGADSRGANSATPGHLVGGGGGD

SEQ ID NO: 174329 - protein, 56 aa, Oryza sativa
  Clone ID: PAT_MRT4530_72280C.1.pep
QNPADMTALVQSLQTQTQSTFVLMSQNSVSKINESATRIDAMELRVHHLIVEMGTD

SEQ ID NO: 174330 - protein, 90 aa, Oryza sativa
  Clone ID: PAT_MRT4530_72281C.1.pep
WRARSPRPYYLVLVTSSPSSLSYHRLARRLAPPLVRRRTSPSGPAASASPLGGGGGRRRWAVVARRRRARIYRRGEQSRAEVGAGGPRAV

SEQ ID NO: 174331 - protein, 44 aa, Oryza sativa
  Clone ID: PAT_MRT4530_72282C.1.pep
AKLALKPILPLGLMAYDDLDRTGHPALGLRSSQGNPGQQFTILV

SEQ ID NO: 174332 - protein, 67 aa, Oryza sativa
  Clone ID: PAT_MRT4530_72283C.1.pep
GSGHAGPARPCRAGPPCRGIGPGTAQHPNRAGMGPTTIRPCRAWARPKSPALGRAVGPRALWPTILH

SEQ ID NO: 174333 - protein, 261 aa, Oryza sativa
  unsure (1)..(261): unsure at all Xaa locations
  Clone ID: PAT_MRT4530_72284C.1.pep
PAGFYCGNEGDIAWFAANSGLVWEAATRFAALVVFAEHRYYGESMPFGSKDKAYNNSKSLAYLTAEQALADYAVLLTDLKKNLSSEGSPVVLFGGSYGGMLAAWMRLKYPHIAVGALASSAPILQFEDVVPSTIFYDLVSNDFKRESLSCFQTIKDSWKALDAQGNGQDGLLKLSKTFHLCKTIKNTXXELSDWLSSAYSYLXAMVDYPMPADFMMPLPGXPIXELCTXIDNQPDGTSILERXYAGVNXILHYTGTGDCLI

SEQ ID NO: 174334 - protein, 549 aa, Oryza sativa
  Clone ID: PAT_MRT4530_72285C.1.pep
MRPLPLLLLILAAAASALARAPPRFPVPHARPRRGVVGAEEAVRGYDYETRYFRQRLDHFSFLEEEGEEGDGFFQQRYLVGRGGGWAGAGGPIFFYCGNEGDIAWFAANSGLVWEAATRFAALVVFAEANLSSHLAPVSVFFLGCALIVRDPIPFTCSLQHRYYGESMPFGSKDKAYNNSKSLAYLTAEQALADYAVLLTDLKKNLSSEGSPVVLFGGSYGGMLAAWMRLKYPHIAVGALASSAPILQFEDVVPSTIFYDLVSNDFKRESLSCFQTIKDSWKALDAQGNGQDGLLKLSKTFHLCKTIKNTGELSDWLSSAYSYLAMVDYPMPADFMMPLPGNPIKELCTKIDNQPDGTSILERIYAGVNVYYNYTGTVDCFDLNDDPHGMDGWDWQACTEMVMPMSYSEDSMFPADKFNYTSYEKDCINSFGVEPRPQWITTEFGGHNISLVLERFGSNIIFFNGLLDPWSGGGVLKNISESVVAIIAPLGAHHIDLRPASKDDPDWLVRLRESELGIISGWLSDYYGARRGALLQRAAPIPWTLLHHS

SEQ ID NO: 174335 - protein, 478 aa, Oryza sativa
  Clone ID: PAT_MRT4530_72286C.1.pep
MVRHRSSGSDGEDDEEGRLSCCRRPPPPLSLPLSPVGVLPGILRLASWSVGSARSGAVVGGSRPPVAPAVAGKAPAEEAGQGARGGEHRRLKPSPPVASWPTVAVPAVVGAAPAVSGAARRDQGESERDKGAAALLQLKRSFSATTASATAFRSWRAGTDCCRWAGVRCDGGRVTFLDLGGRRLQSGGLDAAVFSLTSLRYLNLGGNDFNASQLPATGFERLTELTHLNISPPSFAGQIPAGIGSLTNLVSLDLSSSIYIVNQGDDDVSIMSNLLPPWGFSRVNFEKLIANLGNLRELYLGLVYMSNGGEGWCNALANSTPKIQVLSLPLCQISGPICQSLFSLRSLSVVDLQGNDLSGAIPEFFADLSSLSVLQLSRNKFEGLFPQRIFQNRKLTAIDISYNYEVYGDLPNFPPNSSLIKLHVSGTKFSGYIPSSISNLTDLKELSLSANNFPTELPSSLGMLKSLNLFEVSGLGLL

SEQ ID NO: 174336 - protein, 201 aa, Oryza sativa
  Clone ID: PAT_MRT4530_72287C.1.pep
VDSRGSPGGPTCHVTEARLTRVSGEWSGEEELKKPFVLERAAIRSNLSPLCLAHQIEQEKSRGRCGFLCWSVARIDGGGGRRRGDGGGDEGASDAAAAAGVVEEFVLCCKFARQTEPSKVLAGQSRVDVDAARKKKQARAKNGDTPEPDAAGGARARASRRAKRGPGSYRGVRQRRWGKWVSEIREPNRGKRHWLGTFGSA

SEQ ID NO: 174337 - protein, 60 aa, Oryza sativa
  unsure (1)..(60): unsure at all Xaa locations
  Clone ID: PAT_MRT4530_72288C.1.pep
HPMPEVFGAFRDGYIERAAASLPAFCKVDIPNGVGGVXYWLPVIGLLALCMRLVAACSCV

SEQ ID NO: 174338 - protein, 74 aa, Oryza sativa
  Clone ID: PAT_MRT4530_72289C.1.pep
QPCRVAMTNMMTILKMILTRLLIRAPLGGRHGDDDADHASCLAGCDGDEPVHLPLPLHSSSHDPSRDPQLRAQL

SEQ ID NO: 174339 - protein, 135 aa, Oryza sativa
  unsure (1)..(135): unsure at all Xaa locations
  Clone ID: PAT_MRT4530_7228C.1.pep
LSTSFPICYLIYNCLASLLGRCNGVGIMFMYMIALCHDDDIRVVFGSISEVLRPLDIIIWDYMLRDSRGGPLMVTAQYGYSSTLAYSPKXISWGGYSSVFSPGWMAMTGCRKELGNQGWYLETLGGHRRKGKGKR

SEQ ID NO: 174340 - protein, 65 aa, Oryza sativa
  Clone ID: PAT_MRT4530_72290C.1.pep
MNVCLMQRMRNSEKEPEKQRHSCGGEKKRSKGFGGWKLRTPFEPDDVTTPATLSKFGPSRITTFQ

SEQ ID NO: 174341 - protein, 67 aa, Oryza sativa
  Clone ID: PAT_MRT4530_72291C.1.pep
LLNFFLPPPPTQSSEGGYKEHVTPWFLKGQEPDNGPFAPIFYIGIPPLYKHFTNPLLNSEDAITSQD

SEQ ID NO: 174342 - protein, 67 aa, Oryza sativa
  Clone ID: PAT_MRT4530_72292C.1.pep
MAGPSTSVSAAPISSSTGSSPRADLFCHYRPALGFIVLATARKVLCVFPRREVRRGSHPPPFPSFSH

SEQ ID NO: 174343 - protein, 244 aa, Oryza sativa
  Clone ID: PAT_MRT4530_72293C.1.pep
MPTCQCSVKLDAATAAHWLAAVEEGEPSAARTPTSASLRSAATTGFAKEEHGELNTHRDGVGGGGGRLGQIRGVVSVVGGWPGREGRRVGRLEAVVVPQRSEAKVGLASALGSPPSFHGFLGEGGRRSARTPTTVGTNLARRSSSTAATLGSPSSAAASRRAVAVVEMVRRREREEQRSAPPRPLQPEWLDGLGRGSERLGGRRCPACSHWPARDSWRATAATRRRRSGAMKAIPRPDLTTATR

SEQ ID NO: 174344 - protein, 402 aa, Oryza sativa
  Clone ID: PAT_MRT4530_72294C.1.pep
MSLHRFVNLLMENGEKGVYSLRRLNLSRHPLFYSSTEVSAVQDLPALGEEGYVYYPFKGYGESSKQAFEVESIRLPSPTVSLLPTPSSTDKMCKFDCFSVSESKIICTDQAARTFLYDLDEHCVTSMPSLHAPKYSPFSVSVAIQGEKGEGESSSSSSRRLYVMEEVLLPERGTGSSYQFEAFDYRKPGPEYLVKAWHCDPLPPPPFVRDPRYVPSPVSSYAVVGNFICISTKGIGTYCFDTVSCSWSHAGDWMLPFCGKGEYVPELKLWFGVSAKNNYAPCASDLSPVVRAEPPKPGCIWEDLNLPEDWRPCRMSDLVNLGSGRFCIIRFFQPSGNRDYMKDQIDQTIAVFSGVEVLPDDNKAAGNGKGKGKQNAKGLRMIKHKSRKCTFIEQINNVESVL

SEQ ID NO: 174345 - protein, 47 aa, Oryza sativa
  Clone ID: PAT_MRT4530_72295C.1.pep
YGEPRAQDRHLMWSLLRRIRSNSGDPWLMIGDFNEAMWQTWVILMIR

SEQ ID NO: 174346 - protein, 525 aa, Oryza sativa
  Clone ID: PAT_MRT4530_72296C.1.pep
MVTQLTYLAASAGVCLASALAIALLSIALYIIGVVASFAVLCAKEFAERAHDRPPLVGTVFRQLKNFDRMFDEHVNYATAHRTSRIVYPGHCEVFTSDPAVVEHVLKNSFSKYSKGDFLTTAMKDLFGDGIFATDGDMWRHQRKLASYEFSTKVLRDFSSDTFRRNAAKLAEKISCAAANRISINIQDLLMRATMDSIFKVGFGFELNTLSGSDESGIQFSKAFDEANSLVYYRFVDIMWKLKRYLNIGSEAKLKRNIQIIDSFVMKLIHQKREQMKIAADYKTKEDILSRFVLASEQDPGTMDDRYLRDIVLNFLIAGKDTTGNTLTWFFYLLCKNPIVQDKVALEIREFVEWSKEDNTIESFTKRLDEGAISKMHYLQATISETLRLYPAVPVDAKMADEDDVLPNGYRVVKGDGINYMIYAMGRMTYLWGEDAQEFRPERWLVNGVYQQESPFKFVSFNAGPRICLGKEFAHRQMKIMAATLIHFFKFRLEDESKEPIYKTMFTLHIDNGLHLLANPREISP

SEQ ID NO: 174347 - protein, 1741 aa, Oryza sativa
  unsure (1)..(1741): unsure at all Xaa locations
  Clone ID: PAT_MRT4530_72297C.1.pep
MGKNTQFWIHRPKIVFLAETRQDQYMVQNRIGLRRCFTVNGVGKGGGLALFWDESMNVVLKSYNSRHIDVLITELDCCTWRATFVYGEPRAQDRHLMWSLLRRIRSNSGDPWLMIGDFNEAMWQTEHKSHRKRSESQMRDFREVLSECDLHDIGFQGAPWTFCNMQREGRNVKVRLDRGVASPAWSSRFPQAVITHLTTPSSDHAPLLLEREETTLARPMKIMRYEEVWERESSLPEVIQEAWTMGADASTLGDINDKMKVTMTKLVSWSKDKIGNVRKKIKDLREKLGELRNIGLLDTDNEVHSVKKELEEMLHREEIWWKQRSRITWLKEGDLNTRYFHLKASWRAKKNKIKKLKKNDGSTTMNKKEMKEINRSFFQQLYTKDDNLNPVNLLNMFHEKISEQMNADLIKPFTNEEISDALFQIGPLKAPGPDGFPARFLQRNWGLLKGEVIAAVRNFFEDEVMQEGVNDTVIVMIPKKNLAEDMKDFRPISLCNVVYKVVAKCLVNRMRPMLQEIISEAQSAFIPGRLITDNALIAFECFHSIKNCKRENQNFCALKLDLSKAYDRVDWEFLNGVMERLGFCDKWRRWIMXVHWIAWEKILYPKSHGXLGFRDMKCFNQALLARQAWRLLTSPDSLCARVFKAKYYPNGNLVDTAFPTVSSSVWKGIQHGLDLLKQGTIWRVGNGHNIKIWRHKWVPHGEHINVLEKKGRNRLIYVNELINEENRCWNETLVRHVLKEEDANEVLKIRLPNHQMDDFPAWHHEKSGLFTVKSAYKLAWNLSGKGVVQSSSSTATSGERKIWSRVWNAKVQAKVKIFIWKLAQDKLPTWENKRRRKIEMNGTCPVCGTKGENSYHATVECTKARALREALRAVWHLPGEDKFLWTGPDWLLILLDGVNEEQRTHIMYMLWRAWYLRNDLIHGDGRCSIAGSVSFLTSYEEVLLPNRQMPDDIKGKKPMYSEGQKEKHMAEKQSSGWIAPPDGAAKINVDAGFRMETGEASAGIVIRDCRGLILLAACKTLHPCSSAEQAEALASLEGIRCALQWIHMPVILETDNAEVVARLKTKHSSRSVWEGVIMEAKAAMQGLQAVEVAHIKRDSNKVAHTLAQMALSSGNCLEWRLCAPAEILELLNQEYIDGLLILVGSDRRCSLRVGPYLVMFGPILPGPCGFAALRPSPYQPSPLPRGSRYPVSSPGSLFLPLRPPPFVSHSGGRLSATRFSTTGFDLPDWFRNPKDDGSCAGLDDEEDDIFVLPTEPNVSDERRSQSSTSRSLSIRPGFPATASHEDAEFEADIDEVSRILSARFASPEAIMIAMDCCSVRVTGCLVDKILTRFSNDWVAAFGFFMWVGTQGGYCHCADSYDLMVDILGKFKQFDLMWGLINQMVEVGGLMSLMTMTKVMRRLAGASRWTEAIDAFHKMDRFGVVKDTKAMNVLLDTLCKERSVKRARGVFQELRGTIPPDENSFNTLVHGWCKARMLKEALDTMEEMKQHGFSPSVVTYTSLVEAYCMEKDFQTVYALLDEMRKRRCPPNVVTYTILMHALGKAGRTREALDTFDKLKEDGVAPDASFYNSLIYILGRAGRLEDAYSVVEEMRTTGIAPNVTTFNTLISAACDHSQAENALKLLVKMEEQSCNPDIKTYTPLLKLCCKRQWVKILLFLVCHMFRKDISPDFSTYTLLVSWLCRNGKVAQSCLFLEEMVSKGFAPKQETFDLVMEKLEKRNLQSVYKKIQVLRTQSNFFKLD

SEQ ID NO: 174348 - protein, 132 aa, Oryza sativa
  Clone ID: PAT_MRT4530_72298C.1.pep
MASEKAALEFQLEKSIKQFHEVQMEAERSRVARRSASAWEEDADIKALEPLPLHHRHMATANQQLQKAAKLLDSGAVRATRFLWRHPVARVSLLFYLVFVHLFLMYLMHRLQDFASREGPTAMGGLANSDLP

SEQ ID NO: 174349 - protein, 245 aa, Oryza sativa
  Clone ID: PAT_MRT4530_72299C.1.pep
MALSHCQRQDLLLPPLLLLMSVFVYIPLAGAAEWSRNVPSLIDFKHQQFSPTGSVFGSNLKWMTSQGGVPTFGNWSAAGDTPYTQKFENLRRSKKTATGVYSNPNEVITETPDQPPPPLRSPLHPSSHDALNQRQRYRSAGMQTPDRKASSSDGRVPVTPGRSRLKQGGRGFEPALDEVTVPPFGDWDDANAASGEKYTGIFNRVRRDKLTPNSSVKQQPPSSPSGGRRQEHKVQQIYVYRYIAK

SEQ ID NO: 174350 - protein, 48 aa, Oryza sativa
  Clone ID: PAT_MRT4530_7229C.1.pep
IDTAALSISSKSAMCHDSVTRINSNSSVSHQQCFDTTSSMTAVATGIR

SEQ ID NO: 174351 - protein, 126 aa, Oryza sativa
  unsure (1)..(126): unsure at all Xaa locations
  Clone ID: PAT_MRT4530_722C.1.pep
CWLLQELAGSSWQRRSRPDLDAGSSWRXQPWCGDGGSGDSWQRRRRSWLWWLPCQLAAVAKDMASGSXLLGGEGRRRSGXFAEAXGDGGSGDGGCDSXGGGYVGGREGVGCESVCSEVYGIMEAKS

SEQ ID NO: 174352 - protein, 515 aa, Oryza sativa
  Clone ID: PAT_MRT4530_72300C.1.pep
MKATGGPLPLILFLLIIIVLITAQHTAIAKPFFSLNAFAQGQPNDKDDQNMGKFYVYNKAQTNNYADQRMRKFYLYNKDQANDWDDQKMEKFYLYHEGKTNDRDDQKRKNIYLYNEGHANGDDQTMEKFYLFNKDQAKDGDDQKMGKFYLYNKDQANDWDDQKMERFYLYNKGHANEGDDQTMEKFYLYNKGHANEEDDQTMEKFYLYNKGQAKDGDDQKMEKNYLYNKDQANDWDDQKIEKFYLYHEGKANYRDDQNMEKFYLYKKGEEHKYIHSHGHGHVHFPEGAKDLYFFEDNLAPGSVLITRILSARQSSIFLHRNNSKHIPFSMKNITDILTMFSPVSATMADGIAATLQACEHTGMVHGEKAKCATSIESLLDVVVSSLGTKLVRALTPGAPMEGVPSLRYIVASATPVPNSQSMLACHDMLYPYKVFFCHTPKQTRLYQVSLVSGESGRPLIDGLLAVCHQNTSDWDTGHPFFHFMDVKPGETTACHFFGRGSIIWVPVPSVKEATQ

SEQ ID NO: 174353 - protein, 172 aa, Oryza sativa
  Clone ID: PAT_MRT4530_72301C.1.pep
MIPLEHDILSDFFLVPDSLVSSCYLGISASLEAERHHRRPQRLLLAWGKTTAAQHVVVWHLDHTFEKLASAHLPLVAAAPLVDALRASPAKPLALFDLARRLPLRLHRRGALYFLHLSPRMFGLRAPLPLSLSLTAPATELLAVAASPTAAAVGSGNRWGDGDGEGCTSGAI

SEQ ID NO: 174354 - protein, 106 aa, Oryza sativa
  Clone ID: PAT_MRT4530_72302C.1.pep
LVDPRAAGVASSLQIHILSSSQAVRWHGRDEGRRTSGGATMATATGWRRGPRRREAVVVGRDDRDCDGGRRRLVPATLPPYVSLSVRVSVSLCPFGRSHRAAGEGV

SEQ ID NO: 174355 - protein, 81 aa, Oryza sativa
  Clone ID: PAT_MRT4530_72303C.1.pep
RPGTGTYIRKYELINGCFRGSRCCVVRHPAPPADVRHHRRLPPRQASSCCNCIRWNSSVDSWWWFCHDPSFARSQWTSSRR

SEQ ID NO: 174356 - protein, 355 aa, Oryza sativa
  unsure (1)..(355): unsure at all Xaa locations
  Clone ID: PAT_MRT4530_72304C.1.pep
MASLPDLIDDLTTEILLRIPPDEPASLVRASLVCKPWCRIITDPAFLRRYRAFHRTPPMLGFLHNVDGDKAISSVPRFVPTTTAASSPFSPPAIGSPHWWWALDCRHGRVLINLFNPMELMVWDPITGDHHRFPVPPHPHAYCTGAVLCAARDCRHLDCHQGPFLVVFVGSGEHGYHYSWACLYSSETGEWSSKVSIVFDSYVEMLPSLLVEDMLFFICENGIRILGYDIGRHELWEIEPPLWDDYQGGTLMTAEDGGLGFATMETRGLVLWSWYVDDDDGIADWEQLRVIKLEMLIPVDNPSVSLDLVGFIEGTQTIFVSSDVGVFAIGLKSGQVKXDLARGRSSHPAGVQTVQ

SEQ ID NO: 174357 - protein, 107 aa, Oryza sativa
  Clone ID: PAT_MRT4530_72305C.1.pep
MEAVEVHLVEEELARGGEELRVTEGARGGGRGRLELDSLHSCFFPMSLASLPSLEHAARIAAYTGACHHLRRRVPCCSPLYFPYAASEVGGLMEEVAAKLSAGCETG

SEQ ID NO: 174358 - protein, 94 aa, Oryza sativa
  Clone ID: PAT_MRT4530_72306C.1.pep
HYSDNHLYEAAGECNNRGQGRLSLTRALKLDNSRWLQSTRLQHSTQNPIRSRRHPKHRVSDKSTHQYGTVKKSLINEHYAQRRRKRRLSKSTPT

SEQ ID NO: 174359 - protein, 103 aa, Oryza sativa
  unsure (1)..(103): unsure at all Xaa locations
  Clone ID: PAT_MRT4530_72307C.1.pep
AKLEHKNLVSLFGACLEQQERLLGYXFVLDRSLNLILLDTAKREQVDWEKRYTIINGITXGLHYLHXECEIKGXHRDLKASNMSLDVNVNPEIIDFGLARIMG

SEQ ID NO: 174360 - protein, 333 aa, Oryza sativa
  Clone ID: PAT_MRT4530_72308C.1.pep
MARLPRLLLSFLLLIGVHASVSHGSPPLPSTYDPSICSKSSECGGVNISYPFYLSNATDYYTRFSCGYTDLKISCSRDRDGRNETPTILLGGDNYTVLDIIYDSHTIVLADTDALRGGSCPRVRHNVTFAQADEWLQYTGPRDNLTFFFGCKLNLPPPIDPGLVSLADKHQINCKDFSNWPDSGDSFVFTSAELEAPVESELARRCRQVIVVPVNGDILNSSNQSALPSGGYGQVLNKGFDLAWNSRKDEQCYQCEQSQGHCSYSQNRVFLDCLCSDGKVGNQDCRNSGASNSSTLNVIQNGNYPVQKNCKIRLEHYVDVDTHRVSTEQNGRS

SEQ ID NO: 174361 - protein, 88 aa, Oryza sativa
  Clone ID: PAT_MRT4530_72309C.1.pep
MVATLLARPPRSHRTYGEPPCTAAPHSTARIAPALPARQLRRRRASACRMLRITNKEFAELAQHGQNYLWASDIQSVLGPRSFARRSG

SEQ ID NO: 174362 - protein, 107 aa, Oryza sativa
  unsure (1)..(107): unsure at all Xaa locations
  Clone ID: PAT_MRT4530_7230C.1.pep
LRYPPPPPPPPPXPPPTRSTPPPPPPTPTGAATRHAGTPPRAAATPRRPRPPPGRPPPPRTTSAARRSAPATTARTRAPGTTPTRXTKGTPAGPKETPEEAAKPSDR

SEQ ID NO: 174363 - protein, 95 aa, Oryza sativa
  Clone ID: PAT_MRT4530_72310C.1.pep
MGRWVKPDVYPLIVAMSLVGGMCVFQLTRNVFMNPDVRVNKSHRQSAVLENADEGEKYHHHAFRRFLGTQRPEVFPAINRFFAGPATVPKSDRQN

SEQ ID NO: 174364 - protein, 139 aa, Oryza sativa
  unsure (1)..(139): unsure at all Xaa locations
  Clone ID: PAT_MRT4530_72311C.1.pep
ELGISGGSNNAAXDETNAEKKGSNHTGVEDAPSPSXSHCSSKKKAXKAKAAKESQGPAYGTEETATPEPYEGSTSVYVKERLKKVSSIKKKESGEXSAPAAKIATDEVAARSVRLGAANNKEKIPFIQATCAVNVRQSF

SEQ ID NO: 174365 - protein, 91 aa, Oryza sativa
  unsure (1)..(91): unsure at all Xaa locations
  Clone ID: PAT_MRT4530_72312C.1.pep
KNGHGSPDVQSWTAEWGKCDIRDGKEIKXEXDQDLLLLPTKAALFEDPTFKVYAXYSHRTNKHFFXDYAGPYAKLINLCAQFNTSDGFTLY

SEQ ID NO: 174366 - protein, 61 aa, Oryza sativa
  Clone ID: PAT_MRT4530_72313C.1.pep
PTYNLVNPGASTSNSMEIKGTAGRDGAEFEFDKGRVTPWEGERIHEVAAEELELTLGVGAK

SEQ ID NO: 174367 - protein, 66 aa, Oryza sativa
  Clone ID: PAT_MRT4530_72314C.1.pep
ERLEVCARDALFSLPLYVYSLHKVCVSGACALPPRGNILRGNSAFIAREHPTISTTVRQFCAPEKI

SEQ ID NO: 174368 - protein, 55 aa, Oryza sativa
  unsure (1)..(55): unsure at all Xaa locations
  Clone ID: PAT_MRT4530_72315C.1.pep
VKERQRRRLFLVQFTPVVLYHALKKMEFGALLLSHPHGSQVNSKYRLXCTMNVWV

SEQ ID NO: 174369 - protein, 194 aa, Oryza sativa
  unsure (1)..(194): unsure at all Xaa locations
  Clone ID: PAT_MRT4530_72316C.1.pep
RPTFSIDENITWGVTINFEKXRRPEDSDYTVDVLTRCSVSKDKSGKKTMKIIPLKDRGEPVVISLPLSQIDGLSSIRMHIPKDLLPVEARENTLRKVDEVISRFAKDGIPLLDPEEDMKVQSSSFRKASRRIEALESLFEKHDVHNSPHIKQKLKVLHAKQELSTQIKAIKRTMAASTALAFKDELRARKRVLS

SEQ ID NO: 174370 - protein, 956 aa, Oryza sativa
  Clone ID: PAT_MRT4530_72317C.1.pep
MATLKRKADSAAAELASPPPKAPRGSEALAESPSLAGGGSEPVACVHDVSYPEGYDPSAPATHLLNGVGGAEGAGPAKTFPFQLDPFQAEAIRCLDNGESVMQRVIYTSPIKALSNQKYRGFKEEFSDVGLMTGDVTIEPNASCLYKGSEVMREVAWIIFDEVHYMRDRERGVVWEESIVMAPKNSRFVFLSATVPNAKEFADWVAKVHKQPCHIVYTDYRPTPLQHYVFPSGGDGLYLVVDEKSKFREDSFQKGLNALVPASENDKKRENGKWQKGLLTGKPSEDSDIFKMVKMIIQRQYDPVILFSFSKRECEFLAMQMAKMDLNDDDEKANIETIFWSAMDLLSDDDKKLPQVSNMLPLLKRGIGVHHSGLLPILKEVIEILFQEGLIKCLFATETFSIGLNMPAKTVVFTNVRKFDGDRFRWLSSGEYIQMSGRAGRRGIDQRGICILMVDEKMEPSTAKMILKGSADSLNSAFHLSYNMLLNQIRCEDGDPEKLLRHSFYQFQADRVLPDLEKQVKELELERNSMIIEEEENLKSYYDLLQQYKNLKKDVRDIVHSPKYVLPFLQPGRLARVQYSTDEQSTFSIDENITWGVTINFEKVKTHSEDRRPEDSDYTVDVLTRCSVSKDKSGKKTMKIIPLKDRGEPVVISLPLSQIDGLSSIRMHIPKDLLPVEARENTLRKVDEVISRFAKDGIPLLDPEEDMKVQSSSFRKASRRIEALESLFEKHDVHNSPHIKQKLKVLHAKQELSTKIKAIKRTMRSSTALAFKDELKARKRVLRRLGYITSEDVVEVKGKVACERSSADELTLTELMFSGTLKDATVEQMEKLQDAPKPREELDLLFFQLQETARRVANLQLDCKIQIDVESFVNSFRPDIMEAVYSWAKGSKFYQIMEMTQVFEGSLIRAIRRLEEVLQQLILASKSIGETQLEAKLEEAVSKIKRDIVFAASLYL

SEQ ID NO: 174371 - protein, 197 aa, Oryza sativa
  Clone ID: PAT_MRT4530_72318C.1.pep
SSLATNLSKPAVCRVTSPRTLVLGYAYPAYDCYKTLELNKPQIDQLRFWCQYWILLAFLTTLETITYFTVSWLPMYGEAKLALVLYLWYPKTRGAKHVYESYLQPVLARHEADIDRGLLQLRASAKDATASHLQAAVSLGRACFAEVAGRVSSQLQAARSSGGGGRAGQADQLQKRQKINPEEEEEDEDATVSKTRR

SEQ ID NO: 174372 - protein, 45 aa, Oryza sativa
  Clone ID: PAT_MRT4530_72319C.1.pep
YFNIYISSAQSIINNTPIFLTSYLPFPNLSHPFPTFLIQFSHIFF

SEQ ID NO: 174373 - protein, 66 aa, Oryza sativa
  Clone ID: PAT_MRT4530_7231C.1.pep
MAKAGKPCRYSESKGISGEGISGELQRLRYDEFGIKEAQQASPNLLGPFAIDQAQPISPLKAHMCK

SEQ ID NO: 174374 - protein, 629 aa, Oryza sativa
  Clone ID: PAT_MRT4530_72320C.1.pep
MRGRHLLSPLLSPLAYPKPPSSRLAPRRVASHRTVAPPPAARRAPLSEPDVGISLFASALPGFRGALKQRYSDFVVHEVALDGSLVRLTSFDLPDGECVDAKEGGMDEAQALESFRLLCGDADCEALRGFLERVSEGGDSDVSPIILSADADKTHRSEVHDFFKRNFEALLTDTVEHSDGIQRCIRVRLKPGRRERRDVDGRGRNRKGTGSSGWRDDKPFDSRGSIIWPDHLGKFIRFHLYKENKDTQEALGKIGKMLGLQPRSFGFAGTKDKRAVTTQQVTVFKVQASRLVALNSKLIGIKVGDFRSVVTESEDVIKAALDGLITNGFINYYGLQLQRLKKYPGNYLQALMAIPRTLRLMYVHSYQSYLWNHAASMRVQKYGISRVVEGDLVYKKEAPFEQGALKATSEDDGQTMSSEMNACCETLPEEMIQSVKIADSEDLSKSLYTFEDVVLPLPGSETLFPGNEVAGIYHEIAMKDGINLRESVHGVEDFSITRMKGGYRRVIQRPIDFEWDLITYTDEKIPLVETDLDVLSKTKPLEVNELLSDGISSCTSHDSGLEASLDASESINGASLVVAEAKSIGSSDMLEKLAIKLAFTLPASSYATMAIRELMKTSTSVAHQKTLNI

SEQ ID NO: 174375 - protein, 65 aa, Oryza sativa
  unsure (1)..(65): unsure at all Xaa locations
  Clone ID: PAT_MRT4530_72321C.1.pep
PGKGGRDGAGWALRRPLSLPDSPRHERGLPAALRSSSMRPXWFLRGVGFVRAVEDACGVVFPLLS

SEQ ID NO: 174376 - protein, 173 aa, Oryza sativa
  Clone ID: PAT_MRT4530_72322C.1.pep
MTTIDTTVVHIKIKLSKFCNPVRFIAKFHPSRAKSQREGVASPIMGLWACNFVWDPGPSGAHTQSPTWPGTFGDVGPEGEVSALLLISPEGGLVKRVTLHATQYSTLFYPVCDQSQTGQIKAPVNLSLPFLPPMPPLLVYARRRRRCTALSFSTAKTTTVPLAHHTVTSTVQP

SEQ ID NO: 174377 - protein, 36 aa, Oryza sativa
  Clone ID: PAT_MRT4530_72323C.1.pep
MMRQFEGPEEDLAACKIVRSGLDTKISVSGWHPCRL

SEQ ID NO: 174378 - protein, 56 aa, Oryza sativa
  Clone ID: PAT_MRT4530_72324C.1.pep
MAGGVALSGMAGGDGQKSAQAAGNGGGHLCSAGCGRAMRRGYGGGTAAADDDSCWT

SEQ ID NO: 174379 - protein, 141 aa, Oryza sativa
  Clone ID: PAT_MRT4530_72325C.1.pep
MGRVRTKTVKKTSRQVIEKYYSRMTLDFHTNKKVLEEVSILPSKRLRNKVAGFTTHLMRRIQRGPVRGISLKLQEEERERRMDFVPEKSALEVEEIRVDKETMEMLAALGMADLPGVERQQEVSAPTYSRPPYGGPRRDRV

SEQ ID NO: 174380 - protein, 60 aa, Oryza sativa
  Clone ID: PAT_MRT4530_72326C.1.pep
GLSTHRRRDVLRVSLHIGRRSSVRSGAAIAVTCRGLQGRRLGKRRGHIRTQSSQRHGQCG

SEQ ID NO: 174381 - protein, 108 aa, Oryza sativa
  unsure (1)..(108): unsure at all Xaa locations
  Clone ID: PAT_MRT4530_72327C.1.pep
GFVRPQHSIGATPFWQPGPFQLINTQVFHPQCCPQLRVVGPQFPFQAISGVQAIVQQLQLQQGGVVYFDQTQGQGQALLALNLPPKCGIYPKXSIGPRSISPVGGVWD

SEQ ID NO: 174382 - protein, 142 aa, Oryza sativa
  unsure (1)..(142): unsure at all Xaa locations
  Clone ID: PAT_MRT4530_72328C.1.pep
WSGAFIPGVLRRMAAARRDEYCVYDSHVLTAFTSSLYLAGLXRVTRAVGRQAVMLAGAALFFAGAAVNAAAVNIAMLIVDSMLLGFGIGFTNLQVAVAWIMGSQIGRDGESAMARRYSVAVLALTCVFSAAFGWSWGPLTWC

SEQ ID NO: 174383 - protein, 242 aa, Oryza sativa
  Clone ID: PAT_MRT4530_72329C.1.pep
MGAMWSASSSFRGLSDARCSTSGSSPVVQQVVGGEKIERRWRRKKMTGNLVGVLRREVTVLSGPAHETTARPGWLASVLNSDLMGSLVKPIIAVDLMFSMPPELNSAFLGVAFKTEVFPSEYRWRWNFDSEYLELLKKHGAQQEAGQALQVPRLSIHLVVLYLSIASPLADQDQAGPLTPEIIRSHVTDGPKPRLVSAASCSVGSAFRCSEKLQRKSAANREKRLIAMAALRALAACLFMIR

SEQ ID NO: 174384 - protein, 38 aa, Oryza sativa
  Clone ID: PAT_MRT4530_7232C.1.pep
NRLSNQLTIRAVRTLFHYIMYRPATARMQSYDVPELRG

SEQ ID NO: 174385 - protein, 153 aa, Oryza sativa
  unsure (1)..(153): unsure at all Xaa locations
  Clone ID: PAT_MRT4530_72330C.1.pep
MAGGGFPMGGGITFSVVVTCLMAASXAGGLIFGYDIGISGGVTAMEXAFIPGVLRRMAAARRDEYCVYDSHVLTAFTSSLYLAGLXRVTRAVGRQAVMLAGAALFFAGAAVNAAAVNIAMLIVDSMLLGFGIGFTNLQVQIFLSSKCIPTERL

SEQ ID NO: 174386 - protein, 938 aa, Oryza sativa
  Clone ID: PAT_MRT4530_72331C.1.pep
MAGGGFPVAGGAPPGDYGGGITFSVVVTCLMAASGGLIFGYDIGISGGVTAMESFLAAFFPGVLRRMAAARRDEYCVYDSHVLTAFTSSLYLAGLAASLAAGRVTRAVGRQAVMLAGGALFFAGAAVNAAAVNIAMLIVGRMLLGFGIGFTNQAAPVYLAETAPAKWRGAFTTGFQLFLGIGNLTANLTNYGAARIPRWGWRLSLGLAAAPASVILVGTLLISDTPSSLLVRGRVEQARAALRRVRGAKADVDAELEGVARAVEAARANEEGAYRRILWRQHRPHLVMAVAVPLLQQLTGVIVIAFFSPVLFQTAGFGSNASLMGAVILGAVNLGSTLVSIATVDRYGRRVLFLTGGLVMIACQVAVAWIMGSQIGRDGESAMARRYSVAVLALTCVFSAAFGWSWGPLTWVIPGEIFPVEIRSAGQGISVAVNLGATFVLTQTFLAMLCSFKYATFLYYAAWVAVMTAFVWAFLPETKGVPLEAMGAVWARHWYWRRFVQPPPAAKDAMLPELSRRLTDKSKSVPALPLASVPRSMLSSAAAASRRFAMPQPASSGSTSRRFDFPDSVLLDTVAHADGCGDDATTARAETSDGLPIEVSFVAADPPTFTRCVVRCSGLTAGEFSKGPPFIIGADGAFLVIRVIFPCRSDRRCFTDFFVYRSGPGTPLLELLRRPYPVKHLSDHLGILSCGEHFLVVNPKWQFHADGQVRCDLHVFSSKTTSWESKVARLPCGVEAYIGDFIPTKVLSVEGRSIAWVDLWNGILLFDSVTSNPEVRLIQLPPLMPINGRYLRGGGLDDTYISVDPNRDITCSNGWFRFIEMGFPLLDGSTGQLNFRWQATMFKRLVRPEECQWEPCGTETDSAELRGVCGDFANLQDGFVGSIFKDAHRAAKLYRCVADLPFSADDSSYTAVAVSAVNATTPLLQAAAPHTGAPLARV

SEQ ID NO: 174387 - protein, 89 aa, Oryza sativa
  unsure (1)..(89): unsure at all Xaa locations
  Clone ID: PAT_MRT4530_72332C.1.pep
PTRPGITGQSGRSKRTILSDGDYYPRELAIYVADGSQELSILGYRCVGGASIQDGQTELMLHMILLNEDGREXEHALQETSCLDNQCEG

SEQ ID NO: 174388 - protein, 66 aa, Oryza sativa
  Clone ID: PAT_MRT4530_72333C.1.pep
FGGGFFRASKGFKKPPFSFWGVIQKVFSKIPKNKFPFQKIPEFFPPVFPTIAKVYPQNRVLKKINS

SEQ ID NO: 174389 - protein, 55 aa, Oryza sativa
  Clone ID: PAT_MRT4530_72334C.1.pep
WESQKMSRACSIRWGKAISTDTEIHPIDHHRSLMQMTHRKQSSSTIVVAKQEAEG

SEQ ID NO: 174390 - protein, 52 aa, Oryza sativa
  Clone ID: PAT_MRT4530_72335C.1.pep
MERADEDGSGGGPVGSGGGPGQWWSEHRRKDLVEEQVEVDLGDSGGPGQQRP

SEQ ID NO: 174391 - protein, 61 aa, Oryza sativa
  Clone ID: PAT_MRT4530_72336C.1.pep
EDIIKLETNYSLAELKDLKVVDHVSRPNTVILEMLIESFLNDIIFHISITPTNLVLATVYA

SEQ ID NO: 174392 - protein, 493 aa, Oryza sativa
  Clone ID: PAT_MRT4530_72337C.1.pep
MAARRANCALVLVLALALLAARDAGAAAVPKPNWLGGLSRAAFPKRFVFGTATSAYQVEGMAASGGRGPSIWDAFAHTPGNVAGNQNGDVATDQYHRYKRLPHGNRAYRQGTEDVNLMKSLNFDAYRFSISWSRIFPGITPYVNLYHYDLPLALEKKYGGWLNAKMADLFTEYADFCFKTFGNRVKHWFTFNEPRIVALLGYDQGTNPPKRCTKCAAGGNSATEPYIVAHNFLLSHAAAVARYRTKYQAAQQGKVGIVLDFNWYEALSNSTEDQAAAQRARDFHIGWYLDPLINGHYPQIMQDLVKDRLPKFTPEQARLVKGSADYIGINQYTASYMKGQQLMQQTPTSYSADWQVTYVFAKNGKPIGPQANSNWLYIVPWGMYGCVNYIKQKYGNPTVVITENGMDQPANLSRDQYLRDTTRVHFYRSYLTQLKKAIDEGANVAGYFAWSLLDNFEWLSGYTSKFGIVYVDFNTLERHPKASAYWFRDMLKH

SEQ ID NO: 174393 - protein, 129 aa, Oryza sativa
  Clone ID: PAT_MRT4530_72338C.1.pep
MPCPTKSTGSRQQLALALFTTKSTGSRQPSRVGANARRVRPLVDGPGDGACPVRDLSMLVLDGMYSHSTAESTAANAHAFYGSASSVALRLPHHRTKGIEISNLIEAEFKAERTLEASPSRLHACSGAP

SEQ ID NO: 174394 - protein, 504 aa, Oryza sativa
  Clone ID: PAT_MRT4530_72339C.1.pep
MAARRANCALVLVLALALLAARDAGAAAVPKPNWLGGLSRAAFPNRFVFGTATSAYQVEGMAASGGRGPSIWDAFAHTPGNVAGNQNGDVATDQYHRYKEDVNLMKSLNFDAYRFSISWSRIFPDGEGRVNQEGVAYYNNLINYLLQKGITPYVNLYHYDLPLALEKKYGGWLNAKMADLFTEYADFCFKTFGNRVKHWFTFNEPRIVALLGYDQGTNPPKRCTKCAAGGNSATEPYIVAHNFLLSHAAAVARYRTKYQAAQQGKVGIVLDFNWYEALSNSTEDQAAAQRARDFHIGWYLDPLINGHYPQIMQDLVKDRLPKFTPEQARLVKGSADYIGINQYTASYMKGQQLMQQTPTSYSADWQVTYVFAKNGKPIGPQANSNWLYIVPWGMYGCVNYIKQKYGNPTVVITENGMDQPANLSRDQYLRDTTRVHFYRSYLTQLKKAIDEGANVAGYFAWSLLDNFEWLSGYTSKFGIVYVDFNTLERHPKASAYWFRDMLKH

SEQ ID NO: 174395 - protein, 164 aa, Oryza sativa
  Clone ID: PAT_MRT4530_7233C.1.pep
MVGGGALRRVGKYEVGRTIGEGTFAKVKFAQNTESGESVAMKVVDRSSILKHKMADQVLASRKKIFIILEFITGGELFDKIIRHGRLNEADARRYFQQLIDGVDFCHSKGVYHRDLKPENLLLDSQGNLKISDFGLSAWPAQGGALLRTTCGTPNYVAPEVSDI

SEQ ID NO: 174396 - protein, 241 aa, Oryza sativa
  unsure (1)..(241): unsure at all Xaa locations
  Clone ID: PAT_MRT4530_72340C.1.pep
MAARRANCALVLVLALALLAARDAGAAAVPKPNWLGGLSRAAFPKRFVFGTATSAYQVEGMAASGGRGPSIWDAFAHTPGNVAGNQNGDVATDQYHRYKRLPHGNRAYRQGTEDVNLMKSLXFDAYRXSISWSRIFPDEHTGARRRGRVPDPLRLELDHRGAHVRPPAYHAADLRRPGTERAANRGEERRIAGGKKRRRWIVRPRRRRGGDSCSRGGGRKQQSVSSQSQEAAGDRRGHGLP

SEQ ID NO: 174397 - protein, 48 aa, Oryza sativa
  unsure (1)..(48): unsure at all Xaa locations
  Clone ID: PAT_MRT4530_72341C.1.pep
IFILLIIRRISLRIRRIGRSRSIVVVHRRRRPPAMAPPSRHVHHRXSS

SEQ ID NO: 174398 - protein, 363 aa, Oryza sativa
  Clone ID: PAT_MRT4530_72342C.1.pep
MRTAQQQQQKQQGGGGARGPSVARVQLPRARRRLPSRDLFTEYADFCFKTFGNRVKHWFTFNEPRIVALLGYDQGTNPPKRCTKCAAGGNSATEPYIVAHNFLLSHAAAVARYRTKYQAAQQGKVGIVLDFNWYEALSNSTEDQAAAQRARDFHIGWYLDPLINGHYPQIMQDLVKDRLPKFTPEQARLVKGSADYIGINQYTASYMKGQQLMQQTPTSYSADWQVTYVFAKNGKPIGPQANSNWLYIVPWGMYGCVNYIKQKYGNPTVVITENGMDQPANLSRDQYLRDTTRVHFYRSYLTQLKKAIDEGANVAGYFAWSLLDNFEWLSGYTSKFGIVYVDFNTLERHPKASAYWFRDMLKH

SEQ ID NO: 174399 - protein, 105 aa, Oryza sativa
  Clone ID: PAT_MRT4530_72343C.1.pep
AIPSARGNLYKVYCWGLQLVHTAQGTDIAHQQIYSFPKAPKTDVNPLQILIVLKFCPVPWIIMIRASISSRGERERDPPPPLRREWRRRRPLAAPRFRRGGACSP

SEQ ID NO: 174400 - protein, 543 aa, Oryza sativa
  Clone ID: PAT_MRT4530_72344C.1.pep
MSAPPLLKAPAAAAASLVAAAAAHRATAAAAAPSGASRVPPRRLRCSASGAAAVEVRAPMDWATRSLEEMQRAEDFDSFCLMGLSPLDGRYERFTRDLKPFFSEFGLIRYRVIVEVKWLLKLSQIPEINEVPPFSKEAQLFLDAIIQDFSVADAKEVKKIEKTTNHDVKAVEYFLKQKCSSNPEIAKVLEFFHFGCTSEDINNLSHALALKEGVNTVMFPVMMDICKAMCSLATQNSTIPMLSRTHGQPASPTTLGKEMANFAARLSSIGNSFSEVKILGKFAGAVGNYNADVVAYPEVDWPKVAEDFVKSLGLEFNPYVTQIEPHDYISKLFNLFVQFNNVLTDFDRDMWTYISLGYFKQIVKAGEVGSSTMPHKVNPIDFENSDGNLTIANGTLSSLSMKLPISRMQRDLTDSTVLRNLGVGLGHSLLAYKATLRGINKVQVNESRLSEDLDQTWEVLAEPIQTVMRRYGIPEPYEKLKEMTRGQAVTKDSIRQFIEDLDLPEAARSSLLKLTPHSYIGEAEFLARNIEEVVDLKSGFKIE

SEQ ID NO: 174401 - protein, 131 aa, Oryza sativa
  Clone ID: PAT_MRT4530_72345C.1.pep
NRSCSCAFLGCGHISRCRSALETELLACRDGIALALQWTLLPIVVESDCQEAIQLIKSVNKVLSADACVVNEVIELISGTRVIALNKVHRTQNSINHFLANKGRSESLTYFWPDDSCIAISHLLCENSYSE

SEQ ID NO: 174402 - protein, 41 aa, Oryza sativa
  Clone ID: PAT_MRT4530_72346C.1.pep
TTHAVSTLDGNVKGHGGFDFGCVPIYKDKCAFSPSTQLWKH

SEQ ID NO: 174403 - protein, 42 aa, Oryza sativa
  Clone ID: PAT_MRT4530_72347C.1.pep
RRPSSSGTVKTLCHLNLNKTPSLKRFLVKKKKKKKHSQKKQP

SEQ ID NO: 174404 - protein, 62 aa, Oryza sativa
  Clone ID: PAT_MRT4530_72348C.1.pep
LHPIMYKLCGKTPFFRTVSEPIILFSFRRLGLGVSEVTNQIVNYTTFHPAPALFIYNYYMQH

SEQ ID NO: 174405 - protein, 82 aa, Oryza sativa
  Clone ID: PAT_MRT4530_72349C.1.pep
LRAPFAGPPPPPLTPPPLLLAAPLPSRLLARAQLRLVRLCRAAPPPVARSTGLAPKALVGRAGGTRLTRWRDIRTRARIPDG

SEQ ID NO: 174406 - protein, 544 aa, Oryza sativa
  Clone ID: PAT_MRT4530_7234C.1.pep
MPIAAAAVTSPPAAAQVHGVVPRHASPTPQQRAAPRREQSPLNPSSQSIRSASSGTELAGSAATEASRAHIANLDRVLGKPPQVPRPASHAAASKQERQQQDGELEPLNVRHGLLNALNLSFFVPMPGMRARTAADEHMSPRSLMHMQQLLSADSPRASPRSTIAPRWRSLHGEDGWAGLLDPLDSDLRRELLRYGDFVQAAYQAFHSLPTASARHRGLMLPDRSYRPTRSLFATSALSMPPWAKRPNTPEWLTQQSNWIGYVAVCESEREVARMGRRDIAIVLRGTATCLEWAENLRASLVPLDGESGEGGGQEEPKVARGFRSLYKTAGEKVKSLSEEVMGEVRRLMEKYKGEELSITVVGHSLGGALALLVADEIATTVPDAPPVAVVSFGGPKVGNAAFVDKLQKNGRVNVLRIVNAGDMVTKVPGVAPRLPLTKEQYQHVGAELRIDSKNSPCLRPDAGPACRHDLEAYLHLIDGFTGTGRPFRHDARRSVIRLLQLQRGNVKKEYVNRARELGVDPSAPVDVGRSMAYGNCAVASPSS

SEQ ID NO: 174407 - protein, 211 aa, Oryza sativa
  Clone ID: PAT_MRT4530_72350C.1.pep
MLGELLSRILLLLFGYAMPAFECFKTVEARPNDAHMLRFWCQYWIIVAMVIAFESLISWMPMYGEIKLAFFVYLWYPKTKGSDVVYDTFLRPIVMQYEPNIEQRLLHLRAKSGQLLSFYMKNFADKGTAFFMDVLRYVVSDKPEGSNQEQRNKKSGGWSPFATKRRPPSPPRPPQESLFESNPEAAAVAEVLKATINPRPRRGAQNGKNYY

SEQ ID NO: 174408 - protein, 250 aa, Oryza sativa
  Clone ID: PAT_MRT4530_72351C.1.pep
MAAAAAAAAAEEEIAVKEPLDLIRLSLDERIYVKLRSDRELRGKLHAYDQHLNMILGDVEEIVTTVEIDDETYEEIVRKNTDSKRQRRRRDARAMGVTKEDVEAAITSSLSPSSLVVTDTSGGCGASYEIEVVSEKFEGKRLLERHRMNWNDTMLDCLEISVTLRASRVIESRSRHFPVHGRCSKLWTTPCSIFPKRTDRHNINRAKSQNLATKRAISSVAGFRLPRRQLSIRRNGNGKGKAVASEEKSA

SEQ ID NO: 174409 - protein, 51 aa, Oryza sativa
  Clone ID: PAT_MRT4530_72352C.1.pep
MEAAAPAMLAPSSLGRRMLAPSSCHVAAPSVERPADVAGRWSPEELVPTEP

SEQ ID NO: 174410 - protein, 709 aa, Oryza sativa
  Clone ID: PAT_MRT4530_72353C.1.pep
MAGKGAKATAAKSAEKEKGKKAPVSRSSRAGSQEKPAPNKDVYQLFAEKVRDNKQLESRWAIMQETRVEYFRGKDFTTFMRNHPEVREILGPDKDLEVEDIVNTLLSKNLVIRCDRVWKTVRPGKKKLSSWPAHLEIHREQVFTENDGFFAWMFLKRRTLWQTILSFVWPLFALAVCLFPVYPYQCKIVVLYSCAGALLFIVSILLLRAAIFGILWVLLGKRVWFFPNINAEETTFRELVRFWPEKDEGERPKWTSRLFYATVAVLVILLLRHHAPDEAARARYQKKVSNIIDDVLEWSPKLALSGMMEKHTGTNASETSNHTSGTGSSPVPPTNEGNTAKADPDMDRQTNSDKVQDGDEYGDDMRTRFSERTARVGGGAAKRGRLSEIQRRRLGMRHGGDVGLGEREGGEATGASTRGEEAGGGVALALGGGTGALVGGAVAGAGVVGAEAGAGVAGGGRRGGGLLLGGDRWCGGRLHPPYRESISEELLENIVSRISLCDVVLTSAISRSWIHRERRRPTESELALARRWRQRWWSQSSHEWLGWRGVAGWALRSATGAATKGEPVDGERRWVWMGGCSSRQRVGSRCPLPPLQEAQLRGEPLDEGAEVRAKEGVGVDGTVVRPELRRLLVFLTTTDKSASPRNTVVTLHLRMTPKGYRTQRTCVLYLMLRLSKDNNYWHRPLLVCQCGSGYSFMMYPNVEDYYDRI

SEQ ID NO: 174411 - protein, 162 aa, Oryza sativa
  Clone ID: PAT_MRT4530_72354C.1.pep
MMGNGGVVRGMAEDDWVTRPKVERVELEGSLRRIRSSAGNGGVAIPMFSHYEDQLRVGDGITAEVGVVAAEAELGGRGKAARRGEGAVEKKQENAAGRGFLAARQRKKTKKRGGGLGEIFLMDTEPKARRAWHEEGDNSDFLGDRSDGGGVGITALEMIFFV

SEQ ID NO: 174412 - protein, 161 aa, Oryza sativa
  unsure (1)..(161): unsure at all Xaa locations
  Clone ID: PAT_MRT4530_72355C.1.pep
MAEEREVPFGXYPREEIQWRRGGPVAQRIRARGYEPRCRGFESLLAHSLPKGKGLYFPPEGRKTMIGIADVKLLNLGKEIKKKGGRDSIGXIFKEDKAEDWDSIAVILYVYVKKIRRLGALPGLTRKTPKSGSNLKKKXILGKKNNIVFVFKKNRNCVFIM

SEQ ID NO: 174413 - protein, 48 aa, Oryza sativa
  Clone ID: PAT_MRT4530_72356C.1.pep
DCISVGYMCKGYWGIKGVCYRLIREWVVMGTRREVKSDWCDALKFEKG

SEQ ID NO: 174414 - protein, 66 aa, Oryza sativa
  Clone ID: PAT_MRT4530_72357C.1.pep
PPRVRKLTNLVIKHGLVSGIRHIFGGGSAEEPGKRGPQLPLSILGVTPTEEPPGLQEWVHFLPHKL

SEQ ID NO: 174415 - protein, 72 aa, Oryza sativa
  Clone ID: PAT_MRT4530_72358C.1.pep
MASTVTAEGGLGIREGRVTDGATSRRTMNARMSVKPMSLGIDYTILEQADPQTRRGAAATGAVATVPRLAEM

SEQ ID NO: 174416 - protein, 107 aa, Oryza sativa
  Clone ID: PAT_MRT4530_72359C.1.pep
MAHLIRARAIRAGTIIRVLDYLFIDSDINTRVIIVQQLELLQTECALIGTSNTHASPNAYNMLHSDMVAAVRIAHACCMFLDELSTTYLFPAHHNVNGYERVNDPSV

SEQ ID NO: 174417 - protein, 71 aa, Oryza sativa
  unsure (1)..(71): unsure at all Xaa locations
  Clone ID: PAT_MRT4530_7235C.1.pep
TATPSPPLRYSTRRLRLRLRLPASGGAXPGGEGGGXXEGDXXXQXGXRGNQIGXKXWEAXCDEXGADATXR

SEQ ID NO: 174418 - protein, 264 aa, Oryza sativa
  unsure (1)..(264): unsure at all Xaa locations
  Clone ID: PAT_MRT4530_72360C.1.pep
PPPDPXPIPCLPPQPPFNDRPPPPSPPRGPRGRPRAAAPLPHARHPSPATCPATPPPIIVASPVAAVTAAAQPVAGRQRPPPLPPRXPHPPPLAPPASSSSSQXPPRRRPPLAAPPPPRRPVPTPSSPASHCRPRSDSPPRLAAPASPPASSPXRVSPPPDPPPSXLPPRPPXDRPPPWTPXNRPPPPSPPRGPRGGGRRPVXSPRAAPPSLPRITPPPPXPPPLFHPPPSRRPLPPSPPPRSPSPXPPTPSSSPPSHCRREGR

SEQ ID NO: 174419 - protein, 135 aa, Oryza sativa
  Clone ID: PAT_MRT4530_72361C.1.pep
MAGGGGGGAALAAAAWEIAVVFVLRPLLAFAFVLSIIALSWYVAWRTVLVHVPLVQEIAGLRRKKPVKPKPKERGRFARFYRSLGERECAFELRAMNEAQSTQMYIKAKNIKLKKRNNKDFYSVQNFMTKTLFRT

SEQ ID NO: 174420 - protein, 506 aa, Oryza sativa
  Clone ID: PAT_MRT4530_72362C.1.pep
MAAAAVGTGWGRIRRRRHALRRACWRRGGRCEPGWRSRCEGDSARRERRASAPGDEAVEGRQAEERRASSPAAHEAHEAKLHLSPSRATLSMVVPLPRARCRCVVYVGNIALPHRREREMRKGEKGEKDGDDMARLTLTCSAYMGPTLTQPPRRIKPGSKPPKDLKRMVFNYTLRNIDMERFFLPRPTPVPSVASAADAVEYASLPCPAMTFYPPFSKLFANQKMEFLLLGGNHSNAVVAVDQTCRTVLYDPGEHAVRTMPALPYQVRLPTTSVTVGDDLYILDMPRHEDDDDDGDGCFYGLIYEDGLNEDWRCRALPPPPPPLSDLHVHSYAVVGDTEIWMSTHGGGIYCFDTVSHAWSTVATGWTLPFTGLAEYCHEHGLWFGFSRSNRDMSRNFVLSALDLDGGSKLPVLHRLPLEFTPPDALNLESSYLVNLGHGKFCIARFFHTDEDHRDGEELFAVLTAVEVERCDDDDDAGGANGGGLRMLKHRSEMYKLNSEMMYWVL

SEQ ID NO: 174421 - protein, 419 aa, Oryza sativa
  Clone ID: PAT_MRT4530_72363C.1.pep
MAGTGSFKVTRISEGAVKPAAATPEETLPLAWVDRYPTHRGLVESMHIFRSGADAAPGVIRDALARALVFFYPLAGRIVEPEAGSPAIRCTADGVYFAEAAADCSLEDVRFLERPLLLPKEDLVPYPGDDRWGVEPHNTIMMMQITKFTCGGFVMGLRFNHASADGMGAAQFINAVGDMARGLPEPRVKPVWDREKFPNPSIKPGPLPGLPVLALDYIVLDFPTGYIDGLKAQYKAHSGKFCSGFDVLTAKLWQCRTRALNLEPGATVKLCFFASVRHLLKLDRGYYGNSIFPVKMSAPSETVLSSSVMEVVDMIRQAKERMAVEFFQFAKEETEQDPFQMTFNYESIYVSDWSKLGFAEVDYGFGPPKFAGPLVNNDFIASVVILKAPLPLDGTRMLASCVTKEHSEEFVRGMKEDLP

SEQ ID NO: 174422 - protein, 230 aa, Oryza sativa
  Clone ID: PAT_MRT4530_72364C.1.pep
MKTTDCQESTIEEGPHVEENSTDMENEKLSIRASKLVMQRKLTSLRSHKPLKANVVQDGNMFKSVSNISNESVAVENGVRTNHTDNKYTAYMDLEDDDRPRGLLQNAKRKHAGFRSPICEHANSPLSNDEADAPANEFVTARTKLEMDSVQKYGHNGTQGASVSPQCDNNPNNRNYGVRPTWNSRRGLRGNFVPPIRNNGGSTSNMTSRVIGKNDDSMGDSTRKWSVFPS

SEQ ID NO: 174423 - protein, 99 aa, Oryza sativa
  unsure (1)..(99): unsure at all Xaa locations
  Clone ID: PAT_MRT4530_72365C.1.pep
FPNRVGSTQISSQIKLLPLSANQNRSIVTNIDSDDELSRENTSRRVAXALISLRIKLLPVSPSQNRKYHHQHRFASQILKNRYIKEYIRLVDHRMNHNV

SEQ ID NO: 174424 - protein, 138 aa, Oryza sativa
  Clone ID: PAT_MRT4530_72366C.1.pep
MGVATVAGKVEEVGREDDGRCSGEGCEDWDGGDDARRSELEWMGVNNDVTFLHVKLKELVGGCGESGWELPQLQERWRKWEERMMGGAVVKVVRIGTAATMHAEVSWSGWAAATGRERRGWGRWESARDDKEYTKYLG

SEQ ID NO: 174425 - protein, 129 aa, Oryza sativa
  unsure (1)..(129): unsure at all Xaa locations
  Clone ID: PAT_MRT4530_72367C.1.pep
SPRGPTSLSRAXXAESRSALLVVVVEFDSIRFHDAQESRSSRGLKLSSLDRSFSFFFYNRYKVFVHRVRGAPRXCRAPRRAASVLGAALGVPEGAGGGVAPEEVEEAAAAGKLTQRPVRALXERTDALL

SEQ ID NO: 174426 - protein, 78 aa, Oryza sativa
  Clone ID: PAT_MRT4530_72368C.1.pep
GGRGTNAKKDGGWAPPQGGFLRGGRTPERRHLFFKKRVPRFNGKLPPFGLSVPKTKGGKLNIPPPSQMENQADRTWLP

SEQ ID NO: 174427 - protein, 266 aa, Oryza sativa
  Clone ID: PAT_MRT4530_72369C.1.pep
KVIAEGKSWIHPTIHSPLLSSPLLSSPLRLTPPLTAYRAASVSAAARLGSGGSAADSAGIRLRLFTAASEPGQVSLPFPHLPSHLSSLGADSGRSSCRRAVAAAAPGGSCAEGGGGGGGGSPPSSQIRWRRRRLPSRPCTSRASPPRPCSSRSTSARGFSSLSHARSSSVVVEGWTRGFFFFLFAGTLIKLVYTASCGGGGAELRFAKFERRRLQECFDFVRAQGLVPPHRFPSVASPPWRRSGGTRLWHGHLLPPPPLRAAAGST

SEQ ID NO: 174428 - protein, 444 aa, Oryza sativa
  Clone ID: PAT_MRT4530_7236C.1.pep
ARGALRRVGKSGGAPALREGTFAKVKFAQNTESGESVAMKVVDRSSILKHKMADQIKREISIMKLVRHPNVVRLHEVLASRKKIFIILEFITGGELFDKIIRHGRLNEADARRYFQQLIDGVDFCHSKGVYHRDLKPENLLLDSQGNLKISDFGLSAWPAQGGALLRTTCGTPNYVAPEVLSHKGYDGAHDDTWSCGVILYVATWGYLPFDEVDLTTLYGKIESAEYSFPAWFPNGAKSLIHRILDPNPDKRIRIEEIRNDEWFKKNYEPTREIESEEVNLDDVNAAFDDPEEDADHTLDDEAGPLTLNAFDLIILSQGLNLAALFDRRQDYDKLQNRFLSRKPAKVIMSSMEVVAQSMGYKTHIRNYKMRVEGLNANKTSHLAVMLEIFEVAPSIFMIELQRAAGDTSDYNKFINNYCSKLDDIIWNFPIEKSKSRISRLSKR

SEQ ID NO: 174429 - protein, 123 aa, Oryza sativa
  Clone ID: PAT_MRT4530_72370C.1.pep
MGYLPSSLGSKAAHFVSDLTTVILNPISEREPSSPLPEVDKDEEKSEDDKDSEQNSDTPDGPDTSSFRAFLISFLSSSGSSNGSMEIIPDQNGELGYPTLTPMGKSKKGKSGLLSRGKHSIGK

SEQ ID NO: 174430 - protein, 74 aa, Oryza sativa
  Clone ID: PAT_MRT4530_72371C.1.pep
FYIKKGGEVEEEVARKGEERKEEEVVVEEKSHHLHLQPGEEELVVLSLAGCLPKVFPLPALHLILLILQFSMVD

SEQ ID NO: 174431 - protein, 105 aa, Oryza sativa
  Clone ID: PAT_MRT4530_72372C.1.pep
ETSKKSNEFVCRFVVKIPAGLAPEQAAPLLCAGLTVYSPLKHFGLMSPGLRGGVLGLGGVGHMGVKVAKSMGHHVTVISSSARKRGEAMDDLGADAYLVSSDAAA

SEQ ID NO: 174432 - protein, 71 aa, Oryza sativa
  Clone ID: PAT_MRT4530_72373C.1.pep
MRGTVSDGEATGRAGPSHCLCQKEPGMGRYAGNGGGLGRLPEKERVVASGGAAGPEQYSTGCSSSRRPAAR

SEQ ID NO: 174433 - protein, 125 aa, Oryza sativa
  unsure (1)..(125): unsure at all Xaa locations
  Clone ID: PAT_MRT4530_72374C.1.pep
TILDQSKVHIRSLQAGSGELSIVFPVVGGXRHHRPPPPTTLFALPPPPTXGPPPARSAAHRRASAXSHGHPSKADPNSSALYRSLGSPAPEKKRWSPELEKKSTNREAHPVIQKLQDLRLDFLST

SEQ ID NO: 174434 - protein, 313 aa, Oryza sativa
  Clone ID: PAT_MRT4530_72375C.1.pep
MAGLKVNYHKSEIFTLGLSDNDTNRVAMMFNCPVGQFPIKYLGLPIGPDKILNLGFDFLGQKLEKRLNSWGNNLSHAGRAVQINACLSSIPSYAMGFYQLPEGVHQKFDSIRGRYYWAGNKLKGKYHMWRKLFRSEEECKLDALVERIRQRVWANDGEIRQRVDQDADIAAEAGANARWTILSLAPSCRETWTGFSMDAFRELRRFTELAIPSAMMVWSGLDYSSMEWWSFELVVLLSGLLPNPKLETSALSICLNTGSLMFMVPFGLCTAIRKSNLKSCKFWITGCGSRFVLFFSNSGNHLFFSGTGEPKLR

SEQ ID NO: 174435 - protein, 89 aa, Oryza sativa
  Clone ID: PAT_MRT4530_72376C.1.pep
SPSLHAGAVGFGSRAVVLGSKSSPHCRRRAVEKRRSSVYALLQLSHRLRYHVTSGGGGTKAIPQHLRHLMSSTPTVHAATSGRGGGACV

SEQ ID NO: 174436 - protein, 116 aa, Oryza sativa
  Clone ID: PAT_MRT4530_72377C.1.pep
MDWVAATCSAQCEAKAKNGAVTSTGQGCRTNPLAVHAFRVTGPRGWRQQQKLRLRGWQRIGEANRQGETSEEGDIEPSVEIGSWQEEVMMLEISGGETVMGMGSSTRDVDDQVASC

SEQ ID NO: 174437 - protein, 675 aa, Oryza sativa
  Clone ID: PAT_MRT4530_72378C.1.pep
MIRLFASFPKLIPLLAVFIFSCSLPIAISDDTDTDRGALLCFKSQISDPNGALRSWSNTSLDFCNWQGVSCNNTQTQIRVMGLNISSKGLSGSIPPCIGNLSSIASLDLSNNAFLGKIPAELGHLGQISYLNLSINSLEGHIPDELSLCSKLKVLSLCNNSLQGEIPPSLTQCTHLQQVVLCNNKLQGRIPTKFGMLHELKTLDLSNNALTGDIPPLLGSSPSFVYVDLGGNQLTGGIPEFLANSSSLQVLSLKQNNLTGGIPLALFNSSTLTTIYLNRNNLVGSIPPVTAIAAPLQFLSLALNKLRGGIPASLGNLSSLVRLSLAVNNLVGSIPGSLSELRKLERLILTYNNLSGPVPQSIFNMSSLQYLEMANNSLISQLPPDIGNRLPNLQSLILSMTHLSGPIPASLANMSKLEMIYLVATGLTGVVPSFGLLPNLRDLDLAYNHLEAGDWSFLSSLANCTQLKKLCLDGNSLEGSLPSSVGNLAPQLEWLWLKQNKIYGTIPSEIGNLRSLTILYMDNNLFSGHIPPSIGNLSNLQALSFALNDLFGQIPDSIGNLAQLIEFHIDGNNFSGSIPSSLWHWKHLEKLDISDNSFFGYIPPAVGNLSSIRDLIFARNNFFGHIPSTVGNLSNLSILSFAQNNLFGHIPEFVGNLVKLTNLFLHGNSFSGSIP

SEQ ID NO: 174438 - protein, 44 aa, Oryza sativa
  Clone ID: PAT_MRT4530_72379C.1.pep
GLSFTNSAFCHRPALGLTGLPQSKKDHPVAGVHEPRYSSNPNHE

SEQ ID NO: 174439 - protein, 155 aa, Oryza sativa
  Clone ID: PAT_MRT4530_7237C.1.pep
WCRLPGRPATRSSLASGPRTPRRRCFWRGEGRRPAASTHLIPSSTDGEREETRRRWRPAVRTSHRPSRPRRPPSPRPQLRRARPFPRLPSSRSCFRCRGPRRPRSQPTHAPPRPRRSRCTPPPPHAPRYRRRARPLLPQPATRRPLPRSLAASLL

SEQ ID NO: 174440 - protein, 132 aa, Oryza sativa
  Clone ID: PAT_MRT4530_72380C.1.pep
MESNAARSIRPAWVPPPSIPIAYVSQACMAPSHHGFASDYYIAAAHRHRYWRQLQLVVHPPLLITRDEFRRGCTPTLLLARVDAKMRTDAVQRQDVVKAEVERAAGSGGGARQGSRWRRRKALSDLLVLIDK

SEQ ID NO: 174441 - protein, 478 aa, Oryza sativa
  Clone ID: PAT_MRT4530_72381C.1.pep
MARAAARSPVAIGGAEGGGACPKQRRTWEREKKGGGGGFPRRAWRPEREMKAAATTHRREGADRRRRHLRRERRGISSGEDDHDGLHRWPEMEKNGGLTGGRGKWGFGGVPATGGGGRGSNRLARPYLINFWTWTGAKQISQVVVFIDLVRANTVPTPSAERGFFVNKFMFDCISEGGVAKESIVIDVAGDDSPSDDDAEAREIERHYKEVKRKMKTRKAYNLNDVVFEGYRSLLAMHGRAKPDENSTPYAENDDEESFDEIGSDGEVIRRKSKLRESLVGQRMVPGKPRSKRRRELNELAKPKKVSKFGTTIRCRTYKKSGHNKSSCHKYTDAGTSTTASRHTTNAANASNNSVPSSIGQSRKRKAVELSTSTSACQTWRRSPPVKKAPNKTNPMVKVAASARVLTRQGGSASVNLQAIVPHSQSSRTALVRITSGKACVFVQVQEPASAKTKKSTPSRLMFLFHGNLIRCDVFLHT

SEQ ID NO: 174442 - protein, 869 aa, Oryza sativa
  unsure (1)..(869): unsure at all Xaa locations
  Clone ID: PAT_MRT4530_72382C.1.pep
KSTEQYLLYIHQLIDKNCFVRFHDAVCFVQDRNIEAVIGLDDLSSSSSSNNILFVCSLIYSSSRKSFSQRHHNLGHLCGSHLATLVNQGVFGHVSIDTTFACKGCKIGKQMQLPYPLNKSTRPFDLVHSYVWAKVPFPSKEDHIYYVILIDDYSRYTWVYFMKHRSQXLFFIYQSFAQMIHTQFSSPTRIFSLDXGGEYNSNAFXQFLISQGTLPXLSCPGAHVXNGIAGRKHHHIIENTRTLPNASFVPAHFLEEAISTTMYLINIQQSSSLQGKPPREVLFGSPPHYDHINFFXISYALYAPRRHTMLIAQLVECVFLGYCLKHKSYHCYNPFERCIPISXDITFDENKPFFYSATSQTSSLTNSISFLYAVGAVLEPSTYQEAIALPXWQLAMXGELDTLEHTSTWDHVPLSSHAIPITYKWVYKLKIKSDGSVEGYKARLVARGFQQTHGQYYDEKFTPVAHMTTLRTLIVVTTSRSYTILQIEVKNAFLYGDLHKVYMQPPXGGVEAPPGYVCHLHRSLYGLKXDPHVICAASFRLSDHXLFIHTSECGLTLLLQYVVMXDDILITGDDLDXISFVKGILNHQFMTSDLGSLNYFLGIEVASTADGYYISQRRYIEDLLTQLGLTNTRTATTPMELNVHIRSIDGTLLDDPFRYXHLVGSLVYRTITRLDIAYTIHILSQFVGAPTLVHYDHLLHVLRYLKGIVTYRLFYAKATPLQLRAFSDPTXASDPADRRSVTGYCIFLGTSILTWKSKKQAPVSXSSTMAKLRALVTTTLEIVCLXDFWLILVSFVNCHAPTTLLCDNIGAIQISNYPVNMSSSFTSSDCQQYTIALQYMSSELQIATKAQIREHHRLHLLKLNVFDPP

SEQ ID NO: 174443 - protein, 122 aa, Oryza sativa
  Clone ID: PAT_MRT4530_72383C.1.pep
QPGPCRGPHATPPPFMGVPFWRFAVASPPGVRALCCHQLTEVTAHCQCNSLRAIFKVLVKKHGFSLSCKKRPMAAIAEGLPGHCPVPSQRRRRIRRIAPFPLGDYFIPDAVQLSLTLAIVIF

SEQ ID NO: 174444 - protein, 85 aa, Oryza sativa
  Clone ID: PAT_MRT4530_72384C.1.pep
MAMASERVYVGGSDARGGGGEPVDGANFVFVCVVVGQGRAREREGPAGSRSSSGGGGGGEAARPVSADGLEKKLEVGEARESDGL

SEQ ID NO: 174445 - protein, 448 aa, Oryza sativa
  Clone ID: PAT_MRT4530_72385C.1.pep
MGQGTPGGMGKQGGAPGDRKPGGDGDKKDRKFEPPAAPSRVGRKQRKQKGPEAAARLPNVAPLSKCRLRLLKLERVKDYLLMEEEFVAAQERLRPTEDKTEEDRSKVDDLRGTPMSVGSLEEIIDESHAIVSSSVGPEYYVGILSFVDKDQLEPGCSILMHNKVLSVVGILQDEVDPMVSVMKVEKAPLESYADIGGLDAQIQEIKEAVELPLTHPELYEDIGIRPPKGVILYGEPGTGKTLLAKAVANSTSATFLRVVGSELIQKYLGDGPKLVRELFRVADELSPSIVFIDEIDAVGTKRYDAHSGGEREIQRTMLELLNQLDGFDSRGDVKVILATNRIESLDPALLRPGRIDRKIEFPLPDIKTRRRIFQIHTSKMTLADDVNLEEFVMTKDEFSGADIKAICTEAGLLALRERRMKVTHADFKKAKEKVMFKKKEGVPEGLYM

SEQ ID NO: 174446 - protein, 462 aa, Oryza sativa
  Clone ID: PAT_MRT4530_72386C.1.pep
MGQGTPGGMGKQGGAPGDRKPGGDGDKKDRKFEPPAAPSRVGRKQRKQKGPEAAARLPNVAPLSKCRLRLLKLERVKDYLLMEEEFVAAQERLRPTEDKTEEDRSKVDDLRGTPMSVGSLEEIIDESHAIVSSSVGPEYYVGILSFVDKDQLEPGCSILMHNKMAVRCQCLYKAAFQVLSVVGILQDEVDPMVSVMKVEKAPLESYADIGGLDAQIQEIKEAVELPLTHPELYEDIGIRPPKGVILYGEPGTGKTLLAKAVANSTSATFLRVVGSELIQKYLGDGPKLVRELFRVADELSPSIVFIDEIDAVGTKRYDAHSGGEREIQRTMLELLNQLDGFDSRGDVKVILATNRIESLDPALLRPGRIDRKIEFPLPDIKTRRRIFQIHTSKMTLADDVNLEEFVMTKDEFSGADIKAICTEAGLLALRERRMKVTHADFKKAKEKVMFKKKEGVPEGLYM

SEQ ID NO: 174447 - protein, 84 aa, Oryza sativa
  Clone ID: PAT_MRT4530_72387C.1.pep
LFVRGRSCVCVFVCQRDSALGARALPSTERPGGEDETEDDAVMDGRIPLTPASGGGRGHHRRAHSETFLRLPDADLLLDPEGDF

SEQ ID NO: 174448 - protein, 62 aa, Oryza sativa
  Clone ID: PAT_MRT4530_72388C.1.pep
TGAPPSDLAARGPDQRTTALDCRLQLPAARAARAPMRARRLTAASLSPPGTQLGRARKLAQP

SEQ ID NO: 174449 - protein, 505 aa, Oryza sativa
  Clone ID: PAT_MRT4530_72389C.1.pep
MEWPWPLYTNMSPNSEEGIISQTISSSSSSSCHYQCIATLSGNSSYVSGLAVDGDSLYVASSDGHIRLWPLDMAMAMVREESTSSSSQGEVSRSTVAVTGSPVKCLAATGDGLVSSHQDGTIRVWRHAGGRRRLALRAVLPTAADCLRALLLPGGGYVEVRRHKRRAWVHHVDAVTALALSPDGESMYSVSWDRSLKAWRLPGLRCAESVAAAHDDAINAVVAAPDGHVYTASADGTVKAWRRRTGQKKLSLVCVMERHGAAVNALALGGGGRVLYSGACDRSVVAWENSAGAGAGGADVRMVATATLRGHARAVLCLAADGDVVCSGSADRTVRVWRRGATAAYTCLAVLDGHGGAVKSLALARGGAGCDRCCACHVEESSSCSCAALVCSGSLDCDVKLWRVTVSEAIKGSKVHHVGRLLGLIFHLFVWLSNFVEFKGAGYIYIKGIRSTGLWYQSKQSRYQEVDTQALGTYGYQAFALMRATRRREMRQGKHRDEMATLLTN

SEQ ID NO: 174450 - protein, 62 aa, Oryza sativa
  Clone ID: PAT_MRT4530_7238C.1.pep
RRSKGSSRLTYAQLSLLEVELVVILADGVPPRKDVEHAHLRAPRIPIPVAIPPPARERDRGE

SEQ ID NO: 174451 - protein, 571 aa, Oryza sativa
  Clone ID: PAT_MRT4530_72390C.1.pep
MRNLIALGVTDVVWSILIGNCYAYSSIVRLMPRSHPPPPPPRLSPRLVDATVSRCPSDALAITFFLWCARCPAYFHPPSSFDRLLPAAARLASRLRTAPAILHQLRALGCPIRPHTFLLLLRLYWRGGIYPLVLQLFDQMPLWGFHPNAFARNVVLDVLLRTRHHHSALCFLRDNPSPNYLTYAILLTHLCRSGNWPGVRACFLAMLHQGFLPSAASLNAVFACCTKLAATSELLQLLGFTLVSGYQLTSAMWTCLIARLCREGKLDEAIRMLAKMLASGSPPTVVTYTPIVRALYRAGRHDIATELFASMSSTNCSPDLVLHNVLMDCMTKDKRYDAALGVYLNLHESQMKPDAYTLSTLVRALHLSRNVSLLPRLFLDSADIPYDLVACNSVLNALRKSGFPSQAVQFFINMIKCDIRPDSYSYVGLLDSLCQLGRIDHAINVYHSIVSSDPDSNAYVHAAILCGLVKKGHNRMALMILNEAQAEIALSELIQSSPEEALHDYILGVLAPDPPFSDEIFKGTKPKPLRSTNSRIGEEDGEGVNGGEEGPTREAPPTTDYPICHQRPPPT

SEQ ID NO: 174452 - protein, 94 aa, Oryza sativa
  unsure (1)..(94): unsure at all Xaa locations
  Clone ID: PAT_MRT4530_72391C.1.pep
CLVENAINVQPNILDGINIVLPQFLGIFHTMQERCMKSLQALTSSGPNDSGYTQLXKDFSEVLDLVIDSNITFXLFVYAYQPAALLSRSFFVNS

SEQ ID NO: 174453 - protein, 606 aa, Oryza sativa
  unsure (1)..(606): unsure at all Xaa locations
  Clone ID: PAT_MRT4530_72392C.1.pep
MGPSRSFQNLLLLLLPLALALCSAAASGEASRRFWVENDTFWKDGAPFQIVGGDVHYFRIVPEYWKDRLLRAKALGLNTIQTYVPWNLHEPKPLSWEFKGFTDIESYLRLAHELDMLVMLRVGPYICGEWDLGGFPPWLLTIEPTIELRSSDSTYLSLSLPFITTNCILRVGNSRRYTTDGGAIGNLKNGTILQDDVFAAVDFDTGSNPWPIFQLQKEYNLPGKSAPLSXMAHGGTNFGFYNGANTGQNESDYKADLTSYDYDAPIREYGDVHNAKYKVVSXALRRVIHECTGIPLLQLPSKIERASYGLVEVQKVASLFDVIHNISDALKVAFSEQPLSMELMGQMFGFLLYTSEYQEKHSSSILSIPKVFNSSFVPWVHDRAQVFVSCSHGDVRKPRYVGIVERWSSKTLQIPSLSCSSNVSLYILVENMGRVNYGPYIFDQKGILSSVEIDGIILRHWKMHPVSLNAVGNLSKLQLIMQMTDAEASKVSIYGDSENKLQDVSLYLNEGISEEPAFYEGHFHIDSESEKKDTFISFRGWNKGVAFVNNFNIGRFWPAIGPQCALYVPAPILKPGDNVIVIFELHSPNPELTIKLVKDPDFTCGQ

SEQ ID NO: 174454 - protein, 175 aa, Oryza sativa
  Clone ID: PAT_MRT4530_72393C.1.pep
LIAFLLQGNETRGFESLARTFVISGAVVAADVLLKTIYVFGFGVSLFIDVDQGTGGKWGLWFLHKLVLTGVYGLIVFMYHSRWRDRLPAKPAYYNYVCAMLLLNGISLFGCFLVATGAGFGLWLYNLTSVCYHSLYLPLLYVTFLADFFQEEDMLLENVYYSEMKDAGFFDADWD

SEQ ID NO: 174455 - protein, 45 aa, Oryza sativa
  unsure (1)..(45): unsure at all Xaa locations
  Clone ID: PAT_MRT4530_72394C.1.pep
SKGAFVHWYVGEGMXKCEFSEAGEDLSALNKDFEEVGLSPSRMRR

SEQ ID NO: 174456 - protein, 691 aa, Oryza sativa
  Clone ID: PAT_MRT4530_72395C.1.pep
MHGRPRRPDKPEDAAAAEAKAAKLRVLQAQVLHNHHSRTYTKEALGLSFKLLEINPEAYTAWNYRKLAFQHNIGELSEPEAIKSAIDDELRVVEVALRQNPKSYGAWYHRKWLLNQKLAPVDFKCEFGLLDKLLKVDARNFHGWNYRRFLARFMGVPEEEELKYTMDKISDNFSNYSAWHNRSILLSNLLIKQSKGFESKQKIFSEEFELVTQALFTDPSDQSGWFYHLWLLAQTSSPENPQLIASWPSNGSNLSLSSLSSICCYSLKEGILPIVLYFNEPVKGLSSSSVSLNSDLVVSKNIQWRPLSVTDSGHSNCWVTYLEVSNLECNSLQQFSVEVSITNSDEIVSRSGSNYNCPVHFSFTFELSNNDSTAKDIDPIHELISWDFSEPLLSHVNPSCICFEQLKITNSLVHKESNWHLERLSDEIDLFRELHDDNSKFAKLTLARLLLACAAIKSRGSSLVERKGYCEESLGLFNDLIDLDPSHKRYYEDERSLVLMDQLTCDMEAFKKYCSVKALPKLAPLNHVQLCRLSLTRIGFAERLLWVQMLDLSHNNLRSIEGLEALQQLVCLNLGNNQISSFTALEPLTKIISLKVLDLSCNEIGTHPIDTTRYICPSPFSHRVEACEAFEECRKKNINVEEFWDAILFFKHVNLVQLCLEGNAVTNKENLRTLVVTLNPSLKWLDGKFVH

SEQ ID NO: 174457 - protein, 158 aa, Oryza sativa
  Clone ID: PAT_MRT4530_72396C.1.pep
MEGVVFIGYHNNELSLIMDRLIVGNELYYYPCSQKSSVQWFLVKTNRFTLDRLREWSLNQSEPVRVGTETFKSLENPEELAFSPALMLEIDWICNIIAKFPKFRNLSIDRGSRERIEISETAKCSNYKLHQLDELLLNLHYYNLFTLIRCLSAGTNRG

SEQ ID NO: 174458 - protein, 490 aa, Oryza sativa
  Clone ID: PAT_MRT4530_72397C.1.pep
MTILLLVVFFCRMLGNMAGKNKRKKQPKLPPGPATMPVLGNIHQILMNKPVFRWIHRLLDEMDTEILCLRLGSVHVIAIASPEMAREALRRNDAVLTSRPVSFAWRAFSFGYKNTVGSTGDQWKKMRRMLASEILSSAMERRMLGQRVEEADHLVNYIYRNCNNGTVDIRHVTRHFCGNIIRKLVFGRRHFAFGAGNIGPGRDEEAHIDALFTALDYLGAFSISDYFPSLVLNGLMSTFRRLHDPIIMERMEEWRAPRRNGDERREVADFLDVLISLDDAQGKPLLSLDEVKAETLEIILNSVDNPSNAVEWALAEMVNNPKVMKKAVDELDMVVGKERLVEESDIHSLTYLKACIREAFRIHPYHPFNPSHVAIANITIAGFMIPKGSHIILSRIGLGRNPRARDNPLEFRPERHLKNTDNVVLAEPELRFLSFSAGELSLALSVEGKSVAALKNGSQAAGPTLPYFIAVHCTFAPKLLATAHCQVVVA

SEQ ID NO: 174459 - protein, 138 aa, Oryza sativa
  unsure (1)..(138): unsure at all Xaa locations
  Clone ID: PAT_MRT4530_72398C.1.pep
SLRRQKEKKNPNLRETLGRVAXSRRRWPVTDAGAGATARSRPEYSRSPPRYKRTMTRATVSSRRRWRWRXRRRAPRGYGRPLRDRAPRPQHLAHRKPEDIRIXFEQFGPVKDVYLPRISIQGITWLWVCKFRIQKMLQ

SEQ ID NO: 174460 - protein, 926 aa, Oryza sativa
  Clone ID: PAT_MRT4530_72399C.1.pep
CVSRSLLFWEKKIKKIAEANSDVSGQLQKQKELCEIQEEKLTFLTENNQRLTEGIGSVMEELHLDDKYGSLDLMKLDVIVQLILHEIKCLLNTISDAQDVKQNQILEKSLVVTLLEHFGREVADLRSERSVLRQEWQAKSEELLQLQNERHDLMKISCELRKEMEARNRRVEEMKGEAKFLVRQLSELQESRQSLQAEVIKLIEENSSLSGKLYDSREKEKTANDDFNTLLGEAISTDILGVVFKSLHDERTSQLQSLHEDFGSLHAAGNELYQEIKLMNKKLGDLQLENNYLEKELSKTMSICDSSGSEIGAGRRRTMRRDTKLLKSGRKSQQESTVNIEQRKEIDHAGLEKSNELLREKLHKLQSEVQALRSKEQPVIDVKSCDAEITKLLTNMQMATANAALFKEKVLELIASCESFEISEMVQKEVLKEEITRRNSYVNALKDKLNAVEIENSRLKVDLNGDFTLLGALQTEVSALEKQTMSLAKDCLPSNKLRMEEFSVSPQLSKIAVKPIHGEPNATKMVKDMELEKLHGTIKALQKVVTDTGVVLEQERLDFNANLLDARRQIDLLRLRDDMAAAVDDSDAASDPAAAAYDRRLLKDIQLDLVQTTTPTNRSRAATATATAAASSQRHHRRRNGGSTEAPPLGLWSVVRASRRRQQEEGGDGDDDDLRPPQSEASAERGRRSCSSEVSQLTVVKDLSVDKQELLLPPRPPPPAMAEAPHREWKKKVIERLTADAQAGRPAVDRWRAPGERGGGARARRRHRTDGRRRVRRGAAHRHQREAPPQGRGVHLRRRRRRRRRRRPPQPQPAQDPRACPQDVGEDRAARAGDAALPARAAPPRGGARHPPRRRRRGDGGGEQRQVVRRRAAAIVEGAAGGVPLRAPARQPPAAARAVVLHESQGHRRLTLIKNLHGWMDKARSV

SEQ ID NO: 174461 - protein, 87 aa, Oryza sativa
  Clone ID: PAT_MRT4530_7239C.1.pep
PPSSSSSSRTRCRPPPPPRPSRAPQSSTPSPPGHPSTPREASPQSPPSSSSGSHSPHTGSMTSSNSGGSSSSRHHLGTRSPPPPSPS

SEQ ID NO: 174462 - protein, 60 aa, Oryza sativa
  Clone ID: PAT_MRT4530_723C.1.pep
GNPLHFTPPIGNREEGENGTPRAVAHDQGEPSISHVRTLRPDLGHQSAPAALEAGDALYE

SEQ ID NO: 174463 - protein, 435 aa, Oryza sativa
  Clone ID: PAT_MRT4530_72400C.1.pep
MSVAAGVSDAAITVRDKLRGKIGQTKVKRYWPGKAPEWADDGEDDADLRTANKVSLDKAFPKDEDGDAPPLKDDRRLRRLAQTRAENKEELRADHRRIRQAEIVSTVDEENERQEAELEEEDDEEAQEERRRRIRARQLLREQDRLLPQEEEPIEEEEESEESEYETDSEDEQTGMAMVKPVFIPKSQRDTIAERERLEEEERQLEELVKKRLEARKIETRQIVVEEIRKEEHIEKTLNEEANIEDVDTDDELNEAEEYESWKNREIARIKRDREERDARLKEKEEIEKVRNMTEEERREWERKNPKPLRENKQKWKFMQKYYHKGAFFQEGADDVIQSAGKDDIYARDFSAPTGEDKMDKSILPKVMQVKHFGRSGRTKWTHLVNEDTTDWNAPWATNGPLRAKYNAKMAGMNAPIAKPKGSKKMKDWDTKQDD

SEQ ID NO: 174464 - protein, 329 aa, Oryza sativa
  Clone ID: PAT_MRT4530_72401C.1.pep
MAACCSSLATAVSSSSAKPLAGIPPAAPHSLSLPRAPAARPLRLSASSSRSARASSFVARAGGVDDAPLVGNKAPDFDAEAVFDQEFINVKLSDYIGKKYVILFFYPLDFTFVCPTEITAFSDRYDEFEKLNTEILGVSIDSVWSRAFTSYFIALYSYDMSIPLIQKTFHFCSIFITIQLWGHIYHKRHLLNLMLIHYSKYYGQSDTLKTTFSHLAWVQTDRKSGGLGDLKYPLISDVTKSISKSFGVLIPDQGIALRGLFIIDKEGVIQHSTINNLAIGRSVDETMRTLQALQYVQDNPDEVCPAGWKPGDKSMKPDPKGSKEYFAAI

SEQ ID NO: 174465 - protein, 282 aa, Oryza sativa
  Clone ID: PAT_MRT4530_72402C.1.pep
MDVSKLFYPSMAEALEAEAKAKKKKNGANKIRSIGRLPTPSIHYQPHVSATSNPYNFTNVFALFGENKNKILFSDMEGHSSTYNTELHSFMIMPDLNSPKGPNCLAAHITRTAAHARYDFDIRPDVDYDFFAYNPHGEHTDSLYLMDMDQGKPSSFELLAYYPVGEWQWCSLPLPPFFDDPEHKACSNISYAVIDGTRICISSATATYSFDTVALEWSKIGDWVFPFHAKAEYIPELKLWLGLSASSPSDLCALDLSTAAMDSCDVLPMVHHVGLDADLPEG

SEQ ID NO: 174466 - protein, 132 aa, Oryza sativa
  unsure (1)..(132): unsure at all Xaa locations
  Clone ID: PAT_MRT4530_72403C.1.pep
IKKQLEKATTPGWCMKHPNTEEGAPCKIFMGKNLNRGNRRGLPKKTKKVDPGKNLGGDTAHWCFHQWRFQKNPLRGTQQFWGGGNFFFFFFFIFIFFTIFFYFFFNYFFMFIFFFFFFFFFFFFFFFFFFFX

SEQ ID NO: 174467 - protein, 109 aa, Oryza sativa
  Clone ID: PAT_MRT4530_72404C.1.pep
SPTRSPTRTPTRPGTRGLIAAVPVRLLACLLLFYTARVLFELDDEGLKVKEDDQLEESCENVYVSVQNPWRYSTFVNGELAWYTMTYLGLLYGDLHNTLMAHSFVPCDC

SEQ ID NO: 174468 - protein, 127 aa, Oryza sativa
  Clone ID: PAT_MRT4530_72405C.1.pep
MAGRSGAPRRHPTAANGGVGDTGSTRNGTPCCSEERGICRMRPMRCGSKWPRGHLVLGHSFLSAGVYEGTQHASEEEDEPLRTNREQSHKALPKNLIAAYSRCRTSKAEVPETCSPDRRCTPASGME

SEQ ID NO: 174469 - protein, 67 aa, Oryza sativa
  unsure (1)..(67): unsure at all Xaa locations
  Clone ID: PAT_MRT4530_72406C.1.pep
PPPRPPPPPSPPPPPRPPPFPKPPPSPPXFPMXPPRPPPPPSPXPPMPXPMXPPKPPPLXNPPPAPC

SEQ ID NO: 174470 - protein, 109 aa, Oryza sativa
  unsure (1)..(109): unsure at all Xaa locations
  Clone ID: PAT_MRT4530_72407C.1.pep
FFFFFFGXKISGLTTEAKGNNKYHSTETQQECEPYNFSTEQTRXHPQVPTSGLTIHXTAVKTHQFLQSALPQPLGXCLHCCNTTIAHSHQHRAHIAHIXDQPTXRGSSL

SEQ ID NO: 174471 - protein, 628 aa, Oryza sativa
  Clone ID: PAT_MRT4530_72408C.1.pep
MGDRAAGSGGGGGGGSGVRRVGDYVLVRQIGSGAYARVWLGKHRTRGTEVALKEIAVERLSSKLRESLLSEVDILRRIRHPNVIALHESIRNILLVANNENSLLKIADFGFAKFLEPSSLAETLCGSPLYMAPEVMQAQKYDAKLLRNILNTREIRFPSDCDLSHGCIDLCRKLLRINSVERLTVEEFVNHPFLAEHALERTLSRTPSDIRDGFPFINSSPTRPSSQSSQEDCMPFPLDDESTGQDEGPVSDSKSAIKSYGFATSKRLDKTSGQSPTKHSSLVSKYIRGNNYASSSQRLDHPRRIKENKGDEGHNPKGGYPEDSPIIDSLEFVDQEYVFVHPEGSSSSMNDSRQRTMPSKLDSSSLSPPKLLTAVSAPRPIHGMAINRQQSGGTGSLDSHCSPVSGTSQGSADLNDAMDQPPSDCLTRVRLLEQYASTIAELVKEKIKDAKHLEGFSIQLVVLATWKQAIYICTSYASSATRENPSHDVTAKGFGSNAPHLLANSQLLYDTCMEIESQFLVQMEYAEELANTIGQTIDATEMPDAIEIIFQTALNLGRHGGVDEMMGKSASAMVLYSKAVSMLRFLLTEAPSLALNPALSLTRDDRRRLRTYIEAVNARLVPLQYQRH

SEQ ID NO: 174472 - protein, 106 aa, Oryza sativa
  unsure (1)..(106): unsure at all Xaa locations
  Clone ID: PAT_MRT4530_72409C.1.pep
GEETRPSQSTPTTIYGTTEANIRQDKTSAIDFRDKHGXSPTVSPDTVKRDESAISDLAGHGFEEEDYPIVDYESDLQTAMSTTVRXLPXILYWCDYDFLSIFKIQG

SEQ ID NO: 174473 - protein, 304 aa, Oryza sativa
  unsure (1)..(304): unsure at all Xaa locations
  Clone ID: PAT_MRT4530_7240C.1.pep
SIAFSKCQRKFIVEGQNCKEKVRITPPRTIATDRITPLNHKTGHPSPXTMQTGRITSLDLIRGGFGLHGVRVAVHGKDGGPEAAARMAARVARRRARTWPGSGGGGEDGSTHGAAARTHAARGRRWRRGRRRGXTRTAAHTHVDRARRRRRSALRISSXYSKARAVVVTGGFKWRCQSSGRVMXELLRRRHRSDGGGGEREGRESXGAEGGRRSVQGMPPSSPLRACVRAXCRACRRPRRRLRPXLATVRNADWTATRATRRPKPPRIGSRGVICPVYIVEGEECPILWFRGFYYNYIEQRHKD

SEQ ID NO: 174474 - protein, 148 aa, Oryza sativa
  unsure (1)..(148): unsure at all Xaa locations
  Clone ID: PAT_MRT4530_72410C.1.pep
LLTPKFGKXQSLHRPRVSIVFRVLESANGSCQVASSCVLDGVGCLADRNKGFTVXSNLVDFMTSDLQPIYTLTFGSMLICHIIISRLVSIGLYYCYILLSSVDCLHIIIYIEHIAYCXNPIDIDWNRHRLLSAIGWNYSIGLSANRLI

SEQ ID NO: 174475 - protein, 134 aa, Oryza sativa
  Clone ID: PAT_MRT4530_72411C.1.pep
MVPHAHVGPGRPTGCRPPPAVLLLQAYRRWPPALAPAAAAEREDEDATRRGVENRDSGEAETRQKRSGAAGWSKDHPDYLLEPPLLVQMRARTIKITLQRDRAPPKLELPCFVISNLAVGFSEFIEPGGRQSVV

SEQ ID NO: 174476 - protein, 293 aa, Oryza sativa
  Clone ID: PAT_MRT4530_72412C.1.pep
MEVGFLGLGIMGKAMAANLLRHGFRVTVWNRTLSKCQELVALGAAVGETPAAVVAKCRYTIAMLSDPSAALSVVFDKDGVLEQIGEGKGYVDMSTVDAATSCKISEAIKQKGGAFVEAPVSGSKKPAEDGQLVILAAGDKVLYDDMVPAFDVLGKKSFFLGEIGNGAKMKLVVNMIMGSMMNALSEGLSLADNSGLSPQTLLDVLDLGAIANPMFKLKGPSMLQGSYNPAFPLKHQQKDMRLALALGDENAVSMPVAAASNEAFKKARSLGLGDLDFSAVYEVLKGAGGSGKA

SEQ ID NO: 174477 - protein, 199 aa, Oryza sativa
  unsure (1)..(199): unsure at all Xaa locations
  Clone ID: PAT_MRT4530_72413C.1.pep
LRHGFRVTVWNRTLSKCQELVALGAAVGETPAAVVAKCRYTIAMLSDPSAALSVVFDKDGVLEQIGEGKGYVDMSTVDAATSCKISEAIKQKGGAFVEAPVSGSKKPAEDGQLVILAAGDKVLYDDMVPAFDVLGKKSFFLGEIGNGAKMKLVVNMIXGMMNALSEGLSLADNSGLSPQTLFDVLDLGAIANPMFKLKG

SEQ ID NO: 174478 - protein, 115 aa, Oryza sativa
  Clone ID: PAT_MRT4530_72414C.1.pep
MASASGGGWQRLKRRLNRMWCRYARFSQLRPKHNFRDPMVLRLHPYVPPEALVECACGGGWWLTTSSVQWLQHIPLMLSFLQGMVAGSFGFSCRAEKAIRNFCGSSYEVPGNSVA

SEQ ID NO: 174479 - protein, 531 aa, Oryza sativa
  unsure (1)..(531): unsure at all Xaa locations
  Clone ID: PAT_MRT4530_72415C.1.pep
MWPHMSSSLPSSLYLSFSFLFHSFFFFCFASGAWWERRAGGEGGRRERREGGGELVGPADRRGAAALAGRREGGRGAAVRGDRWEGAACGGQRERISGARWLEGGREGSGGPCHAGGEGGRWECREGGGEIVRAADRKGAAARGSRRERRQRAAADGREGEERRRSPVSRREVSGSAKKVWKIGTDDPRKATYGVKVGVALTLVSLFYYVRPLYDGVRGNAVWAIMTVVLVFEYTVGGSMHKGLKRFAGTMSAAALALGMHWVASKSGETLEPFVASGSVILMAAALVAYDEDFFGKLSSSFDKDYPTKISWLRHWSWQHTTTYVAATAATFSRFIPTVNARFDYGVSIFVMTYSFVAVSGYRVDDLAALVLDRIATIAIGVIICLAVCTLICPVWAGQELGLLTARNMEKLASAVEACVEDYFADPTAAAARSEGYKSVLGSKASEDSAGRAMXRPPHGRFGFRHPYDQYAKVGAAMRQCACCVEALISCAGASSRQRAPPPRLLGDACTRVGAWCARVLKEASACVATM

SEQ ID NO: 174480 - protein, 44 aa, Oryza sativa
  Clone ID: PAT_MRT4530_72416C.1.pep
CHSLSLCLYMYDHVVVFSKVLCCSSNSINCLPYRDVLLKKLYTD

SEQ ID NO: 174481 - protein, 119 aa, Oryza sativa
  Clone ID: PAT_MRT4530_72417C.1.pep
TLLVLGTLLSIIRTCSTKCLDKISSESNKVSRSIACSLVLSTAGCPTASLVTPSLLSLRHSLRRPVADFFHRCWLPRLPVPACCTAASLHHGTKPPPHKPSRIPASTSCTTHLHSSSGE

SEQ ID NO: 174482 - protein, 85 aa, Oryza sativa
  unsure (1)..(85): unsure at all Xaa locations
  Clone ID: PAT_MRT4530_72418C.1.pep
PWRYGTNFAGRTCDSRTXIEMQEPXHXTXPLRNMNSXTKASPFFEQVTITLXXEXPVVVEXKIAEXXNIRFXXXPKIXEXEEXNS

SEQ ID NO: 174483 - protein, 134 aa, Oryza sativa
  Clone ID: PAT_MRT4530_72419C.1.pep
KQKNVVTTAVHLCFLTNGNSLRLGLRCRRHAFPFEGYPCIAPLLLHLDNAGLPPACRHLCCLHAQRLAPGARSPDVPDIEHKTRPPDLHRSTLCASCAPLTLPDRRFGDTTTATLHLDSLTLAPCLDRPTVTCL

SEQ ID NO: 174484 - protein, 111 aa, Oryza sativa
  Clone ID: PAT_MRT4530_7241C.1.pep
MRVGLGRRQPPDSRLLRAAEAAGRGIATKVERPLSPIELQVTRGELDPVSARSTTNKSQYCLRSQHTIVTAAQKTKIGIDYLGPWGDTGHESGGGIDDIVLNETDCGVDDE

SEQ ID NO: 174485 - protein, 125 aa, Oryza sativa
  Clone ID: PAT_MRT4530_72420C.1.pep
KKKKKKGGGGKKKKKKRGEKKKKKKKKKKKKKKKKRKGAALLEGSSLPSPSFPLLAFSLGGGGGISLPFFFHRLAWKTPAFPQLYPFAPLPLFARWLFRAGPRSGRLPHPLLTSIGYWGPPCCGP

SEQ ID NO: 174486 - protein, 50 aa, Oryza sativa
  Clone ID: PAT_MRT4530_72421C.1.pep
MKPYRDHEIQVTKSTLEGLHPATLKKFSEALSNNSAIHDNADFVNGLPDD

SEQ ID NO: 174487 - protein, 574 aa, Oryza sativa
  Clone ID: PAT_MRT4530_72422C.1.pep
MVWALTPVDTVRGAQRCYIFAAGTYKVGRKDCDVIVQTDTSISRVHAEIVVEKMVAWDPQSGAPANPSYVRVVDRSKYGTFFNKVQGTQGSRLHKDEDAMLADGDTVTFGTGNATFRLSFVPIVVFFHGKKSGRISPCLQAVMTSIGAYATRKWSDECTHVLVDESCSLTPELLDAVLAKKQIVLGDWFKVMAEKNIHTEMPSSTQYIPKLTLDGMEIQVVEIKLIESCLAGYTFILGSSEKYKFGDKLHALLESTGAKYLHVDEFCANSQDSGAGENDKDILLVPAKSPLEFSKIRGLFPLSKITDVKLFAAILSGHLEATAIEPPAYIVASSNSTDETIVVDSDVEIDTATSDHTVAASKSEHHIEHISDDKKEVVAISEEDAVNLVEAKTSINLHSDQEKDEIVKPMEEDVKVIEKTATMRGFKVEGEDIPVMTKVPKDETLDSRDETCHVIYTQNLVVKSILQSARAESIETGGINFKRFRKRGAVSGNSFKDLIPYSREPYRESDYERGTVTDFMREEKKRRQMEAIAEDLFNNAKKQWYPVNASRTADEKAPEETTYSRRRNAPSLVL

SEQ ID NO: 174488 - protein, 56 aa, Oryza sativa
  Clone ID: PAT_MRT4530_72423C.1.pep
MDMSPAGHMQGRTVTDSSPVWAEMRWARTCAMLRPRHLLVAGQVGLVNLLRDGGLG

SEQ ID NO: 174489 - protein, 72 aa, Oryza sativa
  Clone ID: PAT_MRT4530_72424C.1.pep
GRFAFELSTPTDTMYFIADSEKEKEEWINSIGRSIVQHSRSVTDAEVVDYDSRPNSKPPPQPKTSEESEPSA

SEQ ID NO: 174490 - protein, 110 aa, Oryza sativa
  Clone ID: PAT_MRT4530_72425C.1.pep
LGGTMKDLLEVSMWGGASRVARSRAQIGSGGDHLVPVTKAACPVYRSCCNRHRRHRRQIHHGKPLPRVDRAGGNRRHRRRRRIHRGKRPAPSVPRHSTPLSCFPLVPSLV

SEQ ID NO: 174491 - protein, 94 aa, Oryza sativa
  Clone ID: PAT_MRT4530_72426C.1.pep
MGVSAGDRRKSGRWLIIFVGCERLATRREKPARGGAGKGAARRGDAGEVAAASYARAAALAESWRRRRRGRRPQRSRGGVVGAGVVLGGVAAAS

SEQ ID NO: 174492 - protein, 538 aa, Oryza sativa
  Clone ID: PAT_MRT4530_72427C.1.pep
MPCRAAARRAAVSALRLVPDLDVEPMLEVSKPGFGDYQCNNAMSVFSRIRGSATNFRNPMAVGQAIANNLPQSNIIESISVAGPGYINITLSSNWIAQRIQDMLVCGIKTWAPILPVKRAVLDFSSPNIAKEMHVGHIRSTIIGDTLAHMFEFTNVEVLRRNHVGDWGTQFGMLIEFLFEQFPDWEDVGNQAVGDLQSFYKASKKRFDDDPDFKERARQAGESFYNPYIPPVLEELTNKGLIVESKGARVIFVEDHPLIVIKQDGGFNYASTDLAALWYRLNVEKAEWIIYVTDVGQQRHFHMLFTAAKMAGWLPEQNGKKYPKASHVGFGLVLGSDGKRFRTRCSEVVRLVDLLDEAKARSKAQLIKRFTGNGQIADWTDDELDRTSEAIGYGAVKYSDLKNNRLTDYTFSFDQMLSDKGNTAVYLQYAHARICSIIRKASKDVEKLKMTGAITLGHPYERFLGLHLIQFTEVVEQACADLQPHRLCDYLYSLSLTFSKFYTNCQKYYTGENIYRNRPCLPRAPSLRAAGGREGQPR

SEQ ID NO: 174493 - protein, 81 aa, Oryza sativa
  unsure (1)..(81): unsure at all Xaa locations
  Clone ID: PAT_MRT4530_72428C.1.pep
EGQITXXGXTPXTXREQRKKQKLKXKTINSPXEXAILDTHIAALPFPPSMYRYINPAHAQNILFQFPTRAAAVPQPPWNLD

SEQ ID NO: 174494 - protein, 307 aa, Oryza sativa
  unsure (1)..(307): unsure at all Xaa locations
  Clone ID: PAT_MRT4530_72429C.1.pep
MTTVTNVGENWKKGLAKVLDHLDSIRGKLSDLDNQQEAHHIAIQRLERAGRERHQHPGDRDADGDRDSDGRHGDRPPRYHKIDFPKFDDXGDPLHFRTPEEEKVWLASYHLLDAARQWYMCVERDLGTPTWRRFSDLLNLHFGSPLRXGALGELAACRRMTMVAVYIDRFLDLLARAGPLIEDXQMDLFTTGLQEPLSIDMQLQYPTTLEVAMSLARSYERREFAMRAAPCRAGTLGCWHHHRLRLPLCLSDTTSSVGQSSAQVASRTVCRLTPPEMDERRRKGLCFNCDDPYTRVDEKSAPRRFRI

SEQ ID NO: 174495 - protein, 132 aa, Oryza sativa
  unsure (1)..(132): unsure at all Xaa locations
  Clone ID: PAT_MRT4530_7242C.1.pep
MSTSASPSIAPSAKYTEVSIHRLDPLLSQXIGSSLSHLVFFFSILVCICXHLSNLVAIPSLSHEHHYFLGPIGNPDPIEFIIAETNRIPFRLANPNLGHWKNMFKSWPSLEKTSPEKSWTVWYKHISASKQV

SEQ ID NO: 174496 - protein, 85 aa, Oryza sativa
  Clone ID: PAT_MRT4530_72430C.1.pep
MAAAAAVNAGERRLLLRRLRRRSGWGLGGRCSEKRKIGGRWRARGETVNSEKMPRGCEKASRLSLSLTCGRGTGRNCLAVAASCG

SEQ ID NO: 174497 - protein, 145 aa, Oryza sativa
  Clone ID: PAT_MRT4530_72431C.1.pep
MQVLKKQYYPTEEVEVGDKAMLLLLEAEASDSPSPFPSRCKTTSVASTAGWRIGIEMTNEYGDMVAAATDVEVNDYPALRANPRHNPKRPLGREMSVQDMVAATTNAEVNDYPTPGANHRHNPKRRSRCSTPSLALTVEGECQPQ

SEQ ID NO: 174498 - protein, 158 aa, Oryza sativa
  Clone ID: PAT_MRT4530_72432C.1.pep
PLARCSPPGTAKQPAAAVARRPVASPGLAVAGPPAAHSSMAAKWAQKTIVIPAQRRGCHLITPKILREIEGDLSGFKCGLAHLFLQHTSASLTINENYDSDVQADTEAFLNRIVPEGRSAPWKHTLQGPDDMPAHIKSSLFGCALTIPITDGHLHMGT

SEQ ID NO: 174499 - protein, 973 aa, Oryza sativa
  Clone ID: PAT_MRT4530_72433C.1.pep
MAPPPSLAWIPNILLPTVIHYSSTNMSANPNQSFDDFNKQASSNFNSFLAIVVVLSVVSIAGSVAIVYLVYRCVKKNGLPAVNINTNPTAAAAMYAVVPDSQIRDATVERFLKEIAGEKPIRFTAQQLAGFTNNYSARLGAGGFGTVYKGMLPNGLTVAVKRLHVGGHGDGWSTSQEQFMAEVGSVGRIHHINLVRLFGFCFDADVRALVYEYMDNGALDAYLFDRSRAVPVATRRAIAVGVARGLRYLHEECQHKIVHYDIKPGNVLLDGGLTPKVADFGLARLASRGDTHVSVSGMRGTPGYAAPEMWMQAGVTEKCDVYSFGVHLFEIVRRRRNLDDGGEPGSQHQWFPMLAWSKHEAGHLAEAIEGCDAMDKQERETVERMCKVAFWCVQQQPEARPPMSAVVRMLEGEVDIDAPPVNPFQHLVASPAAALRWTSTTDSAERVASFSSGAPLAAVLVKVYRGAESCGAAVAAEMKATAHYAVVPDAAMRSATVERFLWEMAHEKPIRFTPRQLAGFTRGYSARLGAGVFGTVYGGALPNGLAVAVKVLRGGMDRRRSEEQFMAEVGTIGRTHHINLVRLFGFCYDAAVRALVYEYMGNGALDAYLFDLSRDVGVPARRAIAIGVARGLRYLHEECEHKIVHYDIKPGNVLLDGGMTPKVADFGLARLVNRGDTHVSVSGMRGTPGYAAPETLMQSGVTEKCDVYSFGMLLLKIVGRRRNFDEAAPESQQWWPMEAWARYERGELMMVDDAAAAINHPSDEICSGSDGEAVVTVAEADDERRCKEAVVRMYQVAFWCVQQRPEARPPMGAVVKMLEGEMDVAPPVNPFLHLMAAPAPVPNPWATTTASSGNAVSENMRTATAAVGDERGGGGGLRRRRWGMDAAAAASSTGDGCGGASSSGYFFSPAVAPAAVRRRRQRRLLQGGGGVEGLDSLVGSLHALEVCCHGTLGAEDGFGGGGRSLDGLEVGGH

SEQ ID NO: 174500 - protein, 108 aa, Oryza sativa
  Clone ID: PAT_MRT4530_72434C.1.pep
MASVPIPSLILSLSLSLSRRPSYSDSSALVPQMGGGNESFGVVLLEMLTGRRSMDKKRPAGFGYVFKGWIDPNITSPAKLGTDLTVVVRSLEQDALQGHREWVDYGLC

SEQ ID NO: 174501 - protein, 253 aa, Oryza sativa
  Clone ID: PAT_MRT4530_72435C.1.pep
MALAQGTGDFSVVVLGSDFAVDAGAVLLNPADREEWHDCLPDLSAPADGEDFSDLEELQVVRVQGTDRAGRRIVRVVGRFFPAPVIGGDRLKKYVLHKLRTELPEGPFCLLYMHSTVQSDDNNPGMSILRGVYEDLPPEYKERLQILYFLHPGLRSRLAIATLGRLFLSGGLYWKIKYVSRLEYLWGDIRKGEVEIPDFVIDHDKILEHRPLTDYGIEPDPLHLADMPAVGYSLGRYEDKWSPEDRWYSRNYM

SEQ ID NO: 174502 - protein, 48 aa, Oryza sativa
  Clone ID: PAT_MRT4530_72436C.1.pep
TTISSYSSSFFPTRHNAMNTITYVNVRMCGVLNKFLGDKMERKLVSFV

SEQ ID NO: 174503 - protein, 60 aa, Oryza sativa
  Clone ID: PAT_MRT4530_72437C.1.pep
QANLCRTLETVITILTITSSSWSLGLVHNHHNSEHVIASYWTITKTESISMVCRIEAKMK

SEQ ID NO: 174504 - protein, 97 aa, Oryza sativa
  unsure (1)..(97): unsure at all Xaa locations
  Clone ID: PAT_MRT4530_72438C.1.pep
MEFGWALRRPMRLLDSPRHERGLPTALRXVGVKPEVWYVWLEVVMRRVLTRPLSDVDLYVNFVVCVPWPVLDMDFNAHSAWNSIREFLGVTPLMATR

SEQ ID NO: 174505 - protein, 168 aa, Oryza sativa
  unsure (1)..(168): unsure at all Xaa locations
  Clone ID: PAT_MRT4530_72439C.1.pep
FFFFFFSSYKDYLVAGSTQLGNTXSSTIKQRQXRVLTSIGPTGPTPTELAKWLRSLPQDMFPGEIASVLXKADDQRFEGNRLRRTAVNRPASEPVPRKRLVFPPANPSPEVYERENIPLPRSFDDIPVTEVNADRKPTVXQALILEQLRITDATPEELLDXSTGHTKS

SEQ ID NO: 174506 - protein, 351 aa, Oryza sativa
  Clone ID: PAT_MRT4530_7243C.1.pep
MPTMPAVVSAAGAAAPCSNVVEDLVGFLRVLSDGTILRSPGPVFCPSTFPDEHPSVEWKEAVYDKPKNLHVRMYKPSPASGGVGAGGGGKLPVLVYFHGGGFCLGSCTWANVHSFCLRLAADAGAVVLSAGYRLAPEHRLPAAVDDAAGFLHWLRERAVDGDGDGDGWWLAEAADFGRVFVTGDSAGGTIAHHLAVRAGSAAAAAPDDPVAIRGYVLLMPFFGGVSRTPSEAGCPAEVFLNLDLFDRFWRLSLPPGATRDHPMANPFGPDSPAMDGVELPPVLVVAGGLDMLRDRAVDYAERLSAMGKPVELAEFAGEHHGFFTLGPGSDAAGELIAAVARFVDVAAPPPK

SEQ ID NO: 174507 - protein, 135 aa, Oryza sativa
  Clone ID: PAT_MRT4530_72440C.1.pep
MEGGGGGGGGRRRHGRRGSTAARVEGAVGGAGRRASVMAPTSDNDDYRATTTTTAGHVASPLRDPSSPRSGGASAGRAGGGSGSAGRSGGSSARLGDEEITKMPVLESGTDDRSGADWENRYLRGFPDRHQLQFL

SEQ ID NO: 174508 - protein, 54 aa, Oryza sativa
  Clone ID: PAT_MRT4530_72441C.1.pep
CSHHHHTLHSQLGGHPIPLHITFPIYILVCSPHLIPPPWLRIYYHRGHRFTLAS

SEQ ID NO: 174509 - protein, 108 aa, Oryza sativa
  Clone ID: PAT_MRT4530_72442C.1.pep
MAAKRKAAAEATSAAARGVAAAQAAEVGLGAGASAAETAEMAATARTARMARALDPAAAITSIRWLVVGGGGEKVLEGGGIMGREREDVLLLLPPPPSPLLRCFTSSP

SEQ ID NO: 174510 - protein, 424 aa, Oryza sativa
  Clone ID: PAT_MRT4530_72443C.1.pep
MEGAAPLLAARGEEEVVEGRRRGGGGGATSAQTLGNVVVSIVGTGVLGLPYAFRTAGWVAGSLGVAAAGCATLYCMLLLVDCRDKLEEKESEETYHGHYTYGDLGEKCFGTIGRCLTEILILVSQAGGSVAYLIFIGQNLHSVFSQLMSPAAFIFAILLPMQIALSFIRSLSSLSPFSIFADVCNVLAMAIVIKEDLQLFDHPFANRSAFNGLWAIPFTFGVAVFCFEGFSMTLALESSMAERRKFRWVLSQAVVGIIIVYACFGVCGYLAYGEATKDIITLNLPNSWSSAAVKVGLCIALVFTFPVMMHPIHEIVEERFQSSGCFPKLSHKVRGAEWVGLHSSRIVMVTILSVVASFIPAFGSFISFVGSTVCALLSFVLPTIFHLSIVGSSMSPWRRWGDYGFLLFGLGFAGYGLIRALFSH

SEQ ID NO: 174511 - protein, 84 aa, Oryza sativa
  Clone ID: PAT_MRT4530_72444C.1.pep
FFFFFTHQSKALLVKKNSKQKNELYFDNRIPKRNEKHNDNNKGQHVERRSVSTGPTHKHRLTKPNSCLRSQIPELFLSCTHRTT

SEQ ID NO: 174512 - protein, 85 aa, Oryza sativa
  Clone ID: PAT_MRT4530_72445C.1.pep
CCFDDIADNATITLHFHGGVDLQLSRNATFMEITSMNGDQEERYVCLIVDKTVDGTAVLGLSPQLDHNIGFDLENKQISIYRKIC

SEQ ID NO: 174513 - protein, 42 aa, Oryza sativa
  unsure (1)..(42): unsure at all Xaa locations
  Clone ID: PAT_MRT4530_72446C.1.pep
IKCLAVYFKIFCMANVYILITQPFGMSCSVPHVGANXXPFLL

SEQ ID NO: 174514 - protein, 284 aa, Oryza sativa
  Clone ID: PAT_MRT4530_72447C.1.pep
MSELRAAHAGAVAVAVHAATVACRRLNMTVLGEGMGLGPYPFIQGYNSSGTASDLVAEMRALEAQARACYSERPMGMDSAFGSPSWDMTGGFVGSHHRRSRVLIVVATALVSRVGSPSLSPPPPVDAALAACIVVVIVGPSYPVFAQQPNIHQKQTVISYSSKSSYPNTPLLDGCFILEFFKCATEEPDELRDVDWGHVIFSTDLLLMENQLSSSVVEAGDGLGGESRIADGGRRQRELVHPIAAATAGDDKLASAINALEELLHKGSPALAAYERHVIFLKRA

SEQ ID NO: 174515 - protein, 110 aa, Oryza sativa
  unsure (1)..(110): unsure at all Xaa locations
  Clone ID: PAT_MRT4530_72448C.1.pep
SSPGSHHRRSRVLIVVATALVSRVGSPSLSPPPPVDAALAXLDGCFILEFFKCATEEPDELRDVDWGHVIFSTDLLLMENQVSRSRSSSSRGSLHRHTWPVLCGATESPS

SEQ ID NO: 174516 - protein, 92 aa, Oryza sativa
  unsure (1)..(92): unsure at all Xaa locations
  Clone ID: PAT_MRT4530_72449C.1.pep
HSPPLDVPGGFLLPARLLPRAPPGVAPPPRLAVPAPPRLPLPLLLRGALPPAPPPPPXLPPPSHGGTXCPPHATPSSTPTGSSPXPPTTTRQ

SEQ ID NO: 174517 - protein, 32 aa, Oryza sativa
  Clone ID: PAT_MRT4530_7244C.1.pep
LSTVSSYILCRIVYVCLKSVYLPRYLASLDTV

SEQ ID NO: 174518 - protein, 392 aa, Oryza sativa
  Clone ID: PAT_MRT4530_72450C.1.pep
MPRRFAGATVARGRRQSSWRCPVGPRRQPLWRPKRIISDKFFQGSICKISFEKGPNRKKFSFTFLVFAAQCDRVVLGSFGGGNIGRPPRRSMEGARQSGGALLAMEDHKWRCLQDLLSRCAGSGTASDLVAEMRALEAQARACYSERPMGMDSAFGSPSWDMTVHILLDMPPPPARCRRRRLLPPTRCSPPALSSSSPGSHHRRSRVLIVVATALVSRVGSPSLSPPPPVDAALAACIVVVIVGFSSSSSPSSSRQRSSPAPDLLARRHSLFLPTPSYPVFAQQPNIHQKQTVISYSSKSSYPNTPLLDGCFILEFFKCATEEPDELRDVDWGHVIFSTDLLLMENQVSSTCTAVRTRRQSDGLRQSGEREVDHLVQLYYECFVSNRVAMRR

SEQ ID NO: 174519 - protein, 100 aa, Oryza sativa
  unsure (1)..(100): unsure at all Xaa locations
  Clone ID: PAT_MRT4530_72451C.1.pep
MRGNHHEARQPNPTTYAVPYCQIXRLNRLTPSHSISADPSRSRFGLQPILTLFPGPISTSNSISISSLSPILGLPNLVVNTVPADLSIQRSAGPIGGSGS

SEQ ID NO: 174520 - protein, 69 aa, Oryza sativa
  unsure (1)..(69): unsure at all Xaa locations
  Clone ID: PAT_MRT4530_72452C.1.pep
WPPFPHTTRLSAARLTMWREYAARXARVWXRGAVHARGSRGCGCSGPTRSLTARGGPRARAGRREAADR

SEQ ID NO: 174521 - protein, 33 aa, Oryza sativa
  Clone ID: PAT_MRT4530_72453C.1.pep
MAEPNPQVEREVEVEEVRRPHLWYLEPRQGGEG

SEQ ID NO: 174522 - protein, 84 aa, Oryza sativa
  unsure (1)..(84): unsure at all Xaa locations
  Clone ID: PAT_MRT4530_72454C.1.pep
DGRGESFRRWEKVAEVLLVLVEQREVTXVDQSGVATRLEVAMATDRGGARGGGVPEVEWENGVGAGVEIDTAMPMVVSARLGGG

SEQ ID NO: 174523 - protein, 110 aa, Oryza sativa
  Clone ID: PAT_MRT4530_72455C.1.pep
MTPLALSMEELLPPNRQTYSNIVMLRSALVLSSLIVALSVPFFGLVMSLVGSFLTMFVAYILPCACFLAILRRTVTWYQVLLCVFIIVVGLCCAGVGTYSSLSKIIQNYK

SEQ ID NO: 174524 - protein, 86 aa, Oryza sativa
  Clone ID: PAT_MRT4530_72456C.1.pep
MVVVIEDGSMNGIPGKRRHRLETTSAPLASVAGDDLGSVGGSGGGGWGGRRLRLQPMGKRDDLECTVAMVVAAAAEGAFLGAGAGG

SEQ ID NO: 174525 - protein, 164 aa, Oryza sativa
  unsure (1)..(164): unsure at all Xaa locations
  Clone ID: PAT_MRT4530_72457C.1.pep
ATHVNTDILFNFSYVKTGAGKTYSMEGPSILHCNKQKTGLVQRVVDELFQSLQSSESMAMWSVKLSMVEIYLEKVRDLLDLSKDNLQIKESKTQGIYISGATEVSIQNSSDALECLSEGIANRAVGETQMNLASSRSHCLYXXSVQQGSTSDERVRGGKIFFVI

SEQ ID NO: 174526 - protein, 297 aa, Oryza sativa
  Clone ID: PAT_MRT4530_72458C.1.pep
MRTITARNPHDSLSFSRRHFKWPVLGKSYSHGATRGEEDYMKSSEAEEEEDEATMAFSSVCPSFHSEDFVSPPKKPPRQQHPQQQHPPQRRKVRTAVSRLRSALAAAVTGRHRQVGLGARLTGTLYGHRRGHVHLAFQLDPRACPALLLELAAPTAALVREMASGLVRIALECERAKGGPAPALPTATGGGKRLLEETVWRAYCNGKSCGYAVRRECGAADWRVLRALEPVSMGAGVIPAASCGGGEGDVMYMRARFERVVGSRDSEAFYMMNPDSTSTSSNSNSGGPELSVYLLRV

SEQ ID NO: 174527 - protein, 151 aa, Oryza sativa
  Clone ID: PAT_MRT4530_72459C.1.pep
MKQKLHNDEAHQIPNLWRLEEPISRITKQLHASDQITALRKPGGEWDGQDAEIGGGSDLHEERGGEHEADGDHDDGQRRVPVHRHGARDRLRRLHTHHTTTHPHNGEVSQHITAALSNPRSLGDIGRGAYHLAGSESLCAAALRLRRGDLW

SEQ ID NO: 174528 - protein, 266 aa, Oryza sativa
  Clone ID: PAT_MRT4530_7245C.1.pep
MPASPPPTSGTCVSGGALLCEYGIEYGNRATTTRVYSTEKLMLKPGVVVENFGFDSGDHQHGPYKKFDGLLGLGGAPESLVGGGGFIALGVPNSSNTAAGFSFTPMRRIPSVPTFYVVALTGISVGGAPLAIPPSAFSSGMVIDFGTVITGLLATAYAAVTAASDVAAMRVVAKVLRAHKALGWSTGDPCSPSKAWRPCSRRRPAVAEPSRLGPAAVAPLLCCEERRKGKNRERKNGVQGYFDTYTTLSLSISTGNNKIMGGVSSS

SEQ ID NO: 174529 - protein, 54 aa, Oryza sativa
  unsure (1)..(54): unsure at all Xaa locations
  Clone ID: PAT_MRT4530_72460C.1.pep
SAYLIIRAHYREPLCYKESWVRVKGSGVPPSKGNNYLRKDGGWAFFIYISXHSS

SEQ ID NO: 174530 - protein, 81 aa, Oryza sativa
  Clone ID: PAT_MRT4530_72461C.1.pep
KLFCVRNPFIFFYTVPSYCKSVAVTCNRVFYLLGMQLCCPLGALFAIPVKWFFPLHLVYTNLKTNNIKNSLTKLDKKKNYP

SEQ ID NO: 174531 - protein, 64 aa, Oryza sativa
  Clone ID: PAT_MRT4530_72462C.1.pep
MSSRRPCTRRSGGGYDPSRPSVTRGRAVTGGGRRLVPLENRLLLSFREKARFKAQEKWSGIPLR

SEQ ID NO: 174532 - protein, 95 aa, Oryza sativa
  Clone ID: PAT_MRT4530_72463C.1.pep
HGGGGCGADKRGPHVSGARVAGLPWTGTTRVIHRRSTGSTARIGPGPIGLCGGGQARLGSAQSRPSGHGDGARTRTRRCDHGNRRWRPLRRGPKA

SEQ ID NO: 174533 - protein, 73 aa, Oryza sativa
  Clone ID: PAT_MRT4530_72464C.1.pep
MAPPLHSEPPLNSRFLSPVFLLFASLVSPQSGSLVNSCEDGGQEWQICVPSYLYTALNVGLHREMLDIILQNW

SEQ ID NO: 174534 - protein, 99 aa, Oryza sativa
  Clone ID: PAT_MRT4530_72465C.1.pep
AHFSAVLYDISCGKELRKFLAVIGSLWILAVIGETCSFTTLLYVGFLCALTLPALYERYETEVDHLVAKGGQDLKKFYKKIDSNVLNKIPRGPVKTKVH

SEQ ID NO: 174535 - protein, 118 aa, Oryza sativa
  Clone ID: PAT_MRT4530_72466C.1.pep
MTSSPAAARHPVLTGERRRGGANGGHQRVEGDATNSPMARTTTNGNRRRRWRGRSGVGVRVDDDGDAPAIFGGNGGRDEDGDDLANPTAAFPSDDDDRSGDGARPDFLRRPRHTGSSG

SEQ ID NO: 174536 - protein, 247 aa, Oryza sativa
  Clone ID: PAT_MRT4530_72467C.1.pep
MMAASAGPGVVVVALVVVVYLILLIRPAASFRVNVGVGIGGGIGIGNQNQNQDQNQNQNQKPYYDDSNNNNNYDEGEGEGGDDQEEGPEAAAPVGPGQSFTGGRGTYKYMAHEFLDAHNKVRAQYGLQPLKWSNKLARYARRWSAARRFDCVMMHSPESPYGENVFWGTGWGWRATDAVKSWAGESSVYDWRGQSCNPGQMCGHFTQIVWNDTKLVGCGRSECVAGGVFITCSYDPPGNWKGEVPLT

SEQ ID NO: 174537 - protein, 1499 aa, Oryza sativa
  Clone ID: PAT_MRT4530_72468C.1.pep
MGNPNLGLGLASSSDHAAGPPPPSRRAPRLAKRRHAAASSRSRQPPPASPAAAPWNPFGGGGGGGTDASGQDGIGGIAPGGVGVGAGEGQDGGFVFGGAASATSQQPPVASSNGEAPFVFGSVRDSLPRFDEGWAASAKLPEKMGRMNLQTRGESSVNANKKDRSSIFGVDIPGLVLNSEVNVLPEKLTQLNLGTRVPLQGDNDVPKTFVFGGNGSGPSSDGTSSDVHRAGSYASANANGVAEKLTQYGIGNQAPLGRMGTESTNDAPPVFVFGGNVSSDHADRTNDVSSGANTNPSDTFNVTDGTGLCPEKISDVPFQQKGSGGSSRQAEAFVSGSTSNEGSVFSSAANSDAFVPPSSVNNLPPELPSCLNIGGGVTQCKQSDNSGYPSEAFVFGSDASLSSHSSKKVMDDRGNFVTGANSKAFTSVHGNMESTLPARMTKLNLGHGAPSNNNKDETAHQPPEVSGFGTNAATTFSSAQAASMPFTSIQTNVSFELKGNGGNLANEDIGNITHSRSDNDQGYGPSSFVFSSGSNAVPPSEGYAEHALQEDIKKLNINREGASVGSTKVNGSSQFVFRSKAEAIPVFGAIPQPNVPESRAFSHSNHSSSFSTSGNDMPSFSFKTTNTASDTIPGESCAVRQEPAWCSRESLFGIDYIKSAYRDKKEAHKNARKNKRPTKLKQHAQPHHFASQETCTTGPDMDLAGDYSPMDCSPYSATVEQVAKEASVMSDQSVHIHDYGVSNQSSSCAEDLVSATEHLVIDADLPTCEDEGRIPNVDTSANSFASSFSSFDEEVTIPIAPQPSSSNMHDTANGKPKSAPAEVWDDAYRLNNQGQAYEENGYRTAHEIGEHATFQESSEDFSGLNFTFGASTSPQSSVSTQRRNTRRKVRTKSGQLPKPSVTQAYVQPKSSQDKKTMQFSPEKNKAGDSADEQSTRGASTSAALETCETWRTSGNQAYTNGHFATAEEYYTRGINSVSGHDSSGYCSRALMLCYSNRAATRMSLGRMREALQDCLIATSIDPTFLKAKVRAANCQLALGDLEDALRSYTACLTSSKTSGSDRKMLAEASDGLERVQSVVDWISLSEELLKKRTVSEATTALQFISNALHISSHSDKLMEMKAEALLTLRKYEEVIQLCQETVVLAEKNSSASETTEWSGRLWRTYLICKTYFLSGKLEDALELLNKHQQVTNVKESEGRTSQECFSSLSTTIRELLSHKAAGNEAFQARRYSEAVEQYSAALARNSDSRPFSAVCFCNRAASYQALGQVTDAIADCSLAMVLDATYLKAISRRATLYEMIRDYGQAANDLRKLISLIEKQANNSGLSPKVLNKHSDLKQARTRLLSVEDEAKRDTPLNLYLILGIEPSSSPADIKKAYRKAALRHHPDKAAQLLVRNEKPDDGFWRDVAKEVHADADHLFKAIGEAYNVLSDSDKRQEYDIEENLRNATKRVSKGGRMHRSPEQRYTKQYDRGFNPRPWQSNRSSGSRSRWSGYDDDYW

SEQ ID NO: 174538 - protein, 151 aa, Oryza sativa
  unsure (1)..(151): unsure at all Xaa locations
  Clone ID: PAT_MRT4530_72469C.1.pep
GGGFFFFFFFFCFFFFFFFFFFWEQPPQNGAKFFWWSGKKFQNYTPGGPYPGKKGKNPPPPPDXPNPPNQKGASPGPAPVKGDRPPLTXPGDPRPNPPTARGGQTDAFKKKGDKKPVPPVRPGLXGPRTGAFPPATPLGRGGPPDQALGGG

SEQ ID NO: 174539 - protein, 63 aa, Oryza sativa
  unsure (1)..(63): unsure at all Xaa locations
  Clone ID: PAT_MRT4530_7246C.1.pep
RKLPIDVKGITLDSGDYNIKTVPGCTVEQMXIDMGGTAIGVGAPKALGQIKHNGVLVHIIVAV

SEQ ID NO: 174540 - protein, 128 aa, Oryza sativa
  unsure (1)..(128): unsure at all Xaa locations
  Clone ID: PAT_MRT4530_72470C.1.pep
MTEEGATTATKSGDDYVPCFGLPYREEGLEDGDDGRKGGDEDLNENEGKEALHPKHRRHPCHGRRIHERLSRAEGGRHQTAMRSAFGKPHSTCGGENLVQRLLSVRRMESTAXHGXKALCXGEVKFPG

SEQ ID NO: 174541 - protein, 467 aa, Oryza sativa
  Clone ID: PAT_MRT4530_72471C.1.pep
RGHFLCPRCRELRLVLISNELSCQMSSFPCNYLGLPLTIRKPTKADLLPLVDKVADNLPGWKASLMNKAGRLTAVRAVLSAIPIYAMMALDLPKWVLKAIDKRRRGFLWKGSDNANGGNCLVSWDRVCRPLSLGGLGILNLEKMGWALRMRWLWLQKTDSSRPWAGLSINVPKNVHSLLAVAVKTILGNGEHTKFWSDRWLQGKTIAELAPNLFALIPKRARKQRSVAQALTNRSWVADIQGGLSVQVLAEYLAIWELVEEVVLLQDVQDQHVWKFTAEGIYTCKSTNEAYFLGSIRFAPWKRIWKCWAPLQCKFFIWLAINNRCWTADRLAKRGLQHTVICPLCDQSEESIQHILISCVFSRQVWTAIFLRLGLAEAAPQPSTDRFLRWWSQATKNQPKEVRKGINSLVTLVAWEIWKHRNDCVFNNANPRVATVLQVIENEGHLWGVAGASRLQRLLSGTVNLGN

SEQ ID NO: 174542 - protein, 63 aa, Oryza sativa
  Clone ID: PAT_MRT4530_72472C.1.pep
MTSATEVQEEEGDGSMIRSNSPISRYIVLSFLNSGHYSLVTTPSSFLLDGWQQGGVVTNEMVG

SEQ ID NO: 174543 - protein, 138 aa, Oryza sativa
  Clone ID: PAT_MRT4530_72473C.1.pep
GKIAKGLQHSVICPLCDQSEESIQHILISCVFSRQVWMAIFLRLGLAEAAPQPSTDRFLRWWSQATKNRLKEVRKGIKSLVTLLAWEIWKHRNDCIFNDANPRVATVLQVIENEGHLWGVAGASCLQKLLSGTANLGN

SEQ ID NO: 174544 - protein, 60 aa, Oryza sativa
  Clone ID: PAT_MRT4530_72474C.1.pep
NPELPKCAHMFKMILHSNSFSLTTRLPSRNNDTLLTRMDKDERTRQYHNHIKGQITSKQP

SEQ ID NO: 174545 - protein, 659 aa, Oryza sativa
  Clone ID: PAT_MRT4530_72475C.1.pep
MAAVTPDEHERQQDGHCRARVNLRPAAARPFGAAARAALKDTLFPDDPFRGLGGMPPARRAWRVARYFVPALDWGAGYSAASFWYDLLAGVTIASLSIPQGISYATLAGIPPVIGLYSCFVPPLVYAVMGSSRNLGVGPVATSSLLVASIVGGKVRASDDQRLYTQLVFTSAFFTGVLQAALGLLRLGILVDFMSRPAITGFMGGTAIVIMLQQLKGFLGMTHFTTKTDIVSVLRYIFHNTHQWQWQSTVLGVCFLIFLVFTEQVRRRRPKLFWVSAMSPLLVVVVGCVFSFLIKGHKHGIPIVGTLKRGINPSSISQLKFQPEYVGVAMKAGFVSGMLALAEGVAVGRSFAAMKKERIDGNKEMVAFGLMNLIGSFTSCYITTGAFSKTAVNYHAGCRTAMSNAVMSVCMALVLVALAPLFRHTPLVALAAIITSSMLGLVKHREIRRLYEVDKADFAVCAAALLGVVFSTMITGLGVAVAISVLRALLHVARPSTSKLGRVSCGSGAGAADDDHAFCDVAQYPGAATAPSILVLQVAGSPVCFANAEYLRERIARWVEDEEKAVAGEDLLYVVLDIGGVTAIDSPGIEMLREVHGELERKGMKMAVTNPRMAVAEKLVLSGLAELVGESWMFLSNGDALAACRYTLQGSKHGGVPPV

SEQ ID NO: 174546 - protein, 38 aa, Oryza sativa
  Clone ID: PAT_MRT4530_72476C.1.pep
PRVRLMEKSFVRLTTCVISPCELYAPFYSVINGFQEYS

SEQ ID NO: 174547 - protein, 81 aa, Oryza sativa
  unsure (1)..(81): unsure at all Xaa locations
  Clone ID: PAT_MRT4530_72477C.1.pep
GPQVNGRAPARSHPNRPGSAPGRIRHKRSAPSAQVQKIASAIAKQQSGPDGVVPGQTVLXTARKILASWRAQVKKNQPGIC

SEQ ID NO: 174548 - protein, 85 aa, Oryza sativa
  Clone ID: PAT_MRT4530_72478C.1.pep
MAARRGRGRGREWEDDDLGVGGGQPPHLAAPVVCLARSAGDLAAGAFVGSLVGYGLSLLGNDNASFFLSPKEHCHRSVLSLSEMS

SEQ ID NO: 174549 - protein, 843 aa, Oryza sativa
  unsure (1)..(843): unsure at all Xaa locations
  Clone ID: PAT_MRT4530_72479C.1.pep
MVYSWFGDRTVQPMPRFKPEYLFGTEGFVQELRTMSFAIGFGTAPLYAQIPHDRDEEKCRVKVTLNTNHEDIPSLMFEAGGGNYIHACQEVARIAIGELRDCYSDQLADTEYRYHPRQPQGSDRGSYLEPAGIENDATTRHLVEMLWAMDEFRAEIVLAAQDREDRNRGKICKLEDKVDRLEKELAALKGEAPPQKARVRLTTRKRALFVPRYQLAPKVRVVEEEEVVPVSANPSVVNVSDDDGEESKRTHSKVEWGATQDDGGKPNEPSINXRCPEDLDNGNGPNNNNNNNNNNGENPTLAQVLVQQAQLMNMMMQQFQNQQNQGNNHAPPQNKLAEFLRVRPPTFSSTTNPVEASDWLHAIEKKLDLLQCTNQEKVSFASHQLHGPASEWWDHFRLNRTTAEPITWLEFTAALRKTHIPSGVVSPKKKEFRTLTQGSRSVTEYLHEFNRLARYAPEDVRTDEERQEKFLEGLNDELSYPLMTGDYHDFQKLVDMAIRQEDKYNRMEQKKRRIAHFKAQQGNSQRPCLAMGPQAVSQGGSSLVARPQRQFFNNNSGNNNRNQAPRPVATLAQHQPAKREPGNKPRVCFNCGEPGHYSDKCPKPRRVKVVPAQNNSTAPVSKARVNHVAAAEAQGAPDVILGTFLVNSVPATVLFDSGATHSFLSMSFARNHGMEVEDLRRPLMVSTPSNQALSSQRSPSVRIEIQGVPFLANLILLESKDLDVILGMDWLARYKGVIDCANRKVTLTSNDGQVVTVYALPSEPLRSSLNQVSLEEIPIVQDYPDVFPDDLPGMPPKRDIEFRIDLVPRKTPIHKRPYRMAANELAEVKRQVDDLLQKGYIRL

SEQ ID NO: 174550 - protein, 585 aa, Oryza sativa
  Clone ID: PAT_MRT4530_7247C.1.pep
MVEAGEIGGAAVFALAAAAALSAASSLGAVDFRRPLAAVGGGGAFEWDGVVPWLIGVLGGGDEAAAGGVSVGVAAWYEVWVRVRGGVIAPTLQVAVWVCMVMSVMLVVEATFNSAVSLGVKAIGWRPEWRFKWEPLAGADEEKGRGEYPMVMVQIPMYNELEVYKLSIGAACELKWPKDKLIVQVLDDSTDPFIKNLVELECESWASKGVNIKYVTRSSRKGFKAGALKKGMECDYTKQCEYIAIFDADFQPEPNFLLRTVPFLMHNPNVALVQARWAFVNDTTSLLTRVQKMFFDYHFKVEQEAGSATFAFFSFNGTAGVWRTTAINEAGGWKDRTTVEDMDLAVRASLNGWKFIYVGDIRVKSELPSTYGAYCRQQFRWACGGANLFRKIAMDVLVAKDISLLKKFYMLYSFFLVRRVVAPMVACVLYNIIVPLSVMIPELFIPIWGVAYIPMALLIITTIRNPRNLHIMPFWILFESVMTVLRMRAALTGLMELSGFNKWTVTKKIGSSVEDTQVPLLPKTRKRLRDRINLPEIGFSVFLIFCASYNLIFHGKTSYYFNLYLQGLAFLLLGFNFTGNFACCQ

SEQ ID NO: 174551 - protein, 239 aa, Oryza sativa
  Clone ID: PAT_MRT4530_72480C.1.pep
MMNSSEPVKLIGAFGSPFVHRVEVALRLKGVPYELILEDMGNKSELLLAHNPVHKMVPVLLHGDRSAICESLVIVEYVDEAFDGPPLLPADPLRRAMARFWVHFLDENCLKPLRPALFGEGEEQKKSMEETREGLTVAEAELRGKRFSGGSSIGLADIAGGGVLAHWVGVLQEVAGVSVLSDGDGEYPALRRWAKDYVANESVMECLPDRDRLLSYFTGIKQKCVSVAKSTLPKYSLLP

SEQ ID NO: 174552 - protein, 73 aa, Oryza sativa
  Clone ID: PAT_MRT4530_72481C.1.pep
QYNIPSLVVSGVFHLQAIFSFSTSMQIFSCSHWGKYFDSPRSVTNFCLITTNPLIRSYPMELGTLRLHILALA

SEQ ID NO: 174553 - protein, 86 aa, Oryza sativa
  unsure (1)..(86): unsure at all Xaa locations
  Clone ID: PAT_MRT4530_72482C.1.pep
FYVTPMDFRGGYPFFLRAKKEPSFXGFFKXRFSAKQKRLKHAPEFEFPRDDEDRRACGPPGVWNPTSPCKPLWLWLFLTQESQCHF

SEQ ID NO: 174554 - protein, 135 aa, Oryza sativa
  unsure (1)..(135): unsure at all Xaa locations
  Clone ID: PAT_MRT4530_72483C.1.pep
VFGSPPRRGPVRCRRPRXRRCRSPGARRVPPPLPWPAGRLCAEPSRARSPPHRPIGPGPFWAVDPVDRWWTTRVVPVHGRPTTRAPLPCGARLSAPLYCLLCMSLRFRFFRRSGVLRDSRRGSSSCRARQVMLAT

SEQ ID NO: 174555 - protein, 852 aa, Oryza sativa
  unsure (1)..(852): unsure at all Xaa locations
  Clone ID: PAT_MRT4530_72484C.1.pep
RVIGLAIVERARRRQAARITNLREGDANTKFFHLKMNARKRKNFIQRLRVGNMWKLKHNEKVAALKEHFQTFMARPGPRSKDLDWDVLQLPTFNCSAISGPITEEEVHAALKQSPSDKAPGSDGFTGAFYKACWETIKGDIMAVIHSFDQLRSNNLPILNSANVVLIPKKXEGAKCAGDYRPISLIHGIGKLISKVLTLRLQPHMGTLISHTQSAFIKKRYIHDNFMYVRNLTRKFHQTRTPTLLLKLDITKAFDLVRWDYLIDLIQRKGFTSRWTNWVSNILASSTTKILLNGCPGSPIKHGRGLRQGDPLSPLLFILAIDPLHHLLEKATELGHLSPLRGRAPRFRTSLYADDAAIFVNPSVQDMTALTNILSDFGHVTDLXTNMSKSQIAPIRCDNIDLSSITRIFPAGLTNFPMKYLGLPLVVGRLKKIHIQPLRDKCRSRLAPWQGKMMSTAARICLTKSVLTAQPIYHLTSLKLPDGTLEELDKIRKKFLWAGGENISGEKCKVNWKRVCRPKDWGGLGVLDLQRFASALRLRWLWNEWVAPDKPWVGTVLPCNQLDKDLFAAATTITVGDGXTARFWSSKWLDNQTPQLIALEIFMVSKRKNRTVQDAISENNWIRDIDISRIAEANQLQQYVHLWIMIRTMRPLNESHGSIRWTLTTNGQYSAKSAYRLQFLLAAKSIFYQSIWKAWAPPKCKFFSWLVTQNRVWTADRLEKRGWQNXKTCLLCYTVDESALHLLAKCRLTKRIWTEIQRWTGTDLQMDNWKNCHSVEQWWTLVAESTSTPRKPLRTLVILISWEIWCERNVRIFRNNASAPSSILAKIKEESGAXVKAGAATLQEFGILGDIT

SEQ ID NO: 174556 - protein, 87 aa, Oryza sativa
  unsure (1)..(87): unsure at all Xaa locations
  Clone ID: PAT_MRT4530_72485C.1.pep
HRPSSSINGPLWITNSGAPEWNNNNSITIDSRGPILLEXYNLDAKLATFYRERIPDRMAYACRDQXARAIYEVTQXITHLTCADFLR

SEQ ID NO: 174557 - protein, 183 aa, Oryza sativa
  Clone ID: PAT_MRT4530_72486C.1.pep
MVSNTIRVAVGILGNAASMLLYAAPILTFRRVIKKGSVEEFSCVPYILALFNCLLYTWYGLPVAYLMILFQKFVLRMVLPVLAFFALTAIFSSFLFHTHGLRKVFVGSIGLVASISMYSSPMVAASPNFIGCPMGILQLVLYCIYRKSHKEAEKLHDIDQENGLKVVTTHEKITGREPEAQRD

SEQ ID NO: 174558 - protein, 102 aa, Oryza sativa
  Clone ID: PAT_MRT4530_72487C.1.pep
MASNISKRFTLASVTRPYGRRVCGASTGLEEIKRSSSRSIAASTALSSSLWPLGDSGDTSGKDVKDECIGGTWSGWCEKKINHNLYRVSEGLVPGGTRHRRY

SEQ ID NO: 174559 - protein, 547 aa, Oryza sativa
  unsure (1)..(547): unsure at all Xaa locations
  Clone ID: PAT_MRT4530_72488C.1.pep
MGAGRPRRWKLPFHRSAPSSPSSPPDPEPHSPARSAVVVVAEEEAPPAEFVCSILGALMADPVILPSGQTYERACLQACAELAFLPARDXSASDAVIPNAALKAAIGTWCARSGRVVPAPPSGDAAREAVLRAMPPDAAKSVRTRRAALASSSNSSYSSPASAASTSSYTSSSEIIPAEDEVGVKPVKEGTNKDAVREQVEMAVDPLEDVVVAKVMDAEEEEEVVLAVAGLREATRESAERRRALCTPRMLGALRRVLLIPRHASARVDATAALVNLTLEPANKVRIVRAGAVPPLVEVLRSSTSPPEAREHAAGALFGLALNEDNRAAIGVLGAVPPLLDLLTSPAHAAPARRDAGMALYHLSLAAVNQSKIARFPGAPKALLAVASSAAERMPIRRLALMVVCNVAACTEGRAALMDAGAVAAVTAILSHDTRSAELDEWCVAAMYAMSRGSLRFRGLARAAGADAALRRVAEECAPGIVRRDMARKTLRAMRNEADDAADLTGSSLECGDGDDCAGSIVSDGLMSFRRRQRELGSSSCGNTAEF

SEQ ID NO: 174560 - protein, 128 aa, Oryza sativa
  Clone ID: PAT_MRT4530_72489C.1.pep
MWCRGQQGDGIGGGVRAAVLTGGSLARKLIGCGLWAARRRSARAERRRQRQGDANKMFDEMRRGMWIRRISFDLKRREYVRVRHYNILDSDGIALHASEPLPNINDDRVEPKSKLMEYNKYINDHIQI

SEQ ID NO: 174561 - protein, 115 aa, Oryza sativa
  Clone ID: PAT_MRT4530_7248C.1.pep
MTGPDPNQNQNHDALVIEDPQIEEVEAIAHHPTQTHDVQRRSTSSVRPQFLNIPIASAPLPTTLKDYHDMVEDLVNKRLKQISIEQTPRPMESELEKLYEAWHDLVPFPAGWHPP

SEQ ID NO: 174562 - protein, 112 aa, Oryza sativa
  Clone ID: PAT_MRT4530_72490C.1.pep
MAGRADGDAGGAGGRMRAAPPYGIDFLTHMPALPYLSPDLRGENLLVCANFASAGVSILNDTGIQFLAMRLELEEEVGDEHDDAAGTRQVEGGVAGDDGVLAGGDAYLSMTA

SEQ ID NO: 174563 - protein, 69 aa, Oryza sativa
  Clone ID: PAT_MRT4530_72491C.1.pep
SLINWAVVALTQSDTRSNVVGKEPPNIHYSLCLVDHLHKQKLNVMSFYNRPEGCTVLHLSGYFLVSGLL

SEQ ID NO: 174564 - protein, 175 aa, Oryza sativa
  Clone ID: PAT_MRT4530_72492C.1.pep
MARPSGVWQVTACRLQAGEDQGRLPLVVDFVGRWRSGEANKKVDESCDDKANGNEPEEGNIVLPRLSIIVAARASLSHRYRLGIPVANSQHSQHTRARGLAQLHLLRELAGWPPPPICSAYRASTNLPELTATGDGETVVVVLDLAGFSAYVTGAVHSGRAPGPSSSPPTSVIIN

SEQ ID NO: 174565 - protein, 116 aa, Oryza sativa
  unsure (1)..(116): unsure at all Xaa locations
  Clone ID: PAT_MRT4530_72493C.1.pep
IYTREGGFELAGNTMPVLLIIHGMKLPDVMTAPEQCARTNVQDNWIIDCILXHQRHSLHMFCLVYDDVSARLNYWHMEVWGDNTYTIINTDRXPHRVKFDXXPTCDDKCLWDDEAV

SEQ ID NO: 174566 - protein, 55 aa, Oryza sativa
  Clone ID: PAT_MRT4530_72494C.1.pep
WYAIYLWPEPIEFPWPFGASYPCPCPASLRPPFSSSASSPSAGFIKSLGKNRFVL

SEQ ID NO: 174567 - protein, 546 aa, Oryza sativa
  Clone ID: PAT_MRT4530_72495C.1.pep
MSARRAAAKCQHEPATPPAPRILNMPRRPAGGGRPTRSAGRAQQQQRMAAPGAVNLGALFEMERRVRGLESAPASPPPYSRAARSQEDAGEQEEKWRFQAEILRAECNFLRMEREVALRKLDRHRGQMEAALKSAVETLVSGRKKIDGRGDVGVAAALDEGIEDLEEMMEDLRVEKESGRRAVSSRRELQRSNGRNFDRQASSLRRRLEKMPPADAEPCVKDIREIALPVAPQSPPPPAEHSDVDDDHSNSPNLSDVEMLRMKMEGMSKGMRERMAEYSRRLEAVAGGDNNNAADDCQSRKCGSRHSRKPSASSQRSWSGGSTNAGASRDTAASHGRSRHTVAPEKHHHHHQQHKIMSEECKMVGSGSCCDCREIVGKIMEQVRTESEQWTEMQDMLEQVRLEMQELQSSRDTWQRRAIASDISLRSLNSQVLEWKHRAHVSEQHVEDLQKNISELESKLHTFKAHFPSPGQPNQEWSEACKMEKPIRSNKAQHPPRPSHEPGGGREKEKHVLICRVKHSPSVAAKRQPFQEIGNISLPRHAPMKR

SEQ ID NO: 174568 - protein, 60 aa, Oryza sativa
  Clone ID: PAT_MRT4530_72496C.1.pep
GPHPLFFGPSLKRWFPFKKKRGGFKRVFLTQILKKPLQIFCVSLRGPFFGFFRACQGGKV

SEQ ID NO: 174569 - protein, 115 aa, Oryza sativa
  Clone ID: PAT_MRT4530_72497C.1.pep
FILLTYIYIYICIYVYIYICIYVYMYIYIYMYICIYIYVYMYIYIYMYICIYIYICIYVYIYMYICIYVYIYMYICIYIYVYMYIYIYIYIYIYIYIYIYIYIYIDVSRYRQSRV

SEQ ID NO: 174570 - protein, 76 aa, Oryza sativa
  Clone ID: PAT_MRT4530_72498C.1.pep
ILLPAENFFKGTGFMLGLQVELLFPENPWKFSGVFLLNVCPPFFIFCHMGFLKKKKKKKKKKKKKKIKTQRVEKTK

SEQ ID NO: 174571 - protein, 49 aa, Oryza sativa
  Clone ID: PAT_MRT4530_72499C.1.pep
LQVIMLPHRGQRNGHRQLCVCHSVCAVLGILSFLCLLCCRMKAAQQAIV

SEQ ID NO: 174572 - protein, 615 aa, Oryza sativa
  Clone ID: PAT_MRT4530_7249C.1.pep
MVEAGEIGGAAVFALAAAAALSAASSLGAVDFRRPLAAVGGGGAFEWDGVVPWLIGVLGGGDEAAAGGVSVGVAAWYEVWVRVRGGVIAPTLQVAVWVCMVMSVMLVVEATFNSAVSLGVKAIGWRPEWRFKWEPLAGADEEKGRGEYPMVMVQIPMYNELEVYKLSIGAACELKWPKDKLIVQVLDDSTDPFIKYNEAAVAGRHNELSEKNRGDQNLVELECESWASKGVNIKYVTRSSRKGFKAGALKKGMECDYTKQCEYIAIFDADFQPEPNFLLRTVPFLMHNPNVALVQARWAFGKDFIPNFAVNDTTSLLTRVQKMFFDYHFKVEQEAGSATFAFFSFNGTAGVWRTTAINEAGGWKDRTTVEDMDLAVRASLNGWKFIYVGDIRVKSELPSTYGAYCRQQFRWACGGANLFRKIAMDVLVAKDISLLKKFYMLYSFFLVRRVVAPMVACVLYNIIVPLSVMIPELFIPIWGVAYIPMALLIITTIRNPRNLHIMPFWILFESVMTVLRMRAALTGLMELSGFNKWTVTKKIGSSVEDTQVPLLPKTRKRLRDRINLPEIGFSVFLIFCASYNLIFHGKTSYYFNLYLQGLAFLLLGFNFTGNFACCQ

SEQ ID NO: 174573 - protein, 100 aa, Oryza sativa
  unsure (1)..(100): unsure at all Xaa locations
  Clone ID: PAT_MRT4530_724C.1.pep
MKNMINPRQYAIXXKXEHEGCQYNAIKANEAPLISHLAGEKSXIRALPDDGTDNASASXREQARSIKNRXGEXHGAFNHRIQQQNYPGISNNPKMRIQET

SEQ ID NO: 174574 - protein, 103 aa, Oryza sativa
  Clone ID: PAT_MRT4530_72500C.1.pep
GALGYHVTTLGPSARATPRPSPGHHVAGGGGGARDTAPRFQCVRPQPSRTAFNAAWAGVWRRLIDPRQSGMTSLGVPRVRRRASLGPTCSQMTMLLPVEAKDS

SEQ ID NO: 174575 - protein, 872 aa, Oryza sativa
  unsure (1)..(872): unsure at all Xaa locations
  Clone ID: PAT_MRT4530_72501C.1.pep
MDRRKKGIVTKQTESKKDTSKPKWQTSELGIKSIERLAADXASGQAQQRDAKIRSLGNSIRLLSVVASLHAPPQPPRHAAPTSAPAAAEAHTCGVPNSHLSACAQLYLSVVYKMERNDHVSARHLLQVFVDAPYLARKNLLPDLWDHVFLPHLLHLKVWFTAEADLAPDDRSRRMKTLQRLYNDHLNSGTAQFAIYYKEWLKSGGAEAPPPPSVPLPSMPGDFDAWDKHSSSLRRSSINRGLYNAVFGTAMEQEDVKDTKLEDDEMSQLVLETDVELEDNPGCLKMGRIAHFRDPNGCKEKQPHFDIIATALEPMPTWNVINHPKIPKKEAVSVEKDLECSELTMNLERAVSMVSSSDSLTQCEYAVQEVARACSNLREDPNLGTWLSCPSFIQGLLEVTFTSKDDLVLECAILIIGELILSNEVNRQIVLNADPQLEVFLRLLRSKELFLKAAIVLYLMKPKAKQMLSLDWIPLVLHILECGDEVQFLSSVKCAPKVAALYFLDQLLMGFDVDRNVENAKQMIALGGLDLLMNRIDGSDSRESKKCISLLTSCIQADGSCRHYLVDNLKKEPIVQLLVGNQKKASSAALNLLSELVCLNRTTQILEFLKELKNGGCLNTMHILLVYLQQAPIAQHPLAAVMLLQLDLLGDSSQYSVYREEAIDAMVAALEHGSHSRKLQEQCARALLLLAGRFSSSGEPIAEAWLLKRAGLDDSLSESFRRTEIFKDKSARVEEEKIVEERLKKLALMLLNSGNKKFLTALSNCISDGIPSLARACLITVTWMSSSLSPLHGCNTFQPLACSILATKLVDSLSYDRVLEERVLASLSLLNLVRHPECLEKLYPLKKDTVESLQDLAEVTWTAKELLFACCR

SEQ ID NO: 174576 - protein, 168 aa, Oryza sativa
  Clone ID: PAT_MRT4530_72503C.1.pep
RTTAMAENPLFDEVVAIYDHLVDNPDAARIVLDAARSDFAHNDDEIAEVEIQLGYVLQRAGELMTEPMDEVEREAQRVFLVEAYHDLRARVDFLLERRRQLDQVVNLLLFIRTYAIIKRALRRLLPAAALVFVAGTAAVVVYVEWRRGTVPTFETFGMIFTRLMCFFL

SEQ ID NO: 174577 - protein, 381 aa, Oryza sativa
  Clone ID: PAT_MRT4530_72504C.1.pep
MATSGAAARPPVATTLSARRGTAPSATAAAASCPASSARRTTWRPRARLSSGNAARARARLLRVEASSMADPVEESLPAAPHTATDAPLETQPQVRTSMWNWKGYNIRYQYAGTSGPALVLIHGFGANSDHWRKNIPVLALKNRVYAIDLIGYGYSDKPNPRELGESFYTFETWGEQLNTFCAEVIKSEAFFICNSIGGLVGLQAAAMEPQKCKGIFLLNISLRMLHISKQPWFGRPFIKSFQSLLRNTVIGKLFFSAVATPESVKNILCQCYHDTSAVTDELVQFILQPGLDPGAVDVFLEFICYSGGPLPEELLPRVKCPVLVAWGEKDPWEPVELGRAYASFDTVEDFVVLPNVGHCPQDEAPDLVNPLVESFVTRHS

SEQ ID NO: 174578 - protein, 72 aa, Oryza sativa
  Clone ID: PAT_MRT4530_72505C.1.pep
KKNFLILKIKRLGILQEELKLFQSYKINVTLQGGSKTFLKIRQFLPPTKLNVLQKTIQSGWDPKLTGPVGGH

SEQ ID NO: 174579 - protein, 50 aa, Oryza sativa
  Clone ID: PAT_MRT4530_72506C.1.pep
KVPSYFFQLTAVERLRIGFLPHFTTLVGLFLPPAFGPLFKKVPYCLGSDF

SEQ ID NO: 174580 - protein, 94 aa, Oryza sativa
  Clone ID: PAT_MRT4530_72507C.1.pep
SGTTLGWSYQNSGEDTCNMQSISYAHAMRSLITVLPSIMHAPAPPGTPRACPSSAFTPENIKKDPPPPPTTTTTTTTQPRGARRQPSSWPSLRA

SEQ ID NO: 174581 - protein, 149 aa, Oryza sativa
  unsure (1)..(149): unsure at all Xaa locations
  Clone ID: PAT_MRT4530_72508C.1.pep
IYFNQHWFLFXVDIKDRMLVFWDSLHNEGDDFFRPIMAQLKANLPTAWDKFVCSPMDFRTFKTVFPPVPRQNLSCDSGVFVMKFIELWSPRILLSNLLSNENICNIRVQYANRIFFHEKNQMLQTEIQNVVLNWFDSVKFPCSRPATFK

SEQ ID NO: 174582 - protein, 621 aa, Oryza sativa
  Clone ID: PAT_MRT4530_72509C.1.pep
MEATGAEATLSQVTAVDGEDNLFQDKESRATAKERGEAAVFGLENIVTANGATSAADLAPPKDVVDEWPEPKQTHTFFFVRICSYEDPSLKAKLEQADKECQKKIQARSHIFEALRTKRSERSNIISELKPLAAENKQYNEVVSGKLKEIEPLQKSLGKFRSENNAMRAQGAGLCSSIEELDQLIKSLNDRISHESISLDEEKRLVKEIKQLNGTRSKVIENAAKRAKMQDTVVERGTIHDQVKQIGVGIDEVKRDRQAVRDKIKVLEDQIHAVDGEIAALQDDLTAATARKDKAFEALNELRKTRDLNNTSFHQYRTISNSVRDLSARGEVEAVQQLCQNEVEKFMAQWCSSKSFREDYEKRILVSLNSRQLSRDGRMRNPDEKPIVLETQVAPPAEQEPAPLKKPAKQAKEAPAPRADVTPKDEIRAKAPAKAAKAKQPLDIDDIPDVHDDEPPKEKTKPKVDEAKLKEMKRQEEIEKNKLALERKKKQAEKQAMKAAARAEKEAEKKLKEKEKKARKRSATAGGAESEEAAESDAKSDEAEAQEEEPAAPVTIKKNARHRSTVTKTKTPLPKAVLKRKKSQAFWSWGAPMAALAAALVALLGALVYYQYYYLPASTSN

SEQ ID NO: 174583 - protein, 288 aa, Oryza sativa
  Clone ID: PAT_MRT4530_7250C.1.pep
MAGEEIGASEEHGCAAGGEPMNDYERQRLARIRENEARLQALGIRRLAASPLLHSPASSAGGKGKRKSRAADADEEYLPSDGGEDDDEEESSSTSDQDGEEEEDAEASSRSRKKGKKKVLNSGKSSQVTHRKENAHLADSVDDDAALQQAIALSLAESLENSVPAMSGETPSTGMKGSGSTPCKKNNTVPIQDSAKTMRIKKQGKSRIQLTEDDVVAFFFSFDEVGKGYITPWDLERMATVHDFIWTDSEISKMIHCFDSDRDGKINLEDFRTIVSRCNMLQEPEKSG

SEQ ID NO: 174584 - protein, 395 aa, Oryza sativa
  Clone ID: PAT_MRT4530_72510C.1.pep
MEVVEADETRQRRRRGGSDGHFKDDDGNLECDDAGDGIALLLLMLLQCGGLPGIAVGRCVVFNFGDSNSDTGSLPAAFGFYLGPPAGRRFFHRQTGRWSDGRLYIDFIAEKLKISYLSPYMESSGSDFTSGVNFAVAGAAVTQKSAIPLGLDTQVNQFLHFKNRTRELRPRGAGSMIAESEFRDAVYAIDIGQNDITLAFLANLTLPEVERELAASAAMVADAVRALRASGARKFWVYNTGPIGCLPQTLALRQKPGDELDAAGCLAEYNAAARSFNAELAAACRRLAAELGGGEDGATVVCTDMYAIKYELFANHSRYGFERPLMACCGHGGPPYNYANLKTCGQPTATACPEGERHVIWDGVHYTEDANAIVARKILSGDFSSPRTKLKALCK

SEQ ID NO: 174585 - protein, 596 aa, Oryza sativa
  Clone ID: PAT_MRT4530_72511C.1.pep
MSVSRIPPSTLTSLLPRALNPRVAVVDLVAGHLTASDAPDEARPIEDELSRLLPYLGSDELTAVVLRAGHSHPLPTLRFLLALPPPAQPSPTHLAFLAGSLASSRLFSQALDALSHLLRLHPGHDALPTLLRSSATAPHPSLPGLLVKALLRHARLRDALRAALRATAAGAPPDAAAFNALLAALSRAGRFDDLWAARAVMARAGVRPNAHTFNILVAALCRGEDAERAQGFLEELEEQGFEPDGVTYNTLLSGYCRRGRLQDALHLFDVMPYRRVQPDLVSHTVVMDALCKAGRVRDARRMFDRMIQSGLSPDAVAYSVLIAGYCNEGRLREARFLLMEMVGCGFSSEGFALKVVVESHVKFSKLLTCLNMVAPIRKHGVVIPSQSYSCLIGALCEDMRPNAARGLLHWMIEDGHSPSLAIYNMIIECFCQCDIVEEALDVKVEMISREVRLDFNTYRALITCFCRLGRSLDGESIMAEMIESGFQPNEAICSALVCGFCKEGALNRAELILRAFVLDFHVHCNESYNALMRAYCETTSSKESLELQNRMLELGFVPNSETCRSLILGLSKSIDLVSSDDGFSCISSKDNGGNAE

SEQ ID NO: 174586 - protein, 130 aa, Oryza sativa
  Clone ID: PAT_MRT4530_72512C.1.pep
MEERRRGMTMRRPNDEGRSTGWPEKRRRMVTRRPVMRGWMTMRSLATRGCAVRRLTTWAYDKAGGNEMTSDEDANDEGARARNKAGGDDGAHNEEANKMGRCNRRLGMVGWGLGTRDNDSGMVEEDLGIG

SEQ ID NO: 174587 - protein, 82 aa, Oryza sativa
  unsure (1)..(82): unsure at all Xaa locations
  Clone ID: PAT_MRT4530_72513C.1.pep
PPRSSSPAGDRGPPIARPVGTFEEHSXLSKKGRKGGLLKLGPIERSYLVKGGPGEGKSXFPPACLPGXXPVXRGNPSQESGR

SEQ ID NO: 174588 - protein, 534 aa, Oryza sativa
  Clone ID: PAT_MRT4530_72514C.1.pep
MAAPSNRKRKRRSAGAAGARKRARRHSVVKLRKQHESTCHDRISELPDDLLTTILGHLDTRTSAATSVLSRRWQHLRKSVPKLRFSQHDILPQTELSHFLRAHEYVFFKPSLCPWKRRVRANPERLIRLVGRYRTRIFLSLLTGYLHKSNAGDKNGTKISSLVLCCTMEDFYANLIDKLISIAICRGVEHLNLETYLYSANDQRPSPAPYKFPLSLFADGKGLSVTKLILAECTLSIPVGFAGFKSLVELSFTEMHISEDMIQTLIENCPNLECFRLRLCSGARHLKIASPHLQLREIMVKSCLQITHMELFAPKLQQFTYRGPCISMVLSSVPLMEHACLDYEGRRDGESVKYILGKLSQDFSLLTSLSIVLNTYRLKNPVIPEVVPTPFKNLKSLTLGAIMHCNDDIGWVTMLLEVAPVLESFQIELLTNEKREHPGGVLWEPSDNAHRHLRQVKFYRFRMRQADVALAGLLLARAPLLQTMTFSRGSVHRSPGQTAQYVEAAADWTAEQRSAITRRLETCNAFGARLEFRS

SEQ ID NO: 174589 - protein, 127 aa, Oryza sativa
  unsure (1)..(127): unsure at all Xaa locations
  Clone ID: PAT_MRT4530_72515C.1.pep
MEVTTIAISVCVKVTSISFAFPSLHTMPNHFFVDHLPFCASQPPEHDHANDALEHAPERRRFDIIVVRPFSSIPKQAAMPRISPRPPLQDASRTLARNIKNTENTSFSSSTXSELTSAVIVDYRCLG

SEQ ID NO: 174590 - protein, 129 aa, Oryza sativa
  Clone ID: PAT_MRT4530_72516C.1.pep
MGNAAARGMRHDDYATAAAATGGRRRKRCSKNTEAGSVPASVPGRRGAEHSAAAAATGVTVKVVLRRKDAERLIARLNEQSAMGRKARMAEIKSEIMAGDGGRGAAAASASPGRCRDAWTHRLAPIQEN

SEQ ID NO: 174591 - protein, 67 aa, Oryza sativa
  Clone ID: PAT_MRT4530_72517C.1.pep
HASTATTVRRAPYKSSSNPPRSRRPHPRSRTLASPPTAHAATNGERPRARRASLLPPRTRARRPRGA

SEQ ID NO: 174592 - protein, 724 aa, Oryza sativa
  unsure (1)..(724): unsure at all Xaa locations
  Clone ID: PAT_MRT4530_72518C.1.pep
MSIRLVSGGIGAARGTCAARASLMGRHGREEGGPRGARGERVARRGGRGPPRGTHMAVVGFTVGRVHAEARRAGWTDGGGPTCSRTACRGPRAREGRRXGRRLTGRDLTQSSGPGTEVASTWKSRRMGRQRRPGRLIRRLTACGGIRRTAASRKGQLALAAGGGEGELIPRLGSGRGRATTAGGGGQSRRHADVAAREESEGCAGLGLAEPVWCCDAHAVTRDPMVTGGARTAALCSGGSGDTARRQRRRPTALGQPGGGQRDPRGRGGERNRRERSRRWRIAAAAITGEQKRGKHDETTRVRFKGMGASPGFKESVPGVGLDGAAPRLAGDERRPPGQSMATGELACGARATSGGLAARPGAVSMRVRGXASRATTRAREGVDEQEGRTEGRGGRRVPRVPRHASSHAPVSRCSAADGDGESRGRATMARWSRSVKWEGLRWEGELGFGFYRRGVRRCRFGGGXRTDLGGQALGLRQRRFRGRCESGDGVDALGGEGGGSDGRFRTTGAQGWRGQGGSGELAWSRWWRGRDRAQRWRQRRPVYAPAPGQGRERDGLARKGKAKGGGGKGALLLPFLGGEAGEARGIGVATLAACGMRRRGHGDAADDSEKGGGLVWRRARTKAVDAAGATVARPQRSAMSGAARGSIGVARSRRGARGKGGRRIQTAAAGIGAEVRRKQRGRERERAALSLGSGTTRVLSTWEGKGEERLRGDGPRRKRPTKI

SEQ ID NO: 174593 - protein, 602 aa, Oryza sativa
  Clone ID: PAT_MRT4530_72519C.1.pep
FRLCWVREEGETSRASRPATGGGRLQRRSTYVRTLMAPAGQPDGRTGRRAGIRRDLSADIHRSIDRLLTHLLLLITELPTPIADAKMQCSNSIACTAYCRMCMYARTDRTVRSEERSRRTDHHACSSDVYLHGRKIDRGSVLPKIIETFKTIKNENKKKTIIKEGVEEHSNTSVLHYYMQCEVIAWQIRSIDGVQTDGDAKSSRSHDQHTGTSRLHGTELAWCSSVLNLVNVTSRRPVLLKIDNSWKWTHTRRGEKAEQNESLASRSKEVKAIGEDEHRRVQLAALSFPRFTPPPPPPMAAARMKNTTMGCAFLLAAFAMAAAFVPVAESRTTPVEKTTTTQAEDGVKKPDCVPAFDPRSFPGHGGTTTPTPIPGHHGGGGSSGTTPSHGGGPSGGALPSPSHGGAAPSHGGGYGASPPVTPSPGGGYGGGSPAPSHGGGAYGSSPSTPSGGGSSPTPSHGGGAYGGGGAPATPASHDGHGLIPTTPGTCDYWRSHPMEMWSALGRWPSSVGHFFGSGSGGAGTGMSIQDALANTRGDGAGELMREGAAALLNSMTRSGFPYTAEQVRDAFAAAAGGGSDGAAAAQAAAFKKANEGGRAEYP

SEQ ID NO: 174594 - protein, 1415 aa, Oryza sativa
  unsure (1)..(1415): unsure at all Xaa locations
  Clone ID: PAT_MRT4530_7251C.1.pep
MYSSPKALLYLFHLAVLYRRLGPTSRTPHFGPGSNHPAHFMFTPSLGRLRALRVPCGPSAHVAERQTPKQTDTNLNAAAPPASRPASDAGAAAAAGDPPLAAAGCHDRPDGRRAVEVPPRHRPAGKXIPIPQTPTAKPFLLPSSTASRPPPPPPLSQGVGKTTLVTRVFETLRESHPHLNIRGFYTREVRESGERVGFEVVTLDGRTGPLASSKVSSRESVRWPTVGRYKVDIASLESLALPELQVKDDTDLFIIDEVGKMELFSSAFFPAVMRVIESNIPVLATIPVPRLGRDIPGVARLRNHPGAVIYTLNTGNRDAMREGVYNHLSSLLQKRNAVRIMSRRRSNMKKHVSFKLNKLCFSVLFILQHQAPTSGSDLHLHKIQSTWMKHRRQGGENMGPSSLIACFSWQFGGIIIAKHFMAFSSSPACRQGQLARMPSQEEIKASLPASVKNLQERDPISTVGEATVSPLIGGGRPVVAGELHANCREEAREDPSYCWISLATSATMLQYLDFSHASTSRKWSHKKQGEGFEAPRNSMEFTLEAPQSYGVFQEDVPYSCNMRQQYPKAGLNHSSSPIKRIIHEDVSFRTNEVQKRPSVIARLMGMDSPPMSTTAGELAAGHTEEKRQDMITSTRPMPRRDPSEMVSTKHVSFVQHKGSMKHSPKQAEVCAYDDSMELFGQLSKAISSSEWAKPQPREHPQEEELQKFKKDFEAWQASRMWEQSRALELESHLDDDDVRCTDIVPYRFQHRGKDNAGKKHTHSNGDAHWRRSKESGTGTGTSISGSRTFSLTSADASSTRLPLSRFYYEEERLLSPKKIVILKPCPEMSTDDIEESSLGSPEMVKKENNMEAFLEEVKKRLKVELEGRMASDDRAADRWAAGGDIPADPKQIARSIANQIRETVTKDLHSALLRSESTRSYRSDIPLNGQSQMDYICRDARKHLSDRLKNVLRREPETEPPALSHRRRTASASFNEEPRPKPRHEVARKGKIRSKEEKKHAIEFDVRSFRRGHHKASPTPAIDSDPVSPRNLIRSFSAPVSGTTFVKLLSEEPRVLTGARLQRKQEGYGSRPPPPSSEEERKGRKDTFNIKGRVSNLRQNLGLRAKLFGKKLHSADESPFPDDLPPIGTLVTAPSVLIHPGVLQENSTEVPPSPASWCSSPPDEMSRGGYPSPVSPLEASFSEHRSPLKMAARDMSSSASEPEHPSSEQAQTDQELAETSPIQDDDDDDTDEIDNPIKAYIRAILVIAGLYGQRRSSDQLFSDREVKPIPAWVFEEVESSSSSSAPATTDCDAAATGVDHRLLFDLINESLPRVVQSSTTLCAFSRWYGAAPRRSPGGKRLLDGLWNTVQAWLAPPPPTDSPNSVDELIGRDMSMSPWNGPFREDVGAAGAEMEAEILDELVDETLWDVLLNVGD

SEQ ID NO: 174595 - protein, 728 aa, Oryza sativa
  unsure (1)..(728): unsure at all Xaa locations
  Clone ID: PAT_MRT4530_72520C.1.pep
CILDLFGGIGAAQRLXAARPNQMGRRGREEKAHEGARGEREARRGGRGPPRGTHMAVVGFTVGRAHADARRAGGRGXGGPTRSVSALRGPRARVGDGGRRLTEVSFXPGRVEVAPTWQPRRMGRQRRPGRLIRRLTACGGIRRTAASRKGRLALAAGGGEGELIPRLASGRGRATTAGGGGQSRRHADVAAREESEGCAGSGLAEPVRCCDAHAVTRDPMVTGGARTAVLCGGGSGKTARRQRRRPTALGQPGGGQGDPRGRGGERNRRERSRRWRIAAAAITGEQXRGKHDETTRVXFKGMGASPGFKESVPGVGLDGAAPRLAGDERRPPGQSMVAGELARGARATSGDSAARPGAVSMRDRGASRATTRAREGEDEQEGRTEGRGGRRVPGVPRHASSHAPVSRCSAADGDGESRGRATMARWSRSVKWEGLRWDGELGFGXFYRRGVRRCRFGGGXRTDLGGQALGWRQRRFRGRCESGDDVDALGGEGGGSDGRIRTTGAXGWRGQGGSGELAWSRWWRGRDRAQRWRQRRPVSAPAPGQGRERGGLARKGKAKGGGGXGALLLPFLGGEAGEARGIGVAALAACGMRRRGHGDAADDSEKGGGLVWRRARTKAVDAAGATVARPQRSAMSGAARGSGNGGDEIQIADGRRKSKAASGERDGEARVREREERGRCPRCVSRAAHVEGVSRRECWAGEGEISPKPQGGRVDFLQEISLRSILRI

SEQ ID NO: 174596 - protein, 73 aa, Oryza sativa
  Clone ID: PAT_MRT4530_72521C.1.pep
YSVFFQQTKQREDIVEWVFVFWKNWSVDFIKQSVISLSRERNKHLLFTMSTPGLHAMFATGMLHSFIDDSLII

SEQ ID NO: 174597 - protein, 133 aa, Oryza sativa
  Clone ID: PAT_MRT4530_72522C.1.pep
KNGVLTTFFFIVFYGFTFNDCSFLNAAGPGARPGKRGPEPAGPPGAPNGGAQNTRGKPGQGRREGERVHGGKHPTRKGAKEKRVKGGGPKGGGNQHKPGLPDGGITRGEAGQTRTQTEPATPGEGAVRRPGPR

SEQ ID NO: 174598 - protein, 361 aa, Oryza sativa
  Clone ID: PAT_MRT4530_72523C.1.pep
MEPFKGNFSNLLNQGSSSQATNSEAQNSLSTQFPTSYPQNFRPSFLQNFHPFGPPSNYQPYRHPPIFQGAQQQEYYGQPTPGSLEGFQLQENLVHSFNQAFGFAANRSQFVDPIKGNDKKSEQYWKAVAREFNSNMPSNGNKRNPKQCRTHWDNVKRDVTKFCGFYSKARTTFTSGYSDDMIMEKACEWYKKHNNQKPFTLEYMWKDLKDQPKWRRVLEESSHNKRNKISESGAYTSSSNQDTEEETERKEKRPEGQKAAKQRQKGKGAPSPLGDKPSQNMVLFHEAITTKAAALLKAAEATLIGAEAKKEKAIAKKEKARAEKYQMYLKLMEKDTSTFSEAKLKRHENVLDQLARELAEE

SEQ ID NO: 174599 - protein, 334 aa, Oryza sativa
  unsure (1)..(334): unsure at all Xaa locations
  Clone ID: PAT_MRT4530_72524C.1.pep
MGNLLQEAWKVFNFKKIWCTHLTKHLDLQPIDHSLXMQYSTSIRATANTSSHGSASPCHTRHNEKEVVEVEEASDSSEEGRRGTRINWTEDDNIRLMSSWLNNSVDPIKGNDKKSEQYWKAVAREFNSNMPSNGNKRNPKQCRTHWDNVKRDVTKFCGFYSKARTTFTSGYSDDMIMEKAREWYKKHNNQKPFTLEYMWKDLKDQPKWRRVLEESSHNKRSKISESGAYTSSSNQDTEEETERKEKRPEGQKAAKQRQKGKGAPSPLGDKPSQNMVLFHEAITTKAAALLKAAEATLIGAEAKKEKAIAKKREGKGRKIPNVFKTDGEGYINLQ

SEQ ID NO: 174600 - protein, 111 aa, Oryza sativa
  Clone ID: PAT_MRT4530_72525C.1.pep
QTDRHRRTTTEILNFLSRRKGNKSASPRPLPRPPSLLPTPERRRTAASPPVAEPRVHPPARRPPPSDPPQVRAPPAPPTALPSPGDRRPTHSHPPPHRWIGLDTSRGAIAH

SEQ ID NO: 174601 - protein, 582 aa, Oryza sativa
  Clone ID: PAT_MRT4530_72526C.1.pep
MRAKVELAVLLLVLVGVAAGTRPPSAPPPVTEDTLQKVAGSLEMYVDELPQMPKIYGFSMRHGHPSPIRLTIGMYQKKWKFHRDLPASTVFVFGTSAATATFPGPTIEAAQGVPLSVTWQNYLPARHILPWDPTVPTAIPRRGGVPTVVHLHGGAHPPQSDGSAFAWFTAGFGETGPAWSTPTYTYPNAQSPGVLWYHDHALGLTRANLLAGLLGAYVIRNPAVEAPLGLPCGDEFDRVLMLADRSFYADGSIYMNYTGIIPNIHPQWQPEYFGEAITVNGKAWPFLAVARRRYRFRIINTSNARYFNLSLTNGLPFTVVGSDTNYLSKPVTAASLLVSVAETFDVVVDFSQSTSSEAELVNTAPYPYPDGQAPNDLNGKVMKFVISPAKAKDTSRVPAKLLDYVAVAEEEAVQRRYIVMYEYEDAATGNPTHLYINGKRLEDPATETPRPGTTEVWEVINLTPDNHPLHLHLATFQATRVRGLVDEDAFKGCMAKLNDAVRCNVSRHAVGEEVAVPEHEKGWKNVVKIAPGYMTTIVVKFFMVDSGKPYPFDATAEPGYVYHCHILDHEDNAMIRPLKLIK

SEQ ID NO: 174602 - protein, 48 aa, Oryza sativa
  Clone ID: PAT_MRT4530_72527C.1.pep
MAKNLFLQMAGWPTSPSGVTIAREKSIFTGGALKEAICENPILQTLDC

SEQ ID NO: 174603 - protein, 105 aa, Oryza sativa
  Clone ID: PAT_MRT4530_72528C.1.pep
MASTLTNVGLSTPAVEVSTLVRPVTGAGRVVVPRVGRGGFAVVRASGPATPSDISDKMRESIDKAMEACADDTGSGERAAERDEVEELSAAASHACDKLMETYDP

SEQ ID NO: 174604 - protein, 113 aa, Oryza sativa
  unsure (1)..(113): unsure at all Xaa locations
  Clone ID: PAT_MRT4530_72529C.1.pep
MRERGRPSDQTDGQDFARTEEIARQGGMAAPSQPAGGRPRGRRQAVXCQGVGSPARRRRCGRTSSGWGKSTKAAAKPTFPVPGEGRWRDELQGGARTAVNRHCPEEAGVRRQS

SEQ ID NO: 174605 - protein, 108 aa, Oryza sativa
  Clone ID: PAT_MRT4530_7252C.1.pep
GLRTRANRVRRRPATARAYDKVVTQVAPIRPTTAYADDPRHLTPSYKVEGATRTAAYAMYYHSTAILYVQAIRTPARAPYENLLSTTYANPVRQQRLGITPPTIVPGK

SEQ ID NO: 174606 - protein, 105 aa, Oryza sativa
  Clone ID: PAT_MRT4530_72530C.1.pep
MADDDDDQDEVQESMEDQTAAAAGLDSRVKASLVLGTESFAISSESGILSEQLAAMKEKSMEILKGYITKHNAPADVPDEPIEGLSDDEGDAPAKNPPKKPKKQK

SEQ ID NO: 174607 - protein, 129 aa, Oryza sativa; identical to SEQ ID NO: 151117
  Clone ID: PAT_MRT4530_72531C.1.pep

SEQ ID NO: 174608 - protein, 55 aa, Oryza sativa
  Clone ID: PAT_MRT4530_72532C.1.pep
SASAAGSVLAADGEGPRIAPRHASLNMQDRHSYQQVADQRDNPMALRAAMMRCWS

SEQ ID NO: 174609 - protein, 150 aa, Oryza sativa
  Clone ID: PAT_MRT4530_72533C.1.pep
MSHTPAVFKERKRVAGRLLREQSWCRQAGAVAGGLWLMSDGVRSRERGGAKVAAAEKSRWSSGWAEKSRWSARLMEKTSAPWEAGEDLASAAAADEDDVGSCCCRPRRMGKTTAPAVAGEDLASVQCAAAAAAEWDETTTRGGARLGLRG

SEQ ID NO: 174610 - protein, 129 aa, Oryza sativa; identical to SEQ ID NO: 151117
  Clone ID: PAT_MRT4530_72534C.1.pep

SEQ ID NO: 174611 - protein, 59 aa, Oryza sativa
  unsure (1)..(59): unsure at all Xaa locations
  Clone ID: PAT_MRT4530_72535C.1.pep
LYNNMAALIDKKKSWWRTYLLKSQRGRCHHSSFRVALAAAVVAAXAGAGAGAALYHVQQ

SEQ ID NO: 174612 - protein, 205 aa, Oryza sativa
  unsure (1)..(205): unsure at all Xaa locations
  Clone ID: PAT_MRT4530_72536C.1.pep
WRKTTQIRAIAIWRGGSRRRGSVVRRRRLAVVAAGSGGSXVTPEVDPPSPEDGSGVGRARGGGGATEPAAGXTTVAAAGCCGNQMHSRRRQRRGARGDGGGSGRTTASGGRSHLAATGPVLAFSRTCVLAMSVCGWWARVWRRWLRLFVVVLLLVSRAPASALHRRRAAATTPRRRCRHQGWCRLVVVTGAGACSSSSSPGRRRS

SEQ ID NO: 174613 - protein, 269 aa, Oryza sativa
  Clone ID: PAT_MRT4530_72537C.1.pep
MEAPTTPAGVQSCPEETSTAKPPSIPEAASATHGGYGVQGQFLTKCSITHWTYLSKRPTIGHCAQERRNVQSSLWQRKDARFLCEGMHHVLKDNQLSLVLAKAMRDQKTTLQPVRQLMALSNSSSNSSVLPLAPSAVATHSDSNNIVTKVMSSLLWFQLGACTAGRVHIKDPSRTTTNSRNPHDVSRKLAEIVPYMGKKYPRIRAIRKSEKCRLFLKDNSSIIPGHPKAHIQDFMKDLPISSLLGELSGYQKVIMLAVQYRDRKFHEPS

SEQ ID NO: 174614 - protein, 105 aa, Oryza sativa
  Clone ID: PAT_MRT4530_72538C.1.pep
GRFFFFFLLKTFAFYFSSPIAITSSSNHVYMNGSNETYSINPLIFHEHYYTTTKGSNRVQCCSRLHGCNHSTYRFGCIRRCTLGSNTRTQDRHRLNQRRREGQPW

SEQ ID NO: 174615 - protein, 99 aa, Oryza sativa
  unsure (1)..(99): unsure at all Xaa locations
  Clone ID: PAT_MRT4530_72539C.1.pep
SPIKTDATSTVKALGGKRGGPTRLPTHHDSHVKRKIPMPKRMKEKELNRKPKDKRLIYLGLEEYLVTALVPSNTGVLGKLTGQDKPDPRXGAHTRRGWA

SEQ ID NO: 174616 - protein, 129 aa, Oryza sativa
  Clone ID: PAT_MRT4530_7253C.1.pep
GRGFFFFFFRRIVVPANSEFPPDDHLPGQGWTWMDEMVARSKRFAVIETDKTLHLRQHRAEVAPESHRNPSSYTTTTTRTPPGRKEGRNQPPNPQRVRPWRLSALTTSMAGTVLPRPPSVFVTASRLTL

SEQ ID NO: 174617 - protein, 183 aa, Oryza sativa
  Clone ID: PAT_MRT4530_72540C.1.pep
GGPGYDEDFAHKGDLPSPNWLFVWRNRDPPKAQFFAWLLTKERLPTKVNLCKKGIVQSVLCPICHSAEETVAHLFFLYPFATAFWNQLEIPQTITSASDLYALRPNGRLPTKHFKVFFLLCLWGLWNNRHDVVFRGESPSLHRLVTRCIEDATLWAERLICADRIVVESWKQILSSPFALCNL

SEQ ID NO: 174618 - protein, 48 aa, Oryza sativa
  Clone ID: PAT_MRT4530_72541C.1.pep
GTLNATTYFTEVHVPNATHAHVPTTSYKTTPKSLATNNKLQTKPTSNI

SEQ ID NO: 174619 - protein, 46 aa, Oryza sativa
  Clone ID: PAT_MRT4530_72542C.1.pep
MAAACTDGTEHRMLGSFSGTHEGGQQNNLTLHANAFRDVIFIHGIS

SEQ ID NO: 174620 - protein, 60 aa, Oryza sativa
  Clone ID: PAT_MRT4530_72543C.1.pep
LTVTCPTFLYIDIHYVYHQLSCCLDDLVNIIYAILAPFWICGTKNRIWYSTIQSFNGSQR

SEQ ID NO: 174621 - protein, 103 aa, Oryza sativa
  unsure (1)..(103): unsure at all Xaa locations
  Clone ID: PAT_MRT4530_72544C.1.pep
SAVKVNLYQNALLSPFWNINAHSVVYITQGRARVQVVNNNGKTVFNGELPRGQLLIIPQHYAVVXKAPRKGCSYIAFQXHPNSMVSXIAGKNSIFRALPNESS

SEQ ID NO: 174622 - protein, 67 aa, Oryza sativa
  Clone ID: PAT_MRT4530_72545C.1.pep
WGTVGWRGPQLRCGRRCTSKHWNHHGSVWRLGRARRHRDGKGEMEVGDGSEGGGDKRRMDDPIIVNH

SEQ ID NO: 174623 - protein, 120 aa, Oryza sativa
  Clone ID: PAT_MRT4530_72546C.1.pep
MQIFVKTGQTHLFEVGSSTTVADVKELVQSREGVDASELYAVFNGKPLADSELLSLAGVEEEQTLYILGRLLGGGKKRKKKTYTKPKKQKHKHKKVKLRVLKFYKVDDSGKVSRLRKQCP

SEQ ID NO: 174624 - protein, 601 aa, Oryza sativa
  Clone ID: PAT_MRT4530_72547C.1.pep
MASHLTRALLSSPPSSAAAAATASAAAALLSSTSPLPAARFLQLHAHLLRTGLLLLPLAPTAASAFLSLAAASLPSHRALPVLLHHLALAPETLPSTFRLNAILRSLRGPDALRFLRRARALGRRGNAFSLSIVLGHCRALAHARQLHANVVAEGHSPDALLATSLVSSYAACGDGDSARKVFDEMPVRDTIAWNVLITCYTRNRRTKDALKLFDAMRGGENGAEPDDVTCILLLQACTSLGALDFGEKVWEYAVDHGYGGELKVRNSLITMYTKCGCVDKAYQVFCETPKKSVVTWSAMISGLASNGFGKDAISAFEEMGRSGVAPDEQTFTGVLSACSHSGLVDEGFKFFDIMCYEYQLKPNVHHYGCMVDLMGRAGLLDQAYELVVKDMRVAPDATIWRTLLGACRIHGHIDLGERVINHLIELKAQQAGDYVLLLNTYAAVEDWGKVAEVRKLMKEKGIQTTPGCTTVELNGEIHEFIAADASHPRKAEIYEKLDEINKHLRIAGYVPNVSSELHDLDSEGKECALAYHSEKLAIAFALLVTPQHRPIRLAKNLRVCVDCHNFTKVFSGVYHRLVIVRDRTRFHHFKEFQCSCNDYW

SEQ ID NO: 174625 - protein, 49 aa, Oryza sativa
  unsure (1)..(49): unsure at all Xaa locations
  Clone ID: PAT_MRT4530_72548C.1.pep
GRFFXSLHSTFIVLGSSHKEGVNDGDQVCHTRDTITWPSPQLLGCYARR

SEQ ID NO: 174626 - protein, 61 aa, Oryza sativa
  Clone ID: PAT_MRT4530_72549C.1.pep
HFFFPLSLAPYLLGPLNFFLIKTFAIFFPKFYAFLHKKKFFPPRFRPVNFRGNHGAVPWVC

SEQ ID NO: 174627 - protein, 326 aa, Oryza sativa
  unsure (1)..(326): unsure at all Xaa locations
  Clone ID: PAT_MRT4530_7254C.1.pep
KRKKKKKKGRRSPRPFRERTTWGGREQTPGPLRRSPRRTGRRQDEHQAGDPRGAGEANGGRRRLFNEKKDPTGAKATKAAKKKRAXPKRXPPQQQQRHPAPPPHRKPRRRPPQPRQGPPRTARGAHQASRAKPRDPAGANAEAKTQHRPPTGAERQQTRTNPETRSKPAQHTDQPTKGPKKNKKPPGGPPNPTPTNREPPTPPPTGHRQNPHTAKTRRDRPEPTQTKPQNPPPTRRPTTRPPPKQATETEGTTPTPQNPTATATPTTPATRSRPHTTEPPRPNQDSPKQKPPNREQTGTTRRTRQREKHQTHNTQTPPTPTQRPPP

SEQ ID NO: 174628 - protein, 40 aa, Oryza sativa
  Clone ID: PAT_MRT4530_72550C.1.pep
SGLQAELSISKIKAISPYSALAFHATGKLREAKGFLKEAL

SEQ ID NO: 174629 - protein, 117 aa, Oryza sativa
  unsure (1)..(117): unsure at all Xaa locations
  Clone ID: PAT_MRT4530_72551C.1.pep
MQPWVVGAPPTPLPXAAGSIAAGSRAGGRREGRREPPLACDRRHRRRTHPPTPPTLPSPLDLGQEGGEWGEGSRSRRHNRRICRRQGARGGGGSRCKRHPNPPPPLGDVEGRAAKAK

SEQ ID NO: 174630 - protein, 166 aa, Oryza sativa
  Clone ID: PAT_MRT4530_72552C.1.pep
MIPEFPRWRAVQRGFGARGSRDCWRQRPTACGGQSTWQQPAERLRHYLASGVGARRRDADQTADRRPPTDPVATREVGRHGATVGGGSVTATTNPRWAIGGKRDGRWLREGGLGMTTRGIRREMLHGDQGEEARRHSVNLTRAKGRGGSFNGDWLTRHETHDANMK

SEQ ID NO: 174631 - protein, 148 aa, Oryza sativa
  unsure (1)..(148): unsure at all Xaa locations
  Clone ID: PAT_MRT4530_72553C.1.pep
TRSPRRPPPRSGPCRLASGPRPEKGHQLKELKLGIILVTYLVKPLISRLGGGRPRKRRRRDLASAPRGALDSFAFAGFWLRAGFPSVPFLPIGRPGGPLLTAGLVXFFHGISPDDAYASLDXPILGLLFATLVVGSYLRNAGMFKHLG

SEQ ID NO: 174632 - protein, 285 aa, Oryza sativa
  Clone ID: PAT_MRT4530_72554C.1.pep
MVMSGGGGGARIVSDPAATPGFRFYPTEEELIGFYLRHRLAGTRADDVARVIPVVDVYGYHPSQLAAMAGVATAGDREQWFFFCPRAERELHGGRPARTTPSGYWKATGSPSFVFSSSAAAAARVIGVKRTMVFYQGRAPSGTKTRWKMNEYKAVAAAAADDDHNAAGVAVQLPPMAPPPSSSACVRLRNELSVCRVHHQPQLQQQQRQLPSSAAAAATNGNLIALAGGYECSHDSSGGSSEDAAIDWSSLITAATDSATAAVDFSFNDDIDFSPAAVGPWAPQL

SEQ ID NO: 174633 - protein, 307 aa, Oryza sativa
  Clone ID: PAT_MRT4530_72555C.1.pep
MVMSGGGGGARIVSDPAATPGFRFYPTEEELIGFYLRHRLAGTRADDVARVIPVVDVYGYHPSQLAAMAGVATAGDREQWFFFCPRAERELHGGRPARTTPSGYWKATGSPSFVFSSSAAAAARVIGVKRTMVFYQGRAPSGTKTRWKMNEYKAVAAAAADDDHNAAGVAVQLPPMAPPPSSSACVRLRNELSVCRVYVSTGTLRSFDRRPLDAPPVISHHQPQLQQQQRQLPSSAAAAATNGNLIALAGGYECSHDSSGGSSEDAAIDWSSLITAATDSATAAVDFSFNDDIDFSPAAVGPWAPQL

SEQ ID NO: 174634 - protein, 143 aa, Oryza sativa
  unsure (1)..(143): unsure at all Xaa locations
  Clone ID: PAT_MRT4530_72556C.1.pep
PSSSLSSAPHHQALCRPCLASVQGSPPKSSPRRSSPSSPSRHRRARSSSLFPCLVAWCFGRSGGSRSVVRSRRRRPRVIASQKTLPTEKPAVPAPPXTLREFAAPSADNVAIGPQVNIGDVDFDLKSSLITMAQASPSSSWDG

SEQ ID NO: 174635 - protein, 1157 aa, Oryza sativa
  Clone ID: PAT_MRT4530_72557C.1.pep
MALEARAVQISIPTDACCFSGGKSSHRMSPATQLVRAPQHAVATAYAEKSLEAGGNAASLPNNMLELVNVVMHQRKAIEDTMRKKKKQQLHKFEMLPSPYDTAWVAMVPLPGSSSQLPCFPQCVEWILQNQQSNGSWDLNQLDSITKDALLSTLACVLALRRGLLFIGRNFSIAMDEQLAAPIGFNITFPGMLSSVIEMGLERDEEVMLDITTCAMAFRILRMNGYDVSSEMSDARIWWAINGVLTTVVDDFFDVGGSREELENLISLVEMWDEHHKEELYSEQVEIVFFAIFNSVNQLGAKWLDLLRSMMTEVEWRISNYVPTPEEYMENAAMTFALGPIVLPALYLVGPKIPESVVRDSEYNELFRLMSTCGRLLNDVQTYEREDGEGKVNSVSLLVIQSGGSVSIEEARREIMKPIERCRRELLGLVLRRGSAVPGPCKELFWKMCKVCYFFYSRGDGFSSPTAKSAAVDARRPTQDDLNADTRVANIEIISGKFKSIVDLGSEAVLNMIVLFIFLYFKNPGLPKEGAKPPISRTTDDHCCRLDEVCYAPSTNTGRGGSPATDTVECSIHIAARATPPARPSKTQEGAPGKDKGPAPDIGVIYVFDDGSWGTRGFGVAVTRDVLSSTLACVLALKRWNVGQEHIRRGLDFIGRNFSIAMDEQIAAPVGFNITFPGMLSLAMGMDLEFPVRQTDVDRLLHLREIELESSWLERDEEIMLDITTCAMAFRLLRMNGYHVSSVELSPVAEASSFRESLQGYLNDKKSLIELYKASKMKYALKFPFYTTLDRLDHKRNIERFDAKDSQMLKTEYLLPHANQDILALAVEDFSSSQSIYQDELNYLECWVKDEKLDQLPFARQKLTYCYLSAAATIFPRELSEARIAWAKNGVLTTVVDDFFDLGGSKEELENLIALVEKWDGHQEEFYSEQVRIVFSAIYTTVNQLGAKASALQGRDVTKHLTEIWLCLMRSMMTEAEWQRTKYVPTMEEYMANAVVSFALGPIVLPTLYFVGPKLQEDVVRDHEYNELFRLMSTCGRLLNDSQGFERESLEGKLNSVSLLVHHSGGSISIDEAKMKAQKSIDTSRRNLLRLVLGEQGAVPRPCKQLFWKMCKIVHMFYSRTDGFSSPKEMVSAVNAVVKEPLKLKVSDPYGSILSGN

SEQ ID NO: 174636 - protein, 236 aa, Oryza sativa
  unsure (1)..(236): unsure at all Xaa locations
  Clone ID: PAT_MRT4530_72559C.1.pep
HASDHLRSIGSWSGSLLKESVCSNGVKKAPIFEEMKYALKFPFYTTLDRLDHKRNIERFDAKDSQMLKTEYLLPHANQDILALAVEDFSSSQSIYQDELNYLECWVKDEKLDQLPFARQKLTYCYLSAAATIFPRELSEARIAWAKNGVLTTVVDDFFDLGGSKEELENLIALVEKWDGHQEEFYSEQVRIVXSAIYTTVNQLGAKASALQGRDVTKHLTEIWVCLMRSMMTEAEW

SEQ ID NO: 174637 - protein, 485 aa, Oryza sativa
  unsure (1)..(485): unsure at all Xaa locations
  Clone ID: PAT_MRT4530_7255C.1.pep
MAGSPHLAGFGREGRRKGSGAADSPPSCRAPPCLWWPPPSPSCRLHCYCRRRPVPLFRLDLEGREESAAGHRPPPFLLGPDLGGREGSHSQEQQPPPPLPSPLPPATAPGCATTATGGRGEGRTGGRGGERREEXSSWLGGGRRRRVFDRRRRRLTGPTCAGVHRGTTTTTPRRRRRRRPRRGASARRRSSSSSSPPPARSYPGPRRGVAGAMSSPFLGSSSSSASSPLSYLTPPRPPPPPPPLLMVRHGLARWLTDLDDELMVFDDDLGVQGQGYAAAANGGIGGGGVEAVNAAAAPRQGGRHAGHPPLPRPPPRQCPRCGSANTKFCYYNNYSRTQPRYLCKACRRHWTEGGTLRDVPVGGGRKNSKRAAGGGKAGATASTAASAHVVAPAAAPPTSSSFPDLLRQMLMAPATAGGGGGYSIDLTAWQQMAAFAAPPQAATGDVGGAVGAASTAAPDANCGGGGVQYWNGWLQDDMPGLDGSC

SEQ ID NO: 174638 - protein, 372 aa, Oryza sativa
  unsure (1)..(372): unsure at all Xaa locations
  Clone ID: PAT_MRT4530_72560C.1.pep
RVRLMTELDVKFTDSMSILVSSDVPEGKGVSSSASVEVATMAAIAAAYGLNIAPRDLALLCQKVENHVVGAPCGVMDQMTSACGEANKLLAMVCQPAEVKELVAIPNHMRFWGLDSGIRHSVGGGDYGSVRVGTYMGRKMIKCAASDLASESSVSDAPVQSNDYKQNAIELLKSEASLEYLCNIPPHRYEAIYAKDIPEVITGDAFLKKYGDHDDTVTAIDPKRSYNVKAPTRHPIYENFRVETFKALLEAANTDEQLSALGELMYQCHYSYNACGLGSDGTDLLVNLVQEMQHRNMSKGESPSLFGAKITGGGSGGSVCVMGKNCLKSSEEIIEIQQRYKXAATGYLPILFDGSSPGAGKFGYLEIRRRPS

SEQ ID NO: 174639 - protein, 730 aa, Oryza sativa
  Clone ID: PAT_MRT4530_72561C.1.pep
MALEARAVQISIPTDACCFSGGKSSHRMSPATQLVRAPQHAVATAYAEKSLEAGGNAASLPNNMLELVNVVMHQRKAIEDTMRKKKKQQLHKFEMLPSPYDTAWVAMVPLPGSSSQLPCFPQCVEWILQNQQSNGSWDLNQLDSITKDALLSTLACVLALRRGLLFIGRNFSIAMDEQLAAPIGFNITFPGMLSSVIEMGLEVPIGQTDVERVLHLQETELKREYEENYRGRNTYMAYVSEGLGNAQDWNEVMNFQRKNGSLFNSLSITAAVLVHNYDAKAHRYLNLLLNKFGTADDLCHIAEVSDFHSSHQGYLSDTRTLLELYKASEVSVADNEFILDRIGSWSGRLLKEQLSSGALQRTSSIFEEVEHALDCPFYATLDRLVHKRNIEHFAAMSYISYAQNNIPDELERIDSWVKENRLHELKFARQKSAYFYLSAAGTVFDPEMSDARIWWAINGVLTTVVDDFFDVGGSREELENLISLVEMWDEHHKEELYSEQVEIVFFAIFNSVNQLGAKVSAVQGRDVTKHLIEIWLDLLRSMMTEVEWRISNYVPTPEEYMENAAMTFALGPIVLPALYLVGPKIPESVVRDSEYNELFRLMSTCGRLLNDVQTYEREDGEGKVNSVSLLVIQSGGSVSIEEARREIMKPIERCRRELLGLVLRRGSAVPGPCKELFWKMCKVCYFFYSRGDGFSSPTAKSAAVDAVIRDPLDLAAVVASQEPIYIIPAS

SEQ ID NO: 174640 - protein, 1021 aa, Oryza sativa
  Clone ID: PAT_MRT4530_72562C.1.pep
MPPAGDAAHAPPPPHRRLVFAFYLTGHGFGHATRAIEVVRHLIAAGHEVHVATAVPEFVFTAELPRSPSSQGLLHIRRAILDCGAVQTDALTVDPLASLLKYHETAVVPRESILRTEAEWLTSINADLVISDVVPVACRVAADVGIPSVCIGNFSWDYIYAEYIVASGDHHRSIVWQIAEDYSHCDILLRLPGYCPMPAFRDVTDVPLVVRGLRKSRSEVRKELGIAENAKVVVFNFGGQVCGASDSQEVPPNFIKLAKDAYTPDAMAASDCMLVHIFYILLCTAYSHYPIGKIGYGTASEALAYKLPFIFVRRDYFNEEPFLRNLLEHYQSSIEMTRRDFLHGHWKPYLLRALTLQPCYDGPTNGGEVAARILEDTAVGKKCISDKFNGARRLQDAIVLGYQLQRAPGRDVAIPDWYSLSETEVGACPISENIKTKESTESCFEDFEILHGDLQGLPDTMSFLKSLSEFNQSELKSNGKQPQERIAASVLFDWEEEMYIARAPGRLDVMGGIGDYSGSLVLQLPLREACHVAVQRNHPSNQKLWENTQARRLENGGMEPVVQIVSFGSELSNRSPTFDMKLSDLMDVDKPISYEKAREFFCRNPSQKWAAYVAGTILVLMTELDVKFTDSMSILVSSDVPEGKGVSSSASVEVATMAAIAAAYGLNIAPRDLALLCQKVENHVVGAPCGVMDQMTSACGEANKLLAMVCQVSSVQYSLQVLLQPAEVKELVAIPNHMRFWGLDSGIRHSVGGGDYGSVRVGTYMGRKMIKCAASDLASESSVSDAPVQSNDYKQNAIELLKSEASLEYLCNIPPHRYCADNDILQLHLNFRYEAIYAKDIPEVITGDAFLKKYGDHDDTVTAIDPKRSYNVKAPTRHPIYENFRVETFKALLEAANTDEQLSALGELMYQCHYSYNACGLGSDGTDLLVNLVQEMQHRNMSKGESPSLFGAKITGGGSGGSVCVMGKNCLKSSEEIIEIQQRYKAATGYLPILFDGSSPGAAKFGYLKIRRRPSSPIAAK

SEQ ID NO: 174641 - protein, 161 aa, Oryza sativa
  Clone ID: PAT_MRT4530_72563C.1.pep
PRVRKVIDPTNDQGKAPSTEKKKKKKKKKKKKKKKKKKKKKKKVRYTQEQILYCIGNPEELPERRDTPKLTEALGAELLAKLPPDLVAHLRAMDDAKEEGKARRKALIEELRHEREVIYNIRDKPEDVLKQYYAKGYAEYEVIIDDDDYEDGDQGSRAAAH

SEQ ID NO: 174642 - protein, 72 aa, Oryza sativa
  Clone ID: PAT_MRT4530_72564C.1.pep
MASSRYNTTWARPQTIVIEETIQYNFGASPPFFAFLFGEFSRQEINYGIYHLEKIKPVSTLLAHSRQVLDLH

SEQ ID NO: 174643 - protein, 110 aa, Oryza sativa
  Clone ID: PAT_MRT4530_72565C.1.pep
GTHEHHRESSAAPGEKLLPVTAASASCSSLLFPLLIESRATHTRFVIWVAASTKALALLSTVLVALLAATAAVRVLDEDDHNLGRLTPDRAPVNSISYAHHWDVSAYQLP

SEQ ID NO: 174644 - protein, 195 aa, Oryza sativa
  Clone ID: PAT_MRT4530_72566C.1.pep
MAAAGSSKTASLLLCLAMISFVQLAQSSPSGDKGIKGFHGKKLSFTLYQQETINKTSYMVVAGVAGAGVSETTTPFGTVYVFRDDLTVRPERSSRVAGVVEGTSVTTSFDGLRSLSLGKITLDHRGRRGSMSVLGGTHNTRPSDCPVVGGTGDFAYAVGYVRTSPVNLRGSSVTFKVEFHLYWPPYAHYAPTSKH

SEQ ID NO: 174645 - protein, 75 aa, Oryza sativa
  Clone ID: PAT_MRT4530_72567C.1.pep
RHHVGVLKSPAAIHLRTSSFTNPELESIQNVTFQGIENLPLPSSKSQRVIRCHKTQTPNRHIKGAITLSPAFSEG

SEQ ID NO: 174646 - protein, 160 aa, Oryza sativa
  Clone ID: PAT_MRT4530_72568C.1.pep
MQRQWRCVCSIPSASLTHNGQASPFVVLLENRTTSGLDNHSACPFCTQELETANHILLDCVFTRQVWLRVLSPLGWTALSPRGSCLQDWWPSSRACLPRHLRAGFNSMVLLVSRQLWKERNSRVFDSALSSVSEVLQSILSEGHLWSLAGIANFGVLLGW

SEQ ID NO: 174647 - protein, 88 aa, Oryza sativa
  Clone ID: PAT_MRT4530_72569C.1.pep
MEFGSGGRDARARRQLQAAGRAAAYLGGGFLLLSAASSAAVRSLRSLSDANQGAALLELPWKRLRLKGQCVLAFGLSLATGISARIFR

SEQ ID NO: 174648 - protein, 210 aa, Oryza sativa
  Clone ID: PAT_MRT4530_7256C.1.pep
WPRAIAAFSTATVAAPHHLVLTVIAGAACHHRHQRSPPPRPHRPLPPPPLPTPNPTQPNSSSSAFSRSSRVLPPPDPAAALPSPAVRSILSAPCACADLHLATRGGGEALAAVVLLLLDSSELRRGGFCGQYVVLLLLQGARGEGGDGGAQERPGHPRHAPLRRPIPQHQAREHSGCRPGQVPAHAIRAKLLHQGIGGAVRVASPGWRRH

SEQ ID NO: 174649 - protein, 45 aa, Oryza sativa
  Clone ID: PAT_MRT4530_72570C.1.pep
AHLIPHHSQIFLALPARRRDEAAADVCIALDRYYSVLGCHSPYAW

SEQ ID NO: 174650 - protein, 115 aa, Oryza sativa
  Clone ID: PAT_MRT4530_72571C.1.pep
MEFGSGGRDARARRQLQAAGRAAAYLGGGFLLLSAASSAAVRSLQALSDANQRKFAAPCGACEGKGTYACRLCRGSSTIEWSPLHDPVFVNPCLCPTCDGTRVQRCLNCLGKGYA

SEQ ID NO: 174651 - protein, 127 aa, Oryza sativa
  Clone ID: PAT_MRT4530_72572C.1.pep
MSSKSAAGRSISGEVAILLVVSVVAKVRECVGSDQEDYLKTDYCKASHTDPKHNPLSILRSGEKSTGVAGESMPLVFEGVIMIQERCAVMDYVVQGVLSQLLSEWYTSGQSKTIRIAVPAVMGGLSN

SEQ ID NO: 174652 - protein, 1013 aa, Oryza sativa
  unsure (1)..(1013): unsure at all Xaa locations
  Clone ID: PAT_MRT4530_72573C.1.pep
MDRQWMYADRWSKEVIDGVRYFLRMAEANRHKGFICCPCNKCKNQKEYSASRTIHFHLFESGFMPSYNCWTSHGEQGVEMEEDEVEDDNIPDFGQYAGFEGNQTDEEERDVDGNDIADDLGXMLQDAKEDCKSEKGAHKLDKMLEDHRTLLYPGCEQGHKKLXDTTLKFLQWKAKNGFSDKAFGDLLKLIKDIIPEGNKLPETTYEAKKIVCPLXLEVQKIHACPNDCILYRGEEYENLEACPVYKALRYKIRRDDPGEVDGQLTKKRIPAKVMWYFPIIXRLRRLFRNKGNTRMMRWHAEERQQDGMLRHPADVSQWRNIEINFKDFGKDARNIRFGPKQPGNDIDVYLRPMVEDLKLLWKKEGVPXWDEDKQEEFNLRALLFVTINDWSALSNLSGQSNKGYKACTHCMDETESTYLKHCRKVVYMGNRRFLAANHPVRKKGNHFEHKADHRAKPKHRSSKTMFAMVKELKVVFGKGHRSQPIESEDGHAAMXKKNSIFWELPYWEFLDVRHAIDVMHLTKNLCVNLLGFLGVYGKSKDTLEARNDLNHMEQRGDLHPEPKEKGSHYLSPASYTISKAEKESMFECLEHIKVPSGYSTNIKRIISTKEKKFTNLKSHDCHLLMTQLLPVVIRGILPDXCAFMNTISQKVINPDRLEALQNDVVHCLVSFESIFPPSFFNIMTHLLCHLVKEISILGPVYLHNMFPFERYMGILKKYVRNRARPDESIAKGYGTEEVIEFCIKFIEDLCPIEVPESRHEGRLWGEGSLRRKAIMAVDNNLFRKAHFTVLQQSSLVAPYIEEHLALVRVINIGKSDAWITRHHIDTFPAWLRQHLMGNETINQQLVTSRPXGLIGLIEYSYQQVATSFPEAGLERTLRLSVLRLSVLGLDGARSRRVWGVTQLAFLAGGPSGSITTFQGWIRLTGGGVMIDDSGMTTVDLNKVGYSDKHFVLANDVTQVFYVKDMSSKGKKGRGPDEPKRHVVLPARLRLLHQHLEVFSPINFSLGFSFAATT

SEQ ID NO: 174653 - protein, 199 aa, Oryza sativa
  Clone ID: PAT_MRT4530_72574C.1.pep
MPTSAERPASRRYSSALPSTAVPHAPLLLSLPPAQKSGYWTRSQPKPKISFHPPTAPDQEEKVADQGGPLGAVTARVAVAPGGGGGEIDRCWVAVDRVSEPFVKMSKLGGGLREDRCKESGSSGSKRWSGARGGSSAGRGWSSAAADLGSGGEEARGDSIQQVAARWQIEAADPGLTSGVVEAEAVEADGARQRTSKFC

SEQ ID NO: 174654 - protein, 471 aa, Oryza sativa
  Clone ID: PAT_MRT4530_72575C.1.pep
MAAAAPPTGKKRRFERSSSQEPPGSGGLDLISGLPDAILGEIISLLPTKYGARTQLVSRRWRPLWRSAPLNLDVYDLSGQERKRVALASKILAEHPGPARRFSLHCFRLRGRHAKLDGWLRSRALADLRELSFSYEVEREAQAQAYPLPPSALRFAPTLVVLYLSSCGFPDEMPPTLHFPRLKQLTLCSVAISEDAIHGVLSRCPALESLLLQGNFGVRRLRINSASLRSFGFYSKSWGFSSASWNGFAGAELQEVVIEDAPCLERLLPLCPNDGVAAIRVIAAPKLEIMGPLSDGISQLHLGTTIFQEMTAVSLTTSMRSVKVLVLDSDGPNLDAVVDFLSCFPCLERLYIASQPFKVIKNTRRYDPLNPIECIQFHLKKVVIRNYGGRRSDVDFAKFFVLNAKALREMELAGLNNCNQKWLANQHRRLQLEKKASQNAQFTFKTTHTSDFSMNKHTHDLSISDPFDRSL

SEQ ID NO: 174655 - protein, 70 aa, Oryza sativa
  unsure (1)..(70): unsure at all Xaa locations
  Clone ID: PAT_MRT4530_72576C.1.pep
SSAHAMGQQLRLHKTDTMYCTDCESEARAEWAINMXSMXAVYPSYNTGACAIANAGGLWTSILPMTADRR

SEQ ID NO: 174656 - protein, 44 aa, Oryza sativa
  Clone ID: PAT_MRT4530_72577C.1.pep
PTNNAILLWTTNNYKKTYTDNIIKNIKLFFGKKKILKHLFNCWY

SEQ ID NO: 174657 - protein, 774 aa, Oryza sativa
  Clone ID: PAT_MRT4530_72578C.1.pep
MAEPGHLAQLSALTTTVITCLILITPTPAAASGASCVASERDALAAFRASLLDPAGRLATWSGHSCCRWRGVHCDGSTGHVVKLDLRNDLTVHSDTDWILFYEVRVDIDSSWVHSALALRNTGEMISSLAALHHLRYLDLSWNNFNDSSIPLFMADLKNLRHLDMSWVDLSAVRDWVHTVNTLSSLKVLRLRGCKLESAISTMSHFNLTRLEVLDLSVNKFNASIQQKWLWDHKGIKELYLTEGHWFGSIPDAFGNMSALQVMDLGHNNLMGTIPTTLQHLCDLQVVSLYDNYIDGDATEFMERLPRCSWNKLREMDLHSTNLSGELPVWIGKLSSLDFVDLSHNTLTGELPVGFGALRNMIYLNLGWNNFTGQISEEHFSSLLNLKYLYLSGNSFKQMVFEEDWIPPFRLKVAHLRSCRLGPKFPSWLKWQTEIRVLDVSGTCISDSLPVWFKTVFSQAYSLNLSDNQLCGTLPRTPEDMLAMVMDLGSNNLTGQVPRFPVNITYFDLSNNSLSGPLPSDLGAPRLEELRLYSNYITGTIPAYFCQLRRLSNMFSGHIPEELTNSFGLHYLDLANNNISGIIPQSLAGMKAMRRTTPDGNRGDVYEGSISSFTKSQELHYTFSNYNLVVLLDLSGNSLTGQIPEEISLLLGLKSLNLSGNHLGGKIPNTIGDLKGLESLDLSRNRLSGEIPSSLSELTSFSWLNLSYNNLSGRIPSGHQLQTLNDQEYIYIGNPGLCGPPLRKNCAMRGRHDEVDDVSDDLAVLYLGGVQAGQ

SEQ ID NO: 174658 - protein, 89 aa, Oryza sativa
  Clone ID: PAT_MRT4530_72579C.1.pep
MARHEKQIVVAARMHKTIETRITKRVDETDDTGEIVVDRFDEIFRRLGSDYSGFVNCGVPFYTVDYLDPKQGLEICNLIRYNRDYIPSE

SEQ ID NO: 174659 - protein, 211 aa, Oryza sativa
  unsure (1)..(211): unsure at all Xaa locations
  Clone ID: PAT_MRT4530_7257C.1.pep
KXXKRXKKKKKKXKKKXEKKKKKXKKKKKKXXKXXXKXKRRKKKKKXKKKKKKKKKKKKKKKKKKKKKRRKKKKKERKKKKKKEKKKKKKKKKKKKKKKKKKKKKRKKKKKERKKKKKKKKKKXKKXKKKKXKKKKKKKKKKKKKKKKXKKKKKXKKKKKKKKKKKKKKKKKXKKKXEGKKERKKKKEKKKEXXXXXRRKKXXPPHKKTLA

SEQ ID NO: 174660 - protein, 298 aa, Oryza sativa
  unsure (1)..(298): unsure at all Xaa locations
  Clone ID: PAT_MRT4530_72580C.1.pep
LPPGATRLVVHRSIAPRRKTIDDHPYVAGGDCHGRLLLCATQGPEPXPPVLDGFYHRRPLGDGDHRHGLLPKAYFICDTRTHKSTRLPDPGLPILHPGNACLASISRDAYLVADLHPTVVGADHATLLLYSSASGAWSNLELNYPPRDRPWGGNGVVVWPKEIWWVDLSYGFLALDLSVAHRELRFVPLPVGRELPPGTGGRDLEKSRCVGLNFGELRYVEIDERDGVGPIVSMWTLLDEDAGTWSFDCEASFKAIWADEGYKATMLPPEIPTVALIHPEHPGDVAYFFLHSRLFGVH

SEQ ID NO: 174661 - protein, 43 aa, Oryza sativa
  Clone ID: PAT_MRT4530_72581C.1.pep
CLISQDQKSKIIVRDFYMCSSSKEDAFGVEIDRSRSRRGRTRA

SEQ ID NO: 174662 - protein, 278 aa, Oryza sativa
  Clone ID: PAT_MRT4530_72582C.1.pep
MDDDVAAWKRWKGQWVTEDGSELWMVLACVPHVVQDGYFKPGFDNGISRDAYLVADLHPTVVGADHATLLLYSSASGAWSNLELNYPPRDRPWGGNGVVVWPKEIWWVDLSYGFLALDLSVAHRELRFVPLPVGRELPPGTGGRDLEKSRCVGLNFGELRYVEIDERDGVGPIVSMWTLLDEDAGTWSFDCEASFKAIWADEGYKATMLPPEIPTVALIHPEHPGDVAYFFLHSRLFGVHLGQCRVLEWQFFEMLHPPMAYHSSRFVRLWKNIPAFRC

SEQ ID NO: 174663 - protein, 39 aa, Oryza sativa
  Clone ID: PAT_MRT4530_72583C.1.pep
MEDLDDVFSDMCLQFVYHNFFELTVVTLADLGVIVVELV

SEQ ID NO: 174664 - protein, 92 aa, Oryza sativa
  unsure (1)..(92): unsure at all Xaa locations
  Clone ID: PAT_MRT4530_72584C.1.pep
SKIQSKIPIVKSSRSGLIRPPSTXYRLCHRRNHGMIGMACSHRSCQGGRERPAQSFFSLLTVLMRQPISTPTQMLYPCRRRGLIPRVSVRVG

SEQ ID NO: 174665 - protein, 50 aa, Oryza sativa
  Clone ID: PAT_MRT4530_72585C.1.pep
NPSHQSASNVEFNPAQDILDGAIKRGASDAKGNRGYGRSIRKEIDSDQSR

SEQ ID NO: 174666 - protein, 70 aa, Oryza sativa
  unsure (1)..(70): unsure at all Xaa locations
  Clone ID: PAT_MRT4530_72586C.1.pep
DSTAAKSLFERGELRKGFNACVHACADVLLMAXGTLATLMLATKALKGEGTPKTCPERTEAMHYILGAHL

SEQ ID NO: 174667 - protein, 59 aa, Oryza sativa
  Clone ID: PAT_MRT4530_72587C.1.pep
MWYLPAIPLWYEQHFLRCWRLHWHRNRILVLMLNRKSGIIMRNSGKLMNYKCESCRLFH

SEQ ID NO: 174668 - protein, 54 aa, Oryza sativa
  unsure (1)..(54): unsure at all Xaa locations
  Clone ID: PAT_MRT4530_72588C.1.pep
KLVSXXGSDWGMFTDICIGTVGRQERKIEIQVVRLEHAYYLSSDMWAFDSFYAL

SEQ ID NO: 174669 - protein, 358 aa, Oryza sativa
  Clone ID: PAT_MRT4530_72589C.1.pep
MANIKWIGPKKEVPPEVEDMEYADGCGEDKIDLEEMLRHADPEVLIGSARAFFDTMEHLIVHIVPQIIALGPLYLHQMWSYERYMAILKGYVRNCTHPKGSMVESYNTEEVVECFIDYLNNGKTIGIHVPRHEGELTGRGTKGKKRFVAHDYKTLREAHFSVLHQLAIVEPYIDQNIKLLRSNNTGRTTKWIMKEHKRLFIEWRTTEEITMKRRKTIILGFIEEIWEIDYGLIVQFPIFKCQWVKYPNGVISDKFGLTVVDLENVGHKDDPWVLANRMAQVFYVTDPTNLKKEIVPSGKQKILGVDGVVDVEDYNQYDSMALYTQFVQKIKLLAASTEKTVKPYIRKDGVDDEGQKVL

SEQ ID NO: 174670 - protein, 81 aa, Oryza sativa
  Clone ID: PAT_MRT4530_7258C.1.pep
ICCRRISIGFDMNMAVERPMPNVCISTAYTDHGAHGQCWWEILQAASAERHCRKSNKANRAKICRRKLPCRFYNTRINLVP

SEQ ID NO: 174671 - protein, 153 aa, Oryza sativa
  Clone ID: PAT_MRT4530_72590C.1.pep
MSSGTSSGSSQGTRSSRSEDDLNLQAQMEKKRKRRKESNRESARRSRMRKQQHLDELTSQVNQLKNQNQQLSMALSLTTQNLVAVQAQNSVLQTQELELQSRLCALTDILMCMNNTSATPTPTIPATTTSACDIFGASSWNQPPIDLYQYQCF

SEQ ID NO: 174672 - protein, 87 aa, Oryza sativa
  Clone ID: PAT_MRT4530_72591C.1.pep
LVLVFGRSYLGPGCAFGSPGCMYNIFGFCSSVFGSLGAVGFFLRFWIRWFLCSAPLLALRVCFCVFFAGGLVAPFFVPCVLNHRIPL

SEQ ID NO: 174673 - protein, 50 aa, Oryza sativa
  Clone ID: PAT_MRT4530_72592C.1.pep
PSSVPIFNISIGLIISRKCLYHKVMVDSCSKFARSRASFSSCTHNGLEPE

SEQ ID NO: 174674 - protein, 36 aa, Oryza sativa
  Clone ID: PAT_MRT4530_72593C.1.pep
MSIDNTRTGTGEGEHDNRNRGNNTTNASTSTRAFSG

SEQ ID NO: 174675 - protein, 398 aa, Oryza sativa
  Clone ID: PAT_MRT4530_72594C.1.pep
MTDVMSCYPIYRGSTVCLRQRLRAGSPQVILFKSYTFDEMIENRAGLFHVVHGSQHSTNSMTQVGTVTYLSDYSQYIIHEVLIYICGKHRKGWSFGGNFESTDILFCSGRVKIAKRVHRVNFNKDTCGMDYMKLDEIFVEAFAVGMKDNQQVFPMFLPHLLEYLFACPAGENSNHELAITFLTNHPALASYMDRIKQCILLDSMVDSLDPVDLLSLKQLLNWVWKWSRDPVKVPGMNSVYIHNAKFHPVTHQMLVNARYIPNPLGCLHFAGNYFSHAHNHQLNLEEAEAAFAENTESFLPFILQFIVVEGIIKQKFNVQRIFTSLHYSGTNLLIRTLGRNFQVRIQGVNVIVCIYQKFWIVEPPESKHQATDNILTVPRQLHASLKAFDSSRLSAAIG

SEQ ID NO: 174676 - protein, 82 aa, Oryza sativa
  Clone ID: PAT_MRT4530_72595C.1.pep
MSQPHRRRRAGGGQAQLLPPVAARCSFSRRGAGSAVCGLGGGERGGGERESASGCRPVATPSVGEQAATRCSPSRRRAGGVR

SEQ ID NO: 174677 - protein, 131 aa, Oryza sativa
  Clone ID: PAT_MRT4530_72596C.1.pep
NLTLGSCCRMTLLLGPPSSGKTTLLLALAGRLGPGLKVSGNITYNGHHLNEFVPQRTSAYVSQQDWHASEMTVRETLEFAGRCQGVGIKYDMLVELLRREKNEGIKPDEDLDVFMKALALEGKQTSLVAEY

SEQ ID NO: 174678 - protein, 150 aa, Oryza sativa
  unsure (1)..(150): unsure at all Xaa locations
  Clone ID: PAT_MRT4530_72597C.1.pep
MIYESYFYAQFGYLLTTKFACFLIDNKGFIGVSTEELSGRCIGLQGLHPIGLYWIILLXLYYQPIAFISLYTXGHIADSSKPYCYRLDQTDWHARISPTFGPALELSRSPRPESFFLVRQGLVSTHGYKYVYPGQLYRLRRRRSRLHQYI

SEQ ID NO: 174679 - protein, 1463 aa, Oryza sativa
  unsure (1)..(1463): unsure at all Xaa locations
  Clone ID: PAT_MRT4530_72598C.1.pep
MWAAEAPFARSGSWREEEDEQEALRWAALQRRPTEARARRGLLRSPAPGEDRVQGHDALCGVDVAGLSPGDRTALVDRLLADSGNVEDFFRRIRSRFDTVQIGVPKIVDTHRVLIVEALVYFACRPVPSHVNLNTRMVEAXTGDVNCRASRMSXVLVLVKASGILVPSQMTMLRVPPGPGESTLLVAVAGLFGPPGKGSGPIHSNGHHQNEYVPQRTSAYVSQQDWHASEMTVRETLEFAGRCQGVGIKYGRSFHHNVLGVVPYLLGSLRFDVNQYVDMLVELLRREKNEGIKPDEDLDVFMKALALEGKQTSLVAEYIMKILGLDICADTIVGDEMIKGISGGQKKRLTTGELLVGSARVLFMDEISTGLDSATTYQIIKYLRHSTHALDGTTIISLLQPAPETYELFDDVILISEGQIVYQGPREYAVDFFAGMGFRCPERKNVADFLQEVLSKKDQQQYWCHYDYPYQYVSVSKFAEAFKTFVIGKRLHDELAVPYNRHRNHPAALSTSNYGVRRLELLKSNFQWQHLLMKRNSFIYVFKFIQLLLVALITMTVFFRSTMHRDSVDDGIIYLGALYFAIVMILFNGFTEVSLLVTKLPILYKHRDLHFYPPWAYTLPSWLLSIPTSLIESGMWVLVTYYVVGYDPQFTRCLGQFLLLFFLHQTSLALFRVMASLGRNMIVANTFGSFALLVVMILGGFIITKESIPAWWIWGYWISPMMYAQNAISVNEFLGHSWSQQFANQNITLGEAILTGYGLFKEKYWFWIGVGALFGYAIVLNFLFTLFLTLLNPIGNIQAVVSKDDIQHRAPRRKNGKLALELRSYLHSASLNGHNLKDQKGMVLPFQPLSMCFKNINYYVDVPAELKSQGIVEDRLQLLIDVTGAFRPGILTALVGVSGAGKTTLMDVLAGRKTGGLIEGSITISGYPKNQETFTRISGYCEQNDVHSPCLTVIESLLYSACLRLPSHVDVNTRRVFVEEVMELVELNALSGALVGLPGVNGLSTEQRKRLTIAVELVANPSIVFMDEPTSGLDARSAAIVMRTVRNIVNTGRTIVCTIHQPSIDIFESFDEGNREIFLYKYVLTFNQHPFLTHSYAGQLLFMKRGGQLIYAGPLGSKSRNLVEFFETQEMVDILSRPRRESKELTFATKYSQPFFAQYAACLWKQNLSYWRNPQYTAVRFFYTVIISLMFGTICWKFGSRRETQHDIFNAMGAMYAAVLFIGITNATSVQPVISIERFVSYRERAAGMYSALPFAFSLVTVEFPYILVQSLIYGTIFYSLGSFEWTAVKFLWYLFFMYFTLLYFTFYGMMTTAITPNHTVAPIIAAPFYTLWNLFCGFMIPRKRIPAWWRWYYWANPVSWTLYGLLTSQFGDLDQPLLLADGITTTTAVDFLRDHFGFRHDFLGVVAGMVAGFCVLFAVVFALAIKYLNFQRRWLVRQQCNIRRAFCSSHGEPMGGRHLQAF

SEQ ID NO: 174680 - protein, 91 aa, Oryza sativa
  Clone ID: PAT_MRT4530_72599C.1.pep
MAADHHSRLLIRSGIDLSTLACLTRFVLKHGVTGDNAAILSLRLLHVHLQINQQPNLRLHRIAMLGVHARAARTGNVMPESATCRQAGSAA

SEQ ID NO: 174681 - protein, 96 aa, Oryza sativa
  Clone ID: PAT_MRT4530_7259C.1.pep
PGRPRVRGRVGGRVGAADLYAPELAVVRAVPDLRLGAEHHFLGALSIFAAPSVGEADTGATEALFLYILTTRGVLDLNYRRLPYRLIIYNILYNFN

SEQ ID NO: 174682 - protein, 684 aa, Oryza sativa
  Clone ID: PAT_MRT4530_725C.1.pep
MFVVTMLQLLLLLLLLLSISLDVSHLIAEAAAAAKPPVSFSFNFSDPSTYSLDDLLFEGDAAKPKDGLVDLTSGRSCYPYCPAGRMSYAHPVQLYDDTTGGEKVVVASFSTRFTFTIRPIDDGIRGDGLAFFLASYPSKLPANSFGGNLGLINNGTTTAFGSDRFIAVEFDTYNNTFDPKSINHIGIDINSVVSSLNTTLLPNFSLNGTMTAHIEFNGITQMLVASLWLAGRPWSAAPDYQVSLRLPDPITSLLLPQVAVGFTGATADLKELNQIMLWSFNSTLTLVNQDRRNKALLFGGPIIGGAVALALVLWFLISCLMQKRVRNTFGKGTGGARRFEYDDLAIATGNFSDDRKLGEGAFGVVYSGFLKRLEREVAVKKIVRESSQEHKDFFAEVSTISEAKHKNLVKFFGWCCRGHSWNILRFMCSCLWSNNNKELFLVYELMKNGNLNDYLYKSESAAVLSWQTYKIAKDIGSGLLYLHHECYPYIIHRDIKPGNVLLDDDFNAKLADFGLSRVANPNNATLKTTAIGSQGYIDPQCMKDGEVSFNRNSDVYSFGIALLEIVCARKHREQIWGLYKSGGDVVEAADSRLAIGVDGAERREMERAIILGLWCSVFETKHRPTMLQAMDVLERDAQLPDLNLIVNSNLSSTDASSSSPVEKRYDSEEAPLVAGSSSSQLAGR

SEQ ID NO: 174683 - protein, 79 aa, Oryza sativa
  Clone ID: PAT_MRT4530_72600C.1.pep
MTVFLQKYLQIISLVSSTFPDKALLFSLYHHRHSSTTVPIPHYSSDDDDGGDDNDEHEVDDEDSSDDGEDDDVAAENYA

SEQ ID NO: 174684 - protein, 89 aa, Oryza sativa
  Clone ID: PAT_MRT4530_72601C.1.pep
MAAAAAAAKRAPLAAASPGDQVLQVVVMKVAIHCQGCAGKVRKHISKMEGVTSFSIDLESKKVTVMGHVSPAGVLESISKVKKAELLFL

SEQ ID NO: 174685 - protein, 246 aa, Oryza sativa
  Clone ID: PAT_MRT4530_72602C.1.pep
MWRRNLMQSKPICNQQRKPINLELSANEKEVAMLDFSGNIGPFVLPAEFRAKEDDEHLDDGARNRDDKVKILESHQRTNLDITQVKKLECFSNISDQIQSAINEGRLNFATPVMSHAKDDRFGKTNRSRWPNKKSLAQTRGSSIRKQIWVPKSRGQEKGLVAGVHVSVQKASVKKKVIELWGHARVEQLENVCHVSVKQEGSSAKVVTNQNPPKSSGDNGSQSRHSHSLSNWQKKQLHKLKCRKAE

SEQ ID NO: 174686 - protein, 64 aa, Oryza sativa
  Clone ID: PAT_MRT4530_72603C.1.pep
LNSYYNLLFYQLPIFLYKLLSLVLQPIFFLGLIEFNLLNPGLNGKKYIVFFHSLRFVCKNSIAS

SEQ ID NO: 174687 - protein, 79 aa, Oryza sativa
  Clone ID: PAT_MRT4530_72604C.1.pep
MSAPGAGAAAAAVSGDGALGARAFANFNIDRGSSALQSSGGPFSGYVSLLLSFIPLFVLLVALRSWYVHDAYGTLYQPL

SEQ ID NO: 174688 - protein, 1125 aa, Oryza sativa
  Clone ID: PAT_MRT4530_72605C.1.pep
MEASAGLVAGSHNRNELVVIRRDGDPGPKPLRQQNGQVCQICGDDVGLNPDGEPFVACNECAFPVCRDCYEYERREGTQNCPQCKTRFKRLRGKSHPQCRIGCARVPGDEEEDGVDDLENEFNWRDRNDSQYVAESMLHAHMSYGRGGVDVNGVPQPFQPNPNVPLLTDGQMVDDIPPEQHALVPSFMGGGGKRIHPLPYADPNLPESAKGSCATVQPRSMDPSKDLAAYGYGSVAWKERMESWKQKQERLHQMRNDGGGKDWDGDGDDGDLPLIFSPVELLYHFGWTKMDEARQPLSRKVPIPSSQINPYRMVIIIRLVVLGFFFHYRVMHPVPDAFALWLISVICEIWFAMSWILDQFPKWFPIERETYLDRLTLRFDKEGQTSQLAPIDFFVSTVDPLKEPPLVTANTVLSILAVDYPVDKVSCYVSDDGAAMLTFEALSETSEFAKKWVPFCKKYSIEPRAPEWYFQQKIDYLKDKVAPYFVRERRAMKREYEEFKVRINALVAKAQKVPEEGWTMQDGTPWPGNNVRDHPGMIQVFLGQSGGHDIEGNELPRLVYVSREKRPGYNHHKKAGAMNALVRVSAVLSNAPYLLNLDCDHYINNSKAIREAMCFMMDPLVGKKVCYVQFPQRFDGIDRHDRYANRNVVFFDINMKGLDGIQGPIYVGTGCVFRRQALYGYDAPKTKKPPSRTCNCWPKWCCCCCCGNRHTKKKTTKPKTEKKKRSFFKRAENQSPAYALGEIEEGAPGAENEKAGIVNQQKLEKKFGQSSVFVASTLLENGGTLKSASPASLLKEAIHVISCGYEDKTDWGKEIGWIYGSVTEDILTGFKMHCHGWRSIYCIPKLPAFKGSAPLNLSDRLHQVLRWALGSVEIFFSNHCPLWYGYGGGLKCLERFSYINSIVYPFTSIPLLAYCTLPAICLLTGKFITPELTNVASLWFMSLFICIFATGILEMRWSGVGIDDWWRNEQFWVIGGVSSHLFALFQGLLKVIAGIDTSFTVTSKGGDDEEFSELYTFKWTTLLIPPTTLLLLNFIGVVAGVSNAINNGYESWGPLFGKLFFAFWVIVHLYPFLKGLVGRQNRTPTIVIVWSILLASIFSLLWVRIDPFLAKNDGPLLEECGLDCN

SEQ ID NO: 174689 - protein, 463 aa, Oryza sativa
  Clone ID: PAT_MRT4530_72606C.1.pep
MQPNARQMRGGGGGGGGGQDDFFDQMLSTLPAVWSELGSGKPAWDLTAGAVGGGGGASDDHSAAAFDDSALLASRLRQHQIDGGGDKPIMLQLSDLHRHHGLAAGDDSGGAAGFLPLSLFADRSQDDIDAAFKSPNGARGDHALYNGFGAAGMHGAAAMQPPPFGQGGSMPAQSFGGGAAASGGGGGGSASAAAAAGASSGGGAAAPPRQRQRARRGQATDPHSIAERVYHSPTTFPFSPPFFIASMPCCLRRERIAERMKALQELVPNANKTDKASMLDEIIDYVKFLQLQVKVLSMSRLGGASAVAPLVANMSSESNGNGNATSSSGNGEAANGSSNGDNNGGGTLRVTEQQVAKLMEEDMGSAMQYLQGKGLCLMPISLATAISSATSSSLLPRTGGGAGGSLHEGGNGTSPPLVNGTATGCDDAGVFFSVKFVVELSFLLLNEDCRGKEESKLLVQKGP

SEQ ID NO: 174690 - protein, 695 aa, Oryza sativa
  unsure (1)..(695): unsure at all Xaa locations
  Clone ID: PAT_MRT4530_72607C.1.pep
MGSSSVVLWWEEWQLRILVLGSLFLQCFLAFAAVHRRRSIPASLRFFIWLAYLGSDALAIYALATLFNRHKTDNQGGSHVLATLVSPQGKGGGDDTGLEVFWAPVLLLHLAGPDSITSYNIEDNELWRRHVLTVISQVTVSLYVFCKSWSGENKLLRAAVLLFIAGTLKCIDKPMALKSASIYGLVTSSPFHDQKSQNNDQGENRSLEAYIQEAKGYFSNLKINDVYTELVAAAQNKDLRVMPFWLFVDLASTLCHRLRVLRFFLVLDNKSADSLLQTALCGSFVRLYTKKSMLLSYFWAKDKRNALISTYSHLNRLLAVCLTISAVALFHQSHKQGYNNSDVKVTYTLLWCTAALEVYALFGPKYKFFTWCKNVAQYNLVGFFARDQTPTRLLKLASCFWCKDYVDQHWYVNQCSSSFAITELVIEQVKAGWKNYIEDTSTYWMFNDRRGQLTIQHELCDEELCKSLDVPFDESIIVWHIATDICFYEGAPAANHHHLKAATRCREISNYMLYLLVVNPDILMSGTRANILSNTCKELRSMFEDEKPPSDESDLTREIHRRAQSSNVDAAATEELIPRASKLASQLLAMDGDKRWKVMQGVWVEMLCFSASRCRGYLHAKSLGQGGEYLSYVWLLLWYMGLESVAERQQRSDFRSHVERVASRQLPCTETESSQEPXIQEEEGAVVPLFQEGNI

SEQ ID NO: 174691 - protein, 223 aa, Oryza sativa
  Clone ID: PAT_MRT4530_72608C.1.pep
MRMHRLSASWLALWKRVISLPVSASAAAGFGWRLCSPARSPAAFARFYRVSQETGKWRVGGLGRGGGGIQRGLCRSEVAARIPRDWQRSGVCLGNATVRRSIREKNARFQPDESSSSLPPSFFSTYIPDGWFPAVTPQSIVTSSSPCLLAGLRQPGILVYSLLLYLLSYAFVRRLQRDEIHERESSVGGVGSVRYRGIPIFIEIECRDYIISKFREDFPTTSP

SEQ ID NO: 174692 - protein, 461 aa, Oryza sativa
  Clone ID: PAT_MRT4530_72609C.1.pep
MARTAEEKSRARGTALWRLLRPLAVLGPRMQRRREAAVPFRGQVRNTAAASLLLLLSLSHVPLYAGAGDADPDPLFWARPLLAAPRGTVMELGVAPVVTSWVVVRLLAALLFDSDSSTTVASCELLARCLAYVTNASRLVIGIAAALGMCGSGGAGNAALVVLQLFAGGVVVVLADLLHETGYGVEGVSAASLLIATNACERAVSHLFSPVKLRLAGAGPEFEGPVFAVTHRVAAAPPSWRHKAGALLFTLLRLDLPNLSNYMTTCVMFVLAVRLDETHLRRLYRSRPRRGTDEFVPIKLLYTSAMPIMLHASAVSAFCVDAGGGAAYPVGGLVYYVTPPSKLLVDPGLIHELLIHSVFVVASCTLLSMAWAEASRSSAREFRTRVIGTGYFVWDETSRRIDRVIAAAAAVGGFAVGGLAVYAGAVGAIGEAGPELLFAVLVIKNLAETFYAKSKLTTTYS

SEQ ID NO: 174693 - protein, 290 aa, Oryza sativa
  Clone ID: PAT_MRT4530_7260C.1.pep
SCVDHAAVFKSITASAPIPMSPLESLASSAVRTANSAKAALILVLTRGGTTARLVAKYRPSMPILSVVVPELKQTDSFDWTCSDEAPARHSLIVRGVIPMLSAATAKAFDNEATEEALGFAISNAKAMGLCNSGESVVALHEETTPPPSPPPPPPPTKSRGRSSESEEEEDGGDGGAAGGSRGGDAAEAQDEDRVHAGAGVEVGGDDRAAVAPGCGRRFNFSHGSHDTTRRRSTTYAFDSEPTKEALGFAISNAKAMGLCNSGESVVALHPDRNCICHQAPDSELVADGS

SEQ ID NO: 174694 - protein, 248 aa, Oryza sativa
  unsure (1)..(248): unsure at all Xaa locations
  Clone ID: PAT_MRT4530_72610C.1.pep
XXXKXXGXKKXXXRKXXXKXEKGKKXKKRXXXXXXXXAXKXXPRXXXXKXKKXXKNXNXXXPXXXXXXPXXKLXXEXQXGXRXXXXXGGPXPXPPXKKGXXKXXGGRRXAREKXARGXXXGEXGRPXXXKKKGVXXXLXGGRRPGGVXPIKQRRXGKAVXFRXXGRXSPNXLEGSWGSAIRXXXQXXXCXXPPNTCRIRGFXLPGELEGAAHPPGERRRSPEEEEAXSXVGGXLVPNSARAXAESLHP

SEQ ID NO: 174695 - protein, 338 aa, Oryza sativa
  Clone ID: PAT_MRT4530_72611C.1.pep
MNGQIYLKKSTVSNILGWREYKGLGADEQRAAASLQRCTVIAPVQLHCRDMGQHQRKKIALYIDRCVYLGILHYLKALLHVQLGVETKGNPKHAFPSKETSKPDETQSDSDLPVRPATHCRSDRPSTGGLTAQHTAALPALVEWYFPLMKIYSSNRPLRKLIIELIFYDANIIGAVVQHDSANNIGAIPLTPWWKYKYLQIDPQHNNIGVVPFTLVTWLSPEGEGDGANVIGAVMLDNCVNDVGVTELISKDRVECCHLPIISAHHHSSTCGYGKGRFIHDIQERGGSAASSLGIAQFWPAIDIDPDINDVRNLESIARPGPASLPTAHHCSFFLLCF

SEQ ID NO: 174696 - protein, 54 aa, Oryza sativa
  unsure (1)..(54): unsure at all Xaa locations
  Clone ID: PAT_MRT4530_72612C.1.pep
KEKCLCSYQGLSVEFXGSEXRSLDGPFVLVWINNMPWAADTSMAALGAKVLQKV

SEQ ID NO: 174697 - protein, 264 aa, Oryza sativa
  Clone ID: PAT_MRT4530_72613C.1.pep
MAFAVSDELLGTFVPIAVYWLYSGLYIVLDAMGMDDYRLHPKGEEATKNVVSKWTVVKGVLVQQSFQIAVSLLLFTIIGDESGTVRKQPPALVIALQFIIAMFVMDTWQYFMHRYMHVNKFLYKHVHSKHHTLVVPYAFGALYNHPLEGLILDTIGGALSFLIAGMTPKTAIFFFSFATIKTVDDHCGLWLPGNILHVFFSNNSAYHDIHHQLYGNKYNFSQPFFVMWDKILGTYMPYTLENRKGGGFEARPIKLNVAEQSKTD

SEQ ID NO: 174698 - protein, 44 aa, Oryza sativa
  Clone ID: PAT_MRT4530_72614C.1.pep
YVQRHTNPTTLTHSNQWPNSREDLASPGLQRRPQPVAPIRGCSR

SEQ ID NO: 174699 - protein, 750 aa, Oryza sativa
  unsure (1)..(750): unsure at all Xaa locations
  Clone ID: PAT_MRT4530_72615C.1.pep
IERVVDVSISPPNDKELSFEEEEKCMHINAQATIVLFGVLSEDVFKTVMPFEDAHLIWTTLKERYDKSKCDDSKCDDVLFLEEPFEKCSTSSPNCEEPQVTTFDDQDNHPTTTLSSTHDYIEGNELVSKVDDHPILPLDSNNTDNEIVILHCVVDSCISPSPKYMCEDDMDKCSTSYSTCGTNLLKEEVNERXWTSEESTSPRCSSSISEDYACFMGVDGDSEFDHLSKKDVTMVIKFMEAIQKQQACTIKKNEEIMSLTEEHKKLKDFHSSLTMRYEKLENEFACATNSIACVASLKKQNQELKFQLDEITNKYVDLQERHDELLCSHVNLVDSHAMLEVSHEVIIATVKSYEPHVQVNLTCANPCFPQANMSLSTICDLDCVGKREKQMDHGLVCIAQXPSQENREGLVNKLEKGXSTVACTKIHQRDIKSINDHTRERNQKMIKSSITCFKCKKVGHHVRDCPWKKGNKLSKKKDIPHIKCFKCTEAGHFASRSPCTLDEQCKTSSERQTGNKQTEKQYRSKSRLXXNCRAKGHIGKNCPMGNIPKPSLSFDHNLLRNAKNDICATRVICSPHTSTKAISVSKSLVTNLYGPNVVGDQNVLKFYCGIKGFDKTARFVIKLIYHHAIEPEGSGWIPRRLQEDSLVTRRIXAEGSKLTRTCILKGYPSVQESRVRPQEAHDDQGGLLDQPQSTQFNLPQLTMKNILSVQVKEDGANAKPDRVMALQEEHKHYQDADCDQGVKHVRDGKA

SEQ ID NO: 174700 - protein, 95 aa, Oryza sativa
  Clone ID: PAT_MRT4530_72616C.1.pep
QPTFAFRKYGCVQLVYNGKNIAPFLPQFGSLQFTWQNNTLAIAAFRLRRPHVGHIFGVASEVVKVLGLERLALSMEKKEPPGCKINGTFWWPSSI

SEQ ID NO: 174701 - protein, 416 aa, Oryza sativa
  unsure (1)..(416): unsure at all Xaa locations
  Clone ID: PAT_MRT4530_72617C.1.pep
MPLEDAHLIWTTLKERCNKSKCDDDIVFMEEPLEECSTSSPNCEEPQVTTFDDQDNHPASTLSSTHDYVEGDELVSKVDDRPIFPMDSNNTDNEIVILHCVVNSCISPSTKYVCEDDMDKCSTSYSTCGTNLLKEEVNEFQWTSEESTSQRCSSSISENYACFMGEDGDSEFDHLSKKDITMVIKLMEAIQKQQACTIKKNEEIMSLTEEHKKLKDFHSSLIMRSKIKSLNLNLTRSLTSKREKQIDHGLVCIAQPSQDNRESMVKKLEEGSTVACTKIHQRDSKSINAYTKGRSQKTIKSSITCFKCKKVGHHIRDCPSKKGNKLSKKEDIPHIKCFKCTEAGHFALRCPCTLDEQCKTSSERQTGNKQTNKQYRSNMGXHIGKNCPMGNIPKSSLSFDHNLLRNAKKDICATRV

SEQ ID NO: 174702 - protein, 746 aa, Oryza sativa
  Clone ID: PAT_MRT4530_72618C.1.pep
MGPQIERVVDVSVSPPNDKELSSEEEEKCIHLNAQATNVLFSVLSEDVFKTIMPLKDAHLIWTTLKERYDKSKCDDVLFLEEPFEECSTSSPNCEEPQVTTFDDPDNHPTSTLSTHDYIEGNELVSKVDDRPILPLDSNNTDNEIVILHCVVDSCISPSPKYMCEDDMDKCSTSYSTCGTNLLKGEVNEPQWTSEESTSPRCSSSISKDHAFFMGKDGDFEFDHLSKKDITIVIKLMEIIKKQQACLIKKNEEIMSLTKEHKKLKDFRSSLIMRYKKLESEFACATNSIVCVASLEKQNQELKSQLEEITIKYVDLQERHDELLCSHDNLVDSHAMLEVAHEAIITTVKSYEPHVQVDLITCTNTCCSKENLSPSTTCDLDCVGKGEKQMYYGLVCIAQPSQDNREGMVNKLEKGSTVVCTKIHQRDIKSINAHTKGRNQKMIKSSITCFKYKKVGHHVRDCPWKKGNKLSKKDIPRIKCFKCTEAGHFASRSPCTLDEQCKTSSERQTGNKQTEKQYRSKSRLCYNCWAKGHIGKNCPKGNIPKPSLSFDYNLLRNAKNDICATRVICSPHTSPQAIWVPKSLVTNLYGPNVVGDQNVLKFYCGTKGFGKTARFAIKLIYHHAIEPGGSRWIPRRLQEDSLVTRRIKAEGSKLTRTCILKGYPSVQESRVRPQEVHDDQGGLLDQPQSTQVNLPQLTMKNMKNMLPKEDGVNAKPDRVMALQEEHKHYQDVDCDQGVKHVHDEKA

SEQ ID NO: 174703 - protein, 645 aa, Oryza sativa
  unsure (1)..(645): unsure at all Xaa locations
  Clone ID: PAT_MRT4530_72619C.1.pep
MGPQIERVVDVSISPPNDKELSFKEEEKCIHLNAQVTNVLFSVLSEDVFKTIMPLEDAHLIWTTLKERYDKSKCDDVLFMEEPLEERSTSSPNCEEPQVTTFDDQDNHPTSTLSSTHDYIEGNELVSKVDDRPILPLDSNNTDNEIVILHCVVDSCISPSTKYVCEDDMDKCSTSYSTCGTNLLKEEVNERHWTSEESTSSRCSSSISEDYACFMGEDGDSEFDHLSKKDITMVIKLMEAIEKQQACTIKKNGEIVSLTEELKKLKNFHSSXTMRYEKLENEFACATNSIACVASLEKQNQELKSQLDEITNKYVDLQERHDELLCSHENLVDSHAMLEVSHEVIIAMVKSYEPHVQVDLTCTNPCCSQANISPSTICDLDCVGKREKQIDHGLVCIAQPSQDNREGMVKNLEEGSTVACTKIHQRDSKSINAYTKGRNQKMIKNSITCFKCKKVRHHVRNCPWKKGNKLIKKKDIPHIKCFKCTEVGHFASXRSPCTLDERCKTSSERQTXNREKYISKSRLCYNCWAKGHIGKNSPMGNIPKPSLSFDYNLLRNAKNDICATRMICSPHTSTKAIWVSKSLVTNLYGPNVVGDQNVLKFYSGTKGFGKTARFAIKLIYHHAFEPGGSGYIPRRLREDVPFSKI

SEQ ID NO: 174704 - protein, 218 aa, Oryza sativa
  Clone ID: PAT_MRT4530_72620C.1.pep
MEVEEAAYRTVWSEPPKRPAGRTKFRETRHPVYRGVRRRGGRPGAAGRWVCEVRVPGARGSRLWLGTFATAEAAARAHDAAALALRGRAACLNFADSAWRMPPVPASAALAGARGVRDAVAVAVEAFQRQSAAPSSPAETFANDGDEEEDNKDVLPVAAAEVFDAGAFELDDGFRFGGMDAGSYYASLAQGLLVEPPAAGAWWEDGELAGSDMPLWSY

SEQ ID NO: 174705 - protein, 85 aa, Oryza sativa
  unsure (1)..(85): unsure at all Xaa locations
  Clone ID: PAT_MRT4530_72621C.1.pep
VHVRIQQRNGRKSLTTXQGLKKEFSYNKILKDLKKEFCCNGTVXQDPXELXQVIQXQGDQRKXXSNFLVXQAGIXKKEHIKIHGF

SEQ ID NO: 174706 - protein, 50 aa, Oryza sativa
  unsure (1)..(50): unsure at all Xaa locations
  Clone ID: PAT_MRT4530_72622C.1.pep
KKXKXLFGGREKKKNAFIPVLAQVLNTGFQIWFLLGQKGKPHLLQHFWGF

SEQ ID NO: 174707 - protein, 60 aa, Oryza sativa
  Clone ID: PAT_MRT4530_72623C.1.pep
MDHAAVKGKQWAWRRRTKSSGKGRVTALSLLEEVHLKRSQKTKSRGFATKLGGLTTKFPL

SEQ ID NO: 174708 - protein, 187 aa, Oryza sativa
  Clone ID: PAT_MRT4530_72624C.1.pep
MPPLTGPKSGDALFGSVERVNAELFTLTYGAIVRQLLTDLEEVEEVNKQLDQMGYNIGTRLVDEFLAKSNVSRCVDFKETADVIAKLGFKMFLGVTATVTNWDAEGTSCSFVLEDNPLVDFVELPDTCQGLQYCNVLSGVIRGALEMVSMKTEVTWVRDMLRGDDAYEMRVKLTKQVPEEYPYKDDD

SEQ ID NO: 174709 - protein, 117 aa, Oryza sativa
  unsure (1)..(117): unsure at all Xaa locations
  Clone ID: PAT_MRT4530_72625C.1.pep
NVTPVDHFFLSHVNILGTXSSLASPWVVEYYVSDSDEGGEEEQGQCCQHCNEVSGSHLPRWSESWSDEDFDQEKDALILVISANLNVIAFIAEANAVLLHAAGREAYTIDIETKHVK

SEQ ID NO: 174710 - protein, 137 aa, Oryza sativa
  unsure (1)..(137): unsure at all Xaa locations
  Clone ID: PAT_MRT4530_72626C.1.pep
HLSSSTVNRLIWRWTSDQRYLARSVYHAFFLGXATLCSYLLWRAKGPAKCKFFLWLVLVFQYRSWMIDLLXKRGIDSHSACPFCTQEIETVNHIFLVYVFTCXVSHHFMSPPGLPDLASPRGCLLQVWWPTSRASIC

SEQ ID NO: 174711 - protein, 72 aa, Oryza sativa
  unsure (1)..(72): unsure at all Xaa locations
  Clone ID: PAT_MRT4530_72627C.1.pep
PTXVDVLLXYDPXNRXPHGMSXRTRXXVVALFTPLCLYPGRLDGIAYLIISPFYVFLFVSVYQIRAQSHSWA

SEQ ID NO: 174712 - protein, 102 aa, Oryza sativa
  Clone ID: PAT_MRT4530_72628C.1.pep
QANDSCFRHQHVDHNAVNVHQPISTQHPTTSPGDVAFSIQTSRCRARRQPLSTWTLLPAHAEQVTGQVGSVAPSLSVGKHPSRPSIHCDCVSTNQQQLDRSL

SEQ ID NO: 174713 - protein, 47 aa, Oryza sativa
  Clone ID: PAT_MRT4530_72629C.1.pep
IQKTYLPSPPPRHPPPPRPPRSPAAPAPAPPPPCDSRCGSRGRRWRS

SEQ ID NO: 174714 - protein, 67 aa, Oryza sativa
  Clone ID: PAT_MRT4530_7262C.1.pep
TDTMITDHLFIIELQCCYSIEKPLRHNKTRVKDTHYRETAHIETGHDQGTRRDNNSVHWGKSKEATL

SEQ ID NO: 174715 - protein, 437 aa, Oryza sativa
  Clone ID: PAT_MRT4530_72630C.1.pep
MAAASSSAAACFLSPSPPPPPRHHSIKHLACAASRSPSPGPSSSRSLALPSPSASASPWPWPRRLRDLLPDETGRILSSATGSLIVALASAALILGDAGSASAFVVATPRKLQADELATVRLFQENTPSVVYITNLAVRQDAFTLDVLEVPQGSGSGFVWDKSGHIVTNFHVIRGASDLRVTLADQTVYEAQVVGFDQDKDVAVLRIKAPTDKLRPVPAGASADLLAGQKVFAIGNPFGLDHTLTTGVISGLRREISSAATGRPIQDVIQTDAAINPGNSGGPLLDSSGNLIGVNTAIYSPSGASSGVGFSIPVDTVGGIVDQLIKFGKVTRPILGIKFAPDQSVEQLGLSGVLVLDAPPNGPAGKAGLQSTKRDSYGRLILGDIITSVNGTKVTNGSDLYRILDQCKVGEKVTVEVLRGDQKEKIPVILEPKPDES

SEQ ID NO: 174716 - protein, 55 aa, Oryza sativa
  Clone ID: PAT_MRT4530_72631C.1.pep
SLSQIPDAATGQMAGDLIGMTTGAGYTPMLKHPQRDLHCRTTTLLMTRGAYTSLS

SEQ ID NO: 174717 - protein, 73 aa, Oryza sativa
  Clone ID: PAT_MRT4530_72632C.1.pep
IVGANKYAIHAIRLLNFVILVNVVVIVYGACLIVAIESDLPSCASFLLAAFSVLRAMSSSRTTVMYRGVHSSV

SEQ ID NO: 174718 - protein, 55 aa, Oryza sativa
  Clone ID: PAT_MRT4530_72633C.1.pep
LLPLYAIPSRRWYLVLNCTSDSEYRRPNILSHGIIVCDTVEYIGVIPNLNKNSSI

SEQ ID NO: 174719 - protein, 725 aa, Oryza sativa
  Clone ID: PAT_MRT4530_72634C.1.pep
MARILGRIWNIGGSTRPSRRQHPGGRGGRSSDNAGQSGSRATGSNPGQLSFPTIAGQLPSLTTAAAPPPHLRLSTIARRSSPARQLVVAVASPSTELSRSSTVARRQLDSAAVAGRRLWGTSEANEQLAEFPPRGWNSYDSFSWIVDENTYMQNAEILAEKLLPHGYEFAVIDYLWYRKYVHGAYTDSYGFDNIDEWGRPFPDLQRFPSSRIDKGFSQLANKVHGMGLKFGIHLMKGISLQAVNGNTPILDIKTGKPYVEDGRQWTARDIGLTHRTCAWMPHGFMSVNTDIGAGKAFLRSLYQQYADWGVDFVKVDCIFGTDYSPKEIITISELLAELDRPIILSISPGTEVTPALAKNISQHVNMYRITGDDWDNWKDVSSHFDVSSSFAAANKIGAIGLRGRSWPDLDMLPFGWLTNAGVNQGPHRQCELTSDEQRTQIALWSMAKSPLMYGGDLRHLDNDTLSIITNPTLLKINHYSINNMEFHHVHSERTSKEDKHSSRFISEDLVHVPKIDGVSLGLTACSDDKANGWNYGMQDDKNISFCLGKTIPLLTSDDIIVHNEEYQTKFHLANMDSDDACLDASGSQRRTSSDSKFPMFSRCRWHAMQMWELNEKGNLISSYSRLCATVESNNKGVVTTGAVARAWIATGSKGEIYLAFFNLDSMSRKITARISDLEKVLGSTFIRKDTCSCTEVWSGRNFGRVEEEISAVVKSHGSMVFEITC

SEQ ID NO: 174720 - protein, 53 aa, Oryza sativa
  Clone ID: PAT_MRT4530_72635C.1.pep
LQQVFHDTNITWALDYFTCLLLKNASFLGWFFFFGFFLVGNFLEIYSGDVYFF

SEQ ID NO: 174721 - protein, 84 aa, Oryza sativa
  unsure (1)..(84): unsure at all Xaa locations
  Clone ID: PAT_MRT4530_72636C.1.pep
MYHRLLRYTHANGWDHSHSIMIXECGRGDCPYARMLRAEHXKESKILAKPCTVFRWLAVRDARCKMTYICQTRANPKMYDTTSF

SEQ ID NO: 174722 - protein, 336 aa, Oryza sativa
  Clone ID: PAT_MRT4530_72637C.1.pep
MSWTKPMSSLLCTILSLVLILEAFTTSHGEFVYHGFSGVNLTLDGNAMVTPDGILELTNDTINLGHAFYPTPQNFRKFSNSTVQSFSLSFVFAILSVHDDISADGMAFFVAPSKNLSNTWAQYIGLLNSRNDGNRSNHMFAVELDTTQNDEFKDIDNNHVGININSLISLQAHHTGYYDDKSGFFNNLTLISGKAMQNMQQCRSLRAAVEGVAGEPDRPQCSEVSAHPCSRRRQDTGSDAERCMRHARSASSGWWPATVRTLSCGHDFHEDCNIAKWLRDNKKACPVHSACNIQLYEEKGHPWSLEGEEMSIALEMMEAEREMDKRRSRRWMGSGA

SEQ ID NO: 174723 - protein, 146 aa, Oryza sativa
  Clone ID: PAT_MRT4530_72638C.1.pep
PPPPPPLKAPDKGRAPSPFTFANLYKGQPAKGSFFFPQTAKRKIGKNPINLETPKFSPSPNFKTPAPAKQLGFPKTKQKLSIPPPPNLEPYKPPPPTPISFSISPSFNLYSFFSLRWYLFFFFIFFFFFFFFFFFFFWTERDLELV

SEQ ID NO: 174724 - protein, 1195 aa, Oryza sativa
  Clone ID: PAT_MRT4530_72639C.1.pep
MAKKPIKPSNRWDSRWRRKPFERGGGFAGGEEPSREMSRGRSPEPLDFFIWTVEDVGLWLEEINLGSYRQVFEENGVNGEYLESLSMFTTEQILRFIRRCHMKWGDFITLCKELRRIKVLLCKHFRNNGDEDTSKSGLPERGARSPQAMVGAVMPIGGVREGGQAEPAVPSRLPEAGALVPIHRLKSLRIRRSTPPSSSSWWRRHCNRTPLTWPLGVYIVSVQCSRSTRVSRTFCRIQARGVAEEMLGASRRSVCTAAAAAAAGSRRRAAAGVASAVSGDSSVSSSSAPPRSVINGEPGVPQLQKRLLSVLAAPKLTGTDNAASLKLREGSLVGRRYESSAAAVDSSDTPPVEKHEYQAEVNRLMDLIVHSLYSNKEVFLRELVSNASDALDKLRYLSVTDPDLIKDGAGLDIRIQTDKENGIITITDTGIGMTRQELVDSLGTIASSGTAKFLKALKESQEAGVDSNLIGQFGVGFYSAFLVSDKVAVSTKSPKSDKQYVWEGEAESSSYTIREETDPEKLLPRGTRLTLYLKREDKGFAHPEKIQKLVKNYSQFVSFPIYTWQEKGYTKEVEVDEPVEAKEGDDETKTEVKKKTKTVVEKYWDWELTNETQPIWLRNPREVSTEEYNEFYKKTFNEYMDPLASSHFTTEGEVEFRSILYVPATKKEDITDRKTKNIRLYVKRVFISDDFDGELFPRYLSFVRGVVDSNDLPLNVSREILQESRIVRIMRKRLVRKAFDMILGISCSENRDDYERFWENYGKFLKLGCMEDKENHKRIAPLLRFFSSQSNEELISLDEYVENMKPEQKDIYYIAADSLSSAKHAPFLEKLNEKEYEVLFLVDPMDEVSVTNLNSYKDKRFVDISKEDLDLGDKNEEKEKEIKQEYSQTCDWIKKRLGEKVARVDISNRLSSSPCVLVAAKFGWSANMERLMRAQSMGDMSSLDFMRSRKAACRANPDDPEALKAVDILFETSMISSGFTPDNPAELSGKIYEMMSTAMASKWASHAQPAEMNLQRDSPVSSEPIEAELAGDHGEELDGRGNELELADDHVEELDSGGNELELAGDHREELGGRGDELELAGDHGEELGGGGTSSSSPATTGRRAMEETSSSLPAALGTGGGTESGGGAWDELELELADGVRRGGKERRRAAGRRRRALGLGSGIGHWGGGAERWCWGGGDEELSRHHQGRGKGS

SEQ ID NO: 174725 - protein, 45 aa, Oryza sativa
  Clone ID: PAT_MRT4530_7263C.1.pep
TRPAPSVFAVHGLTIETVKFVIATAAYFAASAATSIKLDSRYVIC

SEQ ID NO: 174726 - protein, 96 aa, Oryza sativa
  Clone ID: PAT_MRT4530_72640C.1.pep
GRRRRRWRGLLQRAGSRAAPVVALPPHGAAPASPPPAPTPCWSSGAWSPGSSAASPASSQTWAPAYLTPRPAISDSMAFLSRDVEREKETGWWPRA

SEQ ID NO: 174727 - protein, 496 aa, Oryza sativa
  Clone ID: PAT_MRT4530_72641C.1.pep
MPSIISKAPTRPRTRGRTRGRHAATTSSLHFHRTHARTYARRAGSLPPQVRAGYRRCVCVYVRVRRLARVVRPLMRPARRGWGVGALARAFLVLLLLLLAAATTTTIGFGCRGAEAIRVIPPHGPAPGSARSSRGHGHRRSHGNAARVVDAAMPVVGTRPVPALSPAADEESKRRIPSCPDPLHNRADCCFAGGSCGSLDTALNAHVFRVAGKSRERRAATRRRVMDGTGGDGQADGPMGARHAVPPGPASPFTCPIFAGQPGVFMCTAHGVTRSDSPSSATTDHMRGAVPRADSVAAVGSETLRQRCRKLVARLGCRADNAIEPARRAEEQEGQEKEQEGEEEGDDEEEEEEEGEGRRGASGARALLAIGHTTVVAGGGASRPQRKRASTYVWSAKHNGIEIMGFNDISIGAEISQRIDMRVNTPHARGGLRWGPPKGGHTNRFRPKPWTTFQSRHNGYPHLNRAVSPISIGHGARHRLEVTDVKSNLNRANGRH

SEQ ID NO: 174728 - protein, 73 aa, Oryza sativa
  Clone ID: PAT_MRT4530_72642C.1.pep
VYFGRHLRGHTETSGHRPYSHMKMAIPGYSITWAEIDEFWRRKEMEDEEHSLTDDNEAAGIKATTLMVSTYYY

SEQ ID NO: 174729 - protein, 124 aa, Oryza sativa
  Clone ID: PAT_MRT4530_72643C.1.pep
MVAATPTQRVGTPWPYARWSLGGRDASAHSLVLVPARVLCSGKGGETSLQRHHPPRTLEQVGTADGDRSHANFFHTHDDMDALPHLLRDDVHMATARPSEATPTRCRAIQKASKQQGRKTYHAW

SEQ ID NO: 174730 - protein, 275 aa, Oryza sativa
  Clone ID: PAT_MRT4530_72644C.1.pep
LLYQKFVSFALEETRLRTTLTPHPSQYLSELCRPIVAASFNHVSKPCLRLSIFLSHVNEKFKSIKPNDDNTVFNALSFSAPKIRLLRSLTIEKKNSYQVLDFAAFSEPEYDLPIFCANVFTTHAQSIVVLDLNPLYDTTVHKDYKDKYYRSIMPLVHKYNEVWLELMDQAIKENNKATIARNQEEQHKYLTWRAEKDPGYPLLKKLIGESRAEDLVMEFLFEGVNTLGTKSFLDYFPEYARDDGSVNKKRSMIGKSFETRPWDANGEFIGDAEAQ

SEQ ID NO: 174731 - protein, 1590 aa, Oryza sativa
  Clone ID: PAT_MRT4530_72645C.1.pep
MYSSYSAVALALRAAKPSSCAHSTYHHHHHHHHHGDGGDCHQQELLLPLNPRAAAAPRFMLDGYLLRHSAHFLLLSARLRPPPPPPRCCHRRRRVAARCCCCGGGGSVAGHVSWRLDPPRVCRCSGHGAGRSSDLGAVYRRRLECRCGGGGGRLDLGAGCGPRRDAPRLVGRAVRQEVWEYEGGEWPHTSCSMECHTDWGDEEEDCGIAQWEAPPRFRLSRRRSEEDEGDRCRDCHRRKDAESDYYDEDEYSGRQRERRNMNERHGRFTDSNQRRRDQRDYHDDDDYLEFRRWKERRERRDSEFDDAVARRGIEDRRYSEDDRKYDRRRERKDFGYEGAVDVRRGASRYTDNNQRSDWRTEDRDYEVDVRREGKHRRNDDQRYVTRHQQRTDGTEEDVSLLESYRWHDEEYDYDDRDIAERRYYSGRTQKSARASALHEDESNRASSSRNIVDTRVARNKENSASRVRWHDNVDKRAEQTSEERNQRYSSSVVQSFDEKKHDHDDAQLISVRDSRIGTRDVRVITEDDANLASSSKNTMISKHHNTVDQKSTTRKDDSRNRSQKIMELSEVRGTNTEHDSRTQSYHQEDRRRYIENRASSLQSSVKTTSDTRTQVDQHDEVDQQVVALTDSRRRSEKLTDIKMDSTSNVSRTSLKQRNSDEVNQMDIDDRSNSVHNITHITRDKKRYVNQQVIHETDIDVQNVTHVDVSKVRASDISVSRNSQKASETRSDMANSQLEQIHASNSSMVRGPQSYLEAALHNRVYSTSATDIVNTTAEKHGQVEASTNNAAIASTSESHIQARIEDSAVNTIGSVQEQIDLTRICASDSTVVSSSHGLDTRSGQVSRTSATNLVDRTRETRDKSDQQITQASNIDRNDHVTSKFYESSQDSRQSLARLKDAGRLMEHNVGLNWQQEESRRVSNDMDIATLEMQSTEDGSSMVPVDEEKRPMITGSSEQEVRSETTAGSSIPSGSSARQPVNESLLESAARLEKSSTFHVGQFVGEVRKGVSDADTTLTRKNDKSIMEGIARSSSRSRMGGPSDEMWDVQSATSQETFKTADKEEGSSVDGGTTSTSLTPKNETALARKVHKSLWAYVADIVRLGWIQRGESLDSNSNRSVKKSSSSNSQNTEGWISSQERDNEGIQKKTESSKPKDHLMKSHTGESLKKESLPTGSQDLLISESGNVPQINTSKGDFISRTSKEDAHMTGEKAKQSKVAASPKQNTVGGFSEDSTPTLVDVAKKHFPEHEASTSSMITTKGFADNDTGEGVIAGTSSMPISTEGVGWTAGSDEWRYDPSGAMTPYRHPHTQVMMPHEDTPAILESAELPTVGSTRFEEKIVVQETPEVIRTDGKDAELKRRKFQRNKQVMKETFDEWEEAYQRDAEQRKTDELFMREALHEAQRAADLWEVPVGAVLVQNGEIIARGCNLVEDLRDSTAHAEIVCIREASNKLKTWRLADTTLYVTLEPCAMCAGAILQARVDTVVWGAPNKLLGADGSWVRLFPGDGQTSSLDSANTNQGAGPVHPFHPKISIRRGILSAECSEIMQQFFHLRRKKQKPESPPHAHPQGRNHPVKFFSKMHHMFGTIFCL

SEQ ID NO: 174732 - protein, 94 aa, Oryza sativa
  Clone ID: PAT_MRT4530_72646C.1.pep
AIGFSWLLVCILDLIDSMAELRTSWKSMLCCVGGGRVAGVEDDLPPERRRVRGGGHHQRVLSSSSSAYSASTVSMLRLSSTATFTRYDLVLTLS

SEQ ID NO: 174733 - protein, 149 aa, Oryza sativa
  unsure (1)..(149): unsure at all Xaa locations
  Clone ID: PAT_MRT4530_72647C.1.pep
GQGGARRRAAAGAQLREAAAAGLREAACGTAVGRSGARRQRRGYARRRAVRRREAVATXFGCAAQRRGHRGTAARGGGGRQACGPCGGDERRAASACGCAGVREWKVSIFLLSFFFLSHFSNLKPSFSTSHYSVRFGLNLWTKRSRTKK

SEQ ID NO: 174734 - protein, 55 aa, Oryza sativa
  unsure (1)..(55): unsure at all Xaa locations
  Clone ID: PAT_MRT4530_72648C.1.pep
ENLXRVKLSXKFXRSQXPXXXLXQVQVCXXINVFXIXLVLFIRYXSKFHCENXYM

SEQ ID NO: 174735 - protein, 66 aa, Oryza sativa
  unsure (1)..(66): unsure at all Xaa locations
  Clone ID: PAT_MRT4530_72649C.1.pep
KVFGSHLVRSNVQVQQCSVYLTATKRRNHHRSLCTGSQSFXTILFNTHHTQPTSKASSHHQFGLLK

SEQ ID NO: 174736 - protein, 64 aa, Oryza sativa
  Clone ID: PAT_MRT4530_7264C.1.pep
SPGVPRGIRGGPGEPPPFPFSGVNLEVGSSWHKEIYRSKKVTRQRSLAVNGPYINIHWQGGPHA

SEQ ID NO: 174737 - protein, 76 aa, Oryza sativa
  Clone ID: PAT_MRT4530_72650C.1.pep
LVPLLPFTGQPRSGARRRRVVVEGAAGVVRLGGMCEKWEEEDEQEAGRVALTGCSSCEDGSRSSNSPTDESNTLPL

SEQ ID NO: 174738 - protein, 59 aa, Oryza sativa
  Clone ID: PAT_MRT4530_72651C.1.pep
PMHLRSKDAGKIFYNTHIKTKTYYIQLLNSTTHRTLTMRSIKLHIKKKIKQGENICHSQ

SEQ ID NO: 174739 - protein, 303 aa, Oryza sativa
  Clone ID: PAT_MRT4530_72652C.1.pep
PLLGRDCRLTLLRAERRTLAVARASSSSSSSSSQTEPKSEGGEAAAAEGEEQPYEEYEVEILKPYGLKFAKGRDGGTYIEAILPGAAADQTGKFEVGDKVLATSAVFGEEIWPAAGYGQTMYCIRQRVGPLYMKMEKRFGKWDGAAELSEKEIIRAERNSGVISNRVREIQLQNYQRKMEQKMQREEDLRMGLRLYKDGKYEEALEKFESVLGSKPEINESSIASYNVACCYSKLDRIQAGISALEDALKAGYEDFKRIRTDPDLENLRKTEEFNVLLNKYDESFINENAINAIKSLFGFNKK

SEQ ID NO: 174740 - protein, 72 aa, Oryza sativa
  Clone ID: PAT_MRT4530_72653C.1.pep
KKRYSPCRTPNTDNFTSHFSGSLLGVGMSSSDGDVTHIVVVHFYNWHVPVRCTNIELAGLGNYVFACQPSNG

SEQ ID NO: 174741 - protein, 856 aa, Oryza sativa
  Clone ID: PAT_MRT4530_72654C.1.pep
MDEYHHRMGAAADFRRDLEDLVCDHLGGCFSPTSSSSSCSAAGGGVAAGHQPDEEPESSAARRRRRESRLLSRWVARQAEEVLSSMEREVERRNREAELLALARLHPVSTLDPSSFLLSSPTAPPPRPQAPSPTAPPSLLQMWRELEHRRSDADQPFDREPSPDTADRERVRQIARRLTANTDVPTAAAAAATTGEWLGETERQRVRLVREWVQMASQPRDSRVASRRDDTAAGERERRGEPPRLRGRQARLDVITRMARERQRELQGISGYHIVSEFPHRSRNRIQGLLRGRFLRNVVLPVEEEERPPSVAARELGQLRQSHRVSTLRSESAVSSEDVSRFDSSVAESVGVLGSDEPQQGAEVRALTGTENTTQIMLEDVGLQEADAENAAIESPSVALDNMVEMHETQVDNRLQDEAGRDARFWQPSLDDSLDRWPNETAEDAERNWEDNAEELHSETMEDDAREHDHLQDEHDEWHDDESHGTENWQDDFQDSPLDMGPIPRTENRFIPPDDDNVYSMELRELLSRRSVSNLLSNGFGESLERLIRSYVQRRGRGPLNWNLDAAIPSVNSPNENQEQERNAETRQFQAPVNRPALVIPPPPLPPRQPLWHRELRHNNWSTRHREWDAINDLKADMGRLQQGMSSIQRMLEACMDMQLELQRSVRQEVSAALNRFAGPEGYPTDLSDDGSKWDQMRAHVYLLKMCKRANSQWWQMPTMPSADRGGGSGIFSNVYIFVALLLAAARAAKGVLIDCWKEFAMGRTGVKRERLPIEVMQIVGWGVAWFDTRGALALRGACTRVISIPGKMAMQNGGGDEWSPPPPACIACHGQSHGGSSNPSLQSKVKKLVNIYGVK

SEQ ID NO: 174742 - protein, 83 aa, Oryza sativa
  Clone ID: PAT_MRT4530_72655C.1.pep
IPFLSLIFSYSPNASSSHSQSQSCPNPQSQCNPPALILILILILIPIPWTSTTTAWAPAPISAGTSRTSSATTSGDAYPDVVL

SEQ ID NO: 174743 - protein, 79 aa, Oryza sativa
  Clone ID: PAT_MRT4530_72656C.1.pep
ALQDLKGYPTDLSDDGSKWDPVRKGTCCVCSDAQIDSLLYRCGHMCTCSKCANELIRSGGKCPLCRAPIAEVVRAYSVM

SEQ ID NO: 174744 - protein, 102 aa, Oryza sativa
  Clone ID: PAT_MRT4530_72657C.1.pep
LQTLMSVFVIIIGCYTAIDWITDIVIFINILYRWALSYSLLADLTVADWFLRLHGYATSSLLIGITIFTTTNIFATSGGQYYLYIGRLVSMPTASATINGQL

SEQ ID NO: 174745 - protein, 125 aa, Oryza sativa
  Clone ID: PAT_MRT4530_72658C.1.pep
IKTLMSVFVIIIGCYIAIDWITDIVIFINILYRWAPSSSLLVDLSAADWFLRLHGYATSLLLIGITIFTTTNIFATSSGQYYLYIGHLVYMPTVSATINEQFLLDQTQVSYLQFGLVPDTCNMNS

SEQ ID NO: 174746 - protein, 165 aa, Oryza sativa
  Clone ID: PAT_MRT4530_72659C.1.pep
GSSERLVGRRRQQRPNRRRRIWTRKHQYHYSYMCSSPLWKLVVVTLLVCAVVSADVLLLLICALRSMNKRLHRWNKAIRMLTDGVGVKYTGTLAITPGGYSSGRVTDSIDSSSSPLILAKEKELADTCQRHCPTGVPDLVRNSRALYGHELEKERYGLFQLELDA

SEQ ID NO: 174747 - protein, 332 aa, Oryza sativa
  unsure (1)..(332): unsure at all Xaa locations
  Clone ID: PAT_MRT4530_7265C.1.pep
MAVMEEQQEGAAGVMRRRPKTKIVCTLGPASRSVEMIGRLLRAGMCVARFNFSHGSHEYHQETLDNLRAAMESTGILCAVMLDTKGPEIRTGFLKDGKPVQLKKGQEITVSTDYSIKGDDNMISMSYKKLAVDLKPGSVILCADGTITLTVLHCDKEQGLVRCRCENTAMLGERKNVNLPGVIXVDLPTLTEEDREDILKWGXVPNESEMIALSFVRKGSDLVEVRKVLGKHAKSIMLMSKVENQEGVANFDDILAQSDAFMVXRGDLGMEIPIEKIFYAQKGDXFFKCNIQGKPXVVTAPQMLESXMIKSPRPTRAEAXTDVANAVLDGTD

SEQ ID NO: 174748 - protein, 65 aa, Oryza sativa
  Clone ID: PAT_MRT4530_72660C.1.pep
PLPVGLCMFKGPLMLYIRHTGCMENSDTGISRKYDVYDYLYSKAVRGFPMFDVLVLFLQQESGKT

SEQ ID NO: 174749 - protein, 162 aa, Oryza sativa
  Clone ID: PAT_MRT4530_72661C.1.pep
MMMSSSSSAAAGYDGELGPSAAAQAAGVRRKALRAMPTMVYSAAGGPSPACAICLADLEPGERVRVLPKCNHGFHVRCVDRWLLARSTCPTCRQPLFATPPVRPFLAPLRPEGFVTPSNVGGGAVVLGTLAMVSAVLEEEEDDDPCSTGGRRSAGSRAELTV

SEQ ID NO: 174750 - protein, 1144 aa, Oryza sativa
  Clone ID: PAT_MRT4530_72662C.1.pep
MALAGKRLLLAAVWPLAWLAAAAAAAAVDVDDGLALTAFMARMSTGSGSPPPPTWGNRSVPVCRWRGVACGARGRRRGRVVALELPGLGLRGTVPPDLGNLTYLRRLHLAGNRLHGVLPPELGGLAELRHLNLSDNAFQGQIPASLANCTGLEILALYNNRFHGEIPPELCSLRGLRVLSLGMNTLTGSIPSEIGNLANLMTLNLQFSNLTGGIPEEIGDLAGLVGLGLGSNQLAGSIPASLGNLSALKYLSIPSAKLTGSIPSLQNLSSLLVLELGENNLEGTVPAWLGNLSSLVFVSLQQNRLSGHIPESLGRLQMLTSLDLSQNNLISGSIPDSLGNLGALSSLRLDYNKLEGSFPPSLLNLSSLDDLGLQSNRLSGALPPDIGNKLPNLQRFVVDINQFHGTIPPSLCNATMLQVLQTVYNFLSGRIPQCLGIQQKSLSVVALSKNQLEATNDADWVFLSSLANCSNLNALDLGYNKLQGELPSSIGNLSSHLSYLIIANNNIEGKIPEGIGNLINLKLLYMDINRLEGIIPASLGKLKMLNKLSIPYNNLSGSIPPTLGNLTGLNLLQLQGNALNGSIPSNLSSCPLELLDLSYNSLTGLIPKQLFLISTLSSNMFLGHNFLSGALPAEMGNLKNLGEFDFSSNNISGEIPTSIGECKSLQQLNISGNSLQGIIPSSLGQLKGLLVLDLSDNNLSGGIPAFLGGMRGLSILNLSYNKFEGEVPRDGVFLNATATFLAGNDDLCGGIPEMKLPPCFNQTTKKASRKLIIIISICRIMPLITLIFMLFAFYYRNKKAKPNPQISLISEQYTRVSYAELVNATNGFASDNLIGAGSFGSVYKGRMTNNDQQVVAVKVLNLTQRGASQSFMAECETLRCVRHRNLVKILTVCSSIDFQGNEFKAIVYEYLPNGNLDQWLHPNIMGQSEHKALDLTARLRIAIDVASSLEYLHQYKPSPIIHCDLKPSNVLLDSDMVAHVSDFGLARFLHQESEKSSGWASMRGTVGYAAPEYGIGNEVSIQGDVYSYGILLLEMFTRKRPTDDEFGEAVGLRKYVQMALPDNAANVLDQQLLPETEDGGAIKSNSYNGKDLRITCVTSVMRIGISCSEEAPTDRVQIGDALKELQAIRDKFEKHVSNEGTSSQ

SEQ ID NO: 174751 - protein, 114 aa, Oryza sativa
  Clone ID: PAT_MRT4530_72663C.1.pep
VHEFPKARKNESDRIRVSTPPQNREINHETPQIPPNQTTHHPQTNTSNPSTPPPTPQTPLNQSKIAPNPFRPKPPHPRNNSEATRSVSSPGPTTYRTDRKFMTRCDRTPRDPQI

SEQ ID NO: 174752 - protein, 541 aa, Oryza sativa
  Clone ID: PAT_MRT4530_72664C.1.pep
MTFHSELWRSSRAFSTPRTMRTSTDPSGSIVESFHGLVVVHLRTAAPLLAAAVALYILIEQLSYHRKKGSMPGPPLVVVPFLGSAAHLFRDPVGFWDVQAARARKSGAGLAADFLFGRLTVFIRDSELSRRVFANVRADAFHLVGHPFGKKLFGDHNLVYLVGEEHKDLRRRIAPNFTPRALSTYAVIQQRVILSHLRRWLDRSAANGGKAEPIRVPCRDMNLETSQTVFVGPYLTVEARERFDRDYNLFNLGFITLPVDLPGSAFRRARLAGPRLMHTLGDCARQSRQRMRGGGEPECLLDYLMQETVREIDEAAAAGLPPPPHTSDVEAGALLFGFLFAAQDASTSSLCWAVSALDSHPDVLARVRAEVAALWSPESGEPITAEMMSAMKYTQAVAREVVRYRPPAPLVPHIAGEAFQLTAQYTIPKGTMVFPSVYESSFQGFPDAGAFDPDRFFSEARREDVVYKRNFLAFGAGPHQCVGQRYALNHLVIFMALFASLVDFRRERTEGCDVPVYMPTIVPRDGCVVHLKQRCAKLPSF

SEQ ID NO: 174753 - protein, 99 aa, Oryza sativa
  unsure (1)..(99): unsure at all Xaa locations
  Clone ID: PAT_MRT4530_72665C.1.pep
SPDPPPLRLPTTGSATAVKGEGDRCRIHAGRKRRRRCAPXCSPPLPEPSTTVGRKRRGEKKXEVMAHLLRPLALPERSTAVGREERGGEEEAVVVALAH

SEQ ID NO: 174754 - protein, 62 aa, Oryza sativa
  Clone ID: PAT_MRT4530_72666C.1.pep
MSVMPSGKKLSLLLVNDFSRFMQIEILLMLKTKGLLGYFWGSKRIGGRRGGKGNFVWNDIIA

SEQ ID NO: 174755 - protein, 47 aa, Oryza sativa
  Clone ID: PAT_MRT4530_72667C.1.pep
PNIPVDPHAPDILHPHSTVFHWEITKHHPGVHKPPLLYKPALHLIWR

SEQ ID NO: 174756 - protein, 38 aa, Oryza sativa
  Clone ID: PAT_MRT4530_72668C.1.pep
MLDINLFRTEKGGDPELIRRSQRNRSASVELVDEVIRP

SEQ ID NO: 174757 - protein, 81 aa, Oryza sativa
  Clone ID: PAT_MRT4530_72669C.1.pep
GARRGGRPPLPDLPVTPWATALGGWREEGRQMEREEEDEEIELARKRHASAMSDEDRGKKLPEQNAIFGSGGLWPNHAMWP

SEQ ID NO: 174758 - protein, 780 aa, Oryza sativa
  unsure (1)..(780): unsure at all Xaa locations
  Clone ID: PAT_MRT4530_7266C.1.pep
VSVSTGVMKPLLSKLSKQLEEEYTKLKGVRVHKKIMFIRDELSTMRAALQMLADSEELNPRMKDWRDKVRELAYDMEDCIDAFTSRVDHNNDGSTGFKEFFHKFKKLKARHKIANEIEELKTRVMEVSERHKRYDFVNQELTKSSSFAIDPRLHALYVEVDRLVGIEGPTKHIIDKLITNEDEDSYRQLKVVSIVGFGGLGKTTLANQVYHALRSQFLCSAFISVSRKPNLEKVLRKIAQGVTLPTGKIPDGDIHQLVDKLRTYIQDKRYFIVIDDLWGTEEWKSIRLALFNNKCGSRIITTTRSAAVASFSCCDGGYVYLMEPLNFADSKRLFLKRAFGSEELLYPHLEEVFHGILEKCGGLPLAINTISSLLVDQHAKEEWDRMLTAIGSALAKNPDVENMTKILSLSYLDLPHHLRTCLLYLSVFPEDYVIDKQQLINRWIAEEFIHEEQGRSTYEVGERYFLDLIDRSLIQPVDVKYGQVEACRVHDIILDFIACKAAEENFVTSLDTADFGQVSDRRVRRLSVMNISEDHATISASQIDLSHIRSLTLFGRFMQTPLVDLPAIRVLDLEECENMGDNHPILANVETLLHLKYLRIGMLCPITELPRNIGELRHLETLDMRFACQVKELPSTITRLQRLARLSCTSHIVSSVXVPNWMSSLGNLKELKLYIYCLRAEDVKILGAIPTLIFLKLKTFYGTDGRIFIPGYKGFRCLKYFGLVMISCGTTPEFEEGSMPNLEHLKLRFCVHEMECINGATNFGIRHLSTLNKVEVHIYG

SEQ ID NO: 174759 - protein, 128 aa, Oryza sativa
  Clone ID: PAT_MRT4530_72670C.1.pep
KRESYLRSKRQSKAIPKADVPLSTKKIPVEEAYHLLASRGYEYVLLNTSPNGPTAPLHPNWKPVHNTYTFRKGAVLVTFSGQTHVDSFEFLNQSSNQSYKDLLPILVKYDVCIFNSNKGAFITPEQLQ

SEQ ID NO: 174760 - protein, 91 aa, Oryza sativa
  Clone ID: PAT_MRT4530_72671C.1.pep
DYDDPFICTMDCIGAKELAKDFVVSGTASESLYGACESMYKPSMEPEELFETISQALQASVDRDCLSGWGGYVLLVTPTEVQERVIKGRMD

SEQ ID NO: 174761 - protein, 56 aa, Oryza sativa
  unsure (1)..(56): unsure at all Xaa locations
  Clone ID: PAT_MRT4530_72672C.1.pep
MTSXATXXPKTXLLLVLXLSVILVXATAFHHHHHHDGGAEAXGGGGGGGGFFEVPW

SEQ ID NO: 174762 - protein, 48 aa, Oryza sativa
  Clone ID: PAT_MRT4530_72673C.1.pep
MQTYTEHVITTSRGVHTDSIQYFIPAAERLQEELGPNALAFALAHLNG

SEQ ID NO: 174763 - protein, 60 aa, Oryza sativa
  Clone ID: PAT_MRT4530_72674C.1.pep
KNFSFVGFETKTPFRPPKYSHQKRLGNDFFYDLFHRPQLTGFNKAGYLGRISGLELLGFT

SEQ ID NO: 174764 - protein, 49 aa, Oryza sativa
  Clone ID: PAT_MRT4530_72675C.1.pep
AIRVCTLHSKLSNNRILKLNKCHDHTLSVPMDTDLIRFKIWHMTLMAVS

SEQ ID NO: 174765 - protein, 894 aa, Oryza sativa
  Clone ID: PAT_MRT4530_72676C.1.pep
MAMSPLLFIVFLLMLLEPCSSSRSNVYIVYMGERHHGLRPELVQEAHHGMLAAVLGSEQAAMDAILYSYRHGFSGFAAVLTGGQAARLSDWPGVVRVVRNRVLDLHTTRSWDFMGVNPSPSGGGILLESRFGEDSIIGVLDTGIWPESASFRDDGIGEVPRRWKGQCVAGEKFNASNCNRKIIGAKWYVKGYEAEYGKMNTSDIYEFMSARDAVGHGTHTASTAAGALVANASFRGLAKGVARGGAQRARLAVYKVCWATGDCTAADILAAFDDAIHDGVDVISVSLGQAPPLPAYVDDVLSIGSFHAVAKGVVVVCSAGNSGPYSETVINSAPWIVTVAAGTIDRIFLAKIILGNNSTYVGQTLYSGKHPSKSVRIVYAEDISSDNADDTDARSCTAGSLNATLVKGNVVLCFQTRAQRSASVAVETVKKARGVGVIFAQFLTKDIASSLDIPCVQVDYQVGTAILAYTTSMRNPVAQFSFPKTIVGELVAPEVAYFSSRGPSSLSPSILKPDIAAPGVNILAAWSPAAAISSAIGSVNFKIDSGTSMSCPHISGVVALLKSMHPNWSPAAVKSALVTTANVHDAYGFEMVSEAAPYNDANPFDYGGGHVNPNRAAHPGLVYDMGVSDYMRFLCSMGYNTSAISSMTQQQTTCQHTPKSQLNLNVPSITIPELRGKLTVSRTVTNVGPALSKYRARVEAPPGVDVTVSPSLLTFNSTVRKLPFKVTFQAKLKVKGRYTFGSLTWEDGTHTRACCRRMPRGVGGESLIVGVELVVVDVPDAADAAAAAAVAGERLLCELREGVLAGPVRGGSAGVGHCIDEVGRRGQAVAAAAAEERARRRGERRGDRRRDAEGGDQHAEEKGREKPILPLVGLFFGRVFWKAESNCHKVKPTN

SEQ ID NO: 174766 - protein, 65 aa, Oryza sativa
  unsure (1)..(65): unsure at all Xaa locations
  Clone ID: PAT_MRT4530_72677C.1.pep
TPXLIPRTAYVWLSWSHKLNGCVSLCVTVAHDVKATLMNFLVRNHRXGPQPLRXCPIFMTPMPSS

SEQ ID NO: 174767 - protein, 207 aa, Oryza sativa
  Clone ID: PAT_MRT4530_72678C.1.pep
AYFLTSENHYMLKLSTIHRKGGNATRCTIVPRVSITIILSMAKFQQPTPAALQLAACSPGFRTQSQQHHPTRWQLVSCMRSWPCTPRFNHPASGAAHVAPTQPAAVPALWLTFPPVLQHANLAFVDHSGLARSCPSPALPLRNSIHHRAHKPPCCLVSQAAGRTASLALFALITFDPTNIKPAAKAAACTHSPDEQRENDLHLLRAT

SEQ ID NO: 174768 - protein, 73 aa, Oryza sativa
  Clone ID: PAT_MRT4530_72679C.1.pep
MAGGCAQWLEDASSGGIGGSVVIARGWRGAGDCVMQRLGGATVGSARSLVGIQRFIASPGRSEPLDEMDGPQY

SEQ ID NO: 174769 - protein, 60 aa, Oryza sativa
  Clone ID: PAT_MRT4530_7267C.1.pep
NSDGKTKHKATESRWCYILTRRGTLHTKFKTANRSGGFYLTDRKILLKGHLGLSKSTALI

SEQ ID NO: 174770 - protein, 142 aa, Oryza sativa
  unsure (1)..(142): unsure at all Xaa locations
  Clone ID: PAT_MRT4530_72680C.1.pep
GRVRGRVGIRVGHKNQCSICREAVPGAKLRTNTRTASQENPSERYIQVGSVDNHDFXLMGFGNYYGAEKSLHEADRGVPALLHHDMYIVRTWTIHVLTLSVDRNASLRMRMWRCVQLTGQSADFDGSIDCNTRSICIHVSDV

SEQ ID NO: 174771 - protein, 257 aa, Oryza sativa
  Clone ID: PAT_MRT4530_72681C.1.pep
MSSIGTGYDLSVTTFSPDGRVFQVEYATKAVDNSGTVVGIKCKDGIVLGVEKLVTSKMMLEGSNRRIHSVHWHSGLDIILINVMAVAGLAADGRQIVSRAKSEAASYEKVYGEPISVKELADRVASYVHLCTLYWWLRPFGCGVILGGYDRDGPQLYMIEPSGVSYKYFGAALGKGRQAAKTEIEKLKLSELTCREGIVEVAKIIYGVHDEAKDKDFELELSWVCDESKRQHQKVPADLLEQAKVAAQAALEEMDAD

SEQ ID NO: 174772 - protein, 249 aa, Oryza sativa
  Clone ID: PAT_MRT4530_72682C.1.pep
MSSIGTGYDLSVTTFSPDGRVFQVEYATKAVDNSGTVVGIKCKDGIVLGVEKLVTSKMMLEGSNRRIHSVHWHSGLAVAGLAADGRQIVSRAKSEAASYEKVYGEPISVKELADRVASYVHLCTLYWWLRPFGCGVILGGYDRDGPQLYMIEPSGVSYKYFGAALGKGRQAAKTEIEKLKLSELTCREGIVEVAKIIYGVHDEAKDKAFELELSWICDESNRQHQKVPADLLEQAKVAAQAALEEMDAD

SEQ ID NO: 174773 - protein, 41 aa, Oryza sativa
  Clone ID: PAT_MRT4530_72683C.1.pep
REALVQLYLDSSSPYIASSPSARGITSVRSASTAAAFHTAP

SEQ ID NO: 174774 - protein, 335 aa, Oryza sativa
  unsure (1)..(335): unsure at all Xaa locations
  Clone ID: PAT_MRT4530_72684C.1.pep
TVLPISSATDRSTSASRLCTNIQKSQTALIRCENIDLDDVPKNIPTTRTLLPIKYLGLPFTVGRLXCKADLQPLFDKSTGTMAAWRERNMGLAXRTTLVKSVFSPQSVYVLITFKFTKESIKVLDKQRKSFLXAGQENIMGGKCKVNXKRSCSPVXIYGGLDALNLESFALALHVKWLCHKXESSNKAWVGLDTPCDETDKILFVITMITVGDGVASRFRDSAWMHGRHPKEVMPQVYVYAISKTKNRTLRNVIADNTWSRDLNLSIXVAMTTELLEQLVILWATVQSVQLTNHEEYLVPPKKKFLGSTSTNYAWASNKYKLFAWLVIHNRDWTL

SEQ ID NO: 174775 - protein, 164 aa, Oryza sativa
  unsure (1)..(164): unsure at all Xaa locations
  Clone ID: PAT_MRT4530_72685C.1.pep
LGXSETRXGFKXGSTXGXCSLPGGPWGXSGENKFPTLXELXXGXTPTLXXEGXNYNGVXXGSXXVEPGGKLXKRVLEXLXTXXSIXPKTWNSTXFLXPXWXKLPESXSXPGTPXXRVPPGGGXXTQXKGEFGFXRXXPFPXXAIFCXPXRXISVRAQAESCTXR

SEQ ID NO: 174776 - protein, 37 aa, Oryza sativa
  Clone ID: PAT_MRT4530_72686C.1.pep
MMNIFVASNGIVGQAGGFHKISVWYLPASHREVRNDA

SEQ ID NO: 174777 - protein, 86 aa, Oryza sativa
  Clone ID: PAT_MRT4530_72687C.1.pep
MATVPVNPKPFLNNLTGKPVIVKLKWGMEYKGYLVSVDSYMNLQLANTEEYIDGQFSGNLGEILIRCNNVLYLRGVPEDAEIEDAE

SEQ ID NO: 174778 - protein, 59 aa, Oryza sativa
  unsure (1)..(59): unsure at all Xaa locations
  Clone ID: PAT_MRT4530_72688C.1.pep
LTTNMAINRIFYTDSNGRDFLERVRNHRDEWDLDLSQTVGGXYYPVYQXIYVAYGKYEL

SEQ ID NO: 174779 - protein, 78 aa, Oryza sativa
  Clone ID: PAT_MRT4530_72689C.1.pep
SDHLFRYHPFHRSLDRSTAMAPTVGKAHMIVISQLSHSFNVVLSDRLGIRMYVFRGRDSFFTVALVALVNHIPLSIVL

SEQ ID NO: 174780 - protein, 137 aa, Oryza sativa
  unsure (1)..(137): unsure at all Xaa locations
  Clone ID: PAT_MRT4530_7268C.1.pep
VQRGLNGEVFGRLENKGFCLXASKLITVEKSFPEKHYPYLSSKTFFGGFVKXMVSGPVVPMVWKGKKVVSSGRKLVGTTNPLGAEPGTILGELAVDIGRKVIHGRFSVXNASKKTALWFLKGIAEWRSKQHPWIYEV

SEQ ID NO: 174781 - protein, 76 aa, Oryza sativa
  Clone ID: PAT_MRT4530_72690C.1.pep
NPCLDTQLERHVSTSSVIYRDTTYTVNDYLCIRPLSFFLERMVVFLRNAWYAIAAFTFSDISSAPITPASPSQLQV

SEQ ID NO: 174782 - protein, 59 aa, Oryza sativa
  Clone ID: PAT_MRT4530_72691C.1.pep
SNGKKKTRVAFLASIECSNFCRSSPFLSVSWIHMPLRLVALSLSLTLSLSHSHSLSVNN

SEQ ID NO: 174783 - protein, 41 aa, Oryza sativa
  Clone ID: PAT_MRT4530_72692C.1.pep
MAGGRALNRMLCLLGVCVINSVNVDAVQHHMVEFSRFSYTT

SEQ ID NO: 174784 - protein, 88 aa, Oryza sativa
  unsure (1)..(88): unsure at all Xaa locations
  Clone ID: PAT_MRT4530_72693C.1.pep
PHRAKIDAVVRMECEWMRAGLKXVQKRQCQALVRVASAARRLREKEVELDATLDHLLAPRPPPKPPRALATPPPSPPRSMIPSPTASR

SEQ ID NO: 174785 - protein, 512 aa, Oryza sativa
  Clone ID: PAT_MRT4530_72694C.1.pep
MATFFRSANLASRVFDRQFLSPRPGATVNTVRQFYENLVPSYTICDIDCPDYSFRKFTDDGNYLVAFSRNHQDLIVYRPIWPTFSCNEPCDSHDLPPKAKKFDSFFKQLYSISLASSNEYICKDFFLYMECHQFGLFATSTAQSNDSSATEGAIHGVPSIEKITFYLVRLDDGAILDEKAFRNDFINLAHSIGAYLYEDLLCIVSLRYQTIHVLQIRDSGNLVEVRKIGAFCQEDDELFLHSHGQAARGVSFLPGIKQRLLSFIFRKTWNEESDQTLRVQHLKKKFYFHFQDYVDLIIWKVQFLDRHHLFIKFGSVDGGVSRSTEQNSAFFAVYNMETTDIVSLYQNSSEELYSLFEYFYDHFHTNPQNSSHGNFISSHSNNVHALDQLRTIKNKANSTSQQFVKKMMASLPYTCQSQSPSPYFDLSLFRYDEKLISAIDRHRHCTEHPIKFISVKQPNVVKFKIKPGSDSGASDSRAKRISSFLFHPFFPLALSIQQTYMQPTVVNLHFRR

SEQ ID NO: 174786 - protein, 116 aa, Oryza sativa
  Clone ID: PAT_MRT4530_72695C.1.pep
RDNPRESSERDSCDCRSALHVVPGEPTGKGRSKYQPGWATVYAGVPQGLSAFVAMWPAYPDWYVVAAHTLEGSGRLPCDSQKGASSRSCLTVRDLVLYIINRCGSEKSKQPVWFKT

SEQ ID NO: 174787 - protein, 56 aa, Oryza sativa
  Clone ID: PAT_MRT4530_72696C.1.pep
LGSIHVCSLQSAMLNFLRELPIFATSEKRYQACMRVYQIAPQFGIVKSVGAKKNKV

SEQ ID NO: 174788 - protein, 58 aa, Oryza sativa
  Clone ID: PAT_MRT4530_72697C.1.pep
NIHITRWEVRVDLVGQCAIEASRLSWQIINDSCFMKDFRQMPSSTKVCEANPTKEVNI

SEQ ID NO: 174789 - protein, 47 aa, Oryza sativa
  Clone ID: PAT_MRT4530_72698C.1.pep
NYTRTLLVQQIFFLHQEHNQRQNWGWALMEHLPQNVGYQIPLQFVYG

SEQ ID NO: 174790 - protein, 132 aa, Oryza sativa
  unsure (1)..(132): unsure at all Xaa locations
  Clone ID: PAT_MRT4530_72699C.1.pep
XNLVYVSCLADDGYNCFFDHQLCSIIFKNKCVGLAIXQGKLYMLPKHNVACNSMSSPSTNVRNKRKRCNDETSAKLWHCHLGHISKGIIERLIKEEILYPLDFMDSEYCIDCIKGKYVKQIKKGAIRSLGSM

SEQ ID NO: 174791 - protein, 81 aa, Oryza sativa
  Clone ID: PAT_MRT4530_7269C.1.pep
LTSTLMSVTNDVCHAKSLGYGFRYNRIIKGRVFFKIVMRVHVGVFEKYPSPKCTSLYSNARILSNHMYCVMNKTFLYYYNS

SEQ ID NO: 174792 - protein, 106 aa, Oryza sativa
  Clone ID: PAT_MRT4530_726C.1.pep
ATFSIEDANRLTRSAGAEAPPRGHRCHRHRGWRLEQPGQNHALCSGGRCQWRWRHCVQAATSPLLPRAFSRSRMLGAATAPPRPPPARYEEPSSRHRSSSTSAGAP

SEQ ID NO: 174793 - protein, 210 aa, Oryza sativa
  Clone ID: PAT_MRT4530_72700C.1.pep
CGSGSFVMGLLEELGFPRSMIKPYHNPEDIHNALSRGSKNGGIAALVGEIPYIKLFLAKNCKRYTMIGPIYKTAGFGYAFPKGSPLVGDISQAILNITGGDTIIQIEQKWVRDKNSCQNEGSIIGSGSLTFASFEGPIILTGVVSTSSLLVALIILAKQLGEIFLLCPDLTKKRIMDMILERRGILGMNQRLFKGRNCLAILPLWHHSQE

SEQ ID NO: 174794 - protein, 58 aa, Oryza sativa
  Clone ID: PAT_MRT4530_72701C.1.pep
MVGWDWARKWQPGEGASLHDDSGLEDVSLASSLTGSALLAAVAPQLPPSSMECRPLSP

SEQ ID NO: 174795 - protein, 80 aa, Oryza sativa
  Clone ID: PAT_MRT4530_72702C.1.pep
RGVAPPRGPPGFTLKPPGPVCCGELGAETHFPPGPPLPLIPPSLKTPPQRESWDPPRARPGNPGGPPGPGGMGPVNLRGI

SEQ ID NO: 174796 - protein, 577 aa, Oryza sativa
  Clone ID: PAT_MRT4530_72703C.1.pep
MSSPTGCLRLPPTSVSAFMVGWSHHHCWASISSPTGCLRLPPTGVSAFIVGWSHYRCWASTSSSPTDRLVCYRLVSPPGRLAYYAAIDGDLRLHHQLAVTAANWFPRLHGWLITPQSMSVIVFTASSSSPPSMESSLSRLAYYTATQGRLRFHHYSASSIGDCTSASSVVMSPPLLMGDYVFASGVLAPPPLVAMTIPIPTPVVYPEMAGSASSPYVAPLISSRITGRLRPASARTDPLGLAAAAAAVRVRSWRRFAGARCEVALLPARRISAQPRRRNALREKASPPLPADPQVLEESGSLDVQRLPDLDREPGISGGLDAVTSGNIVSKWNLEGGSDVVGLGVAQTGPGIVGRGGNTEVQGRGGNVEEVMISRAGAMANQFGSGECEVPTLSSSFPFLTVEAKEPLVVDAQFLAVQIDKPRLRSIAWSGFAALCAACVLLAVSKLIWGNGKKYLSRNMFDILRPRMNKGESGKGGIKVLKNDTFSEARPNGFSISTMRKEKSKHNFQPLESVEAAAVKFKTNRHGDNIMNERAIDFDISNLGVTTTKKMTKRRSLSKRKKPANGLGGATDVPPDV

SEQ ID NO: 174797 - protein, 159 aa, Oryza sativa
  Clone ID: PAT_MRT4530_72704C.1.pep
QRTSNTMSSRSCDIMNPSLFWTSKTRFSPGEYRSMAATIMANRVDTSEGTPMPSTLPRNKIRISVATQPKLSQPLKATSEVAIAPRPSKLPRLEATSAASLHVRAVLLVVANTPHHLVRRRDGDETARKGGGWPNVEIFDYRLSIEMYHLAPYLDTLLH

SEQ ID NO: 174798 - protein, 961 aa, Oryza sativa
  Clone ID: PAT_MRT4530_72705C.1.pep
MTIPIPTPVVYPEMAGSASSPYVAPLISSRITGRLRPASARTDPLGLAAAAAAVRVRSWRRFAGARCEVALLPARRISAQPRRRNALREKASPPLPADPQVLEESGSLDVQRLPDLDREPGISGGLDAVTSGNIVSKWNLEGGSDVVGLGVAQTGPGIVGRGGNTEVQGRGGNVEEVMISRAGAMANQFGSGECEVPTLSSSFPFLTVEAKEPLVVDAQFLAVQIDKPRLRSIAWSGFAALCAACVLLAVSKLIWGNGKKYLSRNMFDILRPRMNKGESGKGGIKVLKNVKCPEDLLGRPQLDRHKLMNNIKRAKQSRELFDLSSVFGYCSVATCYDVIITETRRMVTNVHTLLEGILEQSKTKSKHSVLFPHPAATNGQEVSASHGCAELPDISISNNIIGETVESSVDFKSSAQVMDNSVKNQNNVGDIEPPVDTPTNDMPTDAKDSIPMVHVVEIEEQIGSPDECIDGLNSISIPSSEFEGQKQFPDISVKNVDGIFGIKSSQISSDTDVIGTNDNSHKFSINVASKTTGDLSSGCSNSIPSESESKEIPVDINRNDLNYFQEIEAQSTFANYDAQTVQYEEISHRVSMITKEACINPAMADILITKSPQRIGEEPVDLMRGNAQSMQELEPSSSIRDHKQIVLANQKNNIISRSHNETQASSEIDSIGTNDNASTSSVYDLPEESIHQSAKNSTENTSYNEEPEESIIKRKIKLHQEMCNDKDAQTKHKVEGVSEIGPEFGPSNDVCKTETVAKKRSKKTPCDKGLKVPEQDIVQCNSMADKKSSSKNVKRTRKNLKSALRNQGTQTTQEISETALVVNSPDDAPRAENIRPFGGSGSSTETQSPMFSDTFSEARPNGFSISTMRKEKSKHNFQPLESVEAAAVKFKTNRHGDNIMNERAIDFDISNLGVTTTKKMTKRRSLSKRKKPANGLGGATDVPPDGFSAEWQHLVNVQQIA

SEQ ID NO: 174799 - protein, 47 aa, Oryza sativa
  unsure (1)..(47): unsure at all Xaa locations
  Clone ID: PAT_MRT4530_72706C.1.pep
KLAGARPPXPDRGLSVLXWGHXXDDYSRCGFLHDTPKXESFSGPWET

SEQ ID NO: 174800 - protein, 258 aa, Oryza sativa
  Clone ID: PAT_MRT4530_72707C.1.pep
MSGCVCRRRVGERFVPLRTWTKLILIADRSAAAPPPPHQRRRPRSSPTVNRVAAVPHSSRHRPPTARFVFLSMEGGGFDFFSEDPNPSVWPSQPIYRYNKYSVLLLVVFCLHVPIATFTSKRVEAIDKKASSYAARAHRAASPPTSRRRRDAWKKETDRDARCLARHLYPRYRGTEIEPSMGYFRDCCTPHRRRTGSGGSANRRRSRIRVSLLRPRPPSCILHPVWQRLEELLLLVVLSCSAAGRRAEGVAMEEEKAQ

SEQ ID NO: 174801 - protein, 1435 aa, Oryza sativa
  Clone ID: PAT_MRT4530_72708C.1.pep
MEKQAGEFEKMLEGIQNAIDAVVLKQDETQAVVLKLDQAMTSRRPQVDAAVKGLRAKMNELKNQVVILEKFRGEFGNSSNMSRVVASSAQRRSDEVDRPLPLLPTPASFIALTSAGDSGPDVHRVATNHRGKALGVVTPSVLPPVTGTTCSPFNSRSAMDSFSRDEIGVSEERGYNHRVPKLDFPQFDGVDPQNWRMRCEHYFGVYGTHPMLWVRVATIFFMGRAASWLRSSKAHLRFGEWTEFCLAVDRKFDRDRHQMLIRQIEQVKQMGSVEEFYERFDDLMNQLLAYDPMYNPLTIVHRFTEELRSEIHHAVMLQRPRDLETALAVACLQEEWLETQKPKEFRKVGDNVQHEVFAILHQDDSDNGNSSSDELDTTPLLALSVHAIQGTTVAQTMHLQDVIQGYAVLILVDSGCSCSFISSSVVSHLLDLLQLHVFFQVKVANGQTLQCQSELARVPWSIQGQQFTSTLKVLPLQSYDMILGMDWLEQYSPMDIDWQQKIIRFHMDDQLVTLCGVVPSVASDSVLSAIELHQLHLSGSIEGLVRLQALESEGSQSMPIPANIQQLLQEFAAVFDEPQGLPPTRDCDHTIPLIPGTQPVNVRPYRYTPLQKDEIERQVADMLDRGIIKHSSSPFSSPVLLVKKKDGSWRFCVDYRHLNALTVKNKYPLPIIDELLDELAGACWFSKLDLRSGYHQIQMHPNDEHKTAFKTHHGHFEFRVLPFGLTSTPATFEGVMNSGLATHLRQSVLVFVDDILVYSQTLADHELHLSCVLQILTEHQLKVKQSKCSFAQPQLAYLGHVISAQGVATDEEKIVAVKNWNTPSSVKELRSFLGLSGYYRKFVRNYGIICKPLTDLLKKGQLFVWTSVHEEAFLTLKSALISTPVLAMPDFHKQFVVETDASDKGISAVLMQVDLPVAFLSKALGPRAQCLSTYEKESLAIMLAVDHWRSYLQHAEFVIRTDHRSLAYLENQRLSTTWQQKALTKLMGLRYRIVYKKSIPSWLQDVPSGYVTDPDTQCILKSLANNGKHHANFELQSEILYFKKRIWIGDNIPLQQQILANLHTAAVGGHSGNLATYQRVKQLFAWPGLRQSVHSFVQTCDICQRAKSEHVKLPGLLQPLEVPDHAWQIISMDFIERLPLSASCNVILVIVDKFSKFAHFLALRHPYTALSVAQLFMDQRGAKLIEQVQVEWVGASSPAITWENFEELRHKFPAAPAWGQAGSQEGRNVTPEATTSSSCAKTRFKPSGPSDTVRVLRCSNPVLSNSNSETSYLSFPLTIARNRTFKNCYVYTSYGILFVSFSFSYSRQQRAERTMIAGNGGWLNYKRQEASNLQRERGASLGEKRHHGQRSAEQPQEEHDEDGRARRGQALQREGTARAELEEEQQQQPLVIAMARRRCLWWLMRDQDPRAVDPPLALVPLICHVGPMCRRTHIL

SEQ ID NO: 174802 - protein, 463 aa, Oryza sativa
  Clone ID: PAT_MRT4530_72709C.1.pep
MGYGMSRMEEEYSEHEDQNNGGSNSQVNNEFLNTHNDIFHMTQIRSGPSESLRKSIGTSKDVISTTRLLSGREINSSGNGKFSSVDRAFLLGRYLPVDGPEIVDRMDSRAYVSQFSADGSLFVAGFQGSHIRIYDVDKGWKVHRDIHARSLRWTISDASLSPDQQFLVYSSLAPIIHIVNVGTAAKQSYANITDIHDGLDFSQHEDVRYTFGIFSVKFSSDGRELVAGSNDDSIYVYDLVANKLTLRLPAHHSDVNTVAFADETGHLIYSGSDDNLCKVWDRRCLSTEEPAGVLTGHLHGITHIDSRGDGRCFISNGKDQAIKMWDIRKMTSNADSYEDRTSNWDYRYSRYPQQYKQLKHPHDQSIATYWGHSVLRTLIRCYFSPAYSTGQKYIYTGSYDSSVCIYDVVSGSQVAKLKGYHQLAIRDCSWHPFDPMLVSSSWDGRVAKWSRSSCQQEETTDLD

SEQ ID NO: 174803 - protein, 59 aa, Oryza sativa
  Clone ID: PAT_MRT4530_7270C.1.pep
LTRCWCFQVVKCKCDSPLLPFEFSDMDSALVVASSEILYHFFARPPVPMTSVEEHSARA

SEQ ID NO: 174804 - protein, 127 aa, Oryza sativa
  Clone ID: PAT_MRT4530_72710C.1.pep
CTKHAERLGTAPAPVDTVTQARVSGPLLARYTRSPPPSVVSRRRRVVLLFFGEKHAVLDHRRRRPAPSPSPPPASRPPHAAMCHRRRRRPGAARRSRGGGGDREQEERGEGRRGGGGARRRHVGRVG

SEQ ID NO: 174805 - protein, 140 aa, Oryza sativa
  unsure (1)..(140): unsure at all Xaa locations
  Clone ID: PAT_MRT4530_72711C.1.pep
IIHIVNVGTAAKQSYANXTDIHDGLDFSQHEDVRYTFGIFSVKFSSDGRELVAGSNDDSIYVYDLVANKLTLRLPAHHSDVNTVAFADETGHLIYSGSDDNLCKSLNPSYLFFLLVWDRRCLSTEEPAGVLTGHLHGITH

SEQ ID NO: 174806 - protein, 376 aa, Oryza sativa
  unsure (1)..(376): unsure at all Xaa locations
  Clone ID: PAT_MRT4530_72712C.1.pep
MVASLARSIPSPLPIPSPNPESSIEIDRRRAERRGDMGGVAAGTRWIHHVRRLSAAKVSADALERGQSRVIDASLTLIRERAKLKAELLRALGGVKASACLLGVPLGHNSSFLQGPAFAPPRIREAIWCGSTNSSTEEGKELNDPRVLTDVGDVPIQEIRDCGVEDDRLMNVVSESVKTVMEEDPLRPLVLGGDHSISYPVVRAVSEKLGGPVDILHLDAHPDIYDAFEGNIYSHASSFARXLEGGYARRLLQVGIRSITPEGREQGKRFGVEQYEMRTFSKDREKLESLKLGEGVKGVYISVDVDCLDPAFAPGVSHIEPGGLSFRDVLNILHNLQGDVVAGDVVEFNPQRDTVDGMTAMVAAKLVRELTAKISK

SEQ ID NO: 174807 - protein, 78 aa, Oryza sativa
  Clone ID: PAT_MRT4530_72713C.1.pep
LVMVQSYLAPEHRLVVVVFRAPAGAVCRWICSHSIWRVVCFCFVENATWPVTHVSAHASANRVGRRSGTIGYRYVLVY

SEQ ID NO: 174808 - protein, 59 aa, Oryza sativa
  Clone ID: PAT_MRT4530_72714C.1.pep
MGEKTTWSGNEAPLPRNGTVAVGIVPIGPCRPDGCWAVPCRAWAGPGRASPLAIHRPFS

SEQ ID NO: 174809 - protein, 97 aa, Oryza sativa
  Clone ID: PAT_MRT4530_72715C.1.pep
MPPPGLAEKCKRTLDDPCLGRRLADGRSDHCLTGQEDGVTNSANDRSSSMWKWEWMDDQTMWTRSCLIKTLCYDAGNQHLITGSSHIRHTAIIQLLR

SEQ ID NO: 174810 - protein, 279 aa, Oryza sativa
  Clone ID: PAT_MRT4530_72716C.1.pep
MRVLPASWSSAASSSASASADRLNSPTPAPPPPAPPPPAPKSSSSSSAELYLNIYDISPINHYLYWFGLGIFHSGIEVHGMEYGFGAHEYPTSGVFQVEPKSCPGFIFRRSVCVGSTDMSRSEVRSFIEDLAEDYHGDTYHLIAKNCNHFTADICKRLTGKPIPGWVNRLARLGSFCNCVLPESIKVSAVKDVTDPPEFPVGSINIALAGHTQIIYLYHISSQRDVELVEIFSRDDDMESNASIVDGSDADDLDHLLITPSSDVVSSKDKILTPGRDSL

SEQ ID NO: 174811 - protein, 363 aa, Oryza sativa
  Clone ID: PAT_MRT4530_72717C.1.pep
MDEVCEGKDFSFPAEEERVLRLWEELDAFHEQLRRTAGGEEFVFYDGPPFATGLPHYGHLLAGSIKDAVARHHAMRGRHVARRFGWDCHGVPVERAVDEALRIATRAQVLEMGVASYNDACRGVVTRYVAEWEAVVTRMGRWVDFEDGYKTMDIKFMESVWWVFAQLWDKDLVYKSFKVMPYSTGMKTPLSNFEAGQHRQFVPAETAMVSFPVVGDVDNAALVAWTTTPWTLPSNLALCQCKICLCQETRLDQLPVTVKVTGKKPGPSKGSSGAAKNGLDTESYELLEKIHGSSLVGLRYTPLFDYFSELQDTAFRVVADNCVADDTGTGVVHFAPAFGEDDYRVCLASGIVEMGKIFGRFSL

SEQ ID NO: 174812 - protein, 147 aa, Oryza sativa
  Clone ID: PAT_MRT4530_72718C.1.pep
MAMSSSMSLLTSPAELGRRGPALKARRSSPAACCAFRRDQYSGGALVDSSMAVLRRRMREARMAENNYEAPAGWSAWEKRYYPAYVSDVSAAVGALQLLLMGTRPSVAIAAAALLFAGVPVSAVAAVHHLAQLAAESAVLLQHHVVP

SEQ ID NO: 174813 - protein, 110 aa, Oryza sativa
  unsure (1)..(110): unsure at all Xaa locations
  Clone ID: PAT_MRT4530_72719C.1.pep
MGATELTVERGRRDSGGIPAKRRGMQRSGATGGHGAAWDGXEQRQTATRGGECGGDIGFAVEVVIWWWIGEMEERPACGEVWRCWWCKWRGTGMAGAAVVGGRWSPESGD

SEQ ID NO: 174814 - protein, 82 aa, Oryza sativa
  Clone ID: PAT_MRT4530_7271C.1.pep
LEQELYDLNAGGERDGLQCAYPRRRSSRVSATSRRSKPRRSSVSAGAWNPRSPSFTIKRKRKVMPNLLKLIKNKRGGKKNIN

SEQ ID NO: 174815 - protein, 188 aa, Oryza sativa
  Clone ID: PAT_MRT4530_72720C.1.pep
MTLVVRNHFSQIVFFTRADLEDESIVDIRDGGVIKHRNGTSDIGSKIIITSRSDKIARLGTTPPLRLQLLPKEAYWYFFKVCTFGSMDASEHPEIASVAMELAMESERSFMVANVFGRLLRSNTNTLYWRLVLASLREFKKKIRVVLLGGADQPQGRFDALGWKSQIAPNYSYTYSCEIQRPMCIVSR

SEQ ID NO: 174816 - protein, 51 aa, Oryza sativa
  Clone ID: PAT_MRT4530_72721C.1.pep
RERPPLLFSLRVAVIHSRGTLLQTDRDDRAEESLNKAFLSPWNYVIDESFV

SEQ ID NO: 174817 - protein, 70 aa, Oryza sativa
  Clone ID: PAT_MRT4530_72722C.1.pep
MDRSTVATPSCERLLDDVAATTLRGSGQQSASGVGKADAGRGQAKAPQTLGVGHRWLGYGEVQQGVRYNV

SEQ ID NO: 174818 - protein, 408 aa, Oryza sativa
  Clone ID: PAT_MRT4530_72723C.1.pep
RYLIIVDDIWSTKAWEFVKSALPDNNLCSRIITTTRDTNVATSCCYTVAGHIHNIQPLSEQDSRELFLKRVFRDVSACPPYLEEVSCGIIRKCHGLPLAIISVASLLVGKPNIVEQWEEVYNSIGSAFTQQGMTDHYNKILLLSYYDLPHYLKTCLLYLSMFPEDYMIEREVLIWRWIAEGFISKVKGLTLDQVAENYFNDLVNRSMIQPIDIQYDGRASACRVHDMILDLIVSLSKEENFTTLMQGEGYNCSNKIRRLSVHVGPDLQTLHCLRVLVFENCHGIGTQHIKHLESFFRLAYLSISSDGITELPEQIGDLKYLQTLDIRHSGIKKLPPTIGRLQNLARLLVGNDVELPNEIGDLQALQELSDAGKYDSIKFVQELRRLTRLSVLRIEFGSYYHGGGLEML

SEQ ID NO: 174819 - protein, 142 aa, Oryza sativa
  unsure (1)..(142): unsure at all Xaa locations
  Clone ID: PAT_MRT4530_72724C.1.pep
VVRDIQQAWQEVRNDASDTNWILLAYGDNKDVVLAGKGTGGLAEMKEQLNNNQVNFGVVRVRAVDDHGSKRAKFVFVTFVGAGVPAIRRARVSTQKXEFERIFNGYHIQMYANTDDDLSEEAITAQLHACAGAHKPQAYEFS

SEQ ID NO: 174820 - protein, 116 aa, Oryza sativa
  unsure (1)..(116): unsure at all Xaa locations
  Clone ID: PAT_MRT4530_72725C.1.pep
RYAHFVALSHPFIALDVALAYLNNIYKLHGMPXSIISDRDRIFTSALWSELFRLTDTQLKMSSAYHPQTDGQTERVNQCLETFLRCFVHACPTKWYRWLALAEXWYNTAYHSALGT

SEQ ID NO: 174821 - protein, 89 aa, Oryza sativa
  Clone ID: PAT_MRT4530_72726C.1.pep
SQSQKAKIKCIKLNEVSNQHQNSQNRQFCTNEQRGIRSTPRRRNCDPISSFLLLRLGGLIAEQVPGEHEDAAGGAEEEEDGEVPGRPAL

SEQ ID NO: 174822 - protein, 50 aa, Oryza sativa
  Clone ID: PAT_MRT4530_72727C.1.pep
MSVFVIIIGCYTAIDWITDIVIFIIFINILSSLFNIAHSTAIDGQLRHHI

SEQ ID NO: 174823 - protein, 363 aa, Oryza sativa
  Clone ID: PAT_MRT4530_72728C.1.pep
MEAATMAWTAAGVGMALVYWFVWVMGAAEVKGKRAVDLKMGSITNDKVKDKYTQYWSFFRRPKETATTEASAEKVPAFVDTFYNLVTDIYEWGWGQSFHFSPSLPGRSHREATRVHEERVADLLQAKPGHRLLDVGCGVGGPMRAIAAHSGSNVVGITINEYQVNRARAHNRKAGLDSRCEVVCGNFLSMPFSDASFDGAYSIEATCHAPRLQDVYGEVFRVLKPGGLYVSYEWVTTSLYRADNPEHVEAIHGIERGDALPGLRRQDEIASIAKEVGFEVLKELDLALPPALPWWTRLKMGRIAYWRNSLVVRVLTMLRIAPKGVCEVHEMLYETAQHLTRGGETGIFTPMHMVLLRKPVESK

SEQ ID NO: 174824 - protein, 41 aa, Oryza sativa
  Clone ID: PAT_MRT4530_72729C.1.pep
GQCNTLDSDHTDVEVQCPHSVPPTFSEEFPQSLLYYSPNYW

SEQ ID NO: 174825 - protein, 62 aa, Oryza sativa
  Clone ID: PAT_MRT4530_7272C.1.pep
MAAPDVEYRCFVGGLAWATHYRSLEAAFSTYGEILESKIINDRETGRPRGFGLVTALERASP

SEQ ID NO: 174826 - protein, 51 aa, Oryza sativa
  unsure (1)..(51): unsure at all Xaa locations
  Clone ID: PAT_MRT4530_72730C.1.pep
PTRPPTRPPTRPPTRPPTRPPTRPRTCXRACIHPSPAPPQPSHTAPKARRA

SEQ ID NO: 174827 - protein, 62 aa, Oryza sativa
  Clone ID: PAT_MRT4530_72731C.1.pep
QAYGMLSMPSIGRMMTTVAHQSTLTVLRLKVATDSCMPKLGPTVMIDYSYMPLHLLCTPASR

SEQ ID NO: 174828 - protein, 139 aa, Oryza sativa
  Clone ID: PAT_MRT4530_72732C.1.pep
MGGGCVWLRCTAREGSGELGGCAESRRAPAGMTACETSRSIPWSSTWGACVSDVKTLAKALPCLWPVRRRRRSWAPLTFLETSSWRSCGGRHALRLLLLMKSELLADGVWRCLATMTSCSLFQGVGAGRVKEVSLWWLG

SEQ ID NO: 174829 - protein, 106 aa, Oryza sativa
  unsure (1)..(106): unsure at all Xaa locations
  Clone ID: PAT_MRT4530_72733C.1.pep
XPKFXRISTKGTSLKKIPSCKHVYNQVKIIFITCRCISHSARPITCYSSPKFPCAVSGGQDRXKNSQKADRRSWPDEAFASLYPCFHPHIFHFQKTKLRNKIKYIC

SEQ ID NO: 174830 - protein, 215 aa, Oryza sativa
  Clone ID: PAT_MRT4530_72734C.1.pep
MATSARRQAMARRDGDGDRAAAAARGSGHGRARGREGVLHHHNRDLCRAVMVVSLQPGAEWRAPSPGPAPPRPDLDGRRLLAATDDASTPAAAYEGGEGVGRQERRRPGAGVAWAAVACSGVAWLGRAPASSVAMRSRGGLQQGCSLVVSLLLAMCGCGCADVFGHVEALRLLLLMKSELLADGVRRCLATMTSCSLFQGVGADRVKEVSLWWLG

SEQ ID NO: 174831 - protein, 87 aa, Oryza sativa
  unsure (1)..(87): unsure at all Xaa locations
  Clone ID: PAT_MRT4530_72735C.1.pep
VSFAPIWSSKVNVSLLKDACTFKSHWFFVIEVEARAVWFPFSGSTSSEAXPFTFARLVTVGLSFYGXHDIFIPPPTGYASVHPMYPR

SEQ ID NO: 174832 - protein, 306 aa, Oryza sativa
  Clone ID: PAT_MRT4530_72736C.1.pep
MDISQATKEPLPSHGQHQTPWKRLQLVIVAKHCRTPSASSSDFIGRSNRRACRPPQERSGPKEAKASPNTKVFTWRFVGNMKERHDNASKEVNGAHERRRRRTGQRHGKAFANIFTSRTQAPHINDHGKVHDVLQAVIPRRNQTRQRIHIHTSRAGGSPPDLVQWTNVRLDVPLVLLLVVQSALKAWLRPAEFESSPAPCLPVTDVLDSPSVPATDAYADGLTMDHPIMTTEFWTSHECLLLPYEQALPENIRVKLPHLIRAVHVAVQIVTWVTDPMHGNTMKAPCGLKTRSFATFQYLLVPITSQ

SEQ ID NO: 174833 - protein, 169 aa, Oryza sativa
  unsure (1)..(169): unsure at all Xaa locations
  Clone ID: PAT_MRT4530_72737C.1.pep
FGRPVATNVGRGRASEGLKTRLIYSYSRRGPPSLPTGRNHPSRSSXSRPAGQDHPASSSPAPGGPRPPDELLPRARPAATTRRAPPRRSAGHGLPASSSPTPDQPRPPGELLPRVRPGATTRRPPPPLPAGRGHSATSSRTPDQSRSPAELLPRVRPVATTRRPSPLLP

SEQ ID NO: 174834 - protein, 492 aa, Oryza sativa
  Clone ID: PAT_MRT4530_72738C.1.pep
IRESRQSEKQLRHPTMDISQATKETLPSHGQHQLLGRDYNLSSLPSIAAPHQRAAPTSSAEATEEPVAHHKNEADPRRRRPRRTSRYESFRTEKDHPRSLMHRNFSEATPPRRTRRVTSSLLVRNRNKVFTRRFVGNMKERHDDAFKKVNGAQERRRGRTGQRHGKAFASVFTLLRQAPHVDDHGIDRDVSQAIIPRRDQTRQRIHIHTSRAGGSPPASNPAGARLDSAQRPSSPEPSRAVQRRYKQPPPTPRPLPVSSFPAAQLLPRLRMLPLASTRCLLHGATIASHHHHGRQPLWSAGHLHATVTSRRRQPPPSPVAASSRRPSRSGRGGAGPGDGARHSAPGWSETTMTAWERSLLWWPGRASGPAVDVAFSRRGPPPSSPPSPSVPSRRPPPLQIRPETARIWPPPPAAPDSSASRRAWGGRGETPPPPSIAAPRLCRHPLGRRRGGGGGGGRRKAAAQHVSLPSRPGEGDARAIHRSPRAEFLQPG

SEQ ID NO: 174835 - protein, 140 aa, Oryza sativa
  Clone ID: PAT_MRT4530_72739C.1.pep
MSKRGRGGSAGNKFRMSLGLPVAATVNCADNTGAKNLYIISVKGIKGRLNRLPSACVGDMVMATVKKGKPDLRKKVMPAVIVRQRKPWRRKDGVYMYFEDNAGVIVNPKGEMKGSAITGPIGKECADLWPRIASAANAIV

SEQ ID NO: 174836 - protein, 240 aa, Oryza sativa
  Clone ID: PAT_MRT4530_7273C.1.pep
MATRLEQCCLLLLLLLCSCSSAAVAAASPAAMSSSRKAVDRLPGFAGPLPFSLETGYVAVGEARFFYYFIESERSPEEDPVLLWLTGGPGCSAFSGLIYEIGPLFFDFHGHKGGLPTLHYKANSWTKISNVIFVDSPPGTGFTYATTAEGLKSSDTIVVHQLYTFIQKWFDDHPQFSSNPLYVSGDSYSGIIIPTLTMEIAKGKESSDERHLNLKFSDIPTVVATLQQSHSLCEIKSSDI

SEQ ID NO: 174837 - protein, 75 aa, Oryza sativa
  Clone ID: PAT_MRT4530_72740C.1.pep
MATDNVVAIDAFLSDTPHVSTSQADDCILSSMSRISIPAQTKVKGIDRSSVAIVTIICAVECISDVTGQKFSPWI

SEQ ID NO: 174838 - protein, 100 aa, Oryza sativa
  Clone ID: PAT_MRT4530_72741C.1.pep
MNVHTMTLCHDDDIRVVFGNLSVVFRLLDIIIWGYMMRKRGGPLMVTAQYGYSSARVYSPKLLSWGGYSSVFSPGWMVMMDCHKKLGNQGLLLESTIEEI

SEQ ID NO: 174839 - protein, 210 aa, Oryza sativa
  unsure (1)..(210): unsure at all Xaa locations
  Clone ID: PAT_MRT4530_72742C.1.pep
WRELPLAAGLLDLRPCKLAPPPPPPXLPVSPSPPRRSHSTITTTATACRPSPPLADEELPLADAVAPETVVAAPEARDGGGEGEVTAMATATGLDAKEVASGVEATATSDGYTTQDHDDDDARATAGCRARRERERESSTDKMAKDNKDEEENPETEEAGKKEAEAEGAEEGEPDESQDRVAPRLKKAMGQRRSTRASRPNPRYHGSQWV

SEQ ID NO: 174840 - protein, 113 aa, Oryza sativa
  Clone ID: PAT_MRT4530_72743C.1.pep
KGSPTSGQFYVNPLNVPVEDACVWTSPTNPDSAGNWAPVNMGVGKDVHGITYLSIFPNLPTSHAQLDFDIEITGDITAPCALKGGSYTGGGNGCTTAISKPGGQATIVFSKGS

SEQ ID NO: 174841 - protein, 63 aa, Oryza sativa
  unsure (1)..(63): unsure at all Xaa locations
  Clone ID: PAT_MRT4530_72744C.1.pep
DLRAHYEELPLSAYQSFGVXYGDLSTSPLYVHKRTFSGRLHRYQDEHTAFGVLALIIWTYTLY

SEQ ID NO: 174842 - protein, 109 aa, Oryza sativa
  Clone ID: PAT_MRT4530_72745C.1.pep
GEKVERVSRVSRRGFRPSHRRRRRGARASSPRATERNLELQWGNLVLHVPKTVIWSMMIVLLDKVASLCGNMRKVWNDLSIIQMACPLQARVCFSQIKERAKLQMRIFI

SEQ ID NO: 174843 - protein, 74 aa, Oryza sativa
  Clone ID: PAT_MRT4530_72746C.1.pep
KMHSYSDTIYRSSKNTLLRTIIDSHMTSRTHNTEQEPLSHHTRIQFNHTRTYVRIYTRTLPGSPSLSPSPTPLN

SEQ ID NO: 174844 - protein, 56 aa, Oryza sativa
  unsure (1)..(56): unsure at all Xaa locations
  Clone ID: PAT_MRT4530_72747C.1.pep
MELAEAVRDETAMAMRXLGHXARAXRGGGGDKNXAXSPLSXHXXLAXXXAGXRGET

SEQ ID NO: 174845 - protein, 99 aa, Oryza sativa
  unsure (1)..(99): unsure at all Xaa locations
  Clone ID: PAT_MRT4530_72748C.1.pep
AAASWYCTSSSKXYHGWEGISVISCFTRGKKSSGGQRDRERQGQPDARRRRQSMRNGGGGMRDGGDWMHDGGGGLDARRRGGLDAKRPWPAQTTSKRRD

SEQ ID NO: 174846 - protein, 1094 aa, Oryza sativa
  Clone ID: PAT_MRT4530_72749C.1.pep
MAIGLPVWISVALLIALSIVASASSLGLSKSNGSDTDLAALLALKVHFSDPDNILAGNWTAGTPFCQWVGVSCSRHRQRVTALELPGIPLQGELGPHLGNISFLSVLNLTDTGLTGSVPDDIGRLHRLKLIDLGHNALSGGIPATIGNLMRLQLLHLPSNQLSGPIPIELQALRRLRSIDLIGNYLTGSIPDSLFNNTPLLAYLSIGNNSLSGPIPGCIGSLPMLELLELQYNNLTGPVPQAIFNMSRLTVVDLGFNSLTGSIPGNTSFSLPVLQWFSISHNRFTGQIPPGLAACPYLQVLRVGDNLFEGVFPSWLAKSTNLSDVSLSRNHLDAGPIPAALSNLTMLTRLGLEMCNLIGAIPVGIGQLGQLSVLDLTTNQLTGPIPACLGNLSALTILSLAENQLDGSVPATIGNMNSLKQLSIAQNNLQGDIGYFLSILSNCINLSTLYIYSNHFTGSLPGSVGNLSSLLRVFSAFENSFTGELPAMISNLTGIQVLDLGGNQLHGKIPESIMMMRNLVFLNLETNNLSGSIPLNTGMLNNIELIYIGTNKFSGLQLDPSNLTKLEHLALGHNQLSSTVPPSLFHLDRLILLDLSQNFFSGELPVDIGNIKQINYMDIYMNRFVGSLPDSIGHLQMLGYLNLSVNEFHDSIPDSFSNLSGLQILDISHNNISGTIPKYLANFTSLANLNLSFNKLEGQIPEGGVFSNITLQSLAGNSGLCGVVRLGFSPCQTTSPKRNRHILKYILLPGIIIVVAAVTCCLYGIIRKKVKHQNISSGMLDMISHQLLSYHELVRATDNFSEDNMLGSGSFGKVFKGQLSSGLVVAIKVIHNHLEHAMRSFDTECRVLRMARHRNLIKILNTCSNLEFRALVLQYMPQGSLEALLHSEERMQLGFLERLDIMLDVSMAMEYLHHEHYEVVVHCDLKPSNVLFDDEMTAHVADFGIARLLLGDDNSTISASMPGTIGYMAPEYGVLGKASRKSDVFSYGIMLLEVFTRKRPTDAMFVGDLSIRQWVHWAFPIDLVHVVDGQLLQDTSCSTSSIDGFLKPVFELGLLCSADSPEQRMEMKDVVVMLKKIRKDYVKSTAKTGSNAQQ

SEQ ID NO: 174847 - protein, 1081 aa, Oryza sativa
  Clone ID: PAT_MRT4530_7274C.1.pep
MAAFRCVPPCLGSNILDPGHFSSASQRAVPVAYSSQSAGGYQSMLITFNADAISTALISQAISEKLCIPPAEFRVEILPKMTNDNVGAESRVEVLPKMTNDNVGVPNKVVLGCHLPDGQEVPSSPPEGDLEKLTAAPLPSVVSPLSPSAPNTAVALTVSTSHGSVPSSLNEGHGVSSKIAAPKEEHVTPTMDPPSRCEHLPLEVAPSNLVTDKAELLEITKAPAVKNRLAKRVRQKIITATSRRSVPLPSNMKKRRLLIDQMKTYVLMKKLGIITKDEEVDEDTMDRCIAFLKEAYPGHYVQLAVLGVLGVLGALVFAGGVGEFWGRDVWVGGEVFIVVPNNNHHGFKSLATGTDLVVAVDDDGFFKDKISEFNGLLVTDKETNKYVINAVKCRFIRVERIRDQLLECNKETYWVPDYVKEKRFHNWLEGARDWAVSRTRFWGTPLPLWISQDGEEIIVMDSVDKLEKLSGVKISDLHRHHIDGITVPSQRGEEFGALKRVDEVFDCWFESGSMPYAYIHYPFENRELFEKNFPGDFIAEGLDQTRGWFYTLMVLSTALFGKPAFKNLICNGLVLAEDGKKMSKSKNNYPSPMEVIDNYGADALRLYVINSPVVRAESLRFNKNGVHGVVKDVFLPWYNAYRFLVQNAKRLEVEGLAVFSPINQAILLRSSNVLDHWIQSATESLVSFVRQEMDAYRLYTVVPYLVKYIDNLTNIYVRFNRKRLKGRTGEDDCRISLSTLYHALVTTCVVMAPFTPFFTEVLYQNLRKVSSKSEKSIHFCNFPSSTGQIDERVEHSVNRMMTIVDLARNIRERHNRPLKTPLRHAHYTTILFTQFLVLWEMVVVHPDNDFLEDITGKLKEYVKEEMNVKMVTACSDPLVYSSLRAEPNFSVLGKRLGKDMGKISNEVKKMTQDQILTFEESGEIFFGSHLLTLEDIKVFREFKRPANVSEKEIDAAGDGDVLVILDLQVDQSLFEAGVVREVVNKIQKLKKTAQLRLTDPVDVYYSSQDSSDSSLEKILQSQDQYIRDALGSPLTSKAQAQPNVEVICEEAYNCVSHYHTFRLLQETVKLVHPFIKIEDFP

SEQ ID NO: 174848 - protein, 53 aa, Oryza sativa
  Clone ID: PAT_MRT4530_72750C.1.pep
TNSVGIEYILSTFIPTCKSCNASLVHTSYQCMQNVYPRASSYNIPPPHACTIS

SEQ ID NO: 174849 - protein, 44 aa, Oryza sativa
  Clone ID: PAT_MRT4530_72751C.1.pep
ARGERELVRVFFFFFLEQILHCGNLSFVDAVATSNKMPETSQLG

SEQ ID NO: 174850 - protein, 179 aa, Oryza sativa
  unsure (1)..(179): unsure at all Xaa locations
  Clone ID: PAT_MRT4530_72752C.1.pep
GGEAEGGQGKHATKARKGPRDKQGRPKAGQGPARPATRAGGRKGRQAEADGTKRARRHARAGRRNRKRRXADDRRKRARRRDGNAPRRGRRGAKAATXTXEAQERRRTPQATRAGHPRREPRAAGRRGRAGAGGAKPPRXPXRATPGGDGPRGNWPIDPGGGKIDFCGGKRFGRIWIRN

SEQ ID NO: 174851 - protein, 180 aa, Oryza sativa
  Clone ID: PAT_MRT4530_72753C.1.pep
MAVIGPDGARPPVWASVPRSVRPDEDTHGTGTAADAVAVWNFPLLFFFSTVRGERAHSDAHLDFPPFAAPDDATPLASGTVFFLSRRAARKTTAVRAASRERQGSATVIATGLGWLRLPLPAAAWLRIPQQRSAITTVVVKVAVAIHRYCRGLCRQPSLPSFVPSPFAAIITEVAVSKGL

SEQ ID NO: 174852 - protein, 101 aa, Oryza sativa
  unsure (1)..(101): unsure at all Xaa locations
  Clone ID: PAT_MRT4530_72754C.1.pep
RAAPGFPRFRAAGSAGEEAGVTGSDSPGLLVGGCGXAGAKGWRWQDDGTATAAARSRECAGEVANCGKKRMRGTASSGGGRRLAGERAVREEERQRNGPGR

SEQ ID NO: 174853 - protein, 59 aa, Oryza sativa
  Clone ID: PAT_MRT4530_72755C.1.pep
MGFLGLKKPNHVQREPSTLDLKSNIVQGSNIHPLGLIAAAPLVALPSDLTAEGQADTPL

SEQ ID NO: 174854 - protein, 117 aa, Oryza sativa
  Clone ID: PAT_MRT4530_72756C.1.pep
METSNTTCTCLYSRRKCSNAFYTYPSLSNAVFADHQFLTAIASTTAHHRIVWPTSDRFHFQLSWPPLLRRASNECYDENRASRQLGHLAGFEGSLQPSACGNQDLTGSEAPPPMCLP

SEQ ID NO: 174855 - protein, 118 aa, Oryza sativa
  Clone ID: PAT_MRT4530_72757C.1.pep
MPQPPRAHRAIQNNGNGDNVNKYQSCLPFAGVPHRSFGFMILIVGGDVVGFLIAPVPPPPKCNPIYEIRNHISENHSNQMRQANAQVTQQKRKIMVTCFQIVFSTTKCYRPMLKKEED

SEQ ID NO: 174856 - protein, 814 aa, Oryza sativa
  Clone ID: PAT_MRT4530_72758C.1.pep
MDRFVRVYSGGELVKGPNGVEFGNLAEEGLWFKAKPAFDELIDAVYKKLGWVPTMLSIRAQGRLNVGGGAHRHFIMVPIDDDMSWSSYVKAVFNGTEWNCLEIFVQAEICSLTEGISSERALMAIKPLYAQRQNGQPQNPEQDMSFVIPSTVNVSPLNGHPQNTRQRKPRKSTRTFSDDGCPDQNGASEAVDTTSYDLIGQYDADHRARALASGQHLTELNPRTREPLRFDRRYERYLRPAGLMGLANICRAGLPSIDRALVSALVDRWRPETHTFHMPCGEITITLQDVAMILGLPIAGHAVTVNPTEPQNELVERYLGKAPPPDRPRPGLRVSWVRAEFNNCPEDADEETIKQHARAYILSLISGLLFPDASGDLYTFYPFPLIADLENIGSYSWGSATLAYLYRAMCDACRRQSDGSNLTGCLLLLQFWSWEHFPIGRPDLVKLKYPNVEELEDERDRPTVGLRWVVGVCARRAAPARCYEHFTNEFDLLTDDQVVWCPYREERMKELQLAPICTQDSHLWLTRAPLLYFFMVEIYMPERVMRQFGLHQVCPPPLRDTSAELHWCRRGRVHNDWAQKHKSFVDMWEAKEQDVVMEDRPYDHSSYMDYLRWYRRSTRIRLCTPKRISNGHKGGASGGSAISDSEDPFRASQLRYTPRAHLIHSVTDKLTVLAKEAASQKSCSRGKCRAFVDQVTRTCVEVIGELGGSSLCDIVDLVPCSSTAATTAAEPEAEQQRDKEEDIHHSMAPDQETESGLGSEKRSRSRTRRTQADRTVQTRSTGKRKRGRSAPRFMYHKKLWDEGTAWCSNQLIIS

SEQ ID NO: 174857 - protein, 31 aa, Oryza sativa
  Clone ID: PAT_MRT4530_72759C.1.pep
KKVFNQVELCLIGETLFLNNTNIFLLIIVIV

SEQ ID NO: 174858 - protein, 570 aa, Oryza sativa
  Clone ID: PAT_MRT4530_7275C.1.pep
MPTNLSSSYSSLFEPLLALSSLLLRRLSAAVRHHRGRNTPPASSDVPPPPPPSSSPLELDRLYGRTVVVDVDAWLLLPAVDAFTFFMVVAVEAGGFLRGLLLLLVYPLLCLLLGDGDGGGGARARAMATVALVGLEEREVARVGRAVMPRFLMAAAAAEGAEAVRAARRSVAVSATLPRVMVEAFLREHVGVDAVVGPELRSVAGVVAGIMDDADAARVAARRLRALLGDEMDQGEADGAGAAVGLVGEGRSGGTVHYLFSRYYCKETFTATEADKRRWRPLPPGGECGGVKPLVFHDGRLAFPPTPSAALAMYAYLPFGVALAVSRIIALSLLPYGRATFLVGALTGVHYRLVGAGHDAAAGGGGGRLYVCNHRTLLDPIVVAAALGKPVTAVTYSLSRVSEMIAPIRTARLTRDREEDRRSMAALLARGDLVVCPEGTTCREGYLLRFSPLFAELGADVNPVALDARVDMFHGTSTTPAAKWMDPFYFMMNPKPSYRVEFLPRAAPAPAAEDGGDSIRVANRVQRQIGEALGFELTGMTRKDKYMMLAGNEGVVAAAAAAAATIKASR

SEQ ID NO: 174859 - protein, 176 aa, Oryza sativa
  unsure (1)..(176): unsure at all Xaa locations
  Clone ID: PAT_MRT4530_72760C.1.pep
LGVIIFHMSRKKEFWFNNLIHQASGYNVKKIYILKADAYESEVDWKIPLMEYLKDSSLRVDREIRWXAFKYILLDRELYRRNIDGVIXSKVAMGEVRQGICXEIHQLAHKMNWLLRRAGFYCPKIIDDYFKYYRGCTAYQRFGNVQLAPVAVLNSIIXKPWLFRGWALDFIGQIYP

SEQ ID NO: 174860 - protein, 109 aa, Oryza sativa
  Clone ID: PAT_MRT4530_72761C.1.pep
GKRGKKGCYKGATLFTNRLAKVGLATLFVLVAETGTLAVAANPVTRAGACKIFPSGGMIKFSPPMYASMLGNYWAVQQLFYGHRWKRLNPQLILFFFRIVTGFQANKPS

SEQ ID NO: 174861 - protein, 220 aa, Oryza sativa
  unsure (1)..(220): unsure at all Xaa locations
  Clone ID: PAT_MRT4530_72762C.1.pep
MEDSFVLPLSDDACGEFLQLRDRAIESFAASGXSDVWSFIWGTGIYTAKRFYNLNYSSLQLPRPMIWLWKTKCVMKIKVFAWLLFCDRLNTRDMLDRRHCAKEDDDLTCALCXHTTRLHVFFTCPFSVACWQQLVIHWDCNLEFFQMIVLARIRFAQRGFLEVFFLAVWHIWKQRNGLIFQNIRPSFQSWKSLFMKEVLLHMCRMKDPLKQSLFDWLQTL

SEQ ID NO: 174862 - protein, 132 aa, Oryza sativa
  unsure (1)..(132): unsure at all Xaa locations
  Clone ID: PAT_MRT4530_72763C.1.pep
GVSAGWDAEIPHYPLFHSWGVGVRRSHAGSGGDRGWHGGAQVGAAGRXGGRSGVRQIWPSRGQIGCGRRRSPRRVGDSDGGMVEALPWPVAEEEDGVRPARRLHVAAVSEAGGMEAVTVRPAQARATTEVYT

SEQ ID NO: 174863 - protein, 168 aa, Oryza sativa
  Clone ID: PAT_MRT4530_72764C.1.pep
IPNPSHCLISSRLITSFRNVKQIGRRIEYIIRGVGVRRSHAGSGGDRGWHGGAQVGAAGRRSQPFVAARRGAEEAERRASDAGAGGRSGVRQIWPSRGQIGCGRRRSPRRVGDSDGGMVEALPWPVAEEEDGVRPARRLHVAAVSEAGGMEAVTVRPAQARATTEVYT

SEQ ID NO: 174864 - protein, 93 aa, Oryza sativa
  Clone ID: PAT_MRT4530_72765C.1.pep
PPPPLLAWNLPSTALVPTRNAAMAATPCTKLDSSSSSSFSISLQPRIDQLTRARVLSFVLAEMRPKSVFKLESAQKLSWGANFKLTIAAGRSS

SEQ ID NO: 174865 - protein, 111 aa, Oryza sativa
  unsure (1)..(111): unsure at all Xaa locations
  Clone ID: PAT_MRT4530_72766C.1.pep
PEGEDGTGPSDDGRANXTPQAPGERQGRRPHQGRTAGAAASSSTGEERERKRPRXQPAIGAXPNRGXGAXGXVEYXXKRARPPQPRDGRGHGKGGRRGGPDEQGPRPASAI

SEQ ID NO: 174866 - protein, 105 aa, Oryza sativa
  Clone ID: PAT_MRT4530_72767C.1.pep
MGVVEKTDASNPVFIGEIRVGGELSKAIQGLREVTAAGAREEECAVCLQDFVAEEKLRMMPCSHTFHQRCIFDWLRLSCICPLCRRALPTQHYSRRMTTSLGARS

SEQ ID NO: 174867 - protein, 451 aa, Oryza sativa
  Clone ID: PAT_MRT4530_72768C.1.pep
MGNLCVFPLRRHILDEVYQHGPYNCTIQRRWKKPVDSARTRLEGRTRDHKLDKLMIQLKNLRLALDLHELISQQRNKYASLQLLSRWRHEVGLNIEIGAFLKKYPHIFDIYVHPIKRNECCKVTPKMSELIAQEDAAIRENEPAIAKRLKKLLTLSKDGTLNMHALWLVRRELGLPDDYRCSILPNHQSDFSLSSPDTLTLITRDENLAVADVEEWRAKEYTEKWLAESETKYAFPINFPTGFKIEKGFRGKLGNWQRLPYTKAYEKNELHPIRNIERLEKRIVGILHELLSLTIEKMIPLERLSHFRKPFEMEVNLRELILKHPGIFYISTKGSTQTVLLRESYNSINDNVVVSQHFSRLCLSVSFSTSLASRYCIYILATLMRWLHLQSPGKTLRYLSESKAVVTSGNVLDEDSFSEPNKIDVMEKDLSLDPNFGSKAVFSSAQSLDFG

SEQ ID NO: 174868 - protein, 70 aa, Oryza sativa
  Clone ID: PAT_MRT4530_72769C.1.pep
NRQLKRTSPNLRAWRDSGPGRMVITKGRQISKSHVKVGQATFGGSHPGPPGRGSQKAATLNHQIKDPLKF

SEQ ID NO: 174869 - protein, 105 aa, Oryza sativa
  unsure (1)..(105): unsure at all Xaa locations
  Clone ID: PAT_MRT4530_7276C.1.pep
STTRASGKHKAINDEGMPQHGRPFMKGRLLHELNVQCPEXGALTPGQCRSLDKTWPPQPMNRPPYMVLDQCRETPMHDVTIEKEIMRKPTPRLLEPYHEYNDQDA

SEQ ID NO: 174870 - protein, 40 aa, Oryza sativa
  Clone ID: PAT_MRT4530_72770C.1.pep
SLWLKYHRTLYKGKAPKVQTEAQLKRREAALHFKRWIGLT

SEQ ID NO: 174871 - protein, 476 aa, Oryza sativa
  unsure (1)..(476): unsure at all Xaa locations
  Clone ID: PAT_MRT4530_72771C.1.pep
MATSIGVPATYRSRPETGRYWKPTRRPLRRASGEEEDPNPNMIKGIHGFKLISYASGMDQSEHHHRLAIVAAYRCPRLYGWMVTPPLLGIIVFTXSAASSSPAGVCTYSVGWLHHRXLGIYVFTDRXFVVADWCLHLYGWLVTPPLLGVYIFTDRPPRPPLTGVSACMTGLLCRRCWASTSSPTGCLICRRLXLRLHGWPIMPPLMGIYVFTNRPPRLSTTGVSACMVGXYATVDGRHCLHRXAALVVVAWFLRLHGYAILPPLIDAIIFTASXPRLLPTGLLAPMIGAPCSRCXMATSSSPLVHLRRCRXGAFTYTASLLWCHSWTSTFSPLFCFFHRRLIMPPPTGVFIFTTTRLRHRFASIAADSCSCHHGHATLSLWWSDFIFVIFGTGKLYCLYFASLATSPTMTSTRASTSQHASPNMMLYYFTTTSGVPIFKIFTRTSDVASVFVMHTLKLRKLFELRHLLNNLKDYCH

SEQ ID NO: 174872 - protein, 102 aa, Oryza sativa
  unsure (1)..(102): unsure at all Xaa locations
  Clone ID: PAT_MRT4530_72772C.1.pep
ALPAEEAKEQGGGLIIKGVGQKRXPVRAFQARLARLRLYTLKYMHDLPSPTPSATFLSCTKQCLQPVMSLLSMDWYYSTPYVCVLTQDVVLNKIVCHQGPRG

SEQ ID NO: 174873 - protein, 51 aa, Oryza sativa
  Clone ID: PAT_MRT4530_72773C.1.pep
MATVRGKFVGMVVRRWNSNLWVTVGMVAAELGDGSATAVNELGDGDCGGGM

SEQ ID NO: 174874 - protein, 297 aa, Oryza sativa
  Clone ID: PAT_MRT4530_72774C.1.pep
MTKIGDSSPPKIGEGSSSGAAERVMANSSVVELPLLTRTNYHEWSLVMQVSMEALEQWDAVEAVSKDRGKDRRALATIICAVPREMKAGLAVKKSAKEAWDAVKKMHAGDDRMKAASVQRLMKQVENMTFRDGENVGDFAMRINGLVASLRELGEEMEDSRVVKKVLRVVPKRLKQVAVAIEMLADIDTMKIEELVGRLQVAEDADAEDQAASSAEHAGQLLLTEEQWEARRRQRRGKEHVHGGIGEKGGSHDDDDDGSSTSSGHVLIESWECVVCVASVLAEEAASSGRACGSRRH

SEQ ID NO: 174875 - protein, 60 aa, Oryza sativa
  Clone ID: PAT_MRT4530_72775C.1.pep
GRLPVQVPIMDACSPPLLPRQASPSVQVRMISCQPACASCRHFHFPVNSSPFRAHVVWGY

SEQ ID NO: 174876 - protein, 63 aa, Oryza sativa
  Clone ID: PAT_MRT4530_72776C.1.pep
MNEVQAVGRIEPRKPIAASPTGAEVGAPFLPSYSDVKWICLPSCPTPQPTDTPFISTKKMKDA

SEQ ID NO: 174877 - protein, 261 aa, Oryza sativa
  Clone ID: PAT_MRT4530_72777C.1.pep
MDYCKQQERDGHRDDGDVTEWKKVAELRAVVEAQDPACKEEDDYQLRRFLRARDHNIGKASAMLVKYLQWKREVKPGGRAIADEEVRGELAQEKLYMQGYDRQGRPLVYGFGARHFPARRDLDEFKRYVVYVLDRTCARLGGNGGQEKFAAVADLQGWGYYGNCDIRAYVAALEIMQNYYPERLGRVFLIHVPYVFMAAWKIIYPFIDDNTKKKFVFVADKDLHATLRDAIDDSNLAEDYGGKLKLVSPLINGATESNRRR

SEQ ID NO: 174878 - protein, 38 aa, Oryza sativa
  Clone ID: PAT_MRT4530_72778C.1.pep
HSTYEQILMFMLTAQWLASYQYLDIEILFPAWRLNRNP

SEQ ID NO: 174879 - protein, 75 aa, Oryza sativa
  Clone ID: PAT_MRT4530_72779C.1.pep
MRSNDVEQRRWPVAEEFLIIAVFTERDADAWAFHSGFELFTILYTERRRLSSDDGWGDESTRGLHPRRRSGLEAQ

SEQ ID NO: 174880 - protein, 122 aa, Oryza sativa
  Clone ID: PAT_MRT4530_7277C.1.pep
MARRWSLRRQFPPRRREGGKANVGGNLWRMTPQKRHALPVAKLRPPPPPPPVPSPSRHSPHHRGRPPPPPLGRCQPPPLRLAAGEEPATPPLGRTPAPLLLMRLEEAPTADKRHVISTWNKD

SEQ ID NO: 174881 - protein, 77 aa, Oryza sativa
  Clone ID: PAT_MRT4530_72780C.1.pep
KPSSSSASGTAAYTASCPAAPASAPATGIAANPGGKPTPAAPPPPSTGPANPPPKSPSPPSPSSAGAPPPPLVPNSC

SEQ ID NO: 174882 - protein, 62 aa, Oryza sativa
  Clone ID: PAT_MRT4530_72781C.1.pep
TCRKSNHKKVSQKGKKLEKYNSRTRKDQKTYAHRSRHIQLRREKKNRLNKKDTQGICLELNT

SEQ ID NO: 174883 - protein, 340 aa, Oryza sativa
  Clone ID: PAT_MRT4530_72782C.1.pep
MATSSRRMRAVQYDKYGGGAQALKHVEVPIPTPKKGEVLIKMEAGSINQVDWKFQKGVARPFMPNKFPFIPVYDLAGEVVELGRGVSSFKVGDKVIAINFPGGGGLAEYAVAQASRTAPRPPEVSAAVGACLPIAAVTALVALRTAGVSLDAGDGGGGGAKKNVLVTAASGGVGHFAVQLASAAGHRVTATCGARNAGLVGGLGADKVLDYATPEGAALRSPSGRRYDAVVHCAAVAGLPWSAFAPVLADAGVVVDLTPGAAAFATALRQRVTFSRKRLVPLFVSPTKEDMELVAGMVAEGKLRAVIESRHPLSRAEEGWARSMAGHATGKIIVEMGDEQ

SEQ ID NO: 174884 - protein, 99 aa, Oryza sativa
  Clone ID: PAT_MRT4530_72783C.1.pep
QNGPGKRDRAGKREKGRGVEAFFLLFWFFLFWLVFFFFFFFFFFFFFFFFFFFSSKEHIANILFTFQVSHIANSKQVALAKSKYTTKPKLLLGSPKMRV

SEQ ID NO: 174885 - protein, 1081 aa, Oryza sativa
  Clone ID: PAT_MRT4530_72784C.1.pep
MDGDADAVKSGRHGSGQACQICGDGVGTTAEGDVFAACDVCGFPVCRPCYEYERKDGTQACPQCKTKYKRHKGSPAIRGEEGEDTDADDVSDYNYPASGSADQKQKIADRMRSWRMNAGGGGDVGRPKYDSGEIGLTKYDSGEIPRGYIPSVTNSQISGEIPGASPDHHMMSPTGNIGKRAPFPYVNHSPNPSREFSGSIGNVAWKERVDGWKLKQDKGAIPMTNGTSIAPSEGRGVGDIDASTDYNMEDALLNDETRQPLSRKVPLPSSRINPYRMVIVLRLVVLSIFLHYRITNPVRNAYPLWLLSVICEIWFALSWILDQFPKWFPINRETYLDRLALRYDREGEPSQLAAVDIFVSTVDPMKEPPLVTANTVLSILAVDYPVDKVSCYVSDDGAAMLTFDALAETSEFARKWVPFVKKYNIEPRAPEWYFSQKIDYLKDKVHPSFVKDRRAMKREYEEFKVRINGLVAKAQKVPEEGWIMQDGTPWPGNNTRDHPGMIQVFLGHSGGLDTEGNELPRLVYVSREKRPGFQHHKKAGAMNALVRVSAVLTNGQYMLNLDCDHYINNSKALREAMCFLMDPNLGRSVCYVQFPQRFDGIDRNDRYANRNTVFFDINLRGLDGIQGPVYVGTGCVFNRTALYGYEPPIKQKKKGSFLSSLCGGRKKASKSKKKSSDKKKSNKHVDSAVPVFNLEDIEEGVEGAGFDDEKSLLMSQMSLEKRFGQSAAFVASTLMEYGGVPQSATPESLLKEAIHVISCGYEDKTEWGTEIGWIYGSVTEDILTGFKMHARGWRSIYCMPKRPAFKGSAPINLSDRLNQVLRWALGSVEILFSRHCPIWYGYGGRLKFLERFAYINTTIYPLTSIPLLIYCVLPAICLLTGKFIIPEISNFASIWFISLFISIFATGILEMRWSGVGIDEWWRNEQFWVIGGISAHLFAVFQGLLKVLAGIDTNFTVTSKASDEDGDFAELYMFKWTTLLIPPTTILIINLVGVVAGISYAINSGYQSWGPLFGKLFFAFWVIVHLYPFLKGLMGRQNRTPTIVVVWAILLASIFSLLWVRIDPFTTRVTGPDTQTCGINC

SEQ ID NO: 174886 - protein, 107 aa, Oryza sativa
  unsure (1)..(107): unsure at all Xaa locations
  Clone ID: PAT_MRT4530_72785C.1.pep
TPFWQPILFFFINNPVFPHQFFPQPRVGGQQFPFQALNFFQTILPQLQLHPIRGGPFGQTQGQTQTFFAFNLPPKCGISPKXKNAPQNISPVGGVWGLIGTKKKFGC

SEQ ID NO: 174887 - protein, 87 aa, Oryza sativa
  Clone ID: PAT_MRT4530_72786C.1.pep
MVVKIALMEVGIKHRSPPKWSVILWMLVSANLWIMCSSSTQKIVLMPEFSASVMHYIHNDRKFLLCNGYVFGFGFVAVSVSDSTLAI

SEQ ID NO: 174888 - protein, 72 aa, Oryza sativa
  Clone ID: PAT_MRT4530_72787C.1.pep
MHAEWARLVAAKGVEDLVFVNKPVHYFDVPLTADILRCAALHRLFLGNWNFPATFGFPCGAGVFPHLCSPTH

SEQ ID NO: 174889 - protein, 144 aa, Oryza sativa
  unsure (1)..(144): unsure at all Xaa locations
  Clone ID: PAT_MRT4530_72788C.1.pep
MVVRAGAYDDELIKTAGDLGDGRVPRDAGEGAGVRRNREPRSTPVVSPPGLPQXIPGGLPYEETLYKPTVDDPGIVDVLAEEGILLVINLDKGLVPLAESDPEPLEDGLVPIVEPEFLIYGDTPAEARPQMPHQVMVDKFYTVS

SEQ ID NO: 174890 - protein, 63 aa, Oryza sativa
  Clone ID: PAT_MRT4530_72789C.1.pep
NEFSIKKNSCCYTQDSHFCFGINGWAVKTEQALARSRNEKIPTLQGCRYFRFITRGIEGSFAH

SEQ ID NO: 174891 - protein, 195 aa, Oryza sativa
  Clone ID: PAT_MRT4530_7278C.1.pep
MAAAGDREGDGGGPWLGGGMEIGFRVRARHPHAKIAIFPDHWRYVWAKICRKDLWIKSTGTLTNLKARFWTCIEVKQIFQASVCFSHQHAFGMPSGKRQVTTMSAEKPSPSSASKPPIPPKTELAFGEASVKDICKYGDIFKKVLAEGHKWENPKELDKPSLFYRYVYWISDSIGGHFAKVAVSVDKRAYYQKLR

SEQ ID NO: 174892 - protein, 120 aa, Oryza sativa
  Clone ID: PAT_MRT4530_72790C.1.pep
YKKKKERSLLCARPTPDPPAGAAQILLARASPLSPPPDGAGRLLHSARPTETADPTHRWLIACSRHAVMERKERRGLLALPRRLLACAGRTFGRGRPKGDMRRRKFSLGGGEGANGGGLE

SEQ ID NO: 174893 - protein, 326 aa, Oryza sativa
  Clone ID: PAT_MRT4530_72791C.1.pep
AWNVGLKAEPDDEITFEFLPLIRCYRSGRVDRLLPDTRVPPSVDAATGVASRDVTIDPATGLWARLYLPDLDGGETKAKLPVLVYYHGGGFCLGSAFNPTFHAYFNTFAALANALVVSVEYRLAPEHPVPAAYADSWEALAWVAGHAAGDGDEAWLVDHADFSRLYLGGESAGSNIAHHIAMRVAEEGLPPGAKIRGLVMIHPYFLGTNRVASDDLDPAVRESLGSLWRVMCPATTGEDDPLINPLVDGAPALDALACDRVLVCIGEGDVLRDRGRAYYDRLTSSGWRGEAEIWQAPEKGHTFHLLEPHCDAAIAQDKVISGFLNR

SEQ ID NO: 174894 - protein, 174 aa, Oryza sativa
  Clone ID: PAT_MRT4530_72792C.1.pep
MASSPAHCFSLHVVLAGLPPSMSLAPAAARHDSSLPSAVVVARVGPLSSIVLASCCCGLRLPSASRYATARTSHRPQRPLNLPPSHRCHSRGRLHLQSNPAANTRSSGGDKYDDGGSAASRYTVTQPSQHVVPPPHAEGGLQLGFWLRRHYPGSRVDFGDSEAGRGGEGGGCRE

SEQ ID NO: 174895 - protein, 62 aa, Oryza sativa
  Clone ID: PAT_MRT4530_72793C.1.pep
IIYKTKKKCIYKHNSFCNLHSLNRWFTRIWSSKPRSASTSCEEWIKMFESSGRVGGRVTDAW

SEQ ID NO: 174896 - protein, 50 aa, Oryza sativa
  unsure (1)..(50): unsure at all Xaa locations
  Clone ID: PAT_MRT4530_72794C.1.pep
NPYTRHKTPKGSGRLNPRGRNGSGPTPRGDXEGGGHITLGPDPPEGVRPH

SEQ ID NO: 174897 - protein, 106 aa, Oryza sativa
  unsure (1)..(106): unsure at all Xaa locations
  Clone ID: PAT_MRT4530_72795C.1.pep
SHSHPCRLSSAKTLAGYIPSQRQHARAMEARRCRRRTASAERRRRGGGCAASSPSPATTSSTSSRSGAGSSAGWPGGPSPPCSCHPAAAASMPXHGAVADVRAGGG

SEQ ID NO: 174898 - protein, 80 aa, Oryza sativa
  unsure (1)..(80): unsure at all Xaa locations
  Clone ID: PAT_MRT4530_72796C.1.pep
SFDHEXAPESPALASAKGIEXSWXLNVQIRHETLLXXVXSYTKNLLARXGGRXEIRQELDXXXWXEEXDAXXXLXXCXXP

SEQ ID NO: 174899 - protein, 305 aa, Oryza sativa
  Clone ID: PAT_MRT4530_72797C.1.pep
MANASATPKTPRRRRRVTFLARTCHRLLRLLATHRLRRGGHGLNSISAGDDSPPSGQPPRGRDAEEAEATQAAAAAQRRHEERHGDDDAAATEEAEAAVAGKYWAQRRSLFSLYDRGVRMDAEGWYSATPEPIAAAQAARAPPGSLVLDAFAGVGGNSIQGCYVVAVEIDPRKVELAAHNARIYGVDDMIEFVVADFFHLAPSLKADLVFLSPPWGGPSYSQAQVYSLDMLKPRDGFTIFQAAQEISPNIIMFLPRNVDLSQVEQLSWLSSPPLDFVSEENYIEHRFKGITAYFGGLAQEVLKQG

SEQ ID NO: 174900 - protein, 46 aa, Oryza sativa
  unsure (1)..(46): unsure at all Xaa locations
  Clone ID: PAT_MRT4530_72798C.1.pep
KQSPRGKNADHERQPRTRVHRRPNTTSIXVPXAXAPPPGGLSNQKA

SEQ ID NO: 174901 - protein, 315 aa, Oryza sativa
  Clone ID: PAT_MRT4530_72799C.1.pep
MVAELVEERDTKPRDGKFKIQQRLGWSALAHAASCLPPGAPCSNLPLIAGCLLPPPIGIVCLLTSHPASSCISLAPTAVGLLTDSIPKEQGEQLDEAVPELEPLRCSACRLPATGGCFPRYLPYYNSSLSRTVRAVPCDDGALCGVAPEKARCARGSDDVCVVVATYGAGVELSVLGTDAFTFPSSGTTLNSKFSYFLTPYFRDTISPSHLFVGDGGAAWALAAALRDQSGRFGSFQAHAYLGVAVAIENAEEVGRQPECVGVEAQPVQVAHLRRLVSSRTGTSANRGTAAHASFISALRPRVDAWPHTGAQSIN

SEQ ID NO: 174902 - protein, 344 aa, Oryza sativa
  Clone ID: PAT_MRT4530_7279C.1.pep
MGSIGGDEAAVLRAEESASGGVDVWSDAVSSHDPDHLLVMVHGILGSNADWQYAANEFVKQLPDDVIVHCSEKNINTLTLEGVDVMGERLADEVIDVIIRKPELTKISFLAHSVGGLAARYAIAKLYRHPSDTSKSETKGTIGGLEAMNFITVATPHLGSRGNNQVPLLFGSIAMENFASRVVHWIFRRTGKHLFLTDDDEGEPPLLQRMAEDYGDLYFIPSTCQFFNSWHSDIVGWRTSSIRRKTELPKWEESISEKYPHIVHEEYSEELGDETCQNSATVCDSDILEEKMVTGLRRVSWEKVDVSFHTSMQRFAAHSIIQVKYQFMNEGADVIQHIIDHFQV

SEQ ID NO: 174903 - protein, 153 aa, Oryza sativa
  unsure (1)..(153): unsure at all Xaa locations
  Clone ID: PAT_MRT4530_727C.1.pep
KPFAAAVTWSRPAMAARLRPAAAVTRMRLAMAAXGSGDTDAACDGGAVAARGESDADTTCDTGGGADAAACGGDSNADANVTRGGGVAARVDGEPGARPRVGGWGGWRRVGELGVRPSIDGSQRRLTRRRVPFAGDAIVVRSFSTAPNAGRVV

SEQ ID NO: 174904 - protein, 662 aa, Oryza sativa
  Clone ID: PAT_MRT4530_72800C.1.pep
MAGCPCQLLLSFLSSLFFFSLLLSSLSLSALAQATARAAGDGGSRVAARGFRAARGYGHHHISTTPPSVAAIGDGGTLQWAIQNFIRASDYITLLHVCPPARLRSLRLGGFQLALAFRELCNGIAEAKVEIVVREGKVGETVVVTAGGAAEVAAGSAGRSRRWDAADEWSGGAAGDQDDGHCATAGSSGDEGDDDTDEEERIPSGGAGARAQLLAHCRCLPSLPPAAAARAQLFPLWPPPVPSSSVVVADAHLFPRRPCARGCAQLTKPSSLGGRRHARLTGHPPPAAGRVYCPAIISAAASVAVAGDRGEGLRDLHPPPFLGAFGDPDGHDGLPVFLPARRTRDRDRGGDFLLTCLQDPDHDAPLRWRVADCRDGYLLLFNSDAGLVATVNPMAPRMTDLIKTPFRINNSASNGAIQDESLPISLDVHLISSEEDPMSFQLVWLCHDEFRVQVSVFSNDTRDWCFLPWVDIEERVSSPDVPQDGTKYWLMSGMQANGLIFWPFQNGKHMLVLDTGTMEFSVYEFPIYSKLVQGCSFGVGETKDGIPCIAYVNGATIVVLIRRFDKKQGVQGWRFVDGVNCDDEADQLGINGGLDVVAIKDGFVYLAATGMILSLCLETRKLEKLFPMSFQFPLHPYIMAWPPTLVGNYGSFAEIQDDISNV

SEQ ID NO: 174905 - protein, 598 aa, Oryza sativa
  unsure (1)..(598): unsure at all Xaa locations
  Clone ID: PAT_MRT4530_72801C.1.pep
METHIGSVDGAAAAADNGAVGCPASAVGCPMTSARPAPVSAGEASLGRHLARRLVQVGVSDVFAVPGDFNLTLLDHLIAEPGLRLVGCCNELNAGYAADGYARARGVGACAVTFTVGGLSVLNAIAGAYSENLPVICIAGGPNSNDYGTNRILHHTIGLPDFSQELRCFQTVLCXQGVVTNLEDAQEQIDTAIGTALRESKPVYFSIRCNLPGLPHPTFSRDPVPFFLAPRLSNKMGLEAAVEATVEFLNKAVKPVLVGGPKLRVAKAGKAFVDLVDASGYAYAVMPSGKGLVPETHPNFSGTSWGSVXKELTEAIGMALGEKDCLCFIEVIAHKDDTSKELLEWGSRVSAANSRPPXSSVETFSTCCKLGSIIIXKHFALQLCSLCPFPRVSVLPVSVALYLLVNICFSNQMLRGXERFSACKKNSWFNCQKLKLPEGCGYEFQMQYGSIGWSVGALLGYAQGAKDKRVIACIGDGSFQVTAQDVSTMIRCAQNSIIFLINNGGYTIEVEIHDGPYNVIKNWNYTGLVDAIHNGEGKCWTSKVKCEEELTEAIGMALGEKDCLCFIEVIAHKDDTSKELLEWGSRVSAANSRPPNPQ

SEQ ID NO: 174906 - protein, 367 aa, Oryza sativa
  Clone ID: PAT_MRT4530_72802C.1.pep
MGRLANWLDDRTSKSTPDYRIQAGSFLLKLWFRPIFIIFFMPTSSCQPMMSSSYTFQESKHTPQSAYSLRHFALAKAMGQPRAQLLPSMSMAALYLILATSPVISDMTDSLDMLWGNTQVLYDSTGHQIVSLSLDRWTTSAFRSKTKYLFARIDMDIKLVAKDSAGTVTTLYMITEGLWDIHDEIDLEFLGNTTGEPYTLHTNIYARGTGGREKQYRLWFDPTEDFHTYTIIWNPQMILILVDGTPIRQMKNQLRNDIPFPLYQPMRLYASIWDADDWATQGGRIKTDWSQAPFTAFFRNYQANACIPYKTAWICSQGSNDSSWFTQDLDEEGKQKLKDVDDNYKIYDYCTDSRRYPNGYPPECGSQ

SEQ ID NO: 174907 - protein, 172 aa, Oryza sativa
  Clone ID: PAT_MRT4530_72803C.1.pep
MGTKNITSMTNPTINSVLQTPTACLAREGRPLPPHAAGFFHHLEAGALLVLPLIAASSELPDIFSSGLYSTFVFQKPDPDAMPTILTPNLPDPENAQEVGCLRRQQASVDDGKGSEPQMLIDMIPMEWSEGYLWSSPGLLISVDIEGAQMLIVIPMDRAKSILGPRPADVRL

SEQ ID NO: 174908 - protein, 1349 aa, Oryza sativa
  Clone ID: PAT_MRT4530_72805C.1.pep
MSTSDDAALSAAINSVTDAATSAIRKTLRPADDTVSPDDLAAAQALVEATTAATVKAVQDAISALVVRPSAATAAAASPSFSPTMVTIDAVALRAALGLPPTTPVDNTSGAPVDNSSGAPVDNTSGAPVDNTGPDLSSLFTALGLNPPQQHDNLPAGFVSGGAPSGADTVDALHAQAVSVLNVKALVPVVLDLGSANYSKCRCLFLITLSKYALSDHILSDAFPNNGAWARMDCVVLAWLYGTIAADLLETVLQPVVTARQVWLCLEQMFLGHHEQRAMQNMQGGGGGNQGGGGGNNRSRHRRNNNSGGNGGTNNSGGGAGQASQGNNQGAMQTHGPPGWPTPQHPWAGPIQMWPGGPLLRARGILGPLPSSAPFAGAAVAGLPAGTLSTPPSTDWYMDTGATSHMTSDTGILSSPIHPSPSTPSHIIVGNGSFLPITATDDASFIPANRMFLLNNVLVSPGMIKNLISVHRFITDNNLSIEFDKFGFTVKDLPTRTVIARTQFSTPIRNIQCDNGREFDNSAARTFFLTNGVSMRMSCPHTSPHNGKAERTLRSLNSIVRSLLFQANLPGSLWAEALHTATYLMNRHPTKTLLRHTPYFALHGVHPSYTHLRVFGCRCYPNLSATAPNKLAPRSTMCVFLGYPSNHKGYRCFDPVTNRVIISRHVVFDENTFPFAENAPANNCATDLSFLDDFSAPVQAPISSGRPSGARPGPSPSPTRSLGGPTLSGPPPAQPPSTRSAGSLGSTTPRPDSSPAPARLAHDSARLASPAPAVSSGRVASRPFPSPSSPRSAHDDSVSHTAATSPLLPPLAIPTCARRARVPPPRPIITGFGKSPVDNDHGMITRGKAGVRVPITRMNLHATVLSPVPRTYRATLADPNWRDAMQEEYSALLANNTWDLVPPPPSANIVTGKWIFRHKFHADGSLDRYKARWVLRGFSQRPGVDFDETFSPVVKPATVRTVLSLAVSHGWPIHQLDVKNAFLHGTLAETVYCIQSSGFVDTAHPNSVCRLNKSLYGLKQSPRACFISTSSCFRVELHRFRYSTRGSNQLEEFSMKDPGELHHFLGVSVSRQSSGLFLSQRQYCLEILEHAGMTDCKPCSTPVDTTSKLSSTDGSRVADPTDYRSLAGALQYLTFTRPDIQYAVQQVCLHMHDPRESHLIALKRILRYVRGTMELGLHIRTSSSHDLVAYSDADWAGCADTRKSTSGYAVFLGDNLVSWSSKRQQTVSRSSTEAEYRAVANAVAETCWLRQLLHELHSLPERATLVYCDNVSAVYLSTNPVQHQRMKHVEIDLHFVREKVAIGSVRVLHVPTTSQFADIFTKGQPTTVFTEFRYSLNVRSHDAPSAGGC

SEQ ID NO: 174909 - protein, 178 aa, Oryza sativa
  Clone ID: PAT_MRT4530_72806C.1.pep
MAAAGFLVAEASTSSASVVKVRVFLRRLISGHLNVTKLLERDRSSGNHGLDGATTTSQLPSRLPATAILTLRWALDSTLSLLGTWHLVFIVIKTLPDYLRTCLSHCFMHIDGSPLHDIVWSYYIEKLKCAIVICGEVDGCLNGNKARVLKDSVAGLELCLGILLLRVTSNISNLFCHK

SEQ ID NO: 174910 - protein, 1265 aa, Oryza sativa
  Clone ID: PAT_MRT4530_72807C.1.pep
MSTSDDAALSAAINSVTDAATSAIRKTLRPADDTVSPDDLAAAQALVEATTAATVKAVQDAISALVVRPSAATAAAASPSFSPTMVTIDAVALRAALGLPPTTPVDNTSGAPVDNSSGAPVDNTSGAPVDNTGPDLSSLFTALGLNPPQQHDNLPAGFVSGGAPSGADTVDALHAQAVSVLNVKALVPVVLDLGSANYSKCRCLFLITLSKYALSDHILSDAFPNNGAWARMDCVVLAWLYGTIAADLLETVLQPVVTARQVWLCLEQMFLGHHEQRAMQVSAEFHHFEQGDLSANNYCRRLKALAGHSRRARRPRHRQTTRPRDASIQLILAEINKGSKNMQGGGGGNQGGGGGNNRSRHRRNNNSGGNGGTNNSGGGAGQASQGNNQGAMQTHGPPGWPTPQHPWAGPIQMWPGGPLLRARGILGPLPSSAPFAGAAVAGLPAGTLSTPPSTDWYMDTGATSHMTSDTGILSSPIHPSPSTPSHIIVGNGSFLPITATDDASFIPANRMFLLNNVLVSPGMIKNLISVHRFITDNNLSIEFDKFGFTVKDLPTRTVIARTQFSTPIRNIQCDNGREFDNSAARTFFLTNGVSMRMSCPHTSPHNGKAERTLRSLNSIVRSLLFQANLPGSLWAEALHTATYLMNRHPTKTLLRHTPYFALHGTDQLRPPQWRAAWALSITNSVSWWADIVWAAPCSASKYTLGWLTGQPFPSPSSPRSAHDDSVSHTAATSPLLPPLAIPTCARRARVPPPRPIITGFGKSPVDNDHGMITRGKAGVRVPITRMNLHATVLSPVPRTYRATLADPNWRDAMQEEYSALLANNTWDLVPPPPSANIVTGKWIFRHKFHADGSLDRYKARWVLRGFSQRPGVDFDETFSPVVKPATVRTVLSLAVSHGWPIHQLDVKNAFLHGTLAETDQINCHVIYLLLYVDNIVLTASSGSLLRWTISYVQEEFSMKDPGELHHFLGVSVSRQSSGLFLSQRQYCLEILEHAGMTDCKPCSTPVDTTSKLSSTDGSRVADPTDYRSLAGALQYLTFTRPDIQYAVQQVCLHMHDPRESHLIALKRILRYVRGTMELGLHIRTSSSHDLVAYSDADWAGCADTRKSTSGYAVFLGDNLVSWSSKRQQTVSRSSTEAEYRAVANAVAETCWLRQLLHELHSLPERATLVYCDNVSAVYLSTNPVQHQRMKHVEIDLHFVREKVAIGSVRVLHVPTTSQFADIFTKGQPTTVFTEFRYSLNTEPEFNSASDPSPHHKLHNSPAIPA

SEQ ID NO: 174911 - protein, 101 aa, Oryza sativa
  Clone ID: PAT_MRT4530_72808C.1.pep
LLISSLTSNMSCYSTHRAGHHEKEDVQIDRCIACREIIQGCSRTTAPLLSPAMPVGNGPGGDRRGGRHWLRQSSTSTRRRSAREMAALWSGGCRRIRPYGR

SEQ ID NO: 174912 - protein, 52 aa, Oryza sativa
  unsure (1)..(52): unsure at all Xaa locations
  Clone ID: PAT_MRT4530_72809C.1.pep
LNGYERTPMNGYAXXAGLGIYHSXIEGHEDKYAFAAYDYPSSGESEGEPWQC

SEQ ID NO: 174913 - protein, 148 aa, Oryza sativa
  Clone ID: PAT_MRT4530_7280C.1.pep
MGSIGGDEAAVLRAEESASGGVDVWSDAVSSHDPDHLLVMVHGILGSNADWQYAANEFVKQLPDDVIVHCNEKNINTLTLEGVDVMGERLADEVIDVIIRKPELTKISFLAHSVGGLAARYAIAKLYRHPSDTSKSETKGTIRGLGSN

SEQ ID NO: 174914 - protein, 671 aa, Oryza sativa
  Clone ID: PAT_MRT4530_72810C.1.pep
MMCAKVVAAAAAEEREMELLLSEIPQVTAPHGQRGGRGGGGGGGGGAAQCYGLHGPTRYHAHAGAPARYGGDPCFPLVLNRRDDGGGQQGGARGAIHVPLSGGFASSPASSTSAGSAPSPGSDRFVGRSPSPMVQATTDEDTERLASQLDGLLVGDAPAADALAAALMPPQGSPASAAKNVYLPDVSAVHGAYNNGYNFGEPGYSLHHEPGVLADQAMASGYVAPSQCFPVDVGLDGYGGFPPSLGTSVGSFMYTRTRNSSGIGWEQGLVHPDHARPVLLPGQSGAEHNWGYAGTGQISLDSRGRSLPKSPYEYSVAAARDIGYMKGGFNQMEPFCDGRKNVPFLNRAKERRFQQHVNNRSVELGSPGMLMYENIVELESPRMLRYENMVGAKGYIYFMAKDQNGCRFLQQKFEEGKDQADLIFEGIIDHIPELMANSFANYLVQKLLDVCDEEQRLRIIAVLTEDPVKLLRVSLNSHGTRSIQKLIETVKTRKQIMLIISALQPGFIHLVNDPNGNHVIQKCLKNFDAEENKIIYDGADTHYKNSLNVLTNYVIQYVLDLKIPFANAQLASLFQGNYVYLSKQKVGSNVVEKCLKVFPDDDKAAIIWELISASHFEQLLQDPYANYVIHTALVQTRGHLRSALVNAILPHEEAIRTNPCCKRISKVLSRR

SEQ ID NO: 174915 - protein, 136 aa, Oryza sativa
  Clone ID: PAT_MRT4530_72811C.1.pep
LKQIKGEDKGTSSGKTHDQRDFFLWGDQRPGKIMDKGGREPRGKDAPKAPKEPLVPWPPRPAQEGGYPGRPPPPQPWAPWGGPHPQRPGVLGRHRGGPCPADPRNPQGAHIIAAPGTRIRIPDFQSREHGSHSPVG

SEQ ID NO: 174916 - protein, 121 aa, Oryza sativa
  Clone ID: PAT_MRT4530_72812C.1.pep
MASVGFGTTVAPAVAAGRRLSHRRAAAPPPPSARVARPSATKSVTAAAATEEKGLFDAIFGALYKEEQLLETDPILNKVEEKAPAAASRATKASGAPAKKAAGDGDGDGGFSFGGLFSKKE

SEQ ID NO: 174917 - protein, 82 aa, Oryza sativa
  unsure (1)..(82): unsure at all Xaa locations
  Clone ID: PAT_MRT4530_72813C.1.pep
STRTTTRRAMGGRRRRRGAKFRIRQCRHRIWHPRGWIRRPAAGPGXGERHCRPRRCDGARSKWGGGACAGGQRGGGRSGSGT

SEQ ID NO: 174918 - protein, 36 aa, Oryza sativa
  Clone ID: PAT_MRT4530_72814C.1.pep
WIIIHVYFLSGLMSELACSILSSVTSFVNISLFSLL

SEQ ID NO: 174919 - protein, 58 aa, Oryza sativa
  Clone ID: PAT_MRT4530_72815C.1.pep
ISANRAAQLVLEGKQKYSEQKTSADKVAHHVLSEARKLRTKDNTSVIFVDLDTLRSDP

SEQ ID NO: 174920 - protein, 358 aa, Oryza sativa
  Clone ID: PAT_MRT4530_72816C.1.pep
MQPAADGERWRGAHPSPGLRAVVRRRRVGAAERATGAVARVRALARDSERNRRCFVSVGTGRMLAAAFESLAAAALVCMMPLDKEAARVTKAAMVATTHLVSSDKRVATRVASTGLIPTLIEALVDADKSVSEKALAVFDAMLTSEEGRASARGHALAMPVLVKKMFRVSDVATELCRRHRSLGSVKGGAGEPVRTQQLSLVEEEVASSVGTRMAMDLVRREADRGAAPEFVAVDIGGEAETAGAEAEPKKMESSFAGKGLERERSGDANPSTTGVLAVYEKQVVPVHVDGSPKEQFHPSTPTAGGAKRRRTGRRVPGWRDPRKILFAFAALSSVGTLILLYFTLSMGRMTGGQADGQ

SEQ ID NO: 174921 - protein, 82 aa, Oryza sativa
  unsure (1)..(82): unsure at all Xaa locations
  Clone ID: PAT_MRT4530_72818C.1.pep
RPPRRHLCAAAPRRAAPCDAPPCAAAELEGVADPREDQDPQDYEXGKSSLFLEHVEPNCEIILFTNKIACNDKHPTCDYAMP

SEQ ID NO: 174922 - protein, 54 aa, Oryza sativa
  Clone ID: PAT_MRT4530_72819C.1.pep
VSRRAVAGAQLLKIRQLMHCVHARFATQVQKHAPPNRPSGQCTSYATDPWSKPL

SEQ ID NO: 174923 - protein, 158 aa, Oryza sativa
  unsure (1)..(158): unsure at all Xaa locations
  Clone ID: PAT_MRT4530_7281C.1.pep
DDDEGEPPIXQRMAEDYGDLYFIXTFFRSALHAFRRRVAYANADCDHIVGWRTSSIRRKTELPKWEESISEKYPHIVHEEYSEELGDETCQNSATVCDSDILEEKMVTGLRRVSWEKVDVSFHTSMQRFAAHSIIQVKYQFMNEGADVIQHIIDHFQV

SEQ ID NO: 174924 - protein, 50 aa, Oryza sativa
  Clone ID: PAT_MRT4530_72820C.1.pep
SHIGRHSLFATQSIVIATVPPKSVIFSQCTVLLVDRSSIYRPAPCLSHTP

SEQ ID NO: 174925 - protein, 75 aa, Oryza sativa
  Clone ID: PAT_MRT4530_72821C.1.pep
LKNGNNKKRCSIIKIHYPIIFTCFQHMLKYAPWLSSKHFQLLKVVVWCNNPSLKKNGVEYLEDQRIVLGDTSLRS

SEQ ID NO: 174926 - protein, 153 aa, Oryza sativa
  Clone ID: PAT_MRT4530_72822C.1.pep
EEKNPFPQKKPGEGGKTKFNPGPPRKGKMAGEKKIPWDPNPRGKSPIWVKRGPKPPNKTPPGVGKKKKPPLFFLGGGVWENPDLFLKGAQNLKKSPPPYLKRGAWGKTPWTRGGEKTPGSLRGGGAFFLGGPPLFPLKKTGKPRKGALSNPFW

SEQ ID NO: 174927 - protein, 35 aa, Oryza sativa
  Clone ID: PAT_MRT4530_72823C.1.pep
WDLGCPPFFRAGCLAGASECSWPLLRWLSLEAEIV

SEQ ID NO: 174928 - protein, 55 aa, Oryza sativa
  Clone ID: PAT_MRT4530_72824C.1.pep
MASGGPRLQGGPPRSTSSVREAVAVTDGLGDGYGSTWATAVEALPFHYLPEQVDR

SEQ ID NO: 174929 - protein, 77 aa, Oryza sativa
  Clone ID: PAT_MRT4530_72825C.1.pep
MGEGMMLRLLLVVTTIGGHRSDGVPANDHHATAAPPHQVAQSPATARDGLARTAATAALSPDQRLSLYMRPYELGRQ

SEQ ID NO: 174930 - protein, 224 aa, Oryza sativa
  Clone ID: PAT_MRT4530_72826C.1.pep
HAAPSPLPRPLVRPFRGRFRGSHPLVLPCNLRNCPYHLRVVPTLHDFLLPPPFSPSLCLFPNRYRRAIPSRLVSSRRCSAGVAARGPSRCRSARGRSRHVAAGRSASGRSGTARRRRSSGRRHRRRRRCSRRCPLGPSRPGRLTPLGSSSPCHRRRRHSPRVAAGAASSSWRGTWRTSSSGPARSSVSGRSRTARPPPPRRAPGRRRPIPARGTPRRRCAYTGR

SEQ ID NO: 174931 - protein, 114 aa, Oryza sativa
  Clone ID: PAT_MRT4530_72827C.1.pep
RTWPGLPRTPMRRGRRRELTGAKNNDGRRRTKAGDELQRRLGSGQPRRRRSDGLRRLKRGGRGAPPPREPDGDDGKRRRRPQPQRDAVGTTTTKAAARATRWRRVDAGTATLLH

SEQ ID NO: 174932 - protein, 385 aa, Oryza sativa
  Clone ID: PAT_MRT4530_72828C.1.pep
WLTPFCVPSYLVSCEDIFIGHFVWDVRVEMGSVDRFLDDILREKPARFTPENLREFTGDYAERLGAGGFGVVYRGRFPGGVQVAVKILHRTLDRRAEEQFMAEVATAGRTYHINLVRLYGFCFDATTKALVYEYLENGSLDRVLFDAAAAAALEFDTLHGIVVGTARGVRYLHEECQHRIIHYDIKPGNVLLAGDYAPKVADFGLAKLCSRDNTHLTMTGARGTPGYAAPELWLPLPVTHKCDVYSFGMLVFEILGRRRNLDTQRPAESQEWYPRWAWQRFDQGRFGEVMAASGIRSKDGEKAERMCKVALWCIQYQPEARPSMSSVVRMLEGEEQIARPVNPFAYMATMDAISSSSSGGGGVSTATSASASGDSAQSTRHDICH

SEQ ID NO: 174933 - protein, 41 aa, Oryza sativa
  Clone ID: PAT_MRT4530_72829C.1.pep
GNPFIKKKKKKKPKKKKKKKKKKKKKKKKNEKKKKKKKKKK

SEQ ID NO: 174934 - protein, 369 aa, Oryza sativa
  Clone ID: PAT_MRT4530_7282C.1.pep
MPPLPRPPPTPTSAAPAPCPRQIAAVVLNHPSSALTPASTRSLSASLLAVAPSLPTPVADSVLKLLWHHAPRALLFFHSLLHLPPRAHAVGPSTLDLALDLSARLRRPRQLTNSILGLFPRHRLAFTPRTFPILFERLAVSQRRPDLAVRLFLSLHRSHRVAQDLPLFNSLLDALSKSRHAGKAASLVRALEQRFTPDVVTYNTLADGWCRVKDTSRALDVLRLMVESGIAPTKTTYNIILKGFFRAGQLRHAWDFFLQMKKRGSKDESCKPDVVSYTTMVHGLGVAGQLEKARKVFDEMAKEGCAPSVATYNALIQVICKKGNVEDAVTVFDVFERAPTEIFSLSLLVQLQFGMIGSKAVYQMIYGDW

SEQ ID NO: 174935 - protein, 216 aa, Oryza sativa
  Clone ID: PAT_MRT4530_72830C.1.pep
MDVEATKDVVHEQAAAPGRGRAARWLLVALNCGMLVVGTTGGPILSRLYFSKGGHRKWLSAWLETAGWPLLLVPVSASYHSRRARDRGAPLFLTPRRVLLAGAVLGVLTGADDFVYAYGLAYLPVSTSAILISTQLAFTVFFACLIVRQRLTAATLNAVALLTIGAVVLGLHASKDRPAGVTTGKYWMGFFLTLGAAALYGLILPLVELAYKHAAG

SEQ ID NO: 174936 - protein, 117 aa, Oryza sativa
  Clone ID: PAT_MRT4530_72831C.1.pep
TRITIIRTSEGATTTASKGPFQHRDELVFEVLARIAETVRNSNGVVISTFEELEPMELERVHGELGDDSVATVLATGPLHRLSSMNTGSNTIHWQIKKNYPFNTPHQPIHQYNFPIN

SEQ ID NO: 174937 - protein, 932 aa, Oryza sativa
  unsure (1)..(932): unsure at all Xaa locations
  Clone ID: PAT_MRT4530_72832C.1.pep
MVIASGAIDRRHLSPFTPTSDDSSSSFFSQDLVPTERQVGFWNSESMVDHKGSKSVFASPLEKIQPNGANHAGDPETPGGQAFKGLDILSLSNLMRQENASGSPSLSWGEILTNPISRLGLSTRETAFVEPTTADQHVPGYGKGLSSSSLSEVFSGKSREIVSGVLCQSTGTHTSIYDSDEPLESMEAIEAQTIGDLLPDDDDDLISGIADGFEFTGMSTNQDDADEDIFCTGGGMELENNDSVKGDKVQDGSFKSQISSGHSINKQPSRTLVVRNITANIEDSDLTVLFQQYGDIRMLYTSFKHHGFVTVSYYDIRAAQNAMRALHSKPLGLMKLDVQFSFPKENVPGKDIDKGMLVVSNIDSSISNDDLLQMLSVYGDVKEISSSPISCTKKFVEFYDVRAAEEALHDLNKGGISGPKFKVELSQHGEAGSCLRQQHSREWKQDSLPHQPKNSSPGTIGKLGTKCQDNSTVHNLFSPVNQQLESPTQCISTTGPQILSSPIRIKSTLQHNNQASVGDLSGPLGQGNFGRGIQTLHPRSLPEHHNRICNNSKSMXTFGFTEIGSCPLHGYHYTWNHTNVFPQSPSAPILWSNLQHPMHVHXILHHLGSAPDNGGSFGNVHSFHPGSLGSIGLHGSPQLYPSELSAFASSRGNFREALFSPVGGGFQSLQQMCNAINGRNPMIHVSTSYDATNDRMRSRRHDGNPAQSENKRQFELDIDRIAKGEDSRTTLMIKNIPNKYNCKLLLAVIDENHRGTYDFIYLPIDFKVYFFFLSVKDCNCEYNFRTDFCNVHFSQNKCNVGYAFINMTDPQHIIPFYKTFNGKKWEKFNSEKVASLAYARIQGRSALIAHFQNSSLMNEDKWCRPMLFHKDGPNAGDQEPFPVGNNVRSRAGRNRSLISLDTKDASPSSSPDQESNSVGTANSTCRTTLEQT

SEQ ID NO: 174938 - protein, 51 aa, Oryza sativa
  unsure (1)..(51): unsure at all Xaa locations
  Clone ID: PAT_MRT4530_72833C.1.pep
NNNAGNNNRNQAPRPVATPSQQXKCPKPRRAKVVPAXNNSSAPVAKARVNH

SEQ ID NO: 174939 - protein, 369 aa, Oryza sativa
  unsure (1)..(369): unsure at all Xaa locations
  Clone ID: PAT_MRT4530_72834C.1.pep
LWQQHSREWKQDSLPHQPKNSSPGTIGKLGTKCQDNSTVHNLFSPVNQQLESPTQCISTTGPQILSSPIRIKSTLQHNNQASVGDLSGPLGQGNFGRGIQTLHPRSLPEHHNRICNNSKSMTVSGRNASSRQDGVDHNIQKVGPAGFCGHSFDQNNEAFGFTEIGSCPLHGYHYTWNHTNVFPQSPSAPILWSNLQHPMHVHSYPGVPPHMLNTGSYPMDQHHLGSAPDNGGSFGNVHSFHPGSLGSIGLHGSPQLYPSELSAFASSRGILGRPCSPQLAGXQSLQQMCNAINGRNPMIHVSTSYDATNDRMRSRRHDGNPAQSENKRQFELDIDRIAKGEDSRTTLMIKNIPNKYNCKLLLAVIDENH

SEQ ID NO: 174940 - protein, 98 aa, Oryza sativa
  Clone ID: PAT_MRT4530_72835C.1.pep
RNHKNRNPKVTQGRKKKGSSIAPMVIASGAIDRRHLSPFTPTSDDSSSSFFSQDLVPTERQVGFWNSESMVDHKGSKSVFASPLDKIQPNGANHAGDP

SEQ ID NO: 174941 - protein, 89 aa, Oryza sativa
  Clone ID: PAT_MRT4530_72836C.1.pep
KKYFYRNRKLKLGFGDRVVVKNDFSLGGVHPVKQSWPCCWIYNGVSKKGHPTPGRAEEQNKTETISGRYVGTFKISSFSGVCFWSWGRS

SEQ ID NO: 174942 - protein, 97 aa, Oryza sativa
  Clone ID: PAT_MRT4530_72837C.1.pep
PCPPIPRMVRSYEESIPMPLKQSWLLLSSKYYGAKGSSSKQGYYGEGSSKKGYYGKQQQQPGITRVRLTKARQYPAQLPSMCRVKPQQCNIFPPGQN

SEQ ID NO: 174943 - protein, 101 aa, Oryza sativa
  unsure (1)..(101): unsure at all Xaa locations
  Clone ID: PAT_MRT4530_72838C.1.pep
AIGLPPSTISFSVSQISSPPLPLGPPLPLRKSSSTRTPRPSTPDGIRLLIVENLAPVPRLPPPLGLXPPPSRRSSALMPRPPPPPTGPPPPDPPSPCRGLA

SEQ ID NO: 174944 - protein, 450 aa, Oryza sativa
  Clone ID: PAT_MRT4530_72839C.1.pep
MPRSLAHPRSPHHHGPRILAHIAVQRLKRCSIRTNKMQQSRQDVDEHVAELRGELRKAREERDRAYRVLEVSEWKALASANDRTTIETLEAELDASRESEKRMLESLAMQTKQLEMTKIELEEARLENASLRETIQRLEAIAVPVATTPRGRYDRDYQRVHGELRMALVAEDKNKKAMEELVLALKEVNGELHTTRQLLARSQHEAETARLESDRLHVSLKRKDDKLRALSEESTESELAETRRENARLLESQRSGRDEIAKLRDILRQAVKDTKVVKEALEEARGENAALKEMLGDKDTAIKCTKQELECLRVTEAAARDSVKELQSLLVATSSSPTAAGMKLSASPSPTASGIKLDMEDSSSSHGSRELHGLIKCHSEARVKPPAGLTLPRRRSDNFEGSVYDIFGSMEDQKSELSAFSTMPRSLPARRRVMMRKVGSLFRFKSFSIK

SEQ ID NO: 174945 - protein, 174 aa, Oryza sativa
  Clone ID: PAT_MRT4530_7283C.1.pep
MAAKSLILFGVLLASLLLVSQDVVAARELTEAHESKGKNVKPEVEQNNWGGGYMHGGGYEHGGGYSQPGYGGGYGQPGYGGGYGQPGYGSGYGPGYGGGGSGPGYGGGYGSPGYGGGYGSPGYGGGSGYGGGYGGGYGGGYGGGSGYGGGGGYGGGSGGGGWQGKVGEEEGGGG

SEQ ID NO: 174946 - protein, 147 aa, Oryza sativa
  Clone ID: PAT_MRT4530_72840C.1.pep
FLPSLCHFSLPLPLSFFHHERERRADDEEAPGRSGWRSPRPSSTATVATKMWWGTTAASTTRWRVMAAADPAAATPRADPAARRRRRPPPALIQRRLAHARIWRCDSGGGGQPTRGSGGATAAKAAPSMDPAGRLRRRLAHAQIRMR

SEQ ID NO: 174947 - protein, 60 aa, Oryza sativa
  Clone ID: PAT_MRT4530_72841C.1.pep
KDRRTSSSPHGGLLPTAPPVAGLSKERARERSKRGNKREVMRWHLTRGYYDQPSCQTKPG

SEQ ID NO: 174948 - protein, 160 aa, Oryza sativa
  Clone ID: PAT_MRT4530_72842C.1.pep
AAMADGNPDGIKRYTPPVHRNRANNRRKSGDRAEKASYLYNNDGEKSHAPSLKNLPPIIPHETFFSNPQNDYSQTRLIPLEGCCASEAAQLLNDRWAAAMNLYNDQSYDSPDKPVMYSGSSGSSWGHGHMKLPHQMNFSEELRRALDEQPVTGPSVNTWN

SEQ ID NO: 174949 - protein, 71 aa, Oryza sativa
  Clone ID: PAT_MRT4530_72843C.1.pep
LAEAPKKGLGNSIPTKQVGTALCYINLIPNLNLQIIGPLDDLHNKYIKQRPKPTKHERVKQAQNRVHQWYI

SEQ ID NO: 174950 - protein, 69 aa, Oryza sativa
  unsure (1)..(69): unsure at all Xaa locations
  Clone ID: PAT_MRT4530_72844C.1.pep
GVGGAWLPRACRLLPSLHLQLWLHRHATHNTTPQGXQMATLVLQLPDFNMDFIVERDFENIHGPCAPGR

SEQ ID NO: 174951 - protein, 108 aa, Oryza sativa
  unsure (1)..(108): unsure at all Xaa locations
  Clone ID: PAT_MRT4530_72845C.1.pep
MSRIKLMYEWAKNSKLTRXIGPEFISLRKRATEEATYRFWARPALPMVRLNHWVRPNHPQRRSIQVSPGRLRXFPNGSWWVIPTFPTVTTVILKQEDFGVIAENYIFP

SEQ ID NO: 174952 - protein, 138 aa, Oryza sativa
  unsure (1)..(138): unsure at all Xaa locations
  Clone ID: PAT_MRT4530_72846C.1.pep
ADDDHDNARRWRLRQLRXAVTAPSLRGAAVAEGEDDDEEAAAEGLKIKILAHGGDGGGFDGGSGMAVVLRAGXQLRRHGDGECGSGNDDGTKTDSGGGRPDEIERVWRGRRGRDGDPPRIQEGAVLGTGCSCCCGSRC

SEQ ID NO: 174953 - protein, 69 aa, Oryza sativa
  Clone ID: PAT_MRT4530_72847C.1.pep
AQAPDSLGRIKQIILISLKKKKLRGSGGKPRDSTGSGEWSKRGSKNQLVMCSASPSVSSPLSSLYAQVR

SEQ ID NO: 174954 - protein, 42 aa, Oryza sativa
  Clone ID: PAT_MRT4530_72848C.1.pep
MSIDHHQFCSRNNSKQQGSNTGYTTGKQRLLRRQKGSSNTTN

SEQ ID NO: 174955 - protein, 70 aa, Oryza sativa
  Clone ID: PAT_MRT4530_72849C.1.pep
MHVEVKVFIWHTDGVVYVWKDESNLDLESKFGTIEVRSYPDGLTGGKRSVRQRQVGADRKAWSDRPTNTS

SEQ ID NO: 174956 - protein, 364 aa, Oryza sativa
  unsure (1)..(364): unsure at all Xaa locations
  Clone ID: PAT_MRT4530_7284C.1.pep
RHDQTPRLVSSPRLASSPAACAEQPPISATRAAAPASCYFRRVLAEGRMSRRWSRTIYVGNLPGDIREREVEDLFYKYGRIVDIDLKIPPRPPGFAFVEFEDPRDAEDAIRGRDGYNFDGNRLRVELAHGXGRGNSSSXNNSGGGGRXVGGVSRHTXYRVLVTGPPSSASWQDLKDHMRXLGDVCYSESFPVEVGGTIGIVDYTNYDDMKYAIRKLDDSEFKNAFXKAYIRVKEYDGKRSRSYSRSRSRSRGRSYSRSRSPSKSPKGKSSRRSASRSRSRSASSRSRSESKGRSPSRSPARSQSPNTSXLPMVMQQAPRNAAQAGAPPRNVAQAGAHHVPDLLMXQVRMMLMCFWGRSVEESWS

SEQ ID NO: 174957 - protein, 566 aa, Oryza sativa
  Clone ID: PAT_MRT4530_72850C.1.pep
MKVDGSALAGRALAAAGARHMFGVVGIPVTSLASRAAAAGVRFLAFRNEQSAGYAAAAYGFLTGSPGLLLTVSGPGCVHGLAGLSHATANAWPLLMVSGSCSQPDAGRGDFQELDQIAATKPFIKIAVKATTIADIPRLVFQALAATVSGRPGGCYLDIPSDVLHQTLTESEAAALIDAAAADSAKSDSSPPKHKSLDEGIEKAAELLRRAERPLVVFGKGAAYSRAEDAIWKLVDTTGIPFLPTPMGKGVVPDTHPLSATAARSLAIGQCDVALVVGARLNWLLHFGEPPKWSKDVKFILVDVCEEEIELRKPHVGIVGDAKRVVELINREIKDQPFCLAPSHPWVEAITKKARDNVLKMEAQLAKDVVPFNFLTPLRIIRDAILAEGNPAPVVVSEGANTMDVGRAVLVQNEPRTRLDAAAVAEPDRLVVAVEGDSGFGFSAMEVEMYMDKRVEDGPSCKTLVRYQLPVVVIVFNNNGVYGGDRRSPDEITGPYKDDPAPTSFVPAAGYHKMMEAFGGKGYLVETPDELKSALSESFRARKPAVINVIIDPYAGAESGRMQHKN

SEQ ID NO: 174958 - protein, 226 aa, Oryza sativa
  Clone ID: PAT_MRT4530_72851C.1.pep
PSHPWVEAITKKARDNVLKMEAQLAKDVVPFNFLTPLRIIRDAILAEGNPAPVVVSEGANTMDVGRAVLVQNEPRTRLDAGTWGTMGVGLGFCVAAAVAEPDRLVVAVEGDSGFGFSAMEVETLVRYQLPVVVIVFNNNGVYGGDRRSPDEITGPYKDDPAPTSFVPAAGYHKMMEAFGGKGYLVETPDELKSALSESFRARKPAVINVIIDPYAGAESGRMQHKN

SEQ ID NO: 174959 - protein, 49 aa, Oryza sativa
  Clone ID: PAT_MRT4530_72852C.1.pep
PSIIRTLLAAISSAARIQSTAPTGTEETEKQRSIEDLASRSRRSATRFS

SEQ ID NO: 174960 - protein, 97 aa, Oryza sativa
  Clone ID: PAT_MRT4530_72853C.1.pep
ARTICDAGLAQRQAAVDHESHRLAIPRLTGSPAPTQRPAAHYRTHPDEFTPNTLLDSDILLRRYQDLQTSTSDHRKALALGAAIVVVNLSQKVATTH

SEQ ID NO: 174961 - protein, 110 aa, Oryza sativa
  Clone ID: PAT_MRT4530_72854C.1.pep
MGSRLDRMIPGGANQKQQVLSLIISVGAALDEAVEEGEGEGEAEEAAHDRMEARRPYDCNGGSSVDVDAIRSASRLLLRYQLYAAIVDECGTWQATGLLTLSGDNLNRLA

SEQ ID NO: 174962 - protein, 134 aa, Oryza sativa
  unsure (1)..(134): unsure at all Xaa locations
  Clone ID: PAT_MRT4530_72855C.1.pep
YAVSVSVKDKAYPLSYDLRNIPIRYTLTYTVGFRIXVRNLPQIIGNISTSXGIAEILLGILLEGQGIPRYKRDPXDRLWASHLIANTPTKVYEAGVHRANSPGDLVESLDYDLIAVPTYPNTLFLRSASITRRQ

SEQ ID NO: 174963 - protein, 72 aa, Oryza sativa
  unsure (1)..(72): unsure at all Xaa locations
  Clone ID: PAT_MRT4530_72856C.1.pep
CGWGISGYTSTGQWAXNIEGSXPRKERKKKRKIXIGPPPHTRIGYLFNGXALLQRQRVSVAGNDQAIETLER

SEQ ID NO: 174964 - protein, 117 aa, Oryza sativa
  Clone ID: PAT_MRT4530_72857C.1.pep
PPRKGPPPPFCPPKSFTLSFTPKPKRRAPPPKCGPGPPFPGIWATPSRRGSWSPPSRSRPPKKKLTGLFRGPSLSPQAPVFFYPLFPPPFESLFPFKISPSSCLGPPLFCVPPPPFL

SEQ ID NO: 174965 - protein, 117 aa, Oryza sativa
  Clone ID: PAT_MRT4530_72858C.1.pep
MEVAVREIAAVDWFGNQRASRIISRIPMEVAMREIAAVDWFENQRASRIISRTPMEVALNDGCRSVVKSINTPIVIGNLIVRHHVEVGGREHQGCQATTFSHQPFLGEAEKWPLWRS

SEQ ID NO: 174966 - protein, 109 aa, Oryza sativa
  unsure (1)..(109): unsure at all Xaa locations
  Clone ID: PAT_MRT4530_72859C.1.pep
XXXGKXSSISXXXWCCXXITARXTXPVSRPXSEFFXLKFAAVYIIFXIFVLSXXGAIXFCFPEMXLPMXXXWXVLXXFFFXXLFXGHXGIXXVGAXLCXVFVPTHPFFV

SEQ ID NO: 174967 - protein, 148 aa, Oryza sativa
  unsure (1)..(148): unsure at all Xaa locations
  Clone ID: PAT_MRT4530_7285C.1.pep
ANQGGNFCFFFLRAGGGRQKIFFRFFFKKKKLLGVSIKKTPPPGGGQINKASRRAFFFSLKRVVGPNPFMLSWFFVKPPRVYFFSFPVVFCFGFLAGNFFSQGKCKGIIIPHFKTPSQKKRLVSIRVPLGNSWPPPPSXXNFQKKTXX

SEQ ID NO: 174968 - protein, 288 aa, Oryza sativa
  unsure (1)..(288): unsure at all Xaa locations
  Clone ID: PAT_MRT4530_72860C.1.pep
NGVQSNKPYKIRKKDKGQIRYLVYXMDNAILNLPHDQSQMVWLIDFAGFSLSNISLHVTKLTADVLQGHYPERLGVAILYNAPKFFESFWKIASPILEPKTFNKVKFVYPDRPETNKIMEDLFNMEELESAFGGKNQATFNINDYAARMREDDIKMPLFWSPENSALASEPYVMVNKDMAQEGSSGLKSEETASEKREETDTESENREETESESERAEIDSVSGKREETVAVSDKREEKETESENGKAAVTSSNGVELTSLPGEGKVGTTIPTFVTSFENPFATISAR

SEQ ID NO: 174969 - protein, 157 aa, Oryza sativa
  unsure (1)..(157): unsure at all Xaa locations
  Clone ID: PAT_MRT4530_72861C.1.pep
MATRPARLSAPAVAAILVAALALCAATASAANVTTTTATAPSGGCYSHLFTFGNSLIDTGNFIHYSTSPGPVARSPYGETFLRRPTGRWSDGRLIVDFIVERLGFPYWTPYLAGKSREDFRYGANFAVASGTALXQLLFKXKHLSVAGITPYFLGGQ

SEQ ID NO: 174970 - protein, 41 aa, Oryza sativa
  Clone ID: PAT_MRT4530_72862C.1.pep
VRSVMVMSPCSHCFLFGVTMVLVKSLKLTRDHLSFYMFSFS

SEQ ID NO: 174971 - protein, 122 aa, Oryza sativa
  Clone ID: PAT_MRT4530_72863C.1.pep
LTFGVHLLVRAENSLCWSSYQQLACIFHGGIHGSDDEQTLQSAGVIPLPSPGKLVSSTPFDEVTAAFPFSDSVSFSSLLSDTATVSSLFPDTESISALSDSLSVSSLFSDSVSVSSLFSDAW

SEQ ID NO: 174972 - protein, 76 aa, Oryza sativa
  Clone ID: PAT_MRT4530_72864C.1.pep
MAAAAPADAKAEAAKMDLLEDDDEFEEFEIDQEWDDKEDGDEAIQQWEDDWDDDDVNDDFSLQLRKELEECNTQKI

SEQ ID NO: 174973 - protein, 681 aa, Oryza sativa
  Clone ID: PAT_MRT4530_72865C.1.pep
MPSLQTAAAEAVVDEAVVAGKGGAMPTSTQDLLFRPCPTTTLLTLLRDTSEKRAAAAEQKMEWLRSQLVGKDVEFDTPFGRHLLTYADHTASGRSLRYIEDYLLNEVLPFYGNTHTEDSHVGRKMTRLMHRAARYVKRCMGGGAGDALLFCGAGTTAAIKRLQEVMGVAAPSAAAPLRARLAAGLRWDERWVVFVGPYEHHSNLLSWRRSLADVVEIGLVGDGLVDVAALRRALASPQYADRPMLGSFSACSNVTGIVVDTREIARVLHQHGAFACFDFAASGPHVKIDMKSGEIDGYDAVFLSPHKFIGGPGTPGILLMNKSLYRLNSQPPSTCGGGTVNYVNGFNEEDTLYYDDIEEREDAGTPAIIQKIRASLAFWVNEYIGYDTIDLHEQIYTEMAMKRLVDNPNVKVLGNTSANRLPIFSFLIYPPMVDSFFHGDDRLAIVRRKRLPLHGRFVTKLLNDLFGIQARGGCACAGPYGNILLEINNELSLRIRSALVEGYLGLKPGWTRLSFAYYISKEEFKFILDAIEFLAAYGHRFLSLYKFDWRSSNWTFSKQAAKELSAATGVLLGEDLQFKAEDKSDNNKPEPNHTKFATYMENAKRIALSLPDINQQIISIPQGVDPDIIIFHMIGNGLIPPRIIALIEAVGYFVLSRDGVTKRDRHKDSRKKRPDEPAMRV

SEQ ID NO: 174974 - protein, 457 aa, Oryza sativa
  Clone ID: PAT_MRT4530_72866C.1.pep
MATSPEIGWSAATLEDKNTNGVAEPVRQGERRGGDDGFPLRRRRRRRRRAALPADVLFEVLLRLGPKDVCRLRGVCRSWRALTTDATFVAAHAARHRGPLLAGGVLDFDVFPSVDVLLMDLSGSVVKCMGGAATHLVLPTTNLDLLCVTEVYTCRATLLNPITGAAVHLPEPLSTPHSLRGRSLSDFDGSFKYGRDSNGDYKVLRVLTDCHNKQFPEQLFEILSLDESSRYHMRWRAKKALPMCVRRDAIGGVVINGVVYFLLDGRPNGVKNAHRESYEMDHMALFDLCSERWISYLEGPMATHPEMNNIDEILPEPLEMSVYQNLSLSELSGALVVAQYTDYRSAEIKSYVDLWYLMDSEKQIWEKKYRIVLEMDTWDTEHIFPHAHPSLILDDGRILIYITVHLANFEGQYTRRVMRLYDPETDTLGSDLVDVKNIHSIGFFSGSLLSIQNGQGL

SEQ ID NO: 174975 - protein, 68 aa, Oryza sativa
  Clone ID: PAT_MRT4530_72867C.1.pep
MFVKPIHAPHRVAPICELRRLVPQYIGGLKLRLTVNKLEYLQLQQLKWHLVTSVIGSKYTDDNTGSKH

SEQ ID NO: 174976 - protein, 71 aa, Oryza sativa
  unsure (1)..(71): unsure at all Xaa locations
  Clone ID: PAT_MRT4530_72868C.1.pep
KXXSFFLYILFXXXRTNSHPLQLLGLRQIFFFMVIIYMKFVLSHKLLMKLTVLALYFYDNIPEKCSFPIFH

SEQ ID NO: 174977 - protein, 147 aa, Oryza sativa
  Clone ID: PAT_MRT4530_72869C.1.pep
IYIYIYIYIYIYIPKEEVSVVQEYLDVFPEELSELPPDREIEFIIELLPGTTPISKRPYRMPINELEELKKQIAKLETKGFIRLSSSPWGAPVLFVKKKDGSLRICVDYRAISEVTVENKYPLPTNDDLFDPLKGACVFFKIDLRSG

SEQ ID NO: 174978 - protein, 160 aa, Oryza sativa
  unsure (1)..(160): unsure at all Xaa locations
  Clone ID: PAT_MRT4530_7286C.1.pep
MASNKVVFSVLLLAVVSVLAGXGXMAEYTTKXQVVYTPGPLCQPGMGYPMYXLPRCRALVKRQCVXRGTAAAAEQVRXXCCRQLAAVDXNWCRCEEINHMLGXIYXEARRPXCRAPMXXVFRGCRKRDLXRAAXNLPAFCNVXIPTAGSGVCYWLAKSGY

SEQ ID NO: 174979 - protein, 328 aa, Oryza sativa
  Clone ID: PAT_MRT4530_72870C.1.pep
MKYSKEAKPERAAGGRSRAVPVALLLVVLCAFSFYLGGIYSTGRSLLDVNGIVVKGASSSSSASAVAIQKDTNTKAVVVFPECPADYQDYTPCTDPKRWRKYGNYRLSFMERHCPPAVERKECLVPPPQGYKAPIRWPKSKDQCWYRNVPYDWINSQKSNQHWLRKEGDKFIFPGGGTMFPNGVGAYADLMAELIPGMTDGTVRTALDTGCGVASWGGDLLGRGRGILTLSLAPRDNHEAQVQFALERGIPAILGIISTQRLPFPSAAFDMAHCSRCLIPWTEFGGLYLLEVHRVLRPGGFWALSGPPVNYENRWHGWNTTVVAQKAD

SEQ ID NO: 174980 - protein, 51 aa, Oryza sativa
  Clone ID: PAT_MRT4530_72871C.1.pep
PKPHCYWHRRSVCTPFNIHHPLLINTEPNLITATLSPQREYATALMRVMRY

SEQ ID NO: 174981 - protein, 112 aa, Oryza sativa
  Clone ID: PAT_MRT4530_72872C.1.pep
EAHQESNAARRSLGDGVLVRRRRNCYGRRRRCTPGLLRGSWATSKGEAAASRARRCSELTRSRSRRLAAPNEAFLVASGTALTGAGVGTPVPGESEAGYLGSCAKRDRGERE

SEQ ID NO: 174982 - protein, 57 aa, Oryza sativa
  Clone ID: PAT_MRT4530_72873C.1.pep
SPFTGLIESALFLTDKENVLNHAELYREKIDGHQLTGARGPLLILILFPLLNEAGGA

SEQ ID NO: 174983 - protein, 93 aa, Oryza sativa
  Clone ID: PAT_MRT4530_72874C.1.pep
MAVRDQYAQRPLRRLTKNQTRLGEVLATVYWFGDGATATVVVDEKEKERNGVGGQSATVFRVDAVAFPEIGCTKRGVLGGVRDGIERELQNAY

SEQ ID NO: 174984 - protein, 102 aa, Oryza sativa
  Clone ID: PAT_MRT4530_72875C.1.pep
MLPATISMTQTVSLSTPSRWPLTGTYYVRNSVVHPATSPPPTGGAEVWGPISRGSRVVRDRMRCMHGRSQRNGGGGGRDGGMASREREKTKNLVDLGFDRLA

SEQ ID NO: 174985 - protein, 83 aa, Oryza sativa
  Clone ID: PAT_MRT4530_72876C.1.pep
MPSLTPPRTPLLVQPISGNATASTRNTVVLWPPPPFLSFSFSVEAREYTVDDDRSSCAVAEPVHRRQDFAEPRLILGEPPSSP

SEQ ID NO: 174986 - protein, 98 aa, Oryza sativa
  unsure (1)..(98): unsure at all Xaa locations
  Clone ID: PAT_MRT4530_72877C.1.pep
LCHYDDIRVVFGNLSVVFRLLDIIICGYMSRKRGVPLMVTTQYEYSSERVYSPKLISRGGYFSVFSPGWMVMTDCRKKLGNWGWLLKAPXGHRKEGIS

SEQ ID NO: 174987 - protein, 38 aa, Oryza sativa
  Clone ID: PAT_MRT4530_72878C.1.pep
HGRDPYNLRLGHHQREALHPCSIRENSEIIELRNSDGI

SEQ ID NO: 174988 - protein, 83 aa, Oryza sativa
  unsure (1)..(83): unsure at all Xaa locations
  Clone ID: PAT_MRT4530_72879C.1.pep
AAWAGXXGGDREEEEEEKREKGEKRRRFXXSSXFXRLELYLVKRVAFFLLLLSWDGVIHGDAAALTSVIQTMFLMVVEXSDHY

SEQ ID NO: 174989 - protein, 294 aa, Oryza sativa
  unsure (1)..(294): unsure at all Xaa locations
  Clone ID: PAT_MRT4530_7287C.1.pep
TPRLVSSPRLASSPAACAEQPPISATRAAAPASCYFRRVLAGEQXKGRMSRRWSRTIYVGNLPGDIREREVEDLFYKYGRIVDIDLKIPPRPPGFAFVEFEDPRDAEDAIRGRDGYNFDGNRLRVELAHGGRGNSSSFNNSGGGGRRGGVSRHTEYRVLVTGLPSSASWQDLKDHMRNAGDVCYSEVYREGGGTIGIVDYTNYDDMKYAIRKLDDSEFKNAFSKAYIRVKEYDGKRSRSYSRSRSRSRGRSYSRSRSPSKSPKGKSSRRSASRSRSRSASSRSRSESKGRSPSR

SEQ ID NO: 174990 - protein, 108 aa, Oryza sativa
  Clone ID: PAT_MRT4530_72880C.1.pep
IDAITTSSSWSCMVSDKSSQPKLLRPPLGLGKVLVWVQPRSLLGYLFHCLVGQLANPLDTIACRHEWGGPVQLPCRLHPVFICLKAIMGAESLYITQLEPRAEFLQPG

SEQ ID NO: 174991 - protein, 113 aa, Oryza sativa
  Clone ID: PAT_MRT4530_72881C.1.pep
ARGFNEQAGAAVARLSSSLANATFRFGEAYDYFQDIIDRPAAHGFNNSRAPCCSLGRVRPTLTCTPLSTLCKDRSQYVFWDEYHPTDRANELIALETLRKLNITVSANNSTST

SEQ ID NO: 174992 - protein, 63 aa, Oryza sativa
  Clone ID: PAT_MRT4530_72882C.1.pep
MKHMGFAKDGPCWRAIRTKIAGRKPCCEGHGFRQEPDLTGRRNIIPFKIFTEIVLAAQVEGGK

SEQ ID NO: 174993 - protein, 105 aa, Oryza sativa
  unsure (1)..(105): unsure at all Xaa locations
  Clone ID: PAT_MRT4530_72883C.1.pep
VLMCTVHRYRISDGPHGKLVXPLYSGGAFDPLGLADDPEAFTELKVEXIKTGRLAMFSMCGFFVQAIVTGKGPLENLADHLYDTVNNNAWAYATNFVSGKSSGGR

SEQ ID NO: 174994 - protein, 230 aa, Oryza sativa
  Clone ID: PAT_MRT4530_72884C.1.pep
MAFFPNIPEAKQEIQSLYRNYAHLFDMSSDNAGVDSRIMRRQPAMLIDRSVFLTGSAIWTIALHYKAHIYRWLLQKFSAIQTTSSQRNAAVVGNIVIVLVNSFGILGSDFTTKHHGREVTFTVSAILMVFCQITIPLLVEAQIGLGGGTRILTGYTTATFLLTCVVSYGLSWSWGSLFCTIPGMKIQSAGQVIGMGLCFGLCFVQMQYFLLMLCRLKNAILAYYAMWIWS

SEQ ID NO: 174995 - protein, 189 aa, Oryza sativa
  Clone ID: PAT_MRT4530_72885C.1.pep
MGFAPHGGYWRRLRRLASAHALAPGRLAARRRAIGEETVRRVAAAMARDGAVGVRRLLHLASLDNVMASVFGVGLGELGAGAVSELEEMVGQGYELLGTFNWGDHLPLLRLLDVHGVRRKSRALASRVKVFVSKIIEEHKTRRDAKYGGCDGDGDFVDVLLGLEGEERLEEEDMVAVLWVTYKKQGYRL

SEQ ID NO: 174996 - protein, 46 aa, Oryza sativa
  Clone ID: PAT_MRT4530_72886C.1.pep
VPGEFYTSLNWAIGVIDIVSVKELYKKFGKITNYVHGGKRWNFLIN

SEQ ID NO: 174997 - protein, 835 aa, Oryza sativa
  Clone ID: PAT_MRT4530_72887C.1.pep
MPWDMMEQLPRITVPSRTYGNLTMVLSRFLCFRCQWVRLTGGGVMIDDSGMTTVDLNKVGYSDEPFVLANDVTQVFFVKDMSSKGKKGRGPDEPKRQVVLPGKRKIVGVEDKTDEDYDQLDGQPPFTVTIDPSILLSNEDIPYSRSDHKEGTIVRRKYVRSTVTADVMPPIPAGYSKVEVELVEGAYEDLELDYPGGDGSYTVSSSYSASTVSTSGSSIDSSSGSCIDSSSCSYTYSSASSSSGTFKVKGPPAPPPAHTGATKKAKVDAAKNKDPGYDCTQEELDAYVASEVKRQFKPRSPEKKIPIDPSVMNFFRGMSAPVKEAIKLSDYERTLKKASSGKSKPVSQLGEQPNQEIEPLVTGKDMTIEEFIIDTGLTTDQLLGVEPIEKAELKYMYELGKPLVKPELVQSLPTQMYKFHQLYVEMSATGREMIGARIRDPDFLQGDDILWINFKEIYKVYQLDAFDVSIMSCWTLMEIQRARRRRVFDTGFIDPRRVNVAMLDQYPQETEDNLIHLLTAQHYKTFILLPYNTEFHWVLLLFDLSACTVNVYDSMDKKESMFDKPERAEDRIYLVLRRRQDVERPYFAGRNLCIATSSTSTQPMQRRSATTAWCPCIVVKPRSSFRASTMSFSPPRQGYEMPSGRDALHLVRSESSCCPSVMLSLYYAKVRCRPSVMLSLFVEINAVAHLRIGASLVYVNMKKEWCSSLGNDHRRQQDLVRRAPRSRQVHSLHYPIHDSRAPQQLVVFGSGQRPLVITTSPPPVGREEAPDPLPIAPSPTPLPPRAAAATALFPARLPTPHGGGSGLFPSLPRRECHQGEEKTPVPRAPLLTEEE

SEQ ID NO: 174998 - protein, 92 aa, Oryza sativa
  Clone ID: PAT_MRT4530_72888C.1.pep
MASISGAMEDWVSAPDRFRNGEFSNILVKITDNLPHSLPPSSTLVNLTPPRKAGHWRLWQRQIRYLYVKLLRLQSTPHAVRPRINVRVRSTQ

SEQ ID NO: 174999 - protein, 900 aa, Oryza sativa
  Clone ID: PAT_MRT4530_72889C.1.pep
MADRDEEQILYDTIAEGSSQYWNEEEGNEDPNQYLNEEGNVERDAEGNQQGHVERDVEGNQEEEASGEQGQAMMERNKENAAKKKYHHHLGSGGYSVAMPKWEQMEASLIERGIEPATANWPERSKFWYYAHGGTLDPADGSLVFGYQIQEAARRLTDAVEASSQGTFRPDRDRDELTLALQTPEHPGRTRGKGVIPWKIGFKEDIHTYRSRMRSKRDTEAKIADLEFRVSSYELNMQEEVARKVDERMAAHRSHDPQPTIPPAMVSPSGNRSSCASTGQVGSQSMDAMQTQDESTCPVDDITQRTPCELHIPFKNLSIKVASGIAIPTDPLGTYHCRPIPAGYSKVEVELVEGAYEYLELDYPTGDGETHLRDTCHAIILWRRRYIILPGRQAASRAPSPPAPPSPPQDPAPSPPHAPPAPSPPQAPASTPPQDPAPTPPRAPTPTPPQAPLPAPSKSRAPPAPPLAHTRATKKVKVDAAKNKDPGYDCTQEELDAYVASEVKRQFKPRSPEKKIPIDPSVRNFFRGMSASVKEAIKLSDYERTLKKASSGKSKPVPQLGEQPNQEIEPLVTGKEMTIEQFITDTGLTTDQLLGVAPIEKAEVKYMYELGKPLVKPELLQSLPTQMYKFHQLYMEMSATGREMIGARIRDTDFLQGDDILWINFRGIYELYQLDALDVSIMSCWILMEIQRARRRRVFDTGFIDPRKVNVAMLDQYPQETEDNLVHLLKAQHYKTFILLPYNTEFHWVLLLIDLEACTVNVYDSMDKKESTFDKVFELIDRAWYRFRHLVRGKWRERLRRKFKFPCAKQKQGTNLCGYYVCEYCHCLADQIITTRELDFILMRDNLTTHKEFIAAVQEQLMGFINEEILDPKGEFYYDGNTIHRSLASELAASTTTSKS

SEQ ID NO: 175000 - protein, 828 aa, Oryza sativa
  Clone ID: PAT_MRT4530_7288C.1.pep
MAEHKPLPGRPKREGEGASKRKAKSGGFESMGLCEEVYRGVRHKGYRVPTPIQRKAMPLILAGHDIAAMARTGSGKTAAFLVPMIQRLRRHDAGAGIRALILSPTRDLATQTLKFAQQLGKFTDLKISLIVGGDSMESQFEELAENPDIIIATPGRLVHHLAEVEDLNLRTVEYVVFDEADSLFSLGLIQQLHDILHKLSDTRQTLLFSATLPQALADFAKAGLRDPQIVRLDLDKKISPDLKLAFFTLRQEEKLAALLYLVRERISSEEQTIIFVSTKHHVEFLNILFREEGLEPSLSYGAMDQEARNIHISKFRARKTMILIVTDVAARGLDIPLLDNVVNWDFPAKPKLFVHRVGRVARQGRSGTAYTFVTSEDMAYLLDLHLFLSKPLRPAPTEEELLKDMEGMNLKIDRALANGETVYGRFPQTIIDLVSDGIKEVINGCTDLIALEKPCTNAFHLYLKTRPMPSTESIRRVKDLPREGLHPIFRDVLGSDELSALAFSERLKSFRPKQTILEAEGEAARGSNQWLDVMKKKREVHEGIINLVHQKNNVDHEPKEELVENISNWERKDVCGNKRKLQSFRDEEYYISSVPQNQHLEAGLSVRANEGFVENRLDAAVLDLVDDETSGMQAQKTRYHWKKNKFVKLNSGDRVTATGKIKTESGAKLKPTKTGIYKKWQQKTHRSIDTGRKFGGFAEEGASTTGSHQRGNRKHTAVGRGRRYIPNADVPSEIRNPEQIQKSRQQKAMDIARMKNRSTKESKFQKFQKNNRRHDGPLKDGKFQKNRRPDGNGKNRRPDGNGKGRGKGKGNANGFGKGKGKMKGKGTR

SEQ ID NO: 175001 - protein, 767 aa, Oryza sativa
  Clone ID: PAT_MRT4530_72890C.1.pep
MADRDEEQILYDTIAEGSSQYWNEEEGNEDPNQYLNEEGNVERDAEGNQQGHVERDVEGNQEEEASGSQPSVGQKRARGQRGAAKKLEGRHIITEVEEDGRPSAPAEAAKNYVRHSGWVVRDNVPISTVYWRRTRARGDHESFVPDSEKEMLWTTMLETFTLPAGTEDKVKRWTLKKMAEQFQSFKGDLYQKYILKGQTPNFDTFPKLRDHWDEFVAYKTGEQGKAMMERNKENAAKKKYHHHLGSGGYSVAMPKWEQMEASLIERGIEPATANWPERSKFWYYAHGGTLNPADGSLVFGYQIQEAARRLTDAVEASSQGTFRPDRDRDELTLALQTPEHPGRTRGKGVIPWKIGFKEDIHTYRSRMRSKRDTEAKIADLEFRVSSYELNMQEEVARKVDERMAAHRSHDPQPTIPPAMVSPSGNRSSCASTGQVGSQSMDAMQTQDESTCPVDDITQRTPCELHIPLKNLSIKVASGMAIPSVRNFFRGMSASVKEAIKLSDYERTLKKASSGKSKPVPQLGEQPNQEIEPLVTGKEMTIEQFITDTGLTTDQLLGVTPIEKAEVKYMYELGKPLVKPELLQSLPTQMYKFHQLYMEMSATGREMIGARIRDTDFLQGDDILWINLRGIYELYQLDALDVSIMSCWILAWYRFRHLVRGKWRERLRRKFKFPCAKQKQGTNLCGYYVCEYCHCLADQIITTRELDFIRMRDNLTTHKEFIAAVQEQLMGFINEEILDPKGEFYYDGNTIHRSLASELAASTTTSKS

SEQ ID NO: 175002 - protein, 121 aa, Oryza sativa
  Clone ID: PAT_MRT4530_72891C.1.pep
MNSRRDFRSHRAALFDGIEEGAIRSSAYSSQIHEHENDQAMDSLHDRVSVLKRLTGDIHEEVENHNRMLDRMGNDMDASRGFLSGTVDKFKMVFETKASRRMATMVASFISVFFLIYYLTK

SEQ ID NO: 175003 - protein, 649 aa, Oryza sativa
  Clone ID: PAT_MRT4530_72892C.1.pep
MVKDLKVVFGKGPGSQPIESEDGHAAMWKKNSIFWELPYYEFLDVRHAIDVMHLTKNLCVNLLGFLGVYGKSKDTLEARNNLKHMEQRGDLHPEPKEKGSHYLSPASYTLSKAEKESMFECLESIKVPSGYSTNIKRIISTKEKKFTNLKSHDCHVLMTQLLPVVIRGILPDNVRATITKLCAFMNTISLKVASGMAIPTDPSGTYHCRRPIPAGYSKVEVELVEGAYEDLELDYPGGDGGTSSSLGDKRAPLAPPPAHTRATKKAKVDAAKNKDPRYDCTQEELDAYVASEVKRQFKPRSPEKKIPIDPSVRNFFRGMSAPVKEAIKLSDYERTLKKAFSGKSKPVPQLGEQPNQEIEPLVTGEDMTIEEFITDTGLTTDQLLGVEPIEKAEVKYMYELGKPLVKPELVQSLPTQMYKFHQLYMEMSATGREMIGARIRDPDFLQGDDILWINFKGIYELYQLDALDVSIMSCWILMEIQRARRRRVFDTGFIDPRKVNVAMLNQYPQDTEDNLVYLLKAQHYKTFILLPYNTEFHWVLLLFDLSACTVNCAKQKQGTNLCGYYVCEYCHCLADQIITTRELDFYETIQGGALRMPLPMLGHLQFVKAAAAQMGKKGAAHVCITGGSSTDVKKTVAAQMGKKEATTHA

SEQ ID NO: 175004 - protein, 1054 aa, Oryza sativa
  Clone ID: PAT_MRT4530_72893C.1.pep
MPLPARHAAAFAAAQRRRRMPTPRRRRRRHAAAAAATPPRQPPPRCRHTAVNERERERSNERERERTRQRTLPRERERERERSNERDIRGQRGAAKKLEGRHIITEVEEDGRPSAPAEAAKNYVRHSGWVVRDNVPVSTVYWRRTRARGDHESFVPDSEKEMLWTTMLETFTLPAGTEDKVKRWTLKKMAEQFQSFKGDLYQKYILKGQTPNFDTFPKLRDHWDEFVAYKTGEQGQAMMERNKENAAKKKYHHHLGSGGYSVAMPKWEEMEASLIERGIEPATANWPERSKFWYYAHGGTLNPADGSLVFGDQIREAARRLTDAVEASSQGTFRPDRDREELTLALQTPEHPGRTRGKGVIPWKIGFKEDIHTYRSRMRSKRDTEAKIADLEFRVSSYELNMQEEVARKVDERMAAHRSHDPQPTIPPAMVSPSGNRSSCASTGQVGSQSMDAMQTQDESTCPVDDITQRTPCELHIPFKNLSIKVASGMAIPTDPSGTYHCRPIPAGYSKVEVELVEGPYEDLELDYPGGDGETHLRDTSHAIILWRRRYIILPGRQAASRAPSPLAPPSPPQDPAPSPPHAPPAPSPPQAPAPTPPQDPAPTPPRAPTPTPPQAPLPAPSKSRAPPAPSPAHTRATKKAKVDAAKNKDPGYDCTQEELDAYVASEVKRQFKPRSPEKKIPIDPSVRNFFRGMSASVKEAIKLSDYERTLKKASSGKSKPVPQLGEQPNQEIEPLVTGKEMTIEQFITDTGLTTDQLLGVAPIEKAEVKYMYELGKPLVKPELLQSLPTQMYKFHQLYMEMSATGREMIGARIRDTDFLQGDDILWINFRGIYELYQLDALDVSIMSCWILMEIQRARRRRVFDTGFIDPRRVNVAMLDQYPQETEDNLVHLLKAQHYKTFILLPYNTEFHWVLLLFDLSACTINVYDSMDKKESTFDKVFEFIDRAWYRFRHLVRGKWRERLRRKFKFPCAKQKQGTNLCGYYVCEYCHCLADQIITTRELDFIRMRDNLTTHKEFIATGQEQLMGFINEEILDPKGEFYYDGNTIHPVLSF

SEQ ID NO: 175005 - protein, 126 aa, Oryza sativa
  Clone ID: PAT_MRT4530_72894C.1.pep
APRRGAAARRPAAPTPSPPAAAPRRAPPGPSPSPPSPRASGPAAPAPSPAPPPATPPSTPPCIPRPSRTTSPTAETTPPSPSPSPSPSPSPPSRRAPRLGRPPRWCPAAAAAAARRRRRGPRIAPP

SEQ ID NO: 175006 - protein, 419 aa, Oryza sativa
  Clone ID: PAT_MRT4530_72895C.1.pep
MNERERTKQKTTSSSSLKPEWSLALEGIRTPQAPTPTPPQAPRPAPSKSRPPQASPPAPTRATKKAKVDAAKNKDLGYDCMQEELDAYVASEVRRQLKPRSPEKKIPIDPSVRNFFRGMSAPAKEAIKLSDYERTLKKASSGKSKPVPQLGEQPNQEIEPLVTGEDFGIEEFITDIGLTTDQLLRGTPIEKAEVKYMYELGKPLVKPEQLQSLPIQMYKFHQLYMEMSATGREMIGARIRDTDFLQGDDIIWINFKGIYELYQLDALDVSIMSCWILMEIQRARRRGVFDTGFIDPRKVNVAMLDQYPQATEDNLVHLLKAQHYKTFILLPNNTEAWYRFRHLVRGKWRERLRRKFNFPFIRMRDNLITHKEFIAAVQEQLMGFINEQILDPKGEFYYDENTIHRSLASEITTITTSKS

SEQ ID NO: 175007 - protein, 1050 aa, Oryza sativa
  unsure (1)..(1050): unsure at all Xaa locations
  Clone ID: PAT_MRT4530_72896C.1.pep
ENENDRTNESENEHVNVHCRENVNENENDRTNESENENDRTKTSENEGTNVNENKRTNVNENERTNVNELGNVNELGNVNERTNEDEQKTCCRSRPSSLSGRASPRRNWSRQVTIRGQRGAAKKLEGRHIITEVEEDGRPSAPAEAAKNYVRHSGWVVRDNVPVSTVYWRRTRARGDHESFVPDSEKEMLWTTMLETFTLPAGTEDKVKRWTLKKMAEQFQSFKGDLYQKYILKGQTPNFDTFPKLRDHWDEFVAYKTGEQGQAMMERNKENAAKKKYHHHLGSGGYSVAMPKWEEMEASLIERGIEPATANWPERSKFWYYAHGGTLNPADGSLVFGDQIREAARRLTDAVEASSQGTFRPDRDREELTLALQTPEHPGRTRGKGVIPWKIGFKEDIHTYRSRMRSKRDTEAKIADLEFRVSSYELNMQEEVARKVDERMAAHRSHDPQPTIPPAMVSPSGNRSSCASTGQVGSQSMDAMQTQDESTCPVDDITQRTPCELHIPFKNLSIKVASGMAIPTDPSGTYHCRPIPAGYSKVEVELVEGPYEDLELDYPGGDGSCTVSSSCSASTVSTSGSSTDSSSGSCTDSSSGSYTYSSASSSSGPSKSRAPPAPSPAHTRATKKAKVDAAKNKDPGYDCTQEELDAYVASEVKRQFKPRSPEKKIPIDPSVRKFFRGMSASVKEAIKLSDYERTLKKASSGKSKPVPQLGEQPNQEIEPLVTGKEMTIEQFITDTGLTTDQLLGVAPIEKAEVKYMYELGKPLVKPELLQSLPTQMYKFHQLYMEMSATGREMIGARIRDTDFLQGDDILWINFRGIYELYQLDALDVSIMSCWILMEIQRARRRRVFDTGFIDPRRVNVAMLDQYPQETEDNLVHLLKAQHYKTFILLPYNTEFHWVLLLFDLSACTINVYDSMDKKESTFDKVFEFIDRAWYRFRHLVRGKWRERLRRKFKFPCAKQKQGTNLCGYYVCEYCHCLADQIITTRELDFIRMRDNLTTHKEFIATVQEQLMGFINEEILDPKGEFYYDGXTIHRSLASELAATTTTLKS

SEQ ID NO: 175008 - protein, 964 aa, Oryza sativa
  unsure (1)..(964): unsure at all Xaa locations
  Clone ID: PAT_MRT4530_72897C.1.pep
MADRDEEQILYDTIAEGSSQYWNEEEGNEDPNQYLNEEGNVERDAEGNQQGHVERDVEGNQEEEASGSQPSVGQKRARGQRGAAKKLEGRHIITEVEEDGRPSAPAEAAKNYVRHSGWVVRDNVPISTVYWRRTRARGDHESFVPDSEKEMLWTTMLETFTLPAGTEDKVKRWTLKKMAEQFQSFKGDLYQKYILKGQTPNFDTFPKLRDHWDEFVAYKTGEQXGKAMMERNKENAAKKKYHHHLGSGGYSVAMPKWEQMEASLIERGIEPATANWPERSKFWYYARGGTLNPADGSVVFGYQIQEAARRLTDAVEASSQGTFRPDRDRDELTLALQTPEHPGRTRGKGVIPWKIGFKEDIHTYRSRMRSKRDTEAKIADLEFRVASGMAIPTDPSGTYHCRPIPAGYSKVEVELVEGAYEDLELDYPAGDGETHLRDTCHAIILWRRRYIILPGRQAASRAPSPPAPPSPPQDPAPSPPHAPPAPSPPQAPASTPPQDPAPTPPRAPTPTPPQAPLPAPSKSRAPPAPPLAHTRATKKAKVDAAKNKDPGYDCTQEELDAYVASEVKRQFKPRSLEKKIPIDPSVRNFFRGMSASVKEAIKLSDYERTLKKASSGKSKPVPQLGEQPNQEIEPLVTGKEMTIEQFITDTGLTTDQLLGVAPIEKAEVKYMYELGKPLVKPELLQSLPTQMYKFHQLYMEMSATGREMIGVRIRDTDFLQGDDILWINFRGIYELYQLDALDVSIMSCWILMEIQRARRRRVFDTGFINPRKVNVAMLDQYPQETEDNLVHLLKAQHYKTFILLPYNTEFHWVLLLIDLEACTVNVYDSMDKKESTFDKVFELIDRAWYRFRHLVRGKWRERLRRKFKFPCAKQKQGTNLCGYYVCEYCHCLADQIITTRELDFIRMRDNLTTHKEFIAAVQEQLMGFINEEILDPKGEFYYDGNTIHRSLASELAASTTTSKS

SEQ ID NO: 175009 - protein, 957 aa, Oryza sativa
  unsure (1)..(957): unsure at all Xaa locations
  Clone ID: PAT_MRT4530_72898C.1.pep
MADRDEEQILYDIIAEGSSQYWNEEEGNEDPNQYLNEEGNVERDAEGNQQGHVERDVEGNQEEEASGSQPSVGQKRARGQRGATKKLEGRHIITEVQEDGRPSAPAEAAKNYVRHNGWVVRDNVPVSTVYWRRTRARGDHESFVPDSEKEMLWTTMLETFTLPAGTEDKSFKGDLYQKYILKGQTPNFDTFPKLRDHCDEFVAYKTGEQGQAMMERNKENAAKKKYHHHLGSGGYSVAMPKWEQMEASLIERGIEPATANWPERSKFWYYAHGGTLNPADGSLVFGDQIREVARRLTDAVEASSQGTFRPDRDRDELTLALQTPEHPGRTRGKGVIPWKIGFKEDIHTYRSRMRSKRDTEAKIADLEFRVSSYELNMQEEVARKVDERMAAHRSHDPQPTIPPAMVSPSGNRSSCASTGQVGSQSMDAMQTQDESTCPVDDITQRTPCELHIPFKNLSIKVASGMAIPTDPSGTYHCRPIPAGYSKVEVELVEGAYEDLELDYPGGDGETHLRDTSHAIILWRRRYIILPGRQAASRAPSPPAPPSPPQDPAPSPPHAPPAPSPPQAPAPTPPQDPAPTPPRAPTPTPPQAPLPAPSKSRAPPAPPPAHTRATKKAKVDAAKNKDPGYDCTQEELDAYVASEVKRQFKPRSPEKKIPVDPSVRSFFRGMSASVKEAIKLSDYERTLKKASSGKSKPVPQLGEQPNQEIEPLVTGKEMTIEQFITDTGLTTDQLLGVAPIEKAEVKYMYELGKPLVKPELLQSLPTQMYKFHQLYMEMSATXMEIQRARRRRVFDTGFIDPRXFHWVLLLFDLEACTVNVYDSMDKKESTFDKVFELIDRAWYRFRQLVRGKWRERLRRKFKFPCAKQKQGNNLCGYYVCEYCHCLANQIITTRELDFIRMRDNLTTHKEFITAVQEQLMGFINEEILDPKGEFYYDGNTIHRSLASELAATTTTSKS

SEQ ID NO: 175010 - protein, 969 aa, Oryza sativa
  Clone ID: PAT_MRT4530_72899C.1.pep
MADRDEEQILYDTIAEGSSQYWNEEEGNEDPNQYLNEEGNVERDAEGNQQGHVERDVEGNQEEEAMQEDGRPSAPAEAAKNYVRHSGWVVRDNVPVSTVYWRRTRARGDHESFVPDSEKEMLWTTMLETFTLPAGTEDKVKRWTLKKMAEQFQSFKGDLYQKYILKGQTPNFDTFPKLRDHWDEFVAYKTGEQGQAMMERNKENAAKKKYHHHLGSGGYSVAMPKWEEMEASLIERGIEPATANWPERSKFWYYAHGGTLNPADGSLVFGDQIREAARRLTDAVEASSQGTFRPDRDRDELTLALQTPEHPGRTRGKGVIPWKIGFKEDIHTYRSRMRSKRDTEAKIADLEFRVSSYELNMQEEVARKVDERMAAHRSHDPQPTIPPAMVASGMAIPTDPSGTYHCRPIPAGYSKVEVELVEGAYEDLELDYPGGDGETHLRDTSHAIILWRRRYIILPGRQAASRAPSPPAPPSPPHDPAPSPPHAPPAPSPPQAPASTPPQDPAPTPPRAPTPTPPQAPLPAPSKSRAPPAAPPAHTRATKKAKVDAAKNKDPGYDCTQEELDAYVASEVKRQFKPRSPEKKIPIDPIVRNFFRGMSTSVKEAIKLSDYERTLKKASSGKSKPVPQLGEQPNQEIEPLVTGKEMTIEQFITDTGLTTDQLLGVAPIEKAEVKYMYELGKPLVKPELLQSLPTQMYKFHQLYMEMSATGREMIGARIRDTDFLQGDDILWINFTHIYELYQLDAVDVSIMSCWILMEIQRARRRRVFDTGFIDPRKVNVAMLDQYPQETEDNLVHLLKAQHYKTFILLPYNTEFHWVLLLFDLEACTVNVYDSMDKKESTFDKVFELIDRAWYRFRHLVRGKWRERLRRKFKFPCAKQKQGNNLCGYYVCEYCHCLANQIITTRELDFIRMRDNLTTHKEFITAVQEQLMGFINEEILDPKGEFYYDGNTIHRSLASELAASTTTSKS

SEQ ID NO: 175011 - protein, 210 aa, Oryza sativa
  Clone ID: PAT_MRT4530_7289C.1.pep
MSPVPSPHQSHHLGHGSRKEKRMRKVDTFAPHNDGHQWRKYGEKKINNCNFPRYYYRCTYKDNMNCPATKQIQQKDYSDPPLYSVTYYNEHTCNSAFLPLSPSEFQLQTASGKAVSICFESSGAQEPMTNASSPSSSAARRSTPSENKNQPLPRHSEAYSWGVGVVEQKPSCTELQSCSTECQDAFSAGTIPEETVDAGRFGSIRFFHFL

SEQ ID NO: 175012 - protein, 65 aa, Oryza sativa
  Clone ID: PAT_MRT4530_728C.1.pep
RPKALQAPLAKHQCPGIPSPPFFLLKKTNQPPPGAPPNKNGGFPPFFFKSFFCKTFVLKKSFFSP

SEQ ID NO: 175013 - protein, 147 aa, Oryza sativa
  unsure (1)..(147): unsure at all Xaa locations
  Clone ID: PAT_MRT4530_72900C.1.pep
MGQAHKPKEREGGVADWALTGXGATGQLDLVKPTWLPRRMGRERRPGGASDGRRRAAESGERRXTGVGTRHRKWHGTGATGEAGDGGGVPGKFERARGWWRRRESRSGGRPTAGEAQRRWPVVGHGQARQRRNGRRDARARGEAGGL

SEQ ID NO: 175014 - protein, 55 aa, Oryza sativa
  Clone ID: PAT_MRT4530_72901C.1.pep
AFTAISISSTVDVFSQRSEHLVVVFQTAAMSKKYILLVLEIVLCTMYMSFFLWIV

SEQ ID NO: 175015 - protein, 52 aa, Oryza sativa
  Clone ID: PAT_MRT4530_72902C.1.pep
MAGSKRPRGWRNISARQTNGQASVAPVDEVSASGQAKLLHLLSNGRSRTNRS

SEQ ID NO: 175016 - protein, 376 aa, Oryza sativa
  Clone ID: PAT_MRT4530_72903C.1.pep
MLASARGFWGRHRRKILVSLGVAGAGYAAYRYLDSHRRQLVRVEQRALEERAAEEIIKNQLQTHFENVQKISDTTTLPFAMHYLRSRIMEELDISHLTEKLMHGKGESSAPALTPKEKYDTWEKIKILSFTRTVSSIWAMTLLSLYVRVQVTILGRHLYLDFARVTDGAQLQEGSDTFSKSGHKDFLATADYLATYGINALITKMQHAATEILKEKQLKDPMGIDEVLETILQILKQFMGLCEDNSWINYLVPENANVYAQLMAVSSSGFDDSSLLKDVRKLDQLMSETRIVLSRNIMDRSLKKIASVVVEDLAVQIGAPIPPPGLPLAKLLAKVAQLSLPLLEEPDKNKHIQIIRSMPEVELFYTFLYANMPPET

SEQ ID NO: 175017 - protein, 40 aa, Oryza sativa
  Clone ID: PAT_MRT4530_72904C.1.pep
IPSGQIVLFPLISKGTRGDDTFHISYGKIQHTLLITGIER

SEQ ID NO: 175018 - protein, 60 aa, Oryza sativa
  Clone ID: PAT_MRT4530_72905C.1.pep
MTFVRYFWLVGPSSIHGGVGCQLFLCFVVFSSPEYEALPDFFGKDKNWFLLKFSRMIAIG

SEQ ID NO: 175019 - protein, 95 aa, Oryza sativa
  unsure (1)..(95): unsure at all Xaa locations
  Clone ID: PAT_MRT4530_72906C.1.pep
PSSXGGXLSXFSWXXISSSXPLRXNXTXEXFMNAVSFRIHAVGTXGGARRAPTEXXXXVAIXXFXXXRRNFLXCWHXRGPXLPLEXFAFNHXGMP

SEQ ID NO: 175020 - protein, 122 aa, Oryza sativa
  unsure (1)..(122): unsure at all Xaa locations
  Clone ID: PAT_MRT4530_72907C.1.pep
LPGESNRSGIGGFGHGGGGGYTKKIWDAIASWITCASMAPVSWTQSTTVHEWWEFLATCHTVPKLGIISLILLISWEIWNEXNRQIFRNKELSTAXLIAKIKDEAKAWATAGXAKRSAEMLP

SEQ ID NO: 175021 - protein, 45 aa, Oryza sativa
  Clone ID: PAT_MRT4530_72908C.1.pep
AQEEAHRLRGTRGFGQTLGSAKPPSCLLAICFHVDVQDYLPMMVT

SEQ ID NO: 175022 - protein, 73 aa, Oryza sativa
  Clone ID: PAT_MRT4530_72909C.1.pep
KTSEIIHTYISKLSLNQKRRGESRLIFMSSLHTWSIVRATPAASSGRARRRRRIGERCAVPTGRTAGGSPTSA

SEQ ID NO: 175023 - protein, 490 aa, Oryza sativa
  unsure (1)..(490): unsure at all Xaa locations
  Clone ID: PAT_MRT4530_7290C.1.pep
MEREFCGEMESQICQFGTFLEVNNQHSATPKGKTIPVKCTDCLPGVASRSLTVIPLEVPHDVLLSAREAKTQYNSTFEHNLSETNFVTGTYNGAHHANVKDVPPDIYETEFRHQFPRIETSFSIIGAHFLSSMVRRGRRKGVRYIEEDRDRSLTLSKRRDGLFKLANDLSLLTDASVAICLHDSNKAQFFGAPSVKPVVDAFVSEAEPFADEQLKAKLTSMQSELVQLENEEEEKDKKTEESIQRFKEAQEESLGMGMAKHLFSRLEDLSHDDMRELLDVLLPLQQDFKKRLPPLRRGXKLQIGGSSAWAHQQPSCSRFLASHRPFTPLLPGGTSGVPMIPPPPVPGSPWSQIFPLRPPLFPSPELVPSQQLPPVSPPQNTVAPPPMHAPLVQQPLTNQSSAVPLLTQWQMRFGDQPPAEVQACTPVEQPQNDNAVHTPTFSDSFLLELLADVSDDGIATAEPLCSPPIDDQFLADIDWLAELDTIDGNL

SEQ ID NO: 175024 - protein, 104 aa, Oryza sativa
  unsure (1)..(104): unsure at all Xaa locations
  Clone ID: PAT_MRT4530_72910C.1.pep
MQLNPKARTRRNKTKAKRXWRCAEIVLNVTLSMRGNHLEAYQPNPMLYTKSYCRNRLHHLTKSDSNLANPDYSXFLLCFRDNPHLXFRFDLIFLSDADITKFGC

SEQ ID NO: 175025 - protein, 66 aa, Oryza sativa
  Clone ID: PAT_MRT4530_72911C.1.pep
MASTTPPKRPLPSSSPLAVNEPSSSELVCLGSSSIQSRARAEPIKYSSFLTGSARARPSSSSTTEL

SEQ ID NO: 175026 - protein, 946 aa, Oryza sativa
  Clone ID: PAT_MRT4530_72912C.1.pep
MASSSPLKASSGVLVVVLLDDVGVDGAVALAQPVGEGEEPGPRRCTYPALPRGKSGGGLRVEVGRVRDGEVVPIPWARLDEDRRYVLNGGVAKMVRFTAEELRASMDKKDNIRNMSVIAHVDHGKSTLTDSLVAAAGIIAQDVAGDVRMTDTRADEAERGITIKSTGISLYYEMTDAALRSFEGKRDGNSYLINLIDSPGHIDFSSEVTAALRITDGALVVVDCIEGVCVQTETVLRQSLAERIKPVLTVNKMDRCFLELQQSGEEAYQAFSRVIESVNVTMAPYEDKNLGDCMVAPEKGTVAFSAGLHGWAFTLSNFAKMYKAKFKVDEAKMMERLWGENYFDHTTKKWTTTAPSTSSKTCQRGFVQFCYEPIRRIISACMNDDKENLWDMLTKLKITLKAEEKELTGKKLMKRVMQAWLPASDALLEMIVFHLPSPAKAQQYRVDTLYDGPLDDPYATAIRNCDPKGPLMVYVSKMIPASDKGRFFAFGRVFSGTVATGNKVRIMGPNFVPGEKKDLYVKTVQRTVIWMGKKQESVDDVPCGNTVAMVGLDQFITKNATLTDEKAVDAHPIKAMKFSVSPVVRKSVACKNASELPKLVEGLKRLAKSDPLVVCTIEESGEHVIAGVGQLHLEICIKDLQEDFMGGAEIIVGPPIITYRETVTKNSCRTVMSKSPNKHNRLYMEARPLDKEDLQQDEPSLCKAIDDERIGPKDDIKERGKILSEEFGWDKDLAKKIWAFGPETKGPNLLVDMCKGVQYLSEIKDSVVAGFQWASKEGALAEENMRGVCFELCDVTLHSDSIHRGGGQLIPTARRAMYAAQLTASPRLMEPMYQVDIQVPKTAVGNVYGVLNSRNGELVEESERTGTPLSNLRFYLPVAKSFDFTEKLRAETSGQAFPQCIFHHWQTMRSDPFQEGSEAAKVITDIRKRKGLKDIITPLSDYEDKL

SEQ ID NO: 175027 - protein, 577 aa, Oryza sativa
  Clone ID: PAT_MRT4530_72913C.1.pep
MARRHGWQLPAHTLQVVAITVFFLLCIEFYAFFSPFLGKDLYQFIAIGVYSFLALSVLILYVRCTAIDPADPGIMITVNGALTYKSEEDCRKDDEAYQQEDYDEEALFCTLCNAEVRKNSKHCRSCDKCVDGFDHHCRWLNNCVGRKNYVTFLCLMAVSLAWLAVESGVGIAVFVRCFTDKAAIEDQIGEKLGYGLSRALFAAIGALGTALSMLASVPLGELFFFHMILIRKGITTYEYVVAMRAQSEPPGPSVNDEQQSLPSSPMSSAPTAFSGSSFARHYKGAWCTPPRIFIDQDEIIPHLQPGRVPSTVDPDSMNPTERAKHYPKRPVRISAWKLAKLDSNEAMKAAARARASSSVLKPVNTRAQYEADRCSSDNTSCRSSVMSVDIGNHINSRSVRNSQYKSSYPPSRASADDIELYPQTPSSFQSNSQTPTPISEHHPAKHFNPIYQTSANRSPFSAVASGVNEASVSDISTRRFGASNADRSSRSSVYWDQEAGRFVSSQANHGSSSRLPRSDLLYTGQSIFFGGPLMTDPATRSFRDPGGSSQRAGASRPHQLPVFVPSDPQKDRFSRLP

SEQ ID NO: 175028 - protein, 167 aa, Oryza sativa
  Clone ID: PAT_MRT4530_72914C.1.pep
MTDKRSSQQALTEGAVCHKRSAEECGVGGQRWEPLQQRVDPLSPGTLMGRSGPNDLVSARPSGGSKRVGRGGAKGITSGEIPLYVATKMSPVQGNSPFIPSPEEYAKAAVRCIGYEPRCVPYWRHSIQWFFASLLPDSVLNLWRLQVGIRKRNQMKVLLGESDHGFS

SEQ ID NO: 175029 - protein, 331 aa, Oryza sativa
  Clone ID: PAT_MRT4530_72915C.1.pep
MYGWEMLSFNIHDGFLEAIVRGNRSGLLTAADYNNLCQCENLDDVKMHLTATEYGPYLQNEPSPLHTTTIVEKCTLKLVDEYKHMMCQATEPLSTFLQYITYGHMIDNVVLIVTGTLHERDVNELLEKCHPLGMFDSIASVAVAQNMRELYRLVLVDTPLAPYFSECITSEDLDDMNIEIMRNTLYKAYLEDFYKFCEKLGGATAEIMCDLLSFEADRRAVNITINRYPYGHEELAVCEDVDQVRGVMEKYPPYQAIFAKISYGESQMLDKAFYEEEVRRLCLSFEQQFHYAVFFAYIRLREQEIRNLMWISECVAQNQKNRVHDSVVFIF

SEQ ID NO: 175030 - protein, 132 aa, Oryza sativa
  Clone ID: PAT_MRT4530_72916C.1.pep
ITMSIATGRVKCRCTTQWIAWNPNYNLQTIWEQTLIWGLMHCQIQHHCPSTTAELLVVTSPPRVVPSSKHFIEHLQYLHNALSGTNSKKRWEAKVGGEPPRRRRGRPRRHPPSLRWMEEPPRLGGGSPGPSC

SEQ ID NO: 175031 - protein, 345 aa, Oryza sativa
  Clone ID: PAT_MRT4530_72917C.1.pep
LSFNIHDGFLEAIVRGNRSGLLTAADYNNLCQCENLDDVKMHLTATEYGPYLQNEPSPLHTAAVVEKCTLKLVDEYKHMMCQATEPLSTFLQYITYGHMIDNVVLIVTGTLHERDVNELLEKCHPLGMFDSIASLAVAQNMRELYRLVLVDTPLAPYFSECITSEDLDDMNIEIMRNTLYKAYLEDPAGFCEKLGGATAEIMCDLLSFEADRRAVNITINSIGTELTRDDRRKLYSNFGLLYPYGHEELAVCEDVDQVRGVMEKYPPYQAIFAKISYGESQMLDKAFYEEEVRRLCLSFEQQFHYAVFFAYIRLREQEIRNLMWISECVAHNQKNRVHDSVVFIF

SEQ ID NO: 175032 - protein, 100 aa, Oryza sativa
  Clone ID: PAT_MRT4530_72918C.1.pep
PAKAPFPLPNSNLANFPNLGRKTKPQVPWPNHSSGRLGLAAKPNSSNLNSKETNKTFVSKAPLRPPTNLTNFTNQFWFDSSSTLNSGILGLHKLPTSLGL

SEQ ID NO: 175033 - protein, 144 aa, Oryza sativa
  unsure (1)..(144): unsure at all Xaa locations
  Clone ID: PAT_MRT4530_72919C.1.pep
RTRGAHVKKGWLMAYFYNTKVLGGYGTKDPDHVEGAKVFKGHYMPGXRDFVNNHYPFGLSWGPVGGAHDSQPRATVPVHKVPGAKVPLPPALPXDPFLPQRNFLNSSXPKEGRSVVFKEISXGKALTTGLQKVTVDMKTKNRFD

SEQ ID NO: 175034 - protein, 74 aa, Oryza sativa
  Clone ID: PAT_MRT4530_7291C.1.pep
ISAWEGFFQDALEHPPKAFKGTLNDKQPGSYRSVHQLKGEQKNMSVTQGGTHGTQGPDDLDGISPLSRVYQKKL

SEQ ID NO: 175035 - protein, 704 aa, Oryza sativa
  Clone ID: PAT_MRT4530_72920C.1.pep
MGLCHGKPSQIPEPEAEEAAAAAGVAVAGAASPGPAAAAAAAAAAKPGTPKQPKFPFYLPSPLPASSYKSSPANSSVASTPARGGLKRPFPPPSPAKHIRALLARRHGSVKPNEAPIPEGGETEVGLDKGFGFSKHFFAKYELGDEVGRGHFGYTCSAKAKKGDHKGHDVAVKVIPKAKYLVERWLIQARGYWKKGATFSRHFVFVLAPGVLVIIVGSIDWLHAMLMVSTLVEFLVPPPSFVLTLPSSGSGRVNGADDPLWIDLQMTTAIAIEDVRREVRILSSLTGHSNLVQFYDAFEDEDNVYIVMELCKGGELLDRILARGGKYSEEDAKVVMVQILSVVSFCHLQGVVHRDLKPENFLFTSKDENSALKVIDFGLSDFVKPDERLNDIVGSAYYVAPEVLHRSYGTEADMWSIGVIAYILLCGSRPFWARTESGIFRAVLKAEPSFDEAPWPTLTAEAKDFVKRLLNKDYRKRMTAAQALSHPWIRNSQQVKIPLDMIIYKLMRAYISSSSLRKSALRALAKTLTANQLFYLREQFELLGPNKNGYISLQNLKTALVKNSTDAMKDSRVIDFVNTVCTLQYRKLDFEEFAASAVSVYQMEALETWEQHARRAYELFDKEGNRPIVIEELASPSGTNATISAPHCPLMMGESAFLLQGCIYPSICIYSWRYAYITNDLGRSAEAGDLNHFHSLKFRVSPEF

SEQ ID NO: 175036 - protein, 894 aa, Oryza sativa
  unsure (1)..(894): unsure at all Xaa locations
  Clone ID: PAT_MRT4530_72921C.1.pep
MADRDEEQILYDTIAEGSSQYWNEEEGNEDPNQYLNEEGNVERDAEGNQQGHLERDVEGNQEEEASGNQPSVGQKRARGQRGAAKKLEGRHIITEVEEDGRPXAPAEAAKNYXVYWRRTRARGDHESFVPDSEKEMLWTTMLETFTLPAGTEDKVKRWTLKKMAEQFQSFKGDLYQKYILKGQTPNFDTFPKLRDHWDEFVAYKTGEQGKAMMERNKENAAKKKYHHHLGSGGYSVAMPKWEQMEASLIERGIEPATANWPERSKFWYYAHGGTLNPADGSLVFGYQIQEAARRLTDAVEASSQGTFRPDRDRDELTLALQTPEHPGRTRGKGVIPWKIGFKEDIHTYRSRMRSKRDTEAKIADLEFRVSSYELNMQEKVARKVDERMAAHRSHDPQPTIPPAMVTSGMAIPTDPSGTYHCRPIPAGYSKVEVELVEGAYEDLELDYPGGDAPSPPQAPASTPPQDPAPTPPRAPTPTPPQAPLPAPSKSRAPPAPPPAHTRATKKAKVDAAKNKDPGYDCTQEELDAYVASEVKRQFKPRSPKKKIPIDPTVRNFFRGMSASVKEAIKLSDYERTLKKASSGKSKPVPQLGEQPNQEIEPLVTGKEMTIEQFITDTGLTTDQLLGVAPIEKAEVKYMYELGKPLVKPELLQSLPTQMYKFHQLYMEMSATGREMIGARIRDTDFLQGDDILWINFRGIYELYQLDALDVSIMSCWILMEIQRARRRRVFDTGFIDPRKVNVAMLDQYPQETEDNLVHLLKAQHYKTFILLPYNTEAWYRFRHLVRGKWRERLRRKFKFPCAKQKQGTNLCGYYVCEYCHCLADQIITTRELDFIRMRDNLTTHKEFIAAVQEQLMGFINKEILDPKGEFYYDGNTIHRSLASELAASTTTSKS

SEQ ID NO: 175037 - protein, 1057 aa, Oryza sativa
  unsure (1)..(1057): unsure at all Xaa locations
  Clone ID: PAT_MRT4530_72922C.1.pep
MPPPPCHAAAAAAATPPGQPAPRCRHTAVNERERERSNERERERTRQQKTCCRSRPSSLSGRASPRRNWSRQMADRDEEQILYDTIAEGSSQYWNKEEGNEDPNQYLNEEGNVERDAEGNQQGHVEKDVEGNQEEEASGSQPSVGQKRARGQRGAAKKLEGRHIITEVEEDGRPSAPAEAAKNYVRHSGWVVRDNVPVSTVYWRRTRARGDHESFVPDSEKEMLWTTMLETFTLPAGTEDKVKRWTLKKMAEQFQSFKGDLYQKYILKGQTPNFDTFPKLRDHWDEFVAYKTGEQGQAMMERNKENAAKKKYHHHLGSGGYSVAMPKWEEMEASLIERGIEPATANWPERSKFWYYAHGGTLNPADGSLVFGDQIREAARRLTDAVEASSQGTFRPDRDRDELTLALQTPEHPGRTRGKGVIPWKIGFKEDIHTYRSRMRSKRDTEAKIADLEFRVSSYELNMQEEVARKVDERMAAHRSHDPQPTIPPAMVSPSGNRSSCASTGQVASGMAIPTDPSGTYHCRPIPAGYSKVEVELVXGAYEDLELDYPGGDGXYIILPGRQAASRAPSPPAPPSPPQNPAPSPPHAPPAPSPPQAPAPTPPQDPAPTPPRAPTPTPPQAPLLAPSKATKKAKVDAAKNKDPGYDCMQEELDAYVASEVKRQFKPRSPEKKISIDPSVRNFFRGMSASVKEAIKLSDYERTLKKASSGKSKPVPQLGEQPNQEIELLVTGKEMTIEQFITDTGLTTDQLLGVAPIEKAEVKYMYELGKPLVKPELLQSLPTQMYKFHQLYMEMSATGREMIGARIRDTDFLQGDDILWINFRGIYELYQLDALDVSIMSCWILMEIQRARRRKVFDTGFIDPRRVNVAMLDQYPQETEDNLVHLLKAQHYKTFILLPYNTEFHWVLLLFDLSACTVNVYDSMDKKESTFDKVFELIDRAWYRFRHLVRGKWRERLRRKFKFPCAKQKQGTNLCGYYVCEYCHCLADQIITTRELDFIRMRDNLTTHKEFIAAVQEQLMGFINEEILDPKGEFYYDGNTIHRSLASELSATTTTSKS

SEQ ID NO: 175038 - protein, 286 aa, Oryza sativa
  Clone ID: PAT_MRT4530_72923C.1.pep
MKSLPSICTVHPHAHTPTPPPPPVAGGSRPSPMTTTTTSGAPTPPRFKRSPHRKKRQPRTRRVAAGETIAAGKPPHPACTAVSLQSPFGPALPRDFFEVDALDLAPRLLGKLLRRDEVVLRITEVEAYRPNDSACHGRFGITARTAPVFGSGGHAYVYLCYGLHMMLNVVADKEGVGAAVLIRSCAPVSGLATIQQRRGQQTDKPLLLTGPGKVGQALGLSTDWSNHPLYTPGGLEVLDGPEPENILVGPRVGIEYASPEHVAAPWRFAVAGTPWISAPKNTLRPR

SEQ ID NO: 175039 - protein, 947 aa, Oryza sativa
  Clone ID: PAT_MRT4530_72924C.1.pep
MNENENDRTNESENEHVNVRCRENVNENENDRTNESENEHVNVRCRENVNENENDRTNESENENDRTKTSENEGTNVNENKRTNILYDTIAEGSSQYWNEEEGNEDPNQYLNEEGNVERDAEGNQQGHVERDVEGNQEEEASGSQPSVGQKRARGQRGAAKKLEGQHIITEVEEDGRPSAPAEVAKNYVRHSGWVVRDNVPVSTVYWRRTRARGDHESFVPDSEKEMLWTTMLETFTLPAGTEDKVKRWTLKKMAEQFQSFKGDLYQKYILKGQTPNFDTFPKLRDHWDEFVAYKTGEQGQAMMERNKENAAKKKYHHHLGSGGYSVAMPKWEQMEASLIERGIEPATANWPERSKFWYYAHGGTLNPADGSLVFGDQIREAVRRLTDAVEASSQGTSRMRSKRDTEAKIADLEFRVSSYELNMQEEVARKVDERMAAHRSHDPQPTISPTMVSPSGNRSSCASTGQVASGMAIPTDPSGTYHCRPIPAGYSKVEVELVEGAYEDLELDYPGGDGSCTVSSSCSASTVSTSGSSIDSSSGSCTDSSSCSYTYSPASSSSGTFKVKGPPAPPPAHTRATKKAKVDAAKNKDPGYDCTQEELDAYVASEVKRQFKPRSPEKKIPIDPSVRNFFRGMSASVKEAIKLSDYERTLKKASSGKSKPVPQLGEQPNQEIEPLVTGKEMTIEQFITDTGLTTDQLLGVAPIEKAEVKYMYELGKPLVKPELLQSLPTQMYKFHQLYMDMSATGREMIGARIRDTDFLQGDDILWINFRGIYELYQLDALDVSIMSCWILFHWVLLLFDLEACTVNVYDSMDKKESTFDKVFELIDRAWYRFRHLVRGKWRERLRRKFKFPCAKQKQGTNLCGYYVCEYCHCLADQIITTRELDFIRMRDNLTTHKEFIAAVQEQLMGFINEEILDPKGEFYYDGNTIHRSLASELAASTTTSKS

SEQ ID NO: 175040 - protein, 203 aa, Oryza sativa
  Clone ID: PAT_MRT4530_72925C.1.pep
HTCPRAAGRRRPRAPAPAPAAPPPRGPAAAGRRGLGQGGGTSRWTAGRLRRAPPPSPPLAFAPPPPAALAAPPPTARELQPAAAAYFGELEKALIHGTSAGAGVDHGMIQSDAYTESAGYLAARPPTLEIFPSWPMSHLQEPYSNSQSVGSTTDSSSAQNTMSQAELVSPASMRSDSGQEQQQQEVLMVTIDDYNYKQGLGAA

SEQ ID NO: 175041 - protein, 71 aa, Oryza sativa
  Clone ID: PAT_MRT4530_72926C.1.pep
LPTDRVNSHRFSSSVDKTRIRFFYPDLFVALDKYVETSRHDLYWPITVLCIHNIHSLINTEIFYHIYRGST

SEQ ID NO: 175042 - protein, 974 aa, Oryza sativa
  Clone ID: PAT_MRT4530_72927C.1.pep
MSVSVDGGDRCYPIVWSAGRGGGRVGDGVSVSRRCFLYQQMADRDEEQILYDTIAEGSSQYWNEEEGNEDPNQYLNEEGNVERDAEGNQQGHVERDVEGNQEEEASGSQPSVGQKRARRQRGAAKKLEGRHIITEVQEDGRPSAPAEAAKNYVRHSGWVVRDNVPVSTVYWRRTRARGDHESFVPDSEKEMLWTTMLETFTLPAGTEDKVKRWTLKKMAEQFQSFKGDLYQKYILKGQTPNFDTFPKLRDHWDEFVAYKTGEQGQAMMERNKENAAKKKYHHHLGSGGYSVAMPKWEEMEASLIERGIEPAIANWPERSKFWYYAHGGTLNPADGSLGTFRPDRDRDELTLALQTPEHPGRTRGKGVIPWKIGFKEDIHTYRSRMRSKRNTEAKIADLEFRVSSYELNMQEEVARKVDERMAAHRSHDPQPTIPPAMVSPSGNRSSCASTGQVASGMAIPTDPSGTYHCRPIPAGYSKVEVELVEGAYEDLELDYPGGDASTPPQDPAPTPPRAPTPTPPQAPLSAPSKSRAPPASPAGHTRATKKAKVDAAQNKDPGYDCTQEELDAYVASEVKRQFKPRSPEKKIPIDPSVRNFFRGMSASVKEAIKLSDYERTLKKASSGKSKPVPQLGEQPNQEIEPLVTGKEMTIEQFITDTGLTTDQLLGVAPIEKAEVKYMYELGKPLVKPELLQSLPTQMYKFHQLYMEMSATGREMIGARIRDTDFLQGDDILWINFRGIYELYQLDALDVSIMSCWICWILMEIQRARRQRVFDTGFIDPRKVNVAMLDQYPQETEDNLVHLLKAQHYKTFILLPYNTEFHWVLLLFDLEACTVNVYDSMDKKESTFDKVFELIDRAWYRFRHLVRGKWRERLRRKFKFPCAKQKQGTNLCGYYVCEYCHCLANQIITTRELDFIRMRDNLTTHKEFITAVQEQLMGFINEEILDPKGEFYYDGNTIHRSLTSELAASTATSKS

SEQ ID NO: 175043 - protein, 429 aa, Oryza sativa
  Clone ID: PAT_MRT4530_72928C.1.pep
MAPQPTCQTCVRNYLGSKEDPALSENPNQLAEQVTNQVAKTDNTVPGPNKEPKVNPDKSKNEAAEIQGTQSVEGTDTHKEKNKEFLNVMITGMKTPLRANNCPNLQNSINKSVSRENSMIKEGSCHKRKTLPSEVDMQDVPQCQTMQSCQNLPKSPTLKSKKIRHVPGFICFICHKIGHYMRHCPQKPYMDAPLQANMSTSRMPFYPQGSPNSPNVNAVRSTFPDDKRAKASCDMCQDIQEKKEMQEYKRRKVMSLEIQAKEDLCRKTNSPAQYYQKASQHSTSSGSTSRSTMSEPGQQATMINSNSHEGSNSVPCPTPSKRRGYKAGVECFICHEMGHYSWDCPQKAKMKCPQKVKSKRVQPTTSLPNVSGPKSSKSPNSGSASLTSPPVGQGRLNHVQVETNGKVVNLEQVEGAGEEQVPQARAEPQ

SEQ ID NO: 175044 - protein, 917 aa, Oryza sativa
  Clone ID: PAT_MRT4530_72929C.1.pep
MADRDEEQILYDTIAEGSSQYWNEEEGNEDPNQYLNEEGNVERDAEGNQQGHVERDVEGNQEEEASGSQPSVGQKRARGQRGAAKKLEGRHIITEVEEDGRPSAPAEAAKNYVRHSGWVVRDNVPVSTVYWRRTRARGDHESFVLDSEKEMLWTTMLETFTLPAGTEDKVKRWTLKKMAEQFQSFKGDLYQKYILKGQTPNFDTFPKLRDHWDEFVAYKTGEQGKAMMERNKENAAKKKYHHHLGSGGYSVAMPKWEQMEASLIERGIEPATANWPERSKFWYYAHGGTLNPADGSLVFGYQIQEAARRLTDAVEASSQGTFRPDRDRDELTLALSRMRSKRDTEAKIADLEFRVSSYELNMQEEVARKVDERMAAHRSHDPQPTIPPAMVSPSGNRSSCASTGQVASGMAIPTDPSGTYHCRPIPAGYSKVEVELVEGAYEDLELDYPGGDGETHLRDTCHAIILWRRRYIILPGRQAASRAPSPPAPPSPPQDPAPSPPHAPPAPSPPQAPASTPQDPAPTPPRAPTPTPPQAPLPAPSKSRAPPAPPLAHTRATKKAKVDAAKNKDPGYDCTQEELDAYVASEVKRQFKPRSPEKKIPIDPSVRNFFRGVAPIEKAEVKYMYELGKPLVKPELLQSLPTQMYKFYQLYMEMSATGREMIGARIRDTDFLQGDDILWINFRGIYELYQLDALDVSIMSCWILMEIQRARRRRVFDTGFIDPRKVNVAMLDQYPQETEDNLVHLLKAQHYKTFILLPYNTEFHWVLLLIDLEACTVNVYDSMDKKESTFDKVFELIDRAWYRFRHLVRGKWRERLRRKFKFPCAKQKQGTNLCGYYVCEYCHCLADQIITTREPDFIRMRDNLTTHKEFIAAVQEQLMGFINEEILDPKGEFYYDGNTIHRSLASELAASTTTSKS

SEQ ID NO: 175045 - protein, 125 aa, Oryza sativa
  Clone ID: PAT_MRT4530_7292C.1.pep
TDETTGSERAHRFPSVKVLLWSRDDVKPPDPVAFACLGLLSDVVAEEQGRLYLLNLTHQLGPRSLPIQNMGHARCAKRGEGDGPIQHCRLDRPLRGPEKWPTRTVNGRNPHVCTFASLSQSLQLY

SEQ ID NO: 175046 - protein, 463 aa, Oryza sativa
  unsure (1)..(463): unsure at all Xaa locations
  Clone ID: PAT_MRT4530_72930C.1.pep
MAPQPTCQTCVRNYLGSEEDPALSENPNQLAEQVTNQVAKTGNAVPGPKKEVATRNQHSSMDIYQILANQTQMLQEIAQNLASIQQQLLLPQPKVNPDKSKNEAAEIQGTQSVEGTDTHKEKNKEFLNVMITGMKTPLRANNCPNLQNSINESVSQENSMVKEGSCHKRKTLPSEVDMQDVPQCQTLQSCQNLSKTPTLKSKKIRHVPGFICFICHEIGHYMRHCPQKPYMDALLQANMSISRMPFYPQGSPNSPNVNAVRPTFPDDKRAKASCDMCQDIQEKKEMQEYKRRKVMSLEIQAKEDLCRKXTNSPAQYYQKASQHSTSSGSTSRSTMSEPGQQATMINSNSHEGSNSVPCPTPSKRRGYKAGVECFICHEMGHYSWCCPQKVKSKRVQPTTSLPNVSGPKSSKSPNSGSASLTSPPVGQGRLNHVQVETNGKVGNLEQVEGAGEEQVPQARAEPQ

SEQ ID NO: 175047 - protein, 915 aa, Oryza sativa
  unsure (1)..(915): unsure at all Xaa locations
  Clone ID: PAT_MRT4530_72931C.1.pep
MADRDEEQILYDTIAEGSSQYWNEEEGNEDPNQYLNEEGNVERDAEGNQQGHVERDVEGNQEEEASGSQPSVGQKRARGQRGAAKKLEGRHIITEVEEDGRPSAPAEAAKNYVRHSGWVVRDNVPVSTVYWRRTRARGDHESFVPDSEKEMLWTTMLETFILPAGTEDKVKRWTLKKMAEQFQSFKGDLYQKYILKGQTPNFDTFPKLRDHWDEFVAYKTGEQGKAMMERNKENAAKKKYHHHLGSGGYSVAMPKWEQMEASLIERGIEPATANWPERSKFWYYAHGGTLNPADGSLVFGYQIQEAARRLTDAVEASSQGTFRPDRDRDELTLALQTPEHPGRTRGKGVIPWKIGFKEDIHTYRSRMRSKRDTEAKIADLEFRVSSYELNMXEEVARKVDERMAAHRSHDPQPTIPPAMXPIPAGYSKVEVELVEGAYEDLELDYPRGDGXPAPSPPHAPPAPSPPQAPASTPQDPAPTPPRXPPAPPLAHTRATKKAKVDAAKNKDPGYDCTQEELDAYVASEVKRQFKPRSPEKKIPIDPSVRNFFRGMSASVKEAIKLSDYERTLKKASSGKSKPVPQLGEQPNQEIEPLVTGKEMTIEQFITDTGLTTDQLLGVAPIEKAEVKYMYELGKPLVKPELLQSLPTQMYKFHQLYMEMSATGREMIGARIRDTDFLQGDDILWINFRGIYELYQLDALDVSIMSCWILMEIQRARRRRVFDTGFIDPRKVNVAMLDQYPQETEDNLVHLLKAQHYKTFILLPYNTEFHWVLLLIDLEACTVNVYDSMDKKSLRLTRAWYRFRHLVRGKWRERLRRKFKFPCAKQKQGTNLCGYYVCEYCHCLADQIITTRELDFIRMRDNLTTHKEFIAAVQEQLMGFINEEILDPKGEFYYDENTIHRSLASELAASTTTSKS

SEQ ID NO: 175048 - protein, 79 aa, Oryza sativa
  Clone ID: PAT_MRT4530_72932C.1.pep
KKKKMFQINLGRKKKKYLKNPFKKKKKNYFENMNGGKNFWGEKNKSTPEFKNCGKKTYHWGFFLKERLKFTVFKPQRSS

SEQ ID NO: 175049 - protein, 1002 aa, Oryza sativa
  Clone ID: PAT_MRT4530_72933C.1.pep
MADRDEEQILYDTIAEGSSQYWNEEEGNEDPNQYLNEEGNVERDVEGNQEEEASGSQPSVGQKRARGQRGAAKKLEGRHIITEVEEDGRPSAPAEAAKNYVRHSGWVVRDNVPVSTVYWRRTRARGDHESFVPDSEKEMLWTTMLETFTLPAGTEDKVKRWTLKKMAEQFQSFKGDLYQKYILKGQTPNFDTFPKLRDHWDEFVAYKTGEQGQAMMERNKENAAKKKYHHHLGSGGYSVAMPKWEQMEASLIERGIEPATANWPERLKFWYYAHGGTLNPADGSLVFGDQIREAARRLTDAVEASSQGTFRPDRDRDELTLALQTPEHPGRTRGKGVIPWKIGFKEDIHTYRSRMRSKRDTEAKIADLEFRVSSYELNMQEEVARKVDERMAAHRSHDPQPTIPPAMVSPSGNRSSCASTGQVASGMAIPTDPSGTYHCRPIPAGYSKVEVELVEGAYEDLELDYPGGDGETHLRDTCHAIILWRRRYIILPGRQAASRAPSPPAPPSPPQDPAPSPPHAPPAPSPPQAPASTPPQDPAPTPPRAPTPTPPQAPLPAPSKSRAPPAPPPAHTRATKKAKVDAAKNKDPGYDCTQEELDAYVASEVKRQFKPRSPEKKIPIDPSVRNFFRGMSASVKEAIKLSDYERTLKKASSGKSKPVPQLGEQPNQEIEPLVTGKEMTIEQFITDTGLTTDQLLGVAPIEKAKVKYMYELGKPLVKPELLQSLPTQMYKFHQLYMEMSATGREMIGARIRDTDFLQGDDILWINFRGIYELYQLDALDVSIMSCWILMEIQRARRRRVFDTGFIDPRKVNVAMLDQYPQETEDNLVHLLKAQHYKTFILLPYNTEFHWVLLLIDLEACTVNVYDSMDKKESTFDKVFELIDRAWYRFRHLVRGKWRERLRRKFKFPCAKQKQGTNLCGYYVCEYCHCLADQIMTTRELDFIRMRDNLTTHKEFIAAVQEQLMGFINEEILDPKGEFYYDGNTIHRSLTSELAASTTTSKS

SEQ ID NO: 175050 - protein, 902 aa, Oryza sativa
  unsure (1)..(902): unsure at all Xaa locations
  Clone ID: PAT_MRT4530_72934C.1.pep
MADRDEEQILYDTIAEGCSQYWNEEEGNEDPNQYLNEEGNVERDAEGNQQGHVERDVEGNQEEEASGSQPSVGQKRARGQRGAAKKLEGRHIITEVEEDGRPSAPAEAAKNYVRHSGWVVRDNVPVSTVYWRRTRARGDHESFVPDSEKEMLWTTMLETFTLPAGTEDKVKRWTLKKMAEQFQSFKGDLYQKYILKGQTPNFDTFPKLRDHWDEFVAYKTGEQGKAMMERNKENAAKKKYHHHLGSGGYSVAMPKWEQMEASLIEMGIEPATANWPERSKFWYYAHGGTLNPADGSLVFGYQIQEAARRLTDAVEASSQGTFRPDRDRDELTLALQTPEHPGRTRGKGVIPWKIGFKEDIHTYRSRMRSKRDTEAKIADLEFRVSSYELNMQEEMARKVDERMAAHRSHDPXPTIPPAMVASGMAIPTDPSGTYHCRPIPAGYSKVEVELVEGAYEDLELDYPGGDGXPAPTPPRAPTPTPPQAPLPAPSKSRAPPAPPLAHTRATKKAKVDAAKIKDPGYDCTQEELDAYVASEVKRQFKPRSPEKKIPIDPSVRNFFRGMSASVKEAIKLSDYERTLKKASSGKSKPVPQLGEQPNQEIEPLVTGKEMTIEQFITDTGLTTDQLLGVAPIEKAEVKYMYELGKPLVKPELLQSLPTQMYKFHQLYMEMSATGREMIGARIRDTDFLQGDDILWINFRGIYELYQLDALDVSIMSCWILMEIQRARRRRVFDTGFIDPRKVNVAMLDQYPQETEDNLVHLLKAQHYKTFILLPYNTEFHWVLLLIDLEACTVNVYDSMDKKESTFDKCAKQKQGTNLCGYYVCEYCHCLADQIITTRELDFIRMRDNLTTHKEFIAAVQEQLMGFINEEILDPKGEFYYDGNTIHRSLASELAASTTTSKS

SEQ ID NO: 175051 - protein, 198 aa, Oryza sativa
  unsure (1)..(198): unsure at all Xaa locations
  Clone ID: PAT_MRT4530_72935C.1.pep
NSARALKEAASTSIVSRNXWXNFWTRYPNLXCFDGSKDGPXDMDSVKIERMKFIDTVNSIIQQHSGIGLNKFSIRCNLLKXDSDILDRWIRFATASKAKIIDMNLCTNRNNKXPTKHLYDFPLEAFGDQDIPFIQCLFLNNVSIKPHSDIGFTKLRSLHLHCVQIIGDLSGLLFNCSSLEDLEVFACLGVTALNIPHQ

SEQ ID NO: 175052 - protein, 1073 aa, Oryza sativa
  Clone ID: PAT_MRT4530_72936C.1.pep
MPPHRPLTNENENDRTNESENEHVNVRCRENVNENENDRTNESENENDRSKTSENEGTNVNENKRTNVNENERRNVNELGNMADRDEEQILYDRIAEGSSQYWNEEEGNEDPNQYLNEEGNVERDAEGNQQGHVERDVEGNQEEEASGSQPSVGQKRARGQRGAAKKLEGRHIITEVQEDGRPSAPAEAAKNYVRHSGWVVRDNVPVSTVYWRRTRARGDHESFVPDSEKEMLWTTMLETFTLPAGTEDKVKRWTLKKMAEQFQSFKGDLYQKYILKGQTPNFDTFPKLRDHWDEFVAYKTGEQGQAMMERNKENAVKKKYHHHLGSGGYSVAMPKWEQMEASLIERGIEPATANWPKRSKFWYYAHGGTLNPADGSLGTFRADKDRDELTLALQTPEHPGRTRGKGVIPWKIDFKEDIHTYRSRMRSKRDTEAKIADLEFRVSSYELNMQEEVARKVDERMAAHRSHDPQPTIPPTMVSPSGNRSSCASTGQVASGMAIPTDPSGIYHCRPIPAGYSKVEVELVEGAYEDLELDYPGGDGETHLRDTSHAIILWRRRYIILPGRQAASRAPSPPAPPSPPQDPAPSPPHAPPAPSPPQAPASTPPEDPAPTPPRALTPTPPQAPLPAPSKSRAPPAPPPAHTRATKKAKVDAAKNKDPGYDCTQEELDAYVASEVKRQFKPRSPEKKIPIDPSVRNFFRGMSAHAKEAIKLSDYERTLKKASSGKSKPVPQLGEQPNQEIEPLVAGKEMTIEQFITDTGLTTDQLLGVAPIEKAEVKYMYELGKPLVKPELLQSLPTQMYKFHQLYMEMSATGREMIGARIRDTDFLQGDDILWINFRGIYKLYQLDALDVSIMSCWILMEIQRARRRRVFDTGFIDPRKVNVAMLDQYPHETEDNLVHLLKVQHYKTFILLPYNTEFHWVLLLFDLEACTINVYDSMDKKESTFDKVFELIDRAWYRFRHLVRGKWRERLRRKFKFPCAKQKQGTNLCGYYVCEYCHCLANQIITTRELDFIRMRDNLTTHKEFITAVQEQLMGFINEEILDPKGEFYYDRNTIHRSLASELAASTTTSKS

SEQ ID NO: 175053 - protein, 1034 aa, Oryza sativa
  unsure (1)..(1034): unsure at all Xaa locations
  Clone ID: PAT_MRT4530_72937C.1.pep
ATPPPPRHAAAATAPQRHAAAAVATPPXNRRPDAATPPLTNENENDRTNESENEHVNVRCRDNVNENENDRMNESENEHVNMADRDEKQILYDTIAEGSSQYWNEEEGNEDPNQYLNEEGNVERDAEGNQQGHVERDVEGNQEEEEASGSQPSVGQKRARGQRGAVKKLEGRHIITEVEEDGRPSAPAEAAKNYTFTLPAGTEDKVKRWTLKKMAKQFQSFKGDLYQKYILKGQTPNFDTFPKLRDHWDEFVAYKTGEQGQAMMERNKENAAKKKYHHHLGSGGYSVAMPKWEQMEASLIERGIEPATANWPERSKFWYYAHGGTLNPADGSLVFGYQIQEAARRLTDAVEASSQGTFRPDRDRDELTLALQTPEHPGRTRGKGVIPWKIGFKEDIHTYRSRMRSKRDTEAKIADLEFRVSSYELNMQEEVARKVDERMAAHRSHDPQPTIPPAMVSPSGNRSSCASTGQVGSQSMDAMQTQDESTCPVDDITQRTPCELHIPFKNLLIKVASGMAIPTDPSGTYHCRPIPAGYSKVEVELVEGAYEDLELDYPGGDGSCTVSSSCSASTVSTSGSSIDSSSGSCTDSSSCSYTYSPTAPPPAHTRATKKAKVDAAKNKDPGYDCTQEELDAYVASEVKRQFKPRSPEKKIPIDPSVRNFFRGMSASVKEAIKLSDYERTLKKASSGKSKPVPQLGEQPNQEIEPLVTGKEMTIEQFITDTGLTTDQLLGVAPIEKAEVKYMYELGKPLVKPELLQSLPTQMYKFHQLYMEMSATGREMIGARIRDTDFLQGDDILWINFRGIYELYQLDALDVSIMSCWILMEIQRARRRRVFDTGFIDPRKVNVAMLDQYPQETEDNLVHLLKAQHYKTFILLPYNTEFHWVLLLIDLEACTVNVYDSMDKKESTFDKVFELIDRAWYRFRHLVRGKWRERLRRKFKFPCAKQKQGTNLCGYYVCEYCHCLADQIITTRELDFIRMRDNLTTHKEFITAVQEQLMGFINEEILNPKGEFYYDGNTIHRSLASELAASTTTSK

SEQ ID NO: 175054 - protein, 100 aa, Oryza sativa
  Clone ID: PAT_MRT4530_72938C.1.pep
LKIWSLLAPLFFPEREFLMTQGRGSTFGVASFWRIFFFFKFFLKKKTRFLKGGGKKKPGVKQGQKVPARVKVKKFVYLKKFKTGHWACFLKKKNGDVFWV

SEQ ID NO: 175055 - protein, 30 aa, Oryza sativa
  Clone ID: PAT_MRT4530_72939C.1.pep
VEYVLLVDVPLIYSSTGYLLLPRLVPFPLP

SEQ ID NO: 175056 - protein, 70 aa, Oryza sativa
  Clone ID: PAT_MRT4530_7293C.1.pep
WIQGREAMTLPSLSKCHQKRQEGLKRTVALHLLVLCQLQTFPGQERLEGTNQLQIPSSVVFQSDGTQKWQ

SEQ ID NO: 175057 - protein, 68 aa, Oryza sativa
  Clone ID: PAT_MRT4530_72940C.1.pep
KGKKKRDSKDMHILTATKPPNPCIYSCHSCRIHQAKSNMNFRLNGRKEVQKSQAQLNFQYIVQILDVI

SEQ ID NO: 175058 - protein, 47 aa, Oryza sativa
  Clone ID: PAT_MRT4530_72941C.1.pep
MAEAPMRIAKPVALGRSRACSTSCAVARGHASSHPSCGCEDLPSRIT

SEQ ID NO: 175059 - protein, 141 aa, Oryza sativa
  Clone ID: PAT_MRT4530_72942C.1.pep
MELEDQGSDPTDAPLLHYHQSSISAYRPAFAPYRPLLLATPPCNVHRLRPPRRARRSTDGVPSRHPASSIPVVVSSFRQSYRMGVAAVAVVSSHPSCQSLASDVCTVTSTATSRCLTGLHHRPAVSPPPSTRGAALPRRLG

SEQ ID NO: 175060 - protein, 139 aa, Oryza sativa
  unsure (1)..(139): unsure at all Xaa locations
  Clone ID: PAT_MRT4530_72943C.1.pep
GFRKTTCPKAGGFPPNAENPGPPSPXRVPGPGVKKTPXPKSPGCRTPGPNYGTCRFPPPAPKVGRGPLGLMENKKGGTFFLGRPVPPGALGMGGPQTLGPPKKTGLIYFFGTAPVGGLPPRGFVMGIKPKPQPSKLFFV

SEQ ID NO: 175061 - protein, 58 aa, Oryza sativa
  Clone ID: PAT_MRT4530_72944C.1.pep
TLTLIRPAPPLGPPAPEPGVAAAASPAAAVLVSHRLCRPLAQAAARQIGGWRGAAAAS

SEQ ID NO: 175062 - protein, 66 aa, Oryza sativa
  unsure (1)..(66): unsure at all Xaa locations
  Clone ID: PAT_MRT4530_72945C.1.pep
RFFPSFHLVVTLXSXPXAWRPIHXXSEQVPRVVXLLXXRSSCSFKEKXKSXXHVGXEPNEXGFPGC

SEQ ID NO: 175063 - protein, 69 aa, Oryza sativa
  Clone ID: PAT_MRT4530_72946C.1.pep
MEKWPLACTTTTDNIAAVGKGEGRRETKTVARGGDQSCCCLPIFTWSWKKAEDDTSIMFIGAKSFKYCR

SEQ ID NO: 175064 - protein, 517 aa, Oryza sativa
  Clone ID: PAT_MRT4530_72947C.1.pep
MATRVKPPPPSRPVVAKSPPRRQPHPPPPPPPPLPRHALHRQHEREGEATMSVWSVGFINARLSQRTPVLGLRLWVLVAAGAAAAVVLALLIVVCLCRRCRRRRCSRLAPAPPHHGRSNRSLKQQQSMVSDKDIEEAARWPPPPSFQPPIEVIKAEQTAPLIMVEAARTSGETATSSGGSTRGWSTESGGSDAAEPEASRRGWGRRYTRRELEEATNRFAAENVLGEGGYGVVYKGILRDNTAVAIKNLHNNRGQAEKDFKVEVATIGRVRHKNLVSLLGYCEGACRLLVYEYMENSNLDKWLHHGDDEISPLTWDMRMHILLGTARGLAYLHEGLEPKIVHRDVKSSNILLDRHWNARVSDFGLAKLLCSERSYVTTRVMGTFGYVAPEYARTGMLNERSDVYSFGVLIMEIISGRTPVDYTRPAPEVNLVEWLKRMVAERRVEEVVDPRLPETPPPKVLKRAVLAALRCVDPDGGQRPTMGHVVHMLEDDLKFRDELQLARDLSPHASDSYEYEL

SEQ ID NO: 175065 - protein, 180 aa, Oryza sativa
  Clone ID: PAT_MRT4530_72948C.1.pep
MEGGGAGVEGVKETAWSARGWEVDGGRIHDHRGRTHPNLLSGSSIVMTTTARRRMATLLATVRMGGNNFDNDRGSAEAALLHSNLLLVFVEHWWGGGESHALVPRTGDGAPLALQPLEKLRLENEGRNKVIPNLLASSMEKEDGCSRVGGAVASDCVEDGCRYRGAASATCVECGGYGVE

SEQ ID NO: 175066 - protein, 239 aa, Oryza sativa
  Clone ID: PAT_MRT4530_72949C.1.pep
LLGIIHTEQVELYYTYLTRAPSLQLYYAHGPTHSLSVMAVVAPGGGGIVPAISVAGAGGFTRRRGIRRLAEHILHDLPLDVAPPGVWIAVALLPLVVVLAPVHVAHSLAPVIYWLYHFLCHPLICPGATGDWSTRTDERAVDGDDALDLWYPGFCSCQWIPASSISAPRESRTRDVAAARDGLRWRGSGGAAAAAVAFFELLAGLLLPGEDAPEQAGEDAGLDLAPARQWPPRVLLPLH

SEQ ID NO: 175067 - protein, 167 aa, Oryza sativa
  Clone ID: PAT_MRT4530_7294C.1.pep
MWEEARLCEEKGKRQRCARRCSGHRRRQENDEAAVLVKREHPGRAVAADAARREHLDRTAASDSVAAACHLWSAFDLMTRRKDPLDGLKLYSGDEHYWFTATMTSAATSPPAAARERKLAGERRREDANGGHQDVESDAANSPMTKTTAEDERTAAASRKRRRSPSA

SEQ ID NO: 175068 - protein, 265 aa, Oryza sativa
  unsure (1)..(265): unsure at all Xaa locations
  Clone ID: PAT_MRT4530_72950C.1.pep
MASLVAIAIAMALMVVQPGRQMTAFAARTSPAAAAEAFWRAAMPGAPMPDAIVELLHHEHGVASAGGKANGGGDGPPPPMNFNYDDYRALPRSDAPSPDALNRVAAVQNADENGVSSPPPPPPTVFFLEDAVRVGESLPLPRPAADATAAGXAAAATALPPLRLYTVRSVRAIEGSSFVVCRGETTAGAGVYGCRDAATGPARAYAVDAAGGGGGDAVIAAVVCHADTSRWDPDHAAFRLLGVRPGGAAVCRAVADAHILPTNKD

SEQ ID NO: 175069 - protein, 144 aa, Oryza sativa
  unsure (1)..(144): unsure at all Xaa locations
  Clone ID: PAT_MRT4530_72951C.1.pep
SSNYVFCFILLLADLLQKGVIDSHSVHPFCAQELETTNHILLHCVFIRQVWRLVLSSGWRWLAPSHGCSLXVWWPSSRACLPKCLRKGFDTLVLLVSWQLWKERKASVFDSSLSPVSVVLESILXKNRLWSLASAASFGDLLGT

SEQ ID NO: 175070 - protein, 283 aa, Oryza sativa
  Clone ID: PAT_MRT4530_72952C.1.pep
MASLVAIAIAMALMVVQPGRQMTAFAARTSPAAAAEAFWRAAMPGAPMPDAIVELLHHEHGVASAGGKANGGGDGPPPPMNFNYDDYRALPRSDAPSPDALNRVAAVQNADENGVSSPPPPPPTVFFLEDAVRVGESLPLPRPAADATAAGAAAATALPPLRLYTVRSVRAIEGSSFVVCRGETTAGAGVYGCRDAVTCPARAYAVDAAGWVGWDSLIAAVLRHSDFAGWDPYDAWRLLSLLAARQVPVDPDHAAFGLLGVRPGGAAVCRAVADAHILPTNKD

SEQ ID NO: 175071 - protein, 99 aa, Oryza sativa
  unsure (1)..(99): unsure at all Xaa locations
  Clone ID: PAT_MRT4530_72953C.1.pep
YRPMRVDRGRGDRDFTGGWGGVGRRERWDSKIESRPSRARARTGERXGSGREGDVAQETRERGAAAVAGRGGADWRWETGPTGGPQGSGGWLGRGLRPA

SEQ ID NO: 175072 - protein, 921 aa, Oryza sativa
  Clone ID: PAT_MRT4530_72954C.1.pep
MADRDEEQILYDTIAEGCSQYWNEEEGNEDPNQYLNEEGNVERDAEGNQQGHVERDVEGNQEEEASGSQPSVGQKRARGQRGAAKKLEGRHIITEVEEDGRPSAPAEAAKNYVRHSGWVVRDNVPVSTVYWRRTRARGDHESFVPDSEKEMLWTTMLETFTLPAGTEDKVKRWTLKKMAEQFQSFKGDLYQKYILKGQTPNFDTFPKLRDHWDEFVAYKTGEQGKAMMERNKENAAKKKYHHHLGSGGYSVAMPKWEQMEASLIEMGIEPATANWPERSKFWYYAHGGTLNPADGSLVFGYQIQEAARRLTDAVEASSQGTFRPDRDRDELTLALQTPEHPGRTRGKGVIPWKIGFKEDIHTYRSRMRSKRDTEAKIADLEFRVSSYELNMQEEMAREVDERMAAHRSHDPQPTIPPAMVSPSGNRSSCASTGQVASGMAIPTDPSGTYHCRPIPAGYSKVEVELVEGAYEDLELDYPGGDASTPQDPAPTPPRAPTPTPPQAPLPAPSKSRAPPAPPLAHTRATKKAKVDAAKIKDPGYDCTQEELDAYVASEVKRQFKPRSPEKKIPIDPSVRNFFRGMSASVKEAIKLSDYERTLKKASSGKSKPVPQLGEQPNQEIEPLVTGKEMTIEQFITDTGLTTDQLLGVAPIEKAEVKYMYELGKPLVKPELLQSLPTQMYKFHQLYMEMSATGREMIGARIRDTDFLQGDDILWINFRGIYELYQLDALDVSIMSCWILMEIQRARRRRVFDTGFIDPRKVNVAMLDQYPQETEDNLVHLLKAQHYKTFILLPYNTEFHWVLLLIDLEACTVNVYDSMDKKESTFDKCAKQKQGTNLCGYYVCEYCHCLADQIITTRELDFIRMRDNLTTHKEFIAAVQEQLMGFINEEILDPKGEFYYDGNTIHRSLASELAASTTTSKS

SEQ ID NO: 175073 - protein, 946 aa, Oryza sativa
  Clone ID: PAT_MRT4530_72955C.1.pep
MADRDEEQILYDTIAEGSSQYWNEEEGNEDPNQYLNEEGNVERDAEGNQQGHVERDVEGNQEEEDSGSQPSVGQKRARGQRGAAKKLEGRHIITEVEEDGRPSAPAEAAKNYVRHSGWVVRDNVPVSTVYWRRTRAHGDHESFVPDSEKEMLWTTMLETFTLPAGTEDKVKRWTLKKMAEQFQSFKGDLYQKYILKGQTLNFDTFPKLRDHWDEFVAYKTGGYSVAMPKWEQMEASLIERGIEPATANWPERSKFWYYAHGGTLNPADGSLVFGDQIREAARRLTDAVEASSQGMFQPDRDRDELTLALQTPEHPGRTRGKGVIPWKIGFKEDIHTYRSRMRSKRDTEAKIADLEFRVSRYELNMQEEVARKVDERMAAHRSHDPQPTIPPAMVSPSGNRSSCASTGQVASGMAIPTDPSGTYHYRLIPAGYSKVEIELVEGAYEDLELDYPGGDASCTVSSSCSASTVSTSGSSIDSSSGSCTDSSSCSYTYSPASSSSGTFKVKGPPAPPPAHTRATKKAKVDVAKNKDPGYDCTQEELDAYVASEVKRQFKPRSPEKKIPIDPSVRNFFRGMSASVKEAIKLSDYERTLKKASSGKSKPVPQLGEQPNQEIEPLVTGKEMTIEQFITDTGLTTDQLLGVAPIEKAEVKYMYELGKPLVKPELLQSLPTQMYKFHQLYMEMSATGREMIGARIRDTDFLQGDDILWINFRGIYELYQLDALDVSIMSCWILMEIQRARRRRVFDTGFIDPRKVNVAMLDQYPQETEDNLVHLLKAQHYKTFILLPYNTEFHWVLLLFDLEACTVNVYDSMDKKESTFDKVFELIDRAWYRFRHLVRGKWRERLRRKFKFPCAKQKQGTNLCGYYVCEYCHCLADQIITTRELDFIRMRDNLTTHKEFIAAVQEQLMGFINEEILDPKGEFYYDGNTIHRSLASKLAASTTTSKS

SEQ ID NO: 175074 - protein, 113 aa, Oryza sativa
  Clone ID: PAT_MRT4530_72956C.1.pep
MANDGEDFFVDDDVVVHAAVAPPPAIGDDDDYGMLNYRPAGCDDDGGGGFAMYEPMIIVFTVVVYLAVWLYGLSKLLPYVRARLHLLRLPDYYCIYAHLFWTGLIGLIISPRD

SEQ ID NO: 175075 - protein, 828 aa, Oryza sativa
  Clone ID: PAT_MRT4530_72957C.1.pep
MADRDEEQILYDTIAEGSSQYWNEEEGNADPNQYLNEEGNVERDAEGNQQGHVKRDVEGNQEEEASAKKLESRHIITEVEEDGRPIAPAEATKNYLRHSGWVVRDNVPVSTVYWQRTRARGDHESFVSDSEKEMLWTTMLETFTLPAGTEDKVKRWTLKKMAEQFQSFKGELYKKYILKRQTPNFDTFPKLRDHWDEFVAYKTGEQGQAMMERNKENAAKKKYHHHLGSGGYSVAMPKWEEMEASLIERGIEPATANWPERSKFWYYAHGGTLNLADGSLVFGDQIREAARRLTDTVEASSQGTFRPNRDRDELTLALKTPELPGRTRGKGVIPWKIGFKVDIHTYRSRMRSKRDTEAKIADLEFRVSSYELSMQEEVARKVDERMAAHRSHDPQPTIPPAMVSPSGNRSSCASTGQVASGMAIPTDPSGTYHCRPIPAGYSKVKVELVEGAYEDLQLDYPGGDAPTPPQYPAPTPPRAPTPTPPQAPLLAPSKSRALPAPPPAPTRATKKAKVDAAKNKDPGYDCTQEELDAHVASEVRRQLKPRSPEKKIPIDPSVRNFFRGMSAPAKEAIKLLNYERTLKKASSGKSKPVPQLGEQPNQEIEPLVTGKEMTIEQFITDTGLTTDQLLGVAPIEKAEVKYMYELGKPLVKPELLQSLPTQMYKFHQLYMEMSATGREMIEARIRDTDFLQGDDILWINFRGIYELYQLDALDISIMSCWILMEIQRARRRRVFDTGFIDTRRVNVAMLDQYPQETVDNLVHLLKVQHSKTFILLPYNTESGFAIAPLIKRVIVPRTSHGEEGAGATAHRHQRYDDEDEEKYVADDE

SEQ ID NO: 175076 - protein, 974 aa, Oryza sativa
  Clone ID: PAT_MRT4530_72958C.1.pep
MADRDVEQILYDTIAEGISQYWNEKEGNEDLNQYLNEEGNMERDAEGNQQGHVERDVEGNQEEEASGSQPSVGQKRARGQQGAAKKLKGRHIITEVEEDGHPSAPAEAAKNYVCHSGWVVRDNVPVSTVYWRRTRARGDHESFVPDSEKEMLWTTMLETFTLPTGTEDKVKRWTLKKMAEQFQSFKGDLYQKYILKGQTPNFDTFPKLRDHWDEFIAYKTGEQGQAMMEINKENAAKKKYHHHLGSGGYSVAMPKWEEMEASLIERGIEPATTNWSERSKFWYYAHGGTLNPADGSLVFGDQIREAARRLTDAVEASSQGTFRPDKDRDELTLALQTPEHPGRTRGKGVIPWKIGFKEDIHTYRSRMRSKRDTETKIADLEFRVSSHELRMQEEVARKVDEHMAAHRSHDPQPTIPPAMVVSGMAIPTDPSGTYHCRPIPAGYSKVEVELVEGAYEDLELDYPGGDSETHLRDTSHAIILWRRRYIILPGRQATSRAPSPPAPPSPPQDPAPYPPHAPPAPSPPQAPAPTPPQDPAPTPPRAPTPTPPQAPLPAPSKSRAPPAPPPAHTRATKKAKVDAAKNKDPGYDCTQEELDTYVASEVKRQFKPRSLEKKIPIDPSVRNFFRDQLLGVEPIVKAELKYMYELSKPLVKPELVQSLPTQMYKFHQLYIEMSATGREMIGARIRHPDFLQGDDILWINFKGIYEVYQLDALDVSIMSCWILIEIQRARRRRVFDTGFIDPRRVNVAMLDQYPQETEDNLVHLLKAQHYKMFILLPYNTEFHWVLLLFDLSACTVNVYDSMDKIESTFDKVFELIDRAWYRFRHLVRGNWRERLRRRFKFPYAKQKQGTNLCGYYVCEYCHCLADQIITTRELDFIRMRDNLTTHKEFIAAVQEQLMGFINEEILDPKGEFYYDGNTIHRPTGEVGPLYAGWDEAVGARARKLLGGDGVARGGEMEEDSLTPARPWLQLLRHR

SEQ ID NO: 175077 - protein, 347 aa, Oryza sativa
  Clone ID: PAT_MRT4530_72959C.1.pep
MVRNSAVKGGFSKYQEGIGKRGEEIQHINPRRSTNQDLTNQEVNKIIQLKPNSFPVGIDVENPFMYPISEAQLPTAECPTGTIPILCNNRQENISTKNTDAIVTSQQQEVAGIKYFDDIYGTQATINIYEPMVKHHWDLSGSWIQIENGPDVIGAGSWVSPSFSGDSFARFHISWRDEVQNKSCNNHKCPGFVQVSSSVVLGGRIQPVSVYNGPQYAIKFLIFKDPKTENWWLVYGEEKTAIGYWPSSQFSYMKEMASKALWGGYVQGPTASEDSPQMGSGHFASEGYGKAAFVRDIQVVNDDNMRVIPNPVKADPGSTNRRKYTYEYYGHNPNGMHVYYGGPGSYS

SEQ ID NO: 175078 - protein, 104 aa, Oryza sativa
  Clone ID: PAT_MRT4530_7295C.1.pep
MALACASRRLLAGAGTPARSFHSQPYQAKVGVVEFLNGVGKGVETHAAKVEEAVGGDLQRLLETRTLRLKKLGIPCKHRKLILSFAHKYRLGLWKPQAEAKKAQ

SEQ ID NO: 175079 - protein, 996 aa, Oryza sativa
  unsure (1)..(996): unsure at all Xaa locations
  Clone ID: PAT_MRT4530_72960C.1.pep
AARGAPPPLRCRHSVVPLPPHRERERANECEREQEKXCRSRPSSRSGRASPRRNSRRQETCFLYEQMADRDEEQILYDIIAEGSSQYWNEEEGNEDPNQYLNEEGNVERDAEGNQEGHVERDVEGNQEKEVSGSQPSIGQKRARGQRGAPKKLEGRHIITEVEEDGRPSAPAEAAKNYTLTLPAGTEDKVQRWTLKKMAEQFQSFKGDLYQKYILNGQTPNFDTFPKLRDHWDEFVAYKTGEQGQAMIERNKENAAKKKYHHHLGSGGYSVAMPKWEEMEASLLERGIEPATANWPERSKFWYYAHGGMLNPADGLLGTFRPDRERDELSLALQTPEHPGRTRGKGVIPWKIGFKEDIHTYRSQMRSKRDTEAKIADLEFRVSSYECSMQEEVARKVDERMAAHRSHDPQPTIPPTMVSPSGNRSSCASTGQVGSQSMDAMQTQDESTCPVDDITQRTPCELHIPFKNLSIKVASGMAIPTDPSGTYHCRPIPAGYSKVEVELVEGAYEDLELDYPGGDGETHLRDTSHAIILWHRRYIILPGRQAASRAPSPLAPPSPPQDPAPSPPHAPAPSLPQAPAPTPLQAPAPTPPRAPLPAPSKSRAPQAPPLAHTWATKKAKVDAAKNKDPGYDCTQEELDAYVASEVKRQFKPRSPEKNIPIDPSVRNFFRGMSAPAKEAIKLSDYERTLKKASSRKSKPVPQLGEQPNQEIEPLVTGEEMTIEEFITDTGLTTDQLLGVAPIEKAEPELVQSLPTQMYKFHQLYMEISATGREMIGARIRDIDFLQGDDILWINFKGIYELYQLDALDISIMSCWILMEIQRARRRGVFDTGFIDPRNVNVAMLDQYPQATEDNLVHLLKAQHYKTFILLPYNTEFHWVLLLFDLSACTVNVYDSMNKKESTFDKVFELIDRAWYWFRHLVRGNWRERLRRKFKFPFIRMRDNLTTHKKFIAAVQEQLMGFINEQILDPKGEFYYDGNTIHKSLASKLATTTTSKS

SEQ ID NO: 175080 - protein, 63 aa, Oryza sativa
  Clone ID: PAT_MRT4530_72961C.1.pep
MATSMITLPLVAPARAKGLSSISRRGSSLAIGCSGGKKIKTDKPYRIGGGVSVNIDAYGMKST

SEQ ID NO: 175081 - protein, 973 aa, Oryza sativa
  unsure (1)..(973): unsure at all Xaa locations
  Clone ID: PAT_MRT4530_72962C.1.pep
MTYRLSNYFLYEQMADRDEEQILYDTIAEGSSQYWNEEEGNEDPNQYLNEEGNVKKDAEGNQEGNVERDVEGNQEEEASGTKNYVRHSGWVVRDNVPISTVYWRRTRARGDHESFVPNLEKEMLWTTMLETFTLPAGTEDKVKRWTLKKMAEQFQSFKGDLYQKYILKGQTPNFDTFPKLRDHWDEFVAYKTGEQGQAMMERNKENAAKKKYHHHLGSGGYSVAMPKWEQMEASLIERGIEPATANWPEQSKFWYYAHGGTLNPADGSLVFGYQIREAARRLTDAVEASSQGTFRPDRDRDELTLALQTPEHPGRTRGKGVIPWKIGFKEDIHTYRSRMRSKRDTEAKIADLEFRVSSYELNMQEEVARKVDERMAAHRSHYPQPTIPPAMVSPSGNRSSCASTGQVASGMAIPTDPSGTYHCRPIPAGYSKVEVELVEGAYEDLELDYPGGDGETYXSPPTPPSPPQDPAPSPPHAPPAPSPPQAPASTPQDPAPTPPRAPTPTPPQAPLPAPSKATKKAKVDAAKNKDPGYDCTQEELDAYVASEVKRQFKPRSPEKKIPIDLSVRNFFRGMSASVKEAIKLSDYERTLKKASSGKSKPVPQLGEQPNQEIEPLVTGKEMTIEQFITDTGLTTDQLLGVAPIEKAEVKYMYELGKTLVKPELLQSLPTQMYKFHQLYMEMSATGREMIGARIRDTDFLQGDDILWINFRGIYELYQLDALDVSIMSCWILFHWVLLLIDLEACTVNVYDSMDKKESTFDKVFELIDRAWYRFRHLVRGKWRERLRRKFKFPCAKQKQGTNLCGYYVCEYCHCLADQIITTRELDFIRMRDNLTTHKEFIAAVQEQLMGFINEEILDPKGTNIEESDIGQLPYLQAVVKETFRLHPPVPLLLPRQAETTTNIAGRRICPRMPLANRMVHLVLGSLLNQFKWNLPVDIERNGIDMSEKFGLTLVKAIPLCALVTPISVESGDH

SEQ ID NO: 175082 - protein, 1438 aa, Oryza sativa
  unsure (1)..(1438): unsure at all Xaa locations
  Clone ID: PAT_MRT4530_72963C.1.pep
MEKQNVDFSKVLVEIQESMLALNRAQGKTQATVIKIDQGVNNWRPQVEEVMQELREEVGELRQKVDFLGKTKMASPLASSPRVPLTDEERKAPLLSHTSVADEVDDRGGRSREDWRMRCEHYFDVNNTYPGLWVRVATIYFIGRAASWLRSSRAHVRYPVWEEFSATMSSKFDKDQHDLLIRQMDQIRQTGTVWEFYEHFDELMNQLLAYDPEVNMRYLIHRFTEGLHREIRNAVLLHRPRDLETALAIASLQEEVLEVVPESNHSKPFRRSDGGVQPKNSSAFKGAFPLPLPPGSGGVRADDKKHQDGQRATGLXDKMSSIKAHRRAQGLCYICAEKWSPAHKCATTVQLHAVQELFSLLQXVKVANGELLSCDQEIPGCEWSSQGYLFCTNLKVIPLSNYDMILGMDWLMHHNPMTVDWTRKSLTLAWKGQTISLQGITSQLATCSSVSVQQLNGLISRCAISNLVQLCSLSVSSTSEIIPEAVQVVLQEFDSVFAEPEGLPPDRPYDHSIPLIPRAQPVNVRPYRYTPTQKDEIELQVKEMLSKGIIQPSYSPFFSPVLLVKKKDGSWHFCVDYRHLNAITVKNNYPLPVIDELLDELNGAQWFTKLDLRSGYHQIRMQVQDEHKTAFKTHNEHYEFCVIPFGLTSAPATFQGVMNSILHPWLRRFVLVFVDDILIYSSTLEEHIQHLRTVFQVLLKHQLKVKRSKCSFGQQRLAYLGHIISPNGVSTDEDKIQAVRDWPVPTSVKELHFLGLAGYYRKFVRHYGIIIIKAALISAPVLAMPNFNLPFVVETDASDKGIGAVLMQQNHPVAFLSRALGSRHQGLSTYEKESLAIILAIEHWSSYLQHAEFFIKTDHRSLSFLDDQRLTTPWQHKALTKLLGLRYKIIYRKGVDNRAADALSRCQSSDTIVLSALSVAIPAWMQEVRDGYVQDPDSRSKVQTLSISAHDVPDYTLKDGILYFKQRMWIGHNISLQQKILANLHTAAVGGHSGIHVNYQHIKQLFAWPGLRSSVVQFVQACSICQKAKSEHVKYPGMLQPLLVPEHAWQVVSLDFIEGLPRSSSFNCILVVVDKFSKYSHFVPLSHPFTALDVTEAYMQFIHRLHGLPQSLISDRDRIFTSTLWTTLFRLAGTQLRMSSSYHPQTDGQTERVNQCLETFLRCFVHACPSQWSRWLALAEYWYNTSFHSALGTTPFEVLYGHKPRYFGLSATAACQSSELQEWLHEREKMQVLICEHLLRAQSRMKFQADHHRSERSFAVGDWVSLKLQPFVQQSVVTRTNRKLSFRFYGPFQVLARVGEVAYRLDLPASSLIHPVIHVSQLKKALAPTETVQLVLPVLHPTTDAEAEPAHILDRRIIRNGSKMVEQVLIQWSGEEPTAVTWENLQELRHRFPHHEAWGQASFQGRGNVTPAQGQDQLRKSNRERQPSRRFPASEWTW

SEQ ID NO: 175083 - protein, 135 aa, Oryza sativa
  Clone ID: PAT_MRT4530_72964C.1.pep
VAMEIPYVMVQIVLFMFIAYPMIGYAWTPVKFFWFVYTMICTLLYFLYIGMMIVSLTPNIQVASILASMFYTGQNLMSGFIGPAPQIPRWWILLYYASPLSWTLNVFFTTQFGDEHEKEIIVFGETKFIATFIND

SEQ ID NO: 175084 - protein, 822 aa, Oryza sativa
  unsure (1)..(822): unsure at all Xaa locations
  Clone ID: PAT_MRT4530_72965C.1.pep
MADRDEEQILYDTIAEGSSQYWNEEEGNEDPNQYLNEEGNVERDAEGNQQGHVERDVEGNQEEEASGSQPSVGRKRARGQRGAAKKLEGRHIITEVEEDGRPSAPAEAAKNYVRHSSWVVRDNVPVSTVYWRRTRARGDHESFVPDSEKEMLWTTMLETFTLPAGTEDKVKRWTLKKMAEQFQSFKGDLYQKYILKGQTPNFDTFPKLRDHWDEFVAYKTGEQGQAMMERNKENAAKKKYHHHLGSEGYSVAMPKWEQMEASLIERGIEPATANWPERSKFWYYAHGGTLNPADGSLVFGDQIREAARRLTDAVEASSQGTSRMRSKRDIEAKIADLEFRVSSYELNMQEEVARKVDERMATHRSHDPQPTIPPAMVSPSGNRSSCASTGQVASGMAIPTDPSGTYHCRPIPAGYSKVEVELVEGAYEDLELDYPGGDGXYIILPGRQAASRAPSPPAPPSPPQDPAPSPPHAPPAPSPPQAPASTPPQDPAPTPRRAPTPTPPQAPLPAPSKSRPPPAPLPAHTRATKKXASSGKSKPVPQLGEQPNQEIEPLVTGKEMTIEQFITDTGLTTDQLLGVAPIEKAEVKYMYELGKPLVKPELLQSLPTQMYKFHQLYMEMSATGREMIGARIRDTNFLQGDDILWINFRGIYELYQLDALDVSIMSCWILMEIQRARRRRVFDTGFIDPRKVNVAMLDQYPQETEDNLVHLLKAQHYKTFILLPYNTEFHWVLLLFDLEACTVNVYDSMDKKESTFDKCAKQKQGTNLCGYYVCEYCHCLADQIITTRELDFIRMRDNLXHTQGIYRGGSRTTHGIHQRRNP

SEQ ID NO: 175085 - protein, 1394 aa, Oryza sativa
  Clone ID: PAT_MRT4530_72966C.1.pep
MPSTPPPLQSATGARRSIRAGDAGARSAVAVAVTFHRSPSSIVVALRRRVAAVAAQRRAAAYHGHRAGSSRPRAPRPSDLPEGRSGPSTAARVATTSAPRQRHVVPPLPGFVRAVEDACEVVFPTAIQNSIREFLGVTPYSGERSLSGVAEDGGGVEWPAAEHCRPSTAAERPGGEAAGAPMLGSGLRAVARAATASGGYAATVGGVVERWRWPAGRPERHQAARQIPRRLRRWHEGPRRWAKSPAERRPGGSLGSDARTTWSGASPFLLRPPRRGPSGNGVGRRRRASASGASLSLSCDFFPNGPYTGRSLPPGADPEGSPGRPRTTLKFGPEKTRRQRRRSLEPHSRCDSGAPAVLRDPYARPAVAPGGAADIARRAGARAASSSSRLRVSGSPPLAAPSPSHVRPSPTRPAASRAPGVSPDAASTQPPRPACPIRRPPVRPMPVRHSLFGSKHMHPSNSRCHQLNRIDMKVASCDLPIPHMDEGSSVVPVVDDAPIDEDTVVDERSCEEQEPPPPPYVVAHLEAAKNYVRHSGWVVRDYVPVSTVYWRRTRARGDHESFVPDSEKEMLWTTMLETFTLPAGTKDKVKRRTLKKMAEQFQSFKGDLYQKYILKGQTPNFDTFPKLRDHWDEFVSYKTGEQGQAMMERNKENTAKKKYHHHLGSGGYSVAMPKWEEMEASLLERGIEPATANWPERSKFWYYAHGGTLNPADGSLVFGDQIREAARRLTDAVEASSQGTFRPDRERDELSLALQTPEHPGRTRGKWVIPWKIGFKEDIHTYRSRMRRKRDTEAKIVDLEFRVSSYECSMQEEVARKVDECMAAHRSHDPQPTIPPAMVSLSGNRSSCASTGLVGSQSMDAMQTQDESTCPVDDITQRTPCELHIPFKNLSIKVASGMAIPTDPSGTYHCRPIPAGYSKVEVELVEGAYEDLELDYPGGDGETHLRDTSHAIILWRRRYIILPGRQAASRAPSPPAPPSPPQDPAPSPPHAPPAPSPPQAPAPTPPQDPAPTPPRAPTPTPPQAPLPAPSKSRAPPAPSPAHTRATKKAKVDAAKNKDPGYDCTQEELDAYVASEVKRQFKPRNPEKKIPIDPSVRNFFRGMSASVKEAIKLSDYERTLKKASSGKSKPVPQLGEQPNQEIEPLVTGVAPIEKAEVKYMYELGKPLVKPELLQSLPTQMYKFHQLYMEMSATGREMIGARIRDTDFLQGDDILWINFRGIYELYQLDALDVSIMSCWILFHWVLLLFDLEACTVNVYDSMDKKESTFDKVFELIDRAWYRFRHLVRGKWRERLRRKFKFPCAKQKQGTNLCGYYMCEYCHCLADQIITTRELDFIRMRDNLTTHKEFIAAVQEQLMGFINEEILDPKGEFYYDGNTIHRSLASELAASTTTSKS

SEQ ID NO: 175086 - protein, 179 aa, Oryza sativa
  unsure (1)..(179): unsure at all Xaa locations
  Clone ID: PAT_MRT4530_72967C.1.pep
MAVATPTSTISPAARGKSAAIDADECIQWLDSKDPSSVIYVSFGSIARTDPKQLIELGLGLEASAHPFIWMVKNAELYGDTARXSSHGLKFRGWTPXMLILSHATVDGFVTHCEXNSIMEVVATRLPMVTWPHSVDQLLNQKMAVEVLGIGVGVGLDESVTEGHCGGEGGGGEGNREHT

SEQ ID NO: 175087 - protein, 69 aa, Oryza sativa
  Clone ID: PAT_MRT4530_72968C.1.pep
MELLRESDVNISGDRVEDGNERGVVIAEFIGPCLKHLPQKSYGGKRNRSSRATCSRANRLHRSSSTSRF

SEQ ID NO: 175088 - protein, 120 aa, Oryza sativa
  unsure (1)..(120): unsure at all Xaa locations
  Clone ID: PAT_MRT4530_72969C.1.pep
RKAYRGIPSTLRYMSRIDMVCSRVYGRARHTLRKFIMEFTDGRSPIWSELGCHCVVFGPASPSPTWRQLTCDIKGTPRKDLRHRISEPTHPPQPTKPELIGAKSSXDLIGSTRLRSRRYR

SEQ ID NO: 175089 - protein, 344 aa, Oryza sativa
  unsure (1)..(344): unsure at all Xaa locations
  Clone ID: PAT_MRT4530_7296C.1.pep
PSFPLSFAPQSADEAAAHKEIYDQLRQTVETFPTAPNSSNSFTYSRHPDGWYTFPEGVVSAMVIKSHLTARTTDIFMVTFPKSGTTWLKTLLHSALHRXGQRSSGAQSPPAADELLAHSPHQLISFLESQVFVKDRIPDLSSLPEPWLLMTHIPSQSLPDSVAASGCKVVYLCRDPKDCFVSLWHFWNRFMPWNIDDAHRQFCNGVSLFGLYWEHVLSYWNWHVERPSEVLFLTYEELAADTLGHLRRLAEFVGRPFTTEEQDARVDRKIVEICAMESLSGLEVNRSGMTNFTKKDVPNNISFRRGVVGDWRNHLTPEMARRIDEITEVKFKGSGLLLHPPFLQ

SEQ ID NO: 175090 - protein, 100 aa, Oryza sativa
  unsure (1)..(100): unsure at all Xaa locations
  Clone ID: PAT_MRT4530_72970C.1.pep
NLDQYLQPCFLPGIKTIKITKRRQFXEPPTVRLGDIHFLEELXMXHWPNLNEPQSLGIPTLKKLKLVNSWNFLETLSVGFFLLGFFPLACNLHSLACLEQ

SEQ ID NO: 175091 - protein, 1198 aa, Oryza sativa
  unsure (1)..(1198): unsure at all Xaa locations
  Clone ID: PAT_MRT4530_72971C.1.pep
PFIDLQSRSLSPSRRPPRDAAPRRRRATPTPRHAAAGXATPPPSPPLAQRRRRHAMPPPXRRATPPTHATPRRRRRRHAVATPPRQAPAQCRHTAVNEHVNENEHVNVRRERERERERSNERERERERSNEEKTCCRSRPSSRSGRASRRRNSCRQMADCDEEQILYDTIAEGSSQYWNEEEGNEDPNQYLNEEGNVERDAEGNQQGHVERDVEGNQEEEASGSQPSVVQKRARGQRGVAKKLEGRHIITXVKEDGRPSAPAEAAKNYVRHSGWVVRDNVTVNTVYWRRTRARGDHESFVPDSEKEMLWTTMLETFTLPTGTEDKVKRWTLKKMAEXFQSFKGELYKKYILKGQTPNFNTFPKLRDHWDEFVAYKTGEQGQAMMERNKENATKKKYHHHLGSGGYSVAMPKWEEMEANLIERGIEPATANWPERSKFWYYAHGGTLNPADGSLVFGDQIREAARXLTDAVEASSQGTFRPDRDRDELTLALQTPEHPGRTRGKGVIPWKIGFKVDIHTYRSRMRSKRDTEAKIADLEFRVSSYELSMQEEVARKVDERMAAHRSHDPQPTIPPAMVSPSGNRSSCASTGQVGSQSMDAMQTQDESTCPVDDITQRTPCEPHIPYKNLSIKVASGMAIPTNPSGTYHCRPIPAGYSKVEVELVEGAYEDLELDYPGGDGETHLRDTSHAIILWRRRYIILPGRQAASRAPSPPAPPSPPQDPAPSPPHDPPAPSPPQAPAPTPPQDPAPTPPRAPTPTPPQASLPAPSKATKKAKVDAAKNKDPGYDCTQEELDAYVASEVKRQFKPRSPEKKIPIDPSVRNFFRGMSASVKEAIKLSYYERTLKKAYSGKSKTVPQLGEQPNQEIEPLVTGKEMTIEEFITDTGLTTDQLLGVAQIEKAEVKYMYELGKPLVKPELLQSLPTQMYKFHQLYMEMSATGREMIGARIRDTDFLQGDDILWINFKGIYELYXLDALDVSIMSCWILMEIXRARRRRVFDTGFIDPRRVNVAMLDQYPQETEDNLVHLLKAQHYKTFILLPYNTEFHWVLLLFDLSACTVNVYDSMDKKESTFNKVFELIHRAWYRFRHLVRGKWRERLRRKFKFPCVKQKQGTNLCGYYVCEYCHCLADQIITTRELDVYRMRDNLTTHKEFIAAVQEQLMGFINEEILDPKGEFYYDGNTIHRSLVSELAASTTTTSKS

SEQ ID NO: 175092 - protein, 377 aa, Oryza sativa
  Clone ID: PAT_MRT4530_72972C.1.pep
MTTTGTTAAHGWSDGGDGGSRSHGARAFPATRGEGEEVKRQFKPRSPEKKIPIDPSVMNFFRGMSAPVKEAIKLSDYERTLKKASSGKSKPVPQLGEQPNQEIEPLVTGKDMTIEEFIIDTGLTTDQLLGVEPIEKAELKYMYELGKSLVKPKLVQSLPTQMYRFHQLYVEMSATGREMIGARIRDLDFLQGDDILWINFKGIYEVYQLDALDVSIMSCWTLFHWVLLFFDLSACTVNVYDSMDKKESTFDKVFELIDRAWYRLRHLVRGNWRERLRRRFKFPCAKQKQGTNLCGYYVCEYCHCLADQIITTRELDFIRMRDNLTTHKEFIAVVQEQLMGFINEEILDPKGEFYYDGNTIHRSLASELAATTTTSKS

SEQ ID NO: 175093 - protein, 325 aa, Oryza sativa
  unsure (1)..(325): unsure at all Xaa locations
  Clone ID: PAT_MRT4530_72973C.1.pep
LGRPTKLRPAMQVQPAKLVQMPHTTMETTSALQAQLQAFLQQLNQPHTIPRPAPLAHAIGSSSLATIKRRTSNRMPRSKHLRLTFKXMIAGETDPSEFLLIYKSAIEAAHGDENTKAKWPGGGGGGPVVAAAAVDVPSPPPDPVGGKAATAQRLGGCALPRLDLEGGNGREAATHPRATAAVVVKAAGKGQRWRRDRDEREGIACIARWSLDLAGRQRQRRWPRPSLHQIRQEGRRRTSVEWRWPCPPLRQIWREGRRRTSVTVAAAAVDGRGGEGRRWCGRGGDPRLEFLSHGLAASAVALAIFGALRRSGVTRAFSGGQQMVI

SEQ ID NO: 175094 - protein, 293 aa, Oryza sativa
  Clone ID: PAT_MRT4530_72974C.1.pep
MDQYGDEDKLLKLLLSLVVYGDAINISTTLRVGNADAPWELKGTPSARPWHRARVPAAMDHLESTCLANTFNSPPGPERPLQKECLEISEFLREFYGGVRSVSILSMEFQRKPGLSAFFSHLYFGGCFLYSSKSDTPGNIGNGENGGNNDNDKCSGDDVSAPHANIGNATNGGSNDDNNNNAYSWDNVLLSSWLKLSLCPMVYGDAANVDFDSSFTPVITSLPSFKSDELDIDSDSSRAPVKMSLNEQIPTVSMLQHALGPMLQPLWNFNVTSKSVAPPISSSIVQQCIYNKL

SEQ ID NO: 175095 - protein, 36 aa, Oryza sativa
  Clone ID: PAT_MRT4530_72975C.1.pep
NTHIHTSLSLFTHSSTKIITLTLNTPYKCSYTQPQT

SEQ ID NO: 175096 - protein, 92 aa, Oryza sativa
  Clone ID: PAT_MRT4530_72976C.1.pep
MSAGDWRARVAEAGACEATHVVLFVARGGFPQSPVILGGDVASAAKLFLHLIRNIEDSDVSVALSSTFSSSSGRPDLLAFLDAPPFCWPVYF

SEQ ID NO: 175097 - protein, 75 aa, Oryza sativa
  Clone ID: PAT_MRT4530_72977C.1.pep
SLSLRSSTKVSPNLTLQIHIWLTLRLIWQVKHIVYSNSLSIYPLYYECMTGDPRVSLCNPFFFLILLLSKKPCLF

SEQ ID NO: 175098 - protein, 205 aa, Oryza sativa
  Clone ID: PAT_MRT4530_72978C.1.pep
MWRKQRQKRLCCAVHCFFNFKVPYQTKPRRLGHIPRSTDSARPRPHLTRACNRPPPARVSARLWCQLPKASNAVAWAPTRRPCRPHLSRQQEGRCDADPALPHCFWICRRERRPRARRACNADNAMRCVRCTAAPLRCVVTTTRKARVATCSETDFGGGARARPCAWITSAYLPAEYVPTQGRRSRWRNGGHFRRDRFQDDPAVF

SEQ ID NO: 175099 - protein, 706 aa, Oryza sativa
  unsure (1)..(706): unsure at all Xaa locations
  Clone ID: PAT_MRT4530_72979C.1.pep
MATKRPRRPPPPSSSPHRRCLSRPPTSQLTARITTAELPSFPRGHYSGQVHRGSGEGAVQIRGDRPAARSAGSGEEGGRIKALLLYGLYVNITLIIQDAKGNNNDLILQHVYTVHKAWRSARSNVCAPTWLSHIPRAWEAGQLSTTAREKWWYDTQWSRVDCGILFASRLCIGAILAVSGAAEASGATHFHTDAKLPFDSPLAELTLTRKRQCPQPTYSRICPSRLSTVIEPTMEPVAVVAVPFPAQGHLNQLLHLSLQLASRGGVDVHYAAPAAHVRQARERVQGGDDAALRSVRFHDLGISTYASPPPDPAAASPFPSHLMPLWEAYTAGAPAPLAALLDKLSASYRRVVVVYDRINDFAAQEAARLRNGEAFVMYCLAVSMLARRIAPQEHQRILRENGLTNITVEDCATEEFVDYIRRTRATKEMSPPRGILTNTCRALEGEFIDVVAGNLAADGKKVFAVGPLNPLLHGNASKQGDQRQRHECLDWLDKQPPASVLYVSFGTTSSLRAEQIEELASALRGSNQRFIWVLRDADRGDIFAEDSGEIISRHAKLLREFTQHNEGSTGLVITGWAPQLEILAHDATAAFMSHCGWNSTMESLSHGXLILAWPMHCDQPWDAELLCKYLKAGVLVRPWEKHNEVTPAKDIQEAIEEAMLSDGGVPMRQRARELGDAIRASVAAAGSSVVGSSRKDLDDFVAYITR

SEQ ID NO: 175100 - protein, 625 aa, Oryza sativa
  Clone ID: PAT_MRT4530_7297C.1.pep
MAPSFPLSFAPQSADEATAHKEIYDQLRQAVETFPTAPNSSTSFTYSRHPDGWYTFPEGVVSAMVIKSHLTARTTDIFMVTFPKSGTTWLKALLHSALHRRADDLAAHSPHQLVPFLETQVFIKDRIPDLSSLPAPRLLMTHIPSQSLPDSVADSSCKVVYLCRDPKDCFISLWHFLNRFRPWDINEAHRNFCDGVSLFGPYWEHVLGYWRWHVKRPSQVLFLTYEELTTDTLGQLRRLAEFVGRPFMVKEQEIEVDRKIVEACAMESLSRLEVNQSGTTDMVDKTYANNIFFRRGVCGLFMASSFPLSSATEAADEAKAHKKIYNQLRQVAETFPTAPSGIDVPYSHHPDGWYMTTAGVVSAMVIKSHLTARATDIFLVTFPKSGTTWIKALLYSALHRRADELVAHSPHQLVPFLESQVFVKDRIPDLSSLPEPRLLMTHIPSQSLPDSVAASGCKVVYWNWHVERPSEVLFLTYEELAADTLGHLRCLAEFVGRPFTMEEQDAGVDRKIVEICAMESLSGLEMNQSGMTNFTEKDVPNNTPKWPTDQRLTRQVSDIGHHTDTAAVLMAGRFCTRHTWLIGSRSQGASALGSSPWNSRASWWRKSPTSSSQLFVNDRILSLNN

SEQ ID NO: 175101 - protein, 76 aa, Oryza sativa
  Clone ID: PAT_MRT4530_72980C.1.pep
PRPHQFHHQPLICVQPIFHQFPLKQGVVLTFEQTQFHSPAFLPLNSPPKFGIFPKYNIAPKTIPPVGGAWTSFLKA

SEQ ID NO: 175102 - protein, 112 aa, Oryza sativa
  unsure (1)..(112): unsure at all Xaa locations
  Clone ID: PAT_MRT4530_72981C.1.pep
GGELRGDMNGHKNYDKAAGRTKEHVRSRRPTGTPPNGDRGQSALKVGRPKGRRAYRRPRYREPKEKAVRRQRNAASFSLTGRAMXQGAAXAAGRLRGTMALRMPMYMGVLTR

SEQ ID NO: 175103 - protein, 341 aa, Oryza sativa
  unsure (1)..(341): unsure at all Xaa locations
  Clone ID: PAT_MRT4530_72982C.1.pep
LPQFFSGHLRRINGSWSLIHRHLRDEAPPSKFLLLIVNFYGLHLHLNPNSIAFLSIFAHLCEAYVGVVPFLDLFRYFYKLRWIXMESNRISKCCGFRLRDGMKAEYIPFQCSSSQSSWRSRWLYLQKDKLDPVLVVPENKPEWSPDSTSKHSLALSLXAFVDIISDLKEQGLQGEQITRHFIKSRLAPIKERSRTAFEFYGKHDPNHEDPDSLDFKVMKERISQDQVSGAXDVLVNKIKRLEGARDEVANAATPLVQAMFFNNNGPSTFDASEIFDKLRASAAILGRRRDAAGTRLDDAEPRTKTTTATATLTKHRGRTRTARRRDERHDDWERREDDDDD

SEQ ID NO: 175104 - protein, 61 aa, Oryza sativa
  Clone ID: PAT_MRT4530_72983C.1.pep
EGKQLILYPTTTLKQRHGQPPCIEPLPLPHVTLLRCCHTSKPCSLRTLRTKRAAAVWTSRM

SEQ ID NO: 175105 - protein, 247 aa, Oryza sativa
  unsure (1)..(247): unsure at all Xaa locations
  Clone ID: PAT_MRT4530_72984C.1.pep
FHRYADTACTRDARCSWDKVYRPKDKRGLGVINLYIQNVALLLKHLHKLYTTVDLRWVRLIWDSYYMTKVPYLMSFLSYNCQMGVGVFXNNVHLEDCFNLPLEPHVYIQYLXLESELDGLGPSTXRGDSWXFFFFWNSLTFYAHKFYRPNFMRISVPRPFXWIWKTKCVKMIKIFMWLDLLWDRLNTRDMLDKRHCAPDDVVLNCGICGGPRETLIHLFFSCPYSKSCWEHLGIRWNTTTLSTRALN

SEQ ID NO: 175106 - protein, 458 aa, Oryza sativa
  unsure (1)..(458): unsure at all Xaa locations
  Clone ID: PAT_MRT4530_72985C.1.pep
MATPPHDASPAPPNPNPVSDDPPPPPPVTETKPEPEPPLPTTSIDPTPSGDEESGDDSSSSVSSASSTSPTAAAAAAAAGGGGGGGGERAAPHPAAKDLLHISFNQDYGCFAAGTKSGFRIYNCDPFREIFRRDLGAAGDIGVGGGGGGIGVVEMLFRCNILALVGGGDAPHYPPNKVMIWDDHQSRCIGELSFRSPVRGVRLRRDRIIVVLENKIFVYNFADLKLVHQIETAPNPKGLCAVSQQPGSIVLVCPGAQKGQVRVEHYGARKTKFINAHTSRVACFALSQDGRLIATASTKGTLVRIYNAAEGNLLQEVRRGADRAEIYSLAFSNNLQYLAVSSDKGTIHVFNLKINVGLTTNDKPLPAPDPDVPHISPSLSFIKGVLPKYFHSEWSVAQFRLHEGEQYIVAFGHEKNTVAVVGMDGSFYRCQFDPVNGGEMXCRLECYNFLKPSSDQPQ

SEQ ID NO: 175107 - protein, 103 aa, Oryza sativa
  Clone ID: PAT_MRT4530_72986C.1.pep
MSAAQLFYLSLFPPLSPSLASNDGESGPGMARYRVDGDGGTATTRQVDIDCIHGTTTSKRAAGKDKAAMQECHASPPPANYFKNKADYNAAAASASAGAINYK

SEQ ID NO: 175108 - protein, 73 aa, Oryza sativa
  Clone ID: PAT_MRT4530_72987C.1.pep
PPGGLAALNPKLPVVPNLTPPGVFFALPGVMPCANFLKFPPYFSRAKLGGNLLSPFPGGRGSFPFFCLEPVGF

SEQ ID NO: 175109 - protein, 174 aa, Oryza sativa
  unsure (1)..(174): unsure at all Xaa locations
  Clone ID: PAT_MRT4530_72988C.1.pep
MDRRSSAPSSRRRKESLLVAEGLVWKNRGGVAMRGRQIGQRNFFNLSDPAQVWWRCPLPASGRHATTVAALAALSPDTMTHPLLLGFXAVVPMLGSSFGLRADRPCNLVSQDCXSVLLRFNDKLRGNQLLKSGEAHTKIYDSTTNLQFVPFPWRQPKGIIGLSSGVHVNEGPWM

SEQ ID NO: 175110 - protein, 174 aa, Oryza sativa
  Clone ID: PAT_MRT4530_72989C.1.pep
MDRRSSAPSSRRRKESLLVAEGLVWKNRGGVAMRGRQIGQRNFFNLSDPAQVWWRCPLPASGRHATTVAALAALSPDTMTHPLRLRPLPLQMLGRRRCLLGWRQLSDSRTAGLQSVLLRFNDKLRGNQLLKSGEAHTKIYDSTTNLQFVPFPWRQPKGIIGLSSGVHVNEGPWM

SEQ ID NO: 175111 - protein, 257 aa, Oryza sativa
  unsure (1)..(257): unsure at all Xaa locations
  Clone ID: PAT_MRT4530_7298C.1.pep
MWQKIKKKYTLKKSDSEKKWQKIKKKRRSPIPRGSEKTKKKRNSPXKGENKKKSEKNSEKSLKKKKNFKKYTLKKSNSEKKWQKKLKKNRSPIRRRSXKKQKKKRRSDSPKKWGKQKKSEKNLKKIRFPRXKGEKNQKIKKKKAKKIIDPIPLKNKXKNKKKYDSYERQKNKKKSKKLGKTLKDKKCKKKKSKKRVRKXVRKKRKERKKAKKKHSRKNKQEKCARKKCQKKQAKEHTRKEGKKNTRKIRFSSSVKNR

SEQ ID NO: 175112 - protein, 952 aa, Oryza sativa
  unsure (1)..(952): unsure at all Xaa locations
  Clone ID: PAT_MRT4530_72990C.1.pep
MNENENERMNVNENERTNVNENERERERERVNERERERANENEGTNVNVNQNEGTNVNENGRTKTNENEGTNMADRDEEQILYDTIVEGSSQYWNEEEGNEDPNQYLNEEGNVERDAEGNQQAHVEREVEGNQEEEASGSQPSVGQKRARGQRGAAKKLEGRHIITEVEEDGRPSAPAEAAKNYVRHSGWVVRDNVPVSTVYWRRTRTRGDHESFVPDSEKEMLWTTMLETFTLPAEQFQSFKGDLYQKYILKGQTPNFDTYPKLRDHWDEFAAYKTGEQGQAMMERNKEKAAKKTYHHHLGSGGYSVAMPKLTLALQTPEHPGRTRGKGVIPWKIGFKEDIHTYRSWMRSKTDTKAKIADLEFRVSSYELSMQEEVARKVDERMAAHRSHYPQPTIPPAMVSPSGNRSSCASMGQVGSQSMDAMQTQDESTCPVDDITQRTPCELHIPFKNLSIKAASGMVIPTDPSGTYHCRPIPAGYSKVEVELVEGAYEDLELDYPGGDGETHLRDTSHAIILWRRRYIILPGRQAASRAPSPPAPPSPPQDPAPSPPHAPPAPSPPQAPAPTPPQAPAPTPPQAPLPAPSKSRATPAPPPAHTRATKKAKVDAAKNKDPGXVKRQFKPRSPEKKIPIDPSVKNFFRASSGKSKPVPQLGEQPNQEIEPLVTGEDMMIEEFITDTGLTTDQLLGVAPIEKAEVKYMYELGKPLVKPELVQSLPTQMYKFHQLYMEMSATGREMIGARIRDPDFLQGDDILWINFKGIYEVYQLDALDVSIMSCWILMEIQRARRRGVFDIGFIDPRKVNVAMLDQYPQATEDNLVHLLKAQHYKTFILLPYNTEAWYRFRHLVRGERLRRRFKFPCAKPKQGTNLCGYYVCEYCHCFADQIITTRELDFISMRDNLTTHKEFIAAVQEQLMGFINEQILDPKGKFYYDGNTIHRSLASELATTTTSKS

SEQ ID NO: 175113 - protein, 1264 aa, Oryza sativa
  unsure (1)..(1264): unsure at all Xaa locations
  Clone ID: PAT_MRT4530_72991C.1.pep
EPPPPDLPSSRSLRSRSLSVAPPATRRRATTTTRHADAAPSRRRHATPPSSPPRAQCRRRHATPPPSPPRAQCRRRHATPPPSPPRNAAAACQRHAAAAVATPPPPSLPRAQCRRCHAPPPPPRHAATATAPQRHAAAAVATPPXRHAAAAAATPPRQPLPRCRHTAVNERERERSNERERERERSNEDKRERGNEREXNKRTNVNELGNMADRDEEQILYDTIAEGSSQYWNEEEGNEDPNQYLNEEGNVERDAEGNQQGHVERDVEGNQEEEAGGSQPSVGQKRARGQRGAAKKLEGRHIITEVEEDGRPSAPAEAAKNYVHHSGWVVRDNVPVSTVYWRRTRARGDHESFVPDSEKEMLWTTMLETFTLPAGTEDKVKRWTLKKMAEQFQSFKGDLYQKYILKGQTPNFDTFPKLRDHWDEFVAYKTGEQGQAMMERNKENAAKKKYHHHLGSGGYSVAMPKWEQMEASLIERGIEPATANWPERSKFWYYAHGGTLNPADGSLVFGDQIREAARRLTDAVEASSQGTFRPDRDRDELTLALQTPEHPGRTRGKGVIPWKIGFKEDIHTYRSRMRSKRDTEAKIADLEFRVSSYELNMQEEVARKVDERMAAHRSHDPQPTIPPAMVSPSGNRSSCASTGQVGSQSMDAMQTQDESTCPVDDITXRIPCELHIPFKNLSIKVVSGMAIPTDPSGTYHCRPIPAGYSKVEVELVEGAYEDLELDYPGGDGETHLRDTSHAIILWRRRYIILPGRQAASRAPSPPAPPSPPQDPAPFPPHAPPAPSPPQAPASTPPQDPAPTPPRAPTPTPPQAPLPAPSKSRAPPAPPPAHTRATKKAKVDAAKNKDPGYDCTQEELDAYVASEVKRQFKPRSPEKKIPIDPSVTNFFRGMSASVKEAIKLSDYERTLKKASSGKSKPVPQLGEQPNQEIEPLVTGKEMTIEQFITDTSLTTDQLLGVAPIEKAEVKYMYELGKPLVKPELLQSLPTQMYKFHQLYMEMSATGREMIGARIRDTDFLQGDDILWINFRGIYELYQLDALDVSIMSCWILMEIQRARRRRVFDTGFIDPRKVNVAMLDQYPQETEDNLVHLLKAQHYKTFILLPYNTEFHWVLLLFDLEACTVNVYDSMDKKESTFDKVFELIDRAWYRFRHLVRGKWRERLRRKFKFPCAKQKQGTNLCGYYVCEYCHCLADQIITTRELDFIRMRDNLTTHKEFIGAVQEQLMGFINEEILDPKGEFYYDGNTIHRSLASELAASTTTSKS

SEQ ID NO: 175114 - protein, 420 aa, Oryza sativa
  Clone ID: PAT_MRT4530_72992C.1.pep
MDPSAAAAAADDDDDYHATTGGMEPRGEEDNGASTRGVTGRLLAWRGEEEDDDDAEDSGGGSGAGANADEDDAASAVSLDTISNDSILLPPEPTSANLASLLRARKLILVVDLDHTLINSTRFAHLSDDEKANGFTERTGDDRSRGLFRMGLFRMITKLRPFVHEFLREASAMFEMHVYTLGNRNYATAVAKLLDPDGAYFGERIISSGESSQPDRKSLGDVFGWAPEMERAAVVILDDTAEVWKGYRDNLIEMERYLYFASSRGKFGIAVRSLAERNRDESEREGALAVALRVLRRVHGEFFSGSVCSGSFADVREVIRQARREVLRGCTVAFTGVIPSGDGGRASDHPVWRRAEQLGATCADDVGEGVTHFVAGKPVTRKALWAQTHGKFLVDTEWINAAHFRWSKPEERMYPVKGEH

SEQ ID NO: 175115 - protein, 204 aa, Oryza sativa
  Clone ID: PAT_MRT4530_72993C.1.pep
MAAAAKATASTASPPTSWRHGSGGGNGDGVDCFTVYFVEAQKLQLLRRNESFELTLEPFTYELLLERRISFVPIGLANMLNVGGAVQGFQTVKKDDGGGGDVVAEVAVKGAKEAYSSARLWAGARGEAAEERHGWSRAEDGELDVPATESGLGKDAADDLDGGGSLGGGGLVVEVEGGLGALDGGHEEGVEGTFPSIRNFSPLF

SEQ ID NO: 175116 - protein, 1200 aa, Oryza sativa
  unsure (1)..(1200): unsure at all Xaa locations
  Clone ID: PAT_MRT4530_72994C.1.pep
MTPRHDAAAARYDETPRRRRGTASAPRRQAATPPPRNAGAVPCASPPPHNVATGPRATSPPCRXRTAPPPRHADAARAATRPLHRPAAVXAATPPSRCRHTAANEREQERANEREREHERANECEREXERERMNEQKRRCWSRPSSRSGXSPRRNSRRQMADRDEEQILYDTIAEGSSQYWNEEEGNEDPNQYLNEEVQRDAEGNQEGHVERDVEGNQEEEDSASQPSAGQKRARGQRGAAKKLEGRHNITEVDEDGRPSAPAEAAKNYVRHSGWVVRDNVPVSTVYWRRTRARGDHESFVPDSKKEMLWTTMLETFTLPAGTEDKVKRWILKKMAEQFQSFKGDLYQKYILKGQTPNFDTFPKLRDHWDEFVAYKTCEQGQAMMERNKENATKKKYHHHLGSGGYSVAMPKWEEMEASLLEWGIEPATANWPDRSKFWYYAHGGTLNLADGSLVFGDQIREAAHRLTEAVEASSQGTFRPDREKDELSLALQTLEHPGRTRGKWVIPWKIGFKEDIHTYRSRMRSKRDTEAKIADLEFRVSSYELSMQQEVARKVDERMAAHRSHDPXPTIPPAMVSPSGNRSSCASTRQVGSQSMDAMQTQHETTCPVDDITQRTPCELHIPFKNLSIKVASGMAIPTDPSGTYHCRPIPAGYSKVEVELVEGAYEDLEVDYPGGDGETHLRDTSHAIILWRKRYIILPGQQAASHAPSPPAPAPSPPQAPAPSPPHQSPVPSPPQAPTPSPPYQSPVPTPPQDPAQTPPQAPPPARTRATKKAKVDAAENKEPPYDCTQQELDAYVEAEVKRQLKPRGPEKKIPIDPSAKKFFRSMSAPAKEAIKLTDYERTLKKASSGKSKPVPQLGEQPNQEIEPLVTGEYFGIQEFINDTGLTTDQLLGDAPIKKAEVKYMYELGKSLVKPELLQSLPTQMYKFHQLYMEMSATGREMIGVRIRDTDFLQGDDILWINFRGIYELYQLDALDVSIMSCWILMEIQRXARRRGVFDTGFIDPRKVNVAMLDQYPQATEDNLVHLLKAQHYKTFILLLYNTEFHWVLLLFDLEAYTVNIYDSMDKKESTFDKVFELIDRAWYRFRHLVRGKWIERLRRKFNFPCAKQKKGTNLCGYYVCEYCHCLANQIITTRELDFIRMRDNLITHKEFIAAVQEQLMGFINEQILDPKGEFYYDGNTIHRSLASELATTTTSKS

SEQ ID NO: 175117 - protein, 1456 aa, Oryza sativa
  Clone ID: PAT_MRT4530_72995C.1.pep
MAERESDVASSNVLMTQLLPVIIRGILPDNVRATITKLCAFMNAISQKVIDPDRLEALQNEVVQCLVSFELIFPPSFFNIMTHLLCHLVKEIRILGPVYLHNMFPFERYMGILKKYVRNRARPEASIAKGYGTEEVIEFCVEFIKDLRPIGVPELRHEGRLRGKGTLGRKEIMTVDNNLFRKAHFTVLQHSSLVAPYIEEHLALVCARNIGKSDAWITRHHIDTFPTWLRQHLMGNESINQQLAFLARGPSGSIATFQGYEINGYTFYTRAQDMKSTNQNSVVRVDAMGHDGTTATYYGAIEDIWELDYGPLKVPLFRCQWVRLTGGGVMIDGSGMTTVDLNKVGYSDEPFVLANDVTQVFFVKDMSSKGKKGRGPDEPKRQVVLPGKRKIIGVEDKTDEDYDQLDGQPPFKVTIDPSILLSNEDTPYSRSDHNEGTIVRRKNTYMADHDEEQILYDTIAEGSSQYWNEEEGNEVPNQYLNEEGNVERDAEGNQQGHVERDVEGNQEEEASGSQPSVGQKRARGQRGAAKKLEGRHIITEVEEDGRPSAPAEAAKNYVRHSGWVVRDNVPVSTVYWRRTRARGDHESFVPDSEKEMLWTTMLETFTLPAGTEDKSFKGELYKKYILKGQTPNFDTFPKLRDHWDEFVAYKTGEQGQAMMERNKENAAKKKYHHHLGSGGYSVAMPKWEEMEASLIERGIEPATANWPERSKFWYYAHGGTLNPADGSLVFGDQIREAARRLTDAVEASSQGTFRPDRDRDELTLALQTPEHPGRTRRKGVIPWKIGFKEDIHTYRSRMRSKRDTEAKIADLEFRVSSYELSMQEEVARKVDERMAAHRSHDPQPTIPPAMVSSSGNRSSCASTGQVGSQSMDAMQTQDESTCPVDDITQRTPCELHIPYKNLSIKVASGMAIPTDPSGTYHCRPIPAGYSKVEVELVEGTYEDLELDYRRGDGETHLRDTSHAIILWRRWYIILPGRQAASRAPSPPAPPSPPQDPAPSPPHDPLAPSLPQAPAATPPQDPALTPPRAPTPTPPQAPLPAPSKSRAPPTPPPAHTRATKKAKVDAAKNKDPGYDCTQEELDAYVASEVKRQFKPRSPEKKIPIDPSVRNFFRVPQLGEQPNQEIEPLVTGKKMTIEQFITDTGLTTDQLLGVAPIEKAEVKYMYELGKPLVKPELLQFLPTQMYKFHQLYMEMSATGREMIGARIRDTDFLQGDDILWINFKGIYELYQLDALDVSIMSCWILMEIQRARRRRVFDIGFIDPRRVNVAMLDQYPQETKDNLVYLLKAQHYKTFILLPYNTEFHWVLLLFDLSACTVNVYDSMDKKESTFDKVFELIDRAWYRFRHLVRGKWRERLRRKFKFPCAKQKQGTNLCGYYVCEYCHCLADQIITTRELDFIRMRDNLTTHKEFIAAVQEQLMGFINEEILDPKGEFYYDGNTIHRSLSSELAATTATSKS

SEQ ID NO: 175118 - protein, 204 aa, Oryza sativa
  unsure (1)..(204): unsure at all Xaa locations
  Clone ID: PAT_MRT4530_72996C.1.pep
VEGNQEQQVSASQPSAAHKRAXGTRGAVKKLEGGHIITQVLELSRPSAPAEAAKNYVRHSGWVVRDNVLVSMVYWHRTRARGDHESFVPDSEKEMLWTTMLETFTLPAGTEDKVKRWTLKKMAEQFQSFKRDLYQKYILEGQTPNFDTFPKLRDHWDEFVAYKTGQQGQAMMERNKENAAKKKYHHHLGSGGYSIAMSKWEEME

SEQ ID NO: 175119 - protein, 91 aa, Oryza sativa
  Clone ID: PAT_MRT4530_72997C.1.pep
MEMSKFHTGEFQLFETIQVEMRKLHSGEKQLFEVLKLIKVKVSSPNHSGNTEKFQQFVISSFLRQWQFLIGSGKVVVGSEFLENCLVLSHA

SEQ ID NO: 175120 - protein, 1110 aa, Oryza sativa
  Clone ID: PAT_MRT4530_72998C.1.pep
MVGLGWLRTSWDPGSGCQFGLNHHRPWVKAEEGNEDPNQYLNEEGNVERDAEGNQQGHVERDVEGNQEEEASGSQPSVGQKRARGQRGAAKKLEGRHIITEVEEDGRPSAPAEAAKNYVRHSGWVVRDNVPVSTVYWRRTRARGDHESFVPDSEKEMLWTTMLETFTLPAGTEDKVKRWTLKKMAEQFQSFKGDLYQKYILKGQTPNFDTFPKLRDHWDEFVAYKTGEQGQAMMERNKENAAKKKYHHHLGSGGYSVAMPKWEEMEASLIERGIEPATANWPERSKFWYYAHGGTLNPADGSLVFGVQIREAAQRLTDAVEASSQGTFRPDRDRDELTLALQTPEHPGRTRGKGVIPWKIGFKEDIHTYRSRMRSKRDTEAKIADLEFRVSSYELNMQEEVARKVDERMAAHRSHDPQPTIPPAMVSPSGNRSSCASTGQVGSQSMDAMQTQDESTCPVDDITQRTPCELHIPFKNLSIKVASGMAIPTDPSGTYHCRPIPAGYSKVEVELVEGAYEDLELDYPGGDGETHLRDTSHAIILWRRRYIILPGRQAASRAPSPPAPPSPPQDPAPSPPHAPPAPSPPQAPAPTPPQDPAPSPPHAPPAPSPPQDPAPTPPQDPAPSPPHAPPAPSPPQAPAPTRPQDPAPSPPRAPTPTPPQAPLPAPSRSRAPPAAPPAHTRATKKAKVDAAKNKDPGYDCTQEELDAYVASEVKRQFKPRSPEKKIPIDPSVRNFFRGMSASVKEAIKLSDYERTLKKASSGKSKPVPQLGEQPNQEIEPLVTGKEMTIEQFITDTGLTTDQLLGAAPIEKAEVKYMYELGKPLVKPELLQSLPTQMYKFHQLYMEMSATGREMIGARIRDTDFLQGDDILWINFTHIYELYQLDAVDVSIMSCWILMEIQRARRRRVFDTGFIDPRKVNVTMLDQYPQETEDNLVHLLKAQHYKTFILLPYNTEFHWVLLLFDLEACTVNVYDSMDKKESTFDKVFELIDRAWYRFRHLVRGKWRERLRRKFKFPCAKQKQGNNLCGYYVCEYCHCLANQIITTRELDFIRMRDNLTTHKEFIAAVQEQLMGFINEEILDPKGEFYYDGNTIHRSLASELAASTTTSKS

SEQ ID NO: 175121 - protein, 488 aa, Oryza sativa
  unsure (1)..(488): unsure at all Xaa locations
  Clone ID: PAT_MRT4530_72999C.1.pep
LRSFFPDRSLSRLLLRRHCLGHPRADAAPHHRAPRRCHAAASPSCSRAAAPLPPPPQAPTPTPPQAPRPAPSKSRPPQASPPAPTRATKKAKVDAAKNKDLGYDCMQEELDAYVASEVRRQLKPRSPEKKIPIDPSVRNFFRGMSAPAKEAIKLSDYERTLKKASSGKSKPVPQLGEQPNQEIEPLVTGEDFGXRRIYYCIGLTTDQLVRGTPLKGGKLGKPLVKPEQLQSLPIQMYKFHQLYMEMSATGREMIGARIRDTDFXXXXXXXXXNFKGIYELYQLDALDVSIMSCWILMEIQRARRRGVFDTGFIDPRKVNVAMLDQYPQATEDNLVHLLKAQHYKTFILLPNNTEFHXVLLLFDLEACIVNVYDSMDKKESTFDKVFELIDRAWYRFRHLVRGKWRERLRRKFNFPCAKQKQGTNLELVFIRMRDNLITHKEFIAAVQEQLMGFINEQILDPKGEFYYDENTIHRSLASEITTITTSKS

SEQ ID NO: 175122 - protein, 50 aa, Oryza sativa
  Clone ID: PAT_MRT4530_7299C.1.pep
MMRSVDWRSSTLPTERIGVAEGRPWIAGNLEGVAGELEAEDWGKFWLRAV

SEQ ID NO: 175123 - protein, 52 aa, Oryza sativa
  Clone ID: PAT_MRT4530_729C.1.pep
KETRTAYINTCPTLMGRSPATCDDAVADAAPPTAPIPTIKDRDIYLRRLPAA

SEQ ID NO: 175124 - protein, 88 aa, Oryza sativa
  Clone ID: PAT_MRT4530_72C.1.pep
AALFFFFFFFFFFFFFFGLGFFLKNCHIPYAIRLKAKIDKKKTPPSLFFFCFLKKSHTHSLAFFFFLRISLMILFTCMLFTNLVHLKT

SEQ ID NO: 175125 - protein, 87 aa, Oryza sativa
  unsure (1)..(87): unsure at all Xaa locations
  Clone ID: PAT_MRT4530_73000C.1.pep
GDRGCXXRLRKAAPAANARPEQAEGRCQRAXEQADNGSRRGWSRGAGGCGGQAAARRPSFPPPAXLISPXSTGLXFPXSKGARKWVV

SEQ ID NO: 175126 - protein, 404 aa, Oryza sativa
  unsure (1)..(404): unsure at all Xaa locations
  Clone ID: PAT_MRT4530_73001C.1.pep
PRPAPSKSRAPQAPPPAPTRATKKAKVDARKXDAYVASEVRTQLKPRSSEKKIPIDPSVRNFFRGMSAPAKEAIKLSDYERTLKKASSGKSKPVPQLGEQPYQEIEPLVTGEDFGIQEFINDTGLTTDQLLRGAPIEKAEVKYMYKLGKPLVKPEQLQSLPTQMYKFHQLYMEMSATGREMIGARIKGTDFLQGDDILWINFKGIYKLYQLDALDVSIMSCWILMEIQRARRRGVFDTRFIDPRKVNVTMLDQYPQATEDNLVHLLKAQHYKTFILLPYNTEFHWVLLLFDLEACTVNVYDSMDKKESTFDKCAKQAQGTNLCGYYVCEYCHCLVDQIITTRELNFIRMRDNLTHKEFIAAVQEQLMGFIDEQILDLKGEFYYDRNTIHRSLASEITTTTTSKS

SEQ ID NO: 175127 - protein, 43 aa, Oryza sativa
  Clone ID: PAT_MRT4530_73002C.1.pep
RSAHWSGTPRDKEPSLLYSARSGRTRVWTRVWTRGRTRGRTRG

SEQ ID NO: 175128 - protein, 1204 aa, Oryza sativa
  unsure (1)..(1204): unsure at all Xaa locations
  Clone ID: PAT_MRT4530_73003C.1.pep
AHLSICHPSLSISRPPPHPPPPPPPRHPPPPXAPAPAVAASASPAAAAAPCPPPAADPCRQCRRRRAAPRRRGGTPPPRRHAATPPPRTAPSRHADAAXATPPPRQAAAAPPRCRHTAAPLPPRERTIARERTKRDLGENXRQRERXTKXTNEQKRRCRRRPSSRSGXSPRRNSRRQMADHDEEQILYDTIAERSSQYXNEEEGNEDPNQYLNEEGNMERDTEGNQEGNVERDAEGNEEEEASGSQPSAGQKSACRQRGAAKKLEGRHFITEVDEDGRPSAPAEAAKNYVRYSGWVVRDNVPVSTVYWRRTRAREDDESFVPDSEKEMLWTTMLETFTLPVGIEDKVKRWTLKKMAEQFQSFKGDLYQKYILKGQTPNFNTFPKLRDHWDEFFAYKTGQQGLAIMERNKENAAKKKYHHHLGSGGYSVAMPKWEEMEASLLERGIEPATAKWPDRSKFWXYAHGGTLNPVDGSLVFSDQIREAARRLTNAVEASSQGTFRPDREKDELSLALQTPEHPGRTRGKGVIPWKIGFKEDIHTYMSRMRSKRDTEAKIADLKYRVSSYELSMQEEVARKVDERMAAHRSHDPQPYIPPAMVSPSGNRSSCASTGXVGSQSMDAMQTQDETTYPVDDITQRTPCELHIPFKNLSIKVASGMAIPTDPSGTYHCRPIPAGYSKVEVELVEGAYEDIELDYPGGDDEMHLRDTSHAIILWCKRYIILPGRQTASRAPSPPAPPSPPQAPAPSPPQAPAPTPPQAPHPAPSELRAPQAPPPAPTRATKKANVDAAKNKDPGYDCTQEELDAYVASEVRRQLKPRSPEKKIPIYPSVRNFFRGMSAPAKEAIKLSDYERTLKKASSGKSKPVPQLGEQPYQEIEPLVTGEDFGIQEFINDTGLTTDQLLRGAPIEKAEVKYMYELGKPLVKPEQLQSLPTQMYKFHQLYMEMSATGREMIRARIRDTDFLQGDDILWINFKGIYELYQLDALDVSIMSCWILMEIQRARRRGVFDTGFIDPRKVNVAMLDQYPQATEDNLVHLLKAQHYKTFILLPYNRQFHWVLLLFDLEACTVNVYDSMDKKESTFDKVFELIDRAWYRFRHLVRGKWRERLRRKFNFPCAKQAQXTNLCGYYVCEYCHCLADQIITTRELDFIRMRDNLTHKEFIAAVQEQLMGFINEQILDPKGEFYYDGNTIHRSLASEITTTTTSKS

SEQ ID NO: 175129 - protein, 119 aa, Oryza sativa
  Clone ID: PAT_MRT4530_73004C.1.pep
NESENEHVNGRCRENVNENENDRTNESENEHVNVRCRENVNENENDRTNESENEHGNVRCRENVNENENDRTNESDNENDRTKTSENEGTNVNENKRTRTSERERGRTKNVLWESSVKP

SEQ ID NO: 175130 - protein, 67 aa, Oryza sativa
  Clone ID: PAT_MRT4530_73005C.1.pep
MRERNPSQSRGTGMRDRAGPARLDCGTESDIGSNLGTEMRGGMWERRSRTSGMREHCRTHPARATGA

SEQ ID NO: 175131 - protein, 222 aa, Oryza sativa
  Clone ID: PAT_MRT4530_73006C.1.pep
MPPRKRRRRACVTVMPPPAEPTPELFLPPELLLEIVARSDAGTLVRCAAASNLLRREILSPPFLRRVCHDGPDAIVPRSSVVGFLHRRRKHDDNEAHCCFSLAHPATPAAASLVEHRLAPFMSRVAPDVLEEYKAVACHGGLVALQRRDPNWRRRSQRRADICVYNPMTGQRSFFTEQRETDTLPGWSLKSTRTCCSPPATAASGCSRPILCPSTTKAAAIS

SEQ ID NO: 175132 - protein, 80 aa, Oryza sativa
  Clone ID: PAT_MRT4530_73007C.1.pep
LPPCIMSKKPKVPFAGGLPDIKEYGSNIEKKLVASNSGPRHKKILSPMQTSLCGLLTSAGRSNRMVRSCLIQFKCLSVVT

SEQ ID NO: 175133 - protein, 78 aa, Oryza sativa
  Clone ID: PAT_MRT4530_73008C.1.pep
FSFAPLLVSCVGLLPRRCVSCRWSPGPHVFSVSSRLCFRCPVVGIRCPVFCLLSARVVRWSAVFTRPPLWTLGRARER

SEQ ID NO: 175134 - protein, 77 aa, Oryza sativa
  Clone ID: PAT_MRT4530_73009C.1.pep
MGLRNNTTASFSVPLTKCRERVTYDRPSRRLPAALYYDCAPSWAQQLNACVISFAVNRAVDHAHMPCRAACELITGN

SEQ ID NO: 175135 - protein, 685 aa, Oryza sativa
  Clone ID: PAT_MRT4530_7300C.1.pep
MRHKQLHPVFFFPSSRPQATARTHQTRNRAEKQEIKPMKPRSRCSSVINGAPLLLVVVVCFGLSPVARSQSSDSCSTPASLAAGVSKLIPFDTSNLTCFDAWSSENFIVRLAIRFMAVSGSTWSFVLSAPDKGGYVAVGFSQDGAMVGSSAVAGWSSGNGVGGVAKQYKLGGTSSRSCPPDQGSLSLVAKNTLVVAQSSRIYVAFQFTAPQPTPYLIYAVGPSNTNPSGNGDYLAQHQVYTSAAVNYAAGTTSSAGGGAADTKKWHGAMAGLGWGVLMPVGIALARYFKKHDPFWFYAHISVQGVGFVLGVAGVVAGFKLNDDVPGGDTHQAIGITVLVLGCLQVLAFLARPDKSSKVRRYWNWYHHNVGRAAVACAAANIFIGLNIAHEGNAARAGYGIFLVVLALVAVFLEVKLWRSRRSGDTYAARYVGICSLIWFFIQKRNIGYGDVGLSYEAAMEGGQYWRIITSAFSHISVVHLVFNMSALWSLGVVEQLGQIGLGVEYYLHYTLVLVVLSGLLVLGFYHVMIQKFKVEYFRRVTAVGYSCVVFGWMTILATKQPSSKLNIFGVLSLPISFAPFESLIFTSIMVPQASFIGHLSGIIVGYSIAWGLVHGMNNYWAITMFGWIVLVFVLSLKRTGSMDLRFIEIEPVTDPSLPSVGVVASRNGRTLQMDVLPRRGVADIV

SEQ ID NO: 175136 - protein, 103 aa, Oryza sativa
  Clone ID: PAT_MRT4530_73010C.1.pep
MDDGGGGGGGDSSPASYIRLLSQHLIEKCICYNMNKEECMETLEKHANIKPVITSTVWKELEKENSEFFATYKKGQGEEPAESKSSSSSQEAAGSKRSGGDDD

SEQ ID NO: 175137 - protein, 103 aa, Oryza sativa
  unsure (1)..(103): unsure at all Xaa locations
  Clone ID: PAT_MRT4530_73011C.1.pep
ARVSKKNALIISHHVSCSGAKLRIGSSCQCGNGCAGXAKYSEVEPTTTTTXFLADANQQGVWCCFRRIRDGAGEQAAAGLQHTASAGTSCRLLTAATGKLEET

SEQ ID NO: 175138 - protein, 91 aa, Oryza sativa
  Clone ID: PAT_MRT4530_73012C.1.pep
KDILLTVVIILNNIYLPLLIVSFPSSFSQRSHIPNISEFHGLLVSSPLPVHHNDSDSTCLHPQTNGSPHVVTKEAMSPPTRPGRVGRPGNS

SEQ ID NO: 175139 - protein, 109 aa, Oryza sativa
  unsure (1)..(109): unsure at all Xaa locations
  Clone ID: PAT_MRT4530_73013C.1.pep
QLGQEGQALLXFDEHKIXLNHLENQVLEXQRANNLLQDAFSQIEQIQMDHVNCKNITPVLXISNTEDHSKVVLKDTLTTETEASCLRCQVEEVNVYFFRNDVQKLIFWT

SEQ ID NO: 175140 - protein, 29 aa, Oryza sativa
  Clone ID: PAT_MRT4530_73014C.1.pep
CWNHCVDWSVGVLYFMHSSRKACRLISQT

SEQ ID NO: 175141 - protein, 152 aa, Oryza sativa
  unsure (1)..(152): unsure at all Xaa locations
  Clone ID: PAT_MRT4530_73015C.1.pep
RAQRRSDDAVCHDWRCLATSLDFLLAHHRHQLPPPRLWLRERKGKRWDLDGEGVHVSAERDNRGKARADVGDDADXRRLRGGEAELLQLMAGEGTVAVLSERELRMGVDVAPEVERLSLXPPADARCRSSPVDRPDELASVALSRRPLDAMW

SEQ ID NO: 175142 - protein, 119 aa, Oryza sativa
  Clone ID: PAT_MRT4530_73016C.1.pep
PSLQYEHTHPRGPHEYVHLYGTRTYIYCTGYTQAHSSGETRIDGKGASLATGNAEDMTASHQKEKPAGDEVGGVNPGHGGDGVGEKAHEEIEGALEGRGAGEEQPLLVNDSRVTSLPRK

SEQ ID NO: 175143 - protein, 103 aa, Oryza sativa
  unsure (1)..(103): unsure at all Xaa locations
  Clone ID: PAT_MRT4530_73017C.1.pep
MGVVTANDAAAAAPGRVRRPSRAAAAALCPCKGRGAPKPPPVAVIAHECPSAMRALVVEVPXGRDVGSCVAAVARRARRGALVLGAFGRVADVVLREPAAVVL

SEQ ID NO: 175144 - protein, 654 aa, Oryza sativa
  Clone ID: PAT_MRT4530_73018C.1.pep
MDGRRRRSGRPDVSYGNSDGIAHNRSVILGTIHGYYKEALAVLPLDDLPELAPRLVGAGVCFGFGDPTTNIIANTLSSFLPDKPDPDHRAKKHKRKASIKTPSAAARSDAAGDAPSPPPETRTIAERSLEGLITFLTSYFRYLPTWDALRYLCLANADLLVAVRLIELDRCYNTKDERFHISSYAARAALTCAASSARQPDVDGFIAGSFSLASHLEFVTQTVLADRSYVLSVEKILLLSGMLKKKPRMLDKSDNPMIFADERRLRNCHTDANASGDANCEKVPGGLTISLRAVLLDKIHANCVTNIIVNTLWYDSTFPAMEKLEVDMICTSTFVRVESRSLRGLIKLLLTCIPEISEHDAMIYLLKNNLKVRKAIEMAGAEGWKSSWDVSAYKAAADASFHPEPEAYVQFSTQSLPKVQAAVKSLLRASTPLSSNDVLQLATLLPSSNCISAKSLETIVDLSTDALDMFIAFKEKFVTQQGFFHRKIEAALRKRGYLYDLQVICVANERVGSQMNFLDFKCPYSHVNFLARPKVGSGLKLFFAEFSNDDDDVSFCCTVSRKSKHGTRIMHPAHPIENYCGGDMDFIEMAHGTHKLTNARIISCGKCAGNRVGMCGDDYIYFDPTRDAKFAQCMNRTASRANISWSDILKVNTS

SEQ ID NO: 175145 - protein, 134 aa, Oryza sativa
  Clone ID: PAT_MRT4530_73019C.1.pep
MGTVAPTMSTMMLSLLPVLSPVNAVMRYFPNLRVRYRIFRIGKWVEPREMVASEYRAQRNQGGMLRQTYDADKLVRCRVGLDIAGFSLRIGKSYTTAKSTNVGDSSPRSGKSFVPSCLPARVIPSTLASDCEVA

SEQ ID NO: 175146 - protein, 393 aa, Oryza sativa
  Clone ID: PAT_MRT4530_7301C.1.pep
MKRPLRRPFAVLLFVVLCAAASFPSVLRRSVGPAPVLAPLPPLDPARLNATLLRLAAADPSEAPLRRDVDDLLEGRLPASSARARAWRLRGDRLHLHLRHHQFPVYRRGHHPDHDHDPLLHPLPRQELHLDPSLRRALRSWHRLRRHDPGVLRNLPSLLSLPGRIPSCAVVGNSGILLGASHGALIDSHAAVFRLNNARISGFAANVGAKTNLSFINSNVLHLCARRPNCFCHPYGDGVPILLYICQAAHFLDVASCNASSRSLHAASISVTDPRLDVLCARIVKYYSLRRFVAETGRAAEEWSSTRDAAMFHYSSGMQAIMVAVGVCDRVSVFGFGKAADAKHHYHSNQKAELDLHDYKAEYAFYRDLADRPEVVPFLNDAGIAVPPVVFYH

SEQ ID NO: 175147 - protein, 103 aa, Oryza sativa
  unsure (1)..(103): unsure at all Xaa locations
  Clone ID: PAT_MRT4530_73020C.1.pep
LGTPPPTLXPPLXNPLGERSSPPAPSRXPPPPDSSSVNDXXNGGGXNVNPWSNXPXEDAXASVPQLSQQASELAKRGDRXEXEEESDXXRERYXEXPRXLTRP

SEQ ID NO: 175148 - protein, 214 aa, Oryza sativa
  unsure (1)..(214): unsure at all Xaa locations
  Clone ID: PAT_MRT4530_73021C.1.pep
LRHLERLRRRDREDGGDGRGADREGMHEEPRIGRRGAGLEDNTXRRKGPRPRAAEKRHGDRRRAPSCRGSRPRRHGRRGWWRRQPRPXTPRSGGGRVKRSTGVAGKXGAGESGASQRGGDGRSRPAKLAPRRFAPPPALPLARRGNRCGERRRRRRRTQTGARLPPASLAFSPVPARSRGCATPRSSPARSDPLPWRWPCSCPRRRPRTCSRHP

SEQ ID NO: 175149 - protein, 315 aa, Oryza sativa
  unsure (1)..(315): unsure at all Xaa locations
  Clone ID: PAT_MRT4530_73022C.1.pep
EEMIVNHPVTIDSFGCYDTSWVRSVEKLGMFLHIMAENHQNRDTNNQCVQSNSTMSIHINQLLITMNVLTVNILKLVGPNFTNPNPQLMNEDWFKPFYQXVDAVDGTHVYISHLHACLLNTGTXHITTKNVLLICHHYGRTMLCDAGWPGSVHDRRILNEAVRYYPENFPRVPLGMYLLVHSRFPSRMRSLASYPHVRYHMDQLGVXGIPPPVGREETSNHQHSXIVKKQWKILKEISYNQDYNVPTHKIHATFALHNFRMDNDDVYYRQNNLMYNGYPAVPQQTSFNHMYYATSSEQAISTYCNCITNAVFNQY

SEQ ID NO: 175150 - protein, 975 aa, Oryza sativa
  Clone ID: PAT_MRT4530_73023C.1.pep
MTYRLTNYVLYEQMADRDEEQILYDTIAEGSSQYWNEEEGNEDPNQYLNEEGNVERDAEGNQEGNVERDVEGNQEEEASGSQPFAGQKRARGQRGAAKKLEGQHIITEVDEDGRPSAPAEAAKNYRRTRARRDHESFVLDSEKEMLWTTMLETFTLPAGIEDTVKRWTLKKMVEQFQSFKGDLYQKYILKGQTPNFDTFPKLRDHWDEFVAYKTGQQGQAMMERNKKNATKKKYHHHLGSGGYSVAMPKWEEMETSLLERGIEPATAKWPDRSKFWYYAHGGTLNPVDGSLVFSDQIREAARRLMDTVEASSQGTFRPDREKDELSLALQTLEHPGRTRGKGVIPWKIGFKEDIHTYRSRMRSKRDTEAKIADLEYRVSSYELSMQEEVARKVDERMAAHRSHDPQPTIPPAMVSPSGNRSSCASTGQVGSQSMDAMQTQDETTCPVDDITQRTPCELHIPFKNLSIKVASGMAIPTDPSGTYHCRPILAGYSKVEIELVEGTYEDLELDYLGGDGETHLRDTSHAIILWRKRYIILPGRQAASHAPSPPAPPSPPQAPAPSPPHAPAPSPPQAPSPTPPQAPSPTPPQAPTQTPPQAPRPAPSKSRAPQAPPPAPTRATKKAKVDAAKNKDLGYDCTQEELDAYVASEVRRQLKPRSPEKKIPIDPSARKFFRGMSAPAKEAIKLSDYERTLKKASSGKSKPVPQLGEQPNQEIEPLVTGEDFGIQEFINDTGLTTGQLLRGAPIEKAEVKYIMEIQRARRRGVFDTGFIDPRKVNVAMLDQYPQATEDNLVHLLKAQHYKTFILLPYNTEFLVSSYNKFHSRTNMLSVSYACTVNVYDSMDKKESTFDKVFELIDRAWYRFRHLVRDKWRERLRQKFNFPCTKQKQGTNLCGYYVCEYCHCLADQIITTRELDFIRMRDNLITHKEFIVAVQEQLMGFINEQILDPKGEFYYDGNTIHRSLASEITTTTTSKS

SEQ ID NO: 175151 - protein, 310 aa, Oryza sativa
  Clone ID: PAT_MRT4530_73024C.1.pep
MSHLKQIYESLQGILQNGLQIAAKRLDQTTWQGLEEFLNEIRIIIRLQHANLVRLLGCCVNRKEQILVYEYMPNRSLDYVLSDRERGASLSWFMRRHIINGIAQGLDYLHNHAPEGLIIIHRDMKLSNILLDSENNPKISDFGIARKFCLNGTEPYVTHPVGTPGYMAPEYIHGDLTPKYDVFSFGVLVLEIISGRRVRSPIFNQHGRSIHLLTYAWNIWSNRRYNELLDPYLRVEFQEELTRQIQIALLCVQKNPGDRPDMHEVTMWLSNNGLGLSEPQEPAYLNVPLGYNDDFVTARPDLEAGIIELQ

SEQ ID NO: 175152 - protein, 924 aa, Oryza sativa
  Clone ID: PAT_MRT4530_73025C.1.pep
NQYLNEEGNVERDAEGNQQGHVERDVEGNQEEEASGSQPSVGQKRARGQRGAAKKLEGRHIITEVEEDGRPSALAEAAKNYVRHSGWVVRDNVPISMVYWRRTRARGDHESFVPDSEKEILWTTMLETFTLPAGTEDKVKRWTLKKMAEQFQSFKGELYKKYILKGQTPNFDTFPKLRDHWDEFVAYKTGEQGQAMMERNKENAAKKKYHHHLGSGGYSVTMPKWEEMEASLIERGIEPATANWLERSKFWYYAHGGTLNPADGSLVFGDQIREAARRLTDAVQASSQGTFRPDRDRDELTLALQTTEHPGRTRGKGESERSKRDTEAKIADLEFRVSSYELSMQEEVARKVDERMATHRSHDPQPTIPPAMVSPSGNRSSCASTGQVGSQSMDAMQTQDESTCPVDDITQRTPCELHIPYKNLSIKVASGMAIPTDPSGTYHCRPIPAGYSKVEVELVEGAYEDLELDYPGGDGSSTDSSSGSCTDSSSGSYTYSSASSSSGTFKVKSPPAPPPAHIRAMKKAKVDAAKNKDPGYDCTQEELDAYVASEVKRQFKPRSPEKKIPIDPSVRNFFRGMSASVKEAIKLSDYEQTLKKASSGKSKPVPQLGEQPNQEIEPLVIGKEMTIEQFITDTGLTTDQLLGVAPIEKAEVKYMYELGKPLVKPELLQSLPTQMYKFHQLYMEMSATGREMIGARIRDTDFLQGDDILWINFRGIYELYQLDALDVSIMSCWILMEIQRARRRRVFDTGFIDPRRVNVAMLDQYPQETEDNLVHLLKAQHYKTFILLPYNTEFHWVLLLFDLSACTVNVYDSMDKKESTFDKVFELIECAKQKQGTNLCGYYVCEYCHCLADQIITTRELDFIRMRDNLTTHKEFIAAVQEQLMGFINEEILDPKGKFYYDGNTIHRSLASELAASTTTTSKS

SEQ ID NO: 175153 - protein, 557 aa, Oryza sativa
  unsure (1)..(557): unsure at all Xaa locations
  Clone ID: PAT_MRT4530_73026C.1.pep
MADRDEYQIKYGTIAKGHVERDVEGNQEEEASGSQPSVDQKRARGQRGAAKKLEGRHIITKVEEDGRPSAPAEAAKNYVRHSGWVVRDNVPISTVYWRRTRARGDHESFVLDSEKEMLWTTMLETFTLPAGTEDKVKRWTLKKMAEQFQSFKGDLYQKYILKGQTPNFDTFPKLRDHWDEFVVYKTGEQGQAMMERNKENAAKKKYHHHLGSGGYSVAMPKWEEMEASLIERGIEPATANWPERSKFWYYAHGGTLNPADGSLVFGVQIREAAQRLTDAVEASSQGTFRPDRDRDELTLALQTPEHPGRTRGKGVIPWKIGFKEDIHTYRSRMRSKRDTEAKIADLEFRVSSYELNMQEEVARKVDERMAAHRSHDPQPTIPPAMVSPSGNRSSCASTGQVASGMAIPTDPSGGTSSSLGDKRRLVHHLLRLRHLLLRILHRLLLMLRQHRLHLGSSTDSSSGSCTVSSSCSASTVSTSGSCTDSSSGSCTVSSSCSASTVSTSGSSTDSSSGSCTVSSSCSYTYSPASSSSGTFKXSRAPPAAPPAHTRATKKAKV

SEQ ID NO: 175154 - protein, 1769 aa, Oryza sativa
  unsure (1)..(1769): unsure at all Xaa locations
  Clone ID: PAT_MRT4530_73027C.1.pep
MAERAVAHNLSLSASGDDREQNPRRRARTPSSPSRRSLGREEALEGVERSAISPPTGNGKGRRDGECRLLVYGDGSTPQGALQAAGALLRHPPVVPDPETPARRWLDDVADLVMTAQQRLGAGGRSFAPKASGAATTGSVSSRRRVRRAAAVTRRSSAIPSSTPPTQEDIYTTGIEAAEGDDRVMANFFPMALKGQARGWLMNLPPASVHSWEDLCQQFTMNFQGTYPRPGEEADLHAVQRGDDESLHSYIQRFCQVRNTIPCIPAHAVIYAFRGGVRHNRMLEKIASKEPQTTAELFQLADRVARKEEAWTWNSSGSGVAAPAAPGSAARSGRRDRRRKKRSAYFDDEGHVLAVEGASRATRKGRPASDRKKEAGAPSRERPTGKWCSVHNTSLHDLADCRAVKSLAERTRKWEEERRQERREGKAPAAPAGNRRGEAKQKAPAEDVDDGDDNLGFQEPQATVATVNGGACAHASRRSLKAMKRELLAAAPTHEATRRARWSEVALTFDQTDHPPCVARGGQIAMVVSPTICNVKLRRVLIDGGAALNILSPAAFDAIKAPGMVLRPSQPIIGVTPGHTWPLGHIDLPVTFGGSANFRTERVNFDVADLSLPYNAVLGRPALVKFMAAVHYAYLQMKMPGTGGPITVHGDLQVALACMEQRADQLAAASKPEGGDERLSASVPAAPRQRMITCDEVPEDALVSFLRANADVFAWRPADMPGVPREVIEHRLAVRPGARPIRQKVRRQAPERQAFIREEVARLLEAGFIREVIHPEWLVNPVVVPKANGKLRMCIDYTDLNKACPKDPYPLPRIDQIVDSTAGCDLLCFLDAYSGYHQIRMAREDEEKTTFITPIGTYCYTTMPFGLKNAGPTFQRTTRISLGSQLGRNVEAYVDDLVVKTRNQETLLSDLAETFESLRSARIKLNPDNKLRDVQCVTGCMAALSRFISRLGEKALPLFKLLKRSGPFTWTEEAERALTQLKAYLSSPPVLVAPKPDEPLLLYLAATPQVVSAALVVERDEDNPRSAHPHPVSTRPGREQGGEAPEPNGGPRPPTAGAGPLPACPTVPGAPDPQDGPGATAGRPRLSPSDPEVVGTEAECAPRGLSDEEHPVSTRPGREQGGEAPEPNGGPRPPTTGAGPLPACPTVPGAPDPQDGPGATAGRPRLSPSDPEVVDTEAECAPRGLSDEKRPGDAAGEGDRPRRKVQRPVYFVSEALRDAKTRYPQAQKMLYAILMASRKLRHYFQAHRVTVFTSYPLGQILHNREGTGRVVKWANRTLHFEPRHAIKSQALADFVAEWTPAPEPVSIPEASSGPSQLPHTAYWVMQFDGSLSLQGAGAGVTLTSPSGDVLRYLVRLDFRATNNMAEYEGLLAGLRVATGLGIRRLLVLGDSQLVVNQVYLIDKTLPEDREGSERVQRISKRYVRVEGTLYRRAANGVLLKCIPREQGVELLADIHEGECGAHSASRTLVGKAFRQGFYWPTALNDAVDLVRRCRACQFHARQPHQPAQALQTIPLSWPFAVWGLDILGPFRRAPGGFEYLYVAIDKFTKWPEAYPVIKIDKHSALKFIRGITARFGVPNRIITDNGTQFTSELFGDYCEDMGIKLCFASPAHPRSNGQVERANAEILKGLKTKTFNILKKHGDSWIEELPAVLWANRTTPSRATGETPFFLVYGAEAVLPSKLTLRSPRATMYCEADQDQLRRDDLDYLEERRRRAALRAARYQQSLRRYHQRHVRARSLYVDDLVLRRVQTRAGLSKLSPMWXGPYRV

SEQ ID NO: 175155 - protein, 935 aa, Oryza sativa
  Clone ID: PAT_MRT4530_73028C.1.pep
MADRDEEQILYDTIAEGSSQYWNEKDGKEDPNQYLNKEGNITRARGDHESFVPDSEKEMLWTTMLETFTLPAGTEDKVKRWTLKKMAEQFQSFKGELYKKYILKGQTPNFDTFPKLRDHWDEFIAYKTSEQGQAMMERNKENAAKKKYHRHLGPGGYSVAMPKWEEMEARLLERGIEPATANWPERSKFWYYAHGGTLNPADGSLTPEHPGRTQGKGVIPWKIGFKEDIHTYRSRMRSKRDTEAKIVDLEFRVSSYELSMQEEVARKVDERMAAHRSNDPQPTIPPAMVSPSGNRSSCASTGQVGSQSMDAMQTQDESTCPVDDITQRTPCELHIPFKNLSIKVASGMTIPTDPSGTYHCRPIPAGYSKVEVELVEGAYEDLELDYPGGDGETHLRDTSHAIILWRRLYIILPGRQAASRAPSSLAPPSPPAPPSPPQDPAPSPPQDPAPSPPHAPAPSPPQAPAPTPLQAPAPTPPRSPTPTPPQAPLPAPSKSRAPQAPPPAHRRATKKAKIDAAKNKDPGYDCTQEELDAYMASEVKRQFKPQSPEKKIPIDPSVMNFFRGMSAPAKEAIKLSDYERTLKKASSGKSKLVPQLGEQPNQEIEPLVTGKEMTIEEFITDTGLTTDQLLGVTPIEKAEVKYMYELGKPLVKPELLQSLPTQMYKFHPLYMEMSATGREMIGARIRDTDFLQGDDILWINFKGIYELYQLDAFNVSIMSCWILMEIQRARRRGVFDTGFIDPRKVNVAMLDQYPQATEDNLVHLLKAQHYKTFILLPYNIEFHWVLLLFDLSACTVNVYDSMDKKESTFDKVFELIDRAWYRFRHLVRGKWRERLRRKFKFPCAKQKKGTNLCGYYVCEYCHCLADQIITIRKLNFIRMRDNLTTHKEFIAAVQEQLMGFINEQILDPKGEFYYDGNTIHRSLASELATTTTSKS

SEQ ID NO: 175156 - protein, 1558 aa, Oryza sativa
  unsure (1)..(1558): unsure at all Xaa locations
  Clone ID: PAT_MRT4530_73029C.1.pep
MAERAVAHNLSLSASGDDREQNPRRRARTPSSPSRRSLGREEALEGVERSAISPPTGNGKGRRDGECRLLVYGDGSTPQGALQAAGALLRHPPVVPDPETPARRWLDDVADLVMTAQQRLGAGGRSFAPKASGAATTGSVSSRRRVRRAAAVTRRSSAIPSSTPPTQEDIYTTGIEAAEGDDRVMANFFPMALKGQARGWLMNLPPASVHSWEDLCQQFTMNFQGTYPRPGEEADLHAVQRGDDESLHSYIQRFCQVRNTIPCIPAHAVIYAFRGGVRHNRMLEKIASKEPQTTAELFQLADRVARKEEAWTWNSSGSGVAAPAAPGSAARSGRRDRRRKKRSAYFDDEGHVLAVEGASRATRKGRPASDRKKEAGAPSRERPTGKWCSVHNTSLHDLADCRAVKSLAERTRKWEEERRQERREGKAPAAPAGNRRGEAKQKAPAEDVDDGDDNLGFQEPQATVATVNGGACAHASRRSLKAMKRELLAAAPTHEATRRARWSEVALTFDQTDHPPCVARGGQIAMVVSPTICNVKLRRVLIDGGAALNILSPAAFDAIKAPGMVLRPSQPIIGVTPGHTWPLGHIDLPVTFGGSANFRTERVNFDVADLSLPYNAVLGRPALVKFMAAVHYAYLQMKMPGPGGPITVHGDLQVALACMEQRADQLAAASKPEGGDERLSASVPAAPRQRMITCDEVPEDALVSFLRANADVFAWRPADMPGVPREVIEHRLAVRPGARPIRQKVRRQAPERQAFIREEVARLLEAGFIREVIHPEWLVNPVVVPKANGKLRMCIDYTDLNKACPKDPYPLPRIDQIVDSTAGCDLLCFLDAYSGYHQIRMAREDEEKTTFITPIGTYCYTTMPFGLKNAGPTFQRTTRISLGSQLGRNVEAYVDDLVVKTRNQETLLSDLAETFESLRSARIKLNPDKQNPQVVSAALVVERDEDNPRSAHPQPVSTRPGREQGGEAPEPNGGPRPPTAGAGPLPACPTVPGAPDPQDGPGATAGRPRLSPSDPEVVGTEAECAPRGLSDEEHPPPTPRMAPGPLREGRACRPPTPRSSTQKPSAPRAASRTKSALEMRLAKGIGPAERKLRHYFQAHRVTVFTSYPLGQILHNREGTGRVVKWANRTLHFEPRHAIKSQALADFVAEWTPAPEPVSIPEASSGPSQLPHTAYWVMQFDGSLSLQGAGAGVTLTSPSGDVLRYLVRLDFRATNNMAEYEGLLAGLRVATGLGIRRLLVLGDSQLVVNXRACQFHARQTHQXAQALQTIPLSWPFAVWGLDILGPFRRAPGGFEYLYVAIDKFTKWPEAYPVIKIDKHSALKFIRGITARFGVPNRIITDNGTQFTSELFGDYCEDMGIKLCFASPAHPRSNGQVERANAEILKGLKTKTFNILKKHGDSWIEELPAVLWANRTTPSRATGETPFFLVYGAEAVLPSKLTLRSPRATMYCEADQDQLRRDDLDYLEERRRRAALRAARYQQSLRRYHQRHVRARSLYVDDLVLRRVQTRAGLSKLSPMWEGPYRVIGVPRLGSVRLATGDGTELPNPWNIEHLRRFYP

SEQ ID NO: 175157 - protein, 810 aa, Oryza sativa
  Clone ID: PAT_MRT4530_7302C.1.pep
MLEGISGWELRPSFRGPRLPRWMESGVSSFNEFIHELSVDSDGESVTDSIPGDDENEDFICPSSPLSQSSRLSHTSSFSRRDRRLRRPIRYAISWILWPARFLVSLLVILFNAIKFRIMQTSNKPPESPHISRNFRSRRGLHIKDQVLQRTTDRRRGVVEDLHLAIEIFIESVFDIVHKGAHYVLSPSEVWKKLFCWIHGSSSPVVDVPTANVGSDNPAPTERKTIYRHPLNTDSRTCEDVITELGYPFEAIKVVTSDGYVLLLERIPREGEAKRGERKRGQLLWQQKREAKGRERREARRGGGGGRRRAMARQGVVGGGGCEIMHAGSGSGIIIKSTTTPAVSPYQVFLTGCDHLHNYLFLTLDAPVGHPSGMPVPDGHGHVHEILPDRLCGLGYRMVLLAHLHLQHMIKMYGVNAKNPLWVNAGYDVFLGNLRGLVSREHVDKNISSYKYWKYSVNEHGTKDMPAIVEEIHKIKTSELGKSRPHISEETEDQNDKIKNLEVQASQDDERDNQPYKLCAVCHSLGGAVMLMYVVTSRIAQKPHRLSRLVLLSPAGFHEDSNVVFSMVEKLILFVGPVLAPFIPGLYIPTRFFRMLLNKLARDFNNYPALGGLVQTLMGYVVGGDSSNWVGVLGLPHYNMDDMPGVSFHVALHLAQIKRAKRFQMYDYGSPVANMEAYGTPEPLDLGAHYGLIDIPVDLVAGQRDRVISPSMVKKHYKLMRKAGVEVSYNEFEYAHLDFTFSHREELLSYVMSRLLLVSDPGKGRIKQTSVRLRKLKKAQSEIENDSDSKEHNGIDNVVTDEQNGHVHAA

SEQ ID NO: 175158 - protein, 1012 aa, Oryza sativa
  Clone ID: PAT_MRT4530_73030C.1.pep
MADHNEEQILYDTIAEGSSQYWNEEEGNEDPNQYLNEEGNVERDAEGNQQGHVERDVEGNQEEEASGSQPSVRQKRARGQRGAAKKLEGRHIITEVEEDGRPSAPAEAAKNYVRHSGWVVRDNVPVSTVYWRRTRARGDHESFVPDSEKEMLWTTMLETFTLPAGTEDKVKRWTLKKMAEQFQSFKGDLYQKYILKGQTPNFDTFPKLRDHWDEFVAYKTGEQGQAMMERNKENAAKKKYHHHLGSGGYSVAMPKWEEMEASLIERGIEPATVNWPERSKFWYYAHGGTLNPADGSLVFGYQIQEAARRLTDAVEASSQGTFRPDRDRDELTLALQTPEHPGRTRGKGVIPWKIGFKEDIHTYRSRMRSKRDTEAKIADLEFRVSSYELNMQEEVARKVDERMAAHRSHDPQPTIPPAMMSPSGNRSSCASTGQVGSQSMNAMQTQDESTCPVDDITQRTPCELHIPFKNLSIKVASGMAIPTDPSGTYHCRPIPAGYSKVEVELVEGAYEDLELDYPGGDGSYTVSSSCSASTVSTSGSSIDSSSGSCTDSSSCSYTYSSASSSSGTFKVKGPPAPPPAHTRATKKAKVDTAKNKDPGYDCTQEELDAYVASEVKRQFKPRRPEKKIPIDPSVRNFFRGMSAPVKEAIKLSDYERTLKKASFGKSKPVPQLGEQPNQEIEPLVTGEDMTIEEFIIDTGLTTDQLLGVEPIEKAELKYMYELGKPLVKPELVQSLPTQMYKFHQLYVEMSATGREMIGARIRDPDFLQGDDILWINFKGIYEVYQLDALDVSIMSCWTLMEIQRARWRRVFDTGFIDPRRVNVAMLDQYPQETEDNLVHLLKAQHYKTFILLPYNTEFHWVLLLFDLSACTVNVYDSMDKKESTFDKVFELIDRAWFRFRHLVRGNWRERLRRRFKFPCAKQKQGTNLCGYYVCEYCHCLADQIITTRELDFIRMRDNLTTHKEFIAAVQEQLMGFINEEILDPKGEFYYDGNTIHRSLASELAATTTTSKS

SEQ ID NO: 175159 - protein, 1894 aa, Oryza sativa
  unsure (1)..(1894): unsure at all Xaa locations
  Clone ID: PAT_MRT4530_73031C.1.pep
MAERAVAHNLSPSASGDDREQNPRRRARTPSSPFRRSLGREEALEGVERSATSPPTGNEEGRRDGECRLLVYGDGSTPQGALQAAGVLLRHPPVVPDPETPARRWLDDVADLVMTAQQRLGAGGRSFAPKASGAATTGSVSSRRRARRAAAVTRRSSAIPSSMPPTQEDVRGGPDARLNIERRRNGRRAAHATKGASSSGAPPRSGHGGQPPMSPVGGAGCRAFVASLWNVRWPPRFRPTITEKYDGSVNPAEFLQIYTTGIEAAGGDDRVMANFFPMALKGKARGWLMNLPPVHSWEDLCQQFTMNFQGTYPRPGEEADLHAVQREDDKSLRSYIQRFCQVRNTIPCIPAHAVIYAFRGGVRHNRMLEKIASKEPQTTAELFQLADRVARKEEAWTWNSSGSGVAAPAAPGSAARSGRRDRRRKKRSAYFDDEGHVLAVEGASRATRKGRPASDRKKEAGAPSRERPTGKWCSVHNTSLHDLADCRAVKSLAERTRKWEEERRQERREGKAPAAPAGNRRGEAKQKAPAEDVDDGDDNLGFQEPQATVATVDGGACAHASRRSLKAMKRELLAAAPTHEATRRARWSEVALTFDQTDHPPCVARGGQIAMVVSPTICNVKLRRVLIDGGAALNIHSPAAFDAIKAPGMVLRPSQPIIGVTPGHTWPLGHIDLPVTFGGSANFRTERVNFDVADLSLPYNAVLGRPALVKFMAAVHYAYLQMKMPGPGGPITVHGDLQVALACMXQRADQLDAASKPEGXALVSFLRANADVFAWRPADMPGVPREVIEHRLAVRPGARPIRQKVRRQAPERQAFIREEVARLLEAGFIREVIHPEWLANPVVVPKANGKLRMCIDYTDLNKACPKDPYPLPRIDQIVDSTAGCDLLCFLDAYSSYHQIRMAREDEEKTAFITPIGTYCYTTMPFELKNAGPTFQRTTRISLGSQLGRNVEAYVDDLVVKTRNQETLLSDLAETFESLRSARIKLNPDKCVFGVPAGKLLGFLVTARGIEANPEKIRAIERMRPPSKLRDVQCVIGCMAALSRFISRLGEKALPLFKLLKRSGPFTWTEEAEQALTQLKAYLSSPPVLVAPKPDEPLLLYLAATPQVVSAALVVERDEDNPRSAHPHPVSTRPGREQGGEAPEPNGGPRPPTAGAGPLPACPTVPGAPDPQDGPGATAGRPRLSPSDPEVVGTEAECAPRGLSDEEHPVSTRPGREQGGEAPEPNGGPRPPTTGAGPLPACLTVPGDPDPQDGPGATAGRPRVSPSDPEVVDTEAECAPRGLSDEKRPGDAAGEGDRPRRKVQRPVYFVSEVLRDAKTRYPQAQKMLYAILMASRKLCHYFQAHRVTVVTSYPLGQILHNREGTGRVVKWAVKLSEFDLHFEPRHAIKSQALADFVAEWTPAPEPVSIPEASSGPSQLPHIAYWVMQFDGSLSLQGAGAGVTLTSPSGDVLRYLVRLDFRATNNMAEYEGLLAGLRVATGLGIRRLLVLGDSQLVVNQVCKEYQCSDPQMDAYVRQVRRMERHFDGIELRHVPRRDNALADELSRLASSRAQTPPGAFEERLAQPSARPDPLGETDAPERPPRPVGVQASGLEGSAPSSLRSIAWITEIQVYLTDKTLPEDREGSERVQRISKRYVLVEGTLYRRAANGVLLKCIPREQGVELLADIHEGECGAHSASRTLVGKAFRQGFYWPTALNDAVDLVRRCRACQFHARQPHQPAQALQTIPLSWPFAVWGLDILGPFRRAPGGFEYLYVAIDKFTKWPEAYPVIKIDKHSALKFIRGITARFGVPNRIITDNGTQFTSELFGDYCEDMGIKLCFASPAHPRSNGQVERANAEILKGLKTKTFKILXKHGDSWIEELPAVLWANRTTPSRATGETPFFLVYGAEAVLPS

SEQ ID NO: 175160 - protein, 778 aa, Oryza sativa
  unsure (1)..(778): unsure at all Xaa locations
  Clone ID: PAT_MRT4530_73032C.1.pep
MADRDEEQILYDTIAEGSSQYWNEEEGNEDPNQYLNEEGNVERDAEGNQEEHVERDVEGNQEEEASGSQPSAGQKRARGQRGAAKKLEGRHIITEVDEDGRPSAPAEAAKNYVRHSGWVVRDNVPVSTVYWRRTRARRDHESFVPDSEKEMMWTTMLETFTLPAGTEDKVKRWTLKKMAEQFQSFKGDLYQKYILKGQTPNFNTFPKLRDHWDEFVAYKTGEKGQAMMERNKENAAKKKYHHHLGSGGYSIVMPKWEEMEASLLERGIEPATANWPERSKFWYYAHGGTLNPADGSLGTFRPDREKDELSLALQTPEHPGRTREKWVIPWKIGFKEDIHTYRSRMRSKRDTEAKIADLEFRVSSYELSMQEEVARKVASGMAIPTDPSGTYHCRPIPAGYSKVKVELVEGAYEDLELDYPGGDXAPAPTPPQAPTPTPPQAPLPAPSKSRXPQAPPPAPTRATKKAKVDTAKNKDPGYDCTQEELDAYVALEVRRQLKPRSPEKKIPIDPSVRNFFRGMYAPAKEAIKLSDYERTLKKASSGKSKPVPQLGEQLNQEIEPLVTGEDFGIQDFINDTGLTTDQLLRDAPIEKAEVKYIMEIQRARRRGVFDTGFIDPRKVNVAMLDQYPQATEDNLVHLLKAQHYKMFILLPYNTEFHWVLLLFDLEACTVNVYDSMDKKESTFDKCAKQKQGINLCGYYMFEYCHCLADQIITTRELDFIRMRDNLITHKEFIAAVQEQLMGFINEQILDPKGEFYYDGNTIHRSLSSEIATTTTSKS

SEQ ID NO: 175161 - protein, 296 aa, Oryza sativa
  unsure (1)..(296): unsure at all Xaa locations
  Clone ID: PAT_MRT4530_73033C.1.pep
MTTSCCSVLLFSRACEHEDDGTTLLMAQACELNDNPVVVPSLVSLVESLMQMSLGAADSRTRRHGASCMIHTDNGHEFKWLEFTACYTDEGIQHHLSTPYVAQQNDVVEQWNQTVVSMACAILEQRGMSIEFWGKAVSTTVFLNHMPTKSLIGNMPCEAKHGKKPTVNFQRTFECLVFVKELNDARKLDERSIPDFFIGYEEGMKAYRVLDPRIRVYVSLXNVIFDESHGWDQTTRSGTSVPPSSDFAIEYHVENTTKHPMPGLGEAQGPHQRPQCNCRRLHLQTMPRWHQVQALP

SEQ ID NO: 175162 - protein, 393 aa, Oryza sativa
  unsure (1)..(393): unsure at all Xaa locations
  Clone ID: PAT_MRT4530_73034C.1.pep
MARAGLTHKQESEEGGQLIGVVRRRGRERHALGDAVGSGSGAEKSWAWGRGGGSRVRRRRQSCTAAAAAFFCCTWCRIATPAVAPPSRQPPLLHECATASRAALRCIAGPPPSFKRQRPEYFDMPSGQGNSLFHEAMSPHYVHRLNNQMSYAAGANQSAIPLGGMATYSAGMDSGNHGATITESRTLYVEGLPSNCTKREACGRXNLLCFVDFASPPEARAALETLQGYKFDEHDHESSNLRIQFSLTPRRRPIGWYGCVDNYWLDGNKVDGAEKLFNHVLCDLNYIYSSVDDCNEYIHGASAHIVCRLISWCKTAPVPFLTKRISMAMLAEKCCVVPGRCYVTESPATTTGHTYRLVALLETTICMCFLEMDKLLHRLRCIFVASAGHVVIE

SEQ ID NO: 175163 - protein, 1031 aa, Oryza sativa
  Clone ID: PAT_MRT4530_73035C.1.pep
MEIPGVTFGVPAGKLLGFLVTARGIEANPEKIRAIERMRPPSKLRDVQCVTGCMAALSRFISRLGEKALPLFKLLKRSGPFTWTEEAERALTQLKAYLSSPPVLVAPKPDEPLLLYLAATPQVVSAALVVERDEDNPRSAHPHSVSTRPGREQGGEAPEPNGGPRPPTAGAGPLPACPTVPGAPDPQDGPGATTGRSRLSPSDPDVVGTEAECAPRGLSDEEHPVSTRPGREQGGEAPEPNGGPRPPTTGAGPLPASPKVPGVPDPQDGPRVTAGRPRLSPSDPEVVDTEAECAPRGLSDEKRPGDAAGEEDRPRRKVQRPVYFVSEALRDAKTRYPQAQKMLYAILMASRKLRHYFQAHRVTVVTSYPLGQILHNREGTGRVVKWAIELSEFDLHFEPRHAIKSQALADFVAEWTPAPEPISVPEASSGPSHLPHTAYWVMQFDGSLSLQGAGAGVTLTSPSGDVLRYLVRLDFRATNNMAEYEGLLAGLRVAAGLGILRLLVLGDSQLVVNQVCKEYRCSDPQMDAYVRQVRRMERHFDGIELRHVPRRDNAVADELSRLASSRAQTPPGAFEERLAQPSARPDPLGETDAPERPPRPVGVQASGPEGSAPSSLRLIAWIAEIQAYLTDKTLPEDREGSERVQRISKRYVLVEGTLYRRAANGVLLKCISWEQGVKLLADIHEGEYGAHSASRTLVGKAFRQGFYWPTALNDAVDLVRRCRACQFHARQTHQLAQALQIIPLSWPFAVWGLDILGPFRRAPGGFEYLYVAIDKFTKWPEAYPVVKIDKYSALKFIRGITARFGVPNRIITDNGTQFTSELFGDYCEDMGIKLCFASPAHPRSNGQVERANAEILKGLKTKTFNILKKHGDSWIEELPAVLWANRTTPSRATGETPFFLVYGAEAVLPSELTLRSPRATMYCEADQNQLRRDDLDYLEERRRRAALRAACYQQSLRRYHQRHVRTRSLCVDDLVLRRVQTRAGLSKLSPMWEGPYRVIGVPRPGSVRLATGDGTELPNPWNIEHLRRFYP
